United States Patent Application Publication US 2008/0050393 A1 - sequence listing, part 21

SEQ ID NO: 69436 - DNA, 450 bp, Homo sapiens
ccccagcttcccgagtagctagaagtacatacatgtgaatccagaaggaaactactagagttaataaattcagcacagcttcaggatacaagaccaacacacaaaaattagttgtttttctgtacatgtacaatgaacaatctaaaaaggaaattaagaaggctattccatttaaatagcgctaaacaaataaaatgcttaggaataaatttaaccaaggaagtgaaagacctgcatgctgaatactaccaaacattggtaaaagaaacttaaaaagacctaggtaaatggaaagatccttagttcctgggtcggcagactcaatattgctaaaatgccagtcctattcaaaacaatctacagattcaacacaatccccatcaaaattctgacaaccatttttccccccagaaatagaggaattccaccacatggactagtgtcatcgat

SEQ ID NO: 69437 - DNA, 655 bp, Homo sapiens; identical to SEQ ID NO: 68695

SEQ ID NO: 69438 - DNA, 1202 bp, Homo sapiens; identical to SEQ ID NO: 68696

SEQ ID NO: 69439 - DNA, 664 bp, Homo sapiens; identical to SEQ ID NO: 68697

SEQ ID NO: 69440 - DNA, 1495 bp, Homo sapiens; identical to SEQ ID NO: 68698

SEQ ID NO: 69441 - DNA, 855 bp, Homo sapiens; identical to SEQ ID NO: 68699

SEQ ID NO: 69442 - DNA, 2198 bp, Homo sapiens
accgggtcgacgatttcgtgggagcgtgagcgagccaagcgggacgagaaggaccggcagcaccgtgaccgcgaccgggagaaggagcgggagaaggagaaggggaagcccaagccccgctccccgcagccgccaagccgccaagctgagccaccaaagaaggaggctgccaccacggggccgcaggtgaagagagcagatgagtggaaggacccttggcgccgatccaagtctcccaagaagaaactcggggtgtcggtctccccgagccgggctcgaaggcgtcggaaaacatcaccctcgtcagcctctgcctctaattcctccaggtcgtcttcgcggtcatcgtcctactctggctccggctcctcccggtcgcgatcccggtcttcatcctacagctcctactccagccgctcttccagacacagctcgttctcaggaagccggtccaggtcccggtccttctcttcgtccccgtccccgtccccaacaccttccccacatagaccttccatcagaaccaagggagagccggccccgccgcccgggaaagcaggagagaagtcagtgaagaagccggccccgcctccagccccaccacaggccaccaaaaccactgctcctgtccccgagcccaccaagccaggagaccctcgggaagccaggaggaaggagcggccagccaggaccccccccaggaggcggacgctaagcggcagcggcagtggcagtggtagcagctatagtggttccagctcccgatccaggtccctgagcgtgagcagcgtctcctcagtgtccagtgctacgtcgagcagcagctctgcacacagcgtggactcggaggacatgtacgcagacctggctagccccgtgtcctcagccagctctcggtccccggccccagcccagaccaggaaggagaaaggaaaatctaagaaagaagacggtgttaaagaggaaaagcggaaaagggattcgtccacacaaccacccaaatctgcaaaacctccagcaggggggaagtcctcccagcagccctcgacaccccagcaggcaccccccgggcagccccagcagggcacatttgtggcccacaaggagatcaagttgacactgttgaataaggcggctgataaaggaagcaggaagcgctatgaaccatcagacaaggacaggcagagccctcctccagccaagcggcccaacacatccccagaccgaggttctcgggaccggaagtcaggtgggagactgggctccccgaagccagagcggcagagaggccagaactccaaagcccctgcagccccggctgacaggaagcgccagctgtcaccccagtccaagagctccagcaaggtcacgagcgtgcccggcaaagcctcggatcccggcgccgccagcaccaaatcagggaaggccagcacgctgtctcggcgggaggagctgctgaaacagctgaaggccgtggaggatgctattgcacgcaagcgggccaagatccccgggaaagcataggccgtgccccgaccggactggacgcatttttatacatagggtaagcgcagccattttggattttgcagttaatgtcttattttggctgtgattctttttaaaaagtaaaaaagaaaaaaaagtttctcagctggaaaagaagccacacaggaaatgacaacgacgctgaatcccagcctccctccccagagcagaagtcccgcaggacagacagacacagacagcgctagtgaccagcacggttctcatgtaaattacaagccccagccgccagccccgccttctcttcctcctcctccgtcttcttccctggccctggtcaggcctgtggagccccagctctgggtccctagcccgggtccaggcagccaggctccctcctgagctgagaaacggaacctcgcgaaccactggtggcacatccttctcctcccccgcccctgatcacccgcccccggatcagaaatatatctatattctcgactaaagtctcatcaggaaatatttcctgtcttttattttaagcatcaaattgttttagttgatttaaaaaggaaaaaatacagaaaagaccaaaaaaaggccaagggtgttgttggggcgtctgtctaatgtggtgggtctttttttgaggggtctcctaaaataaaatattttgataagcaaaaaaaaaa

SEQ ID NO: 69443 - DNA, 510 bp, Homo sapiens; identical to SEQ ID NO: 68701

SEQ ID NO: 69444 - DNA, 883 bp, Homo sapiens
  misc_feature (1)...(883): n = a,t,c or g
agaatgtctgtgggacgccagggcgccacgagggtctgtacagccctgctgtatggccaggtctgccccttccaggacagcactgatggcttacggtagggtggggctgtcctccaaactggcagcaacaggccagggacccagaaccangcaggggtgccctggagggttgtgtgggagaaggccaggcctctgactcagctgtctactccatcaccagcaccatcacctccattttgttcaactggccccccgaaaanacttcagtttactatcagcccccgcaacggtcatctttccggataaagctggccttcaggaacctctcctggcctggactgggcttggaggaccatcaggaaattgtcctaggccagttggtgcttccggagcccaacgaggccaagccagatggtgagggggcttgcagtctgcaagactttccgggggtggtgttttggggctacaattcccttaaattccacccggtcatttctgtgcttggaaaacccagtgaaaaatgactggtgtggtgaccttttctccttttccagatcctgctccacgtcctgggcaacacgcattaacaatgccggccctggagccagcaccaccactgctggcggacctggggcctgctctggagccagagtcacctgcagccctgggtccaccaggatatctacattcagcaccagggccagcaccagcaccaggggaagggccccctccagggacagtgctggagccacagtcagccccagagtcctcctgtccctgtcgtgggtctgtaaagaaccaacccagtgaggagctgcctgacatgacgaccttccctcccaggctgctggcagagcagctgaccctcatggatgcgacgaaa

SEQ ID NO: 69445 - DNA, 1115 bp, Homo sapiens; identical to SEQ ID NO: 68703

SEQ ID NO: 69446 - DNA, 1447 bp, Homo sapiens
gagggtgaggcagcccccaggtctctgggtcaggcggacggtccctgcaatgcagtgcccggcaggactgagcagggttcccggggtcgccggtacccatccctcccaagcttccgggggccccgggacgaagccgctcacagaggcaccattcagacggccagacacacacgaaagctttatgtgcagggcccagcctctgggccgcccttgcccagggtttccactcaagttgctatttaggatgaaaagcctttggcaagaccctccgccgcactaacgcccccttcccccagggccagaaacccgcagggaaagcagccccaggacctgctgcagctggcagggtggctatgagactcaggacaccctgggctcctggccagtgactcacagcggtcctccagcaagggcagtggctgggagacacccgtgccgtggagctaggcccagcctggctgggtctcagggctgcttctcttgggtgaccccagcggcccagggtcgttgtgaagatcaacgtggcttgtgggaggagcccggggcccagaaggaagtggggtcaggggctcaggctggccctcgggctgctctgacattgggtgggcactcgctggatggaatcacagttaacacctcgatcccaacacctggactcagaagtggacaggcgagtgcctgccccgggagaggaaggaggtggcacctgctcccaggggccccactgcagagcacggccactgtgagctgacgacagaatcacagtacagcaataatgtccctatcctcttccagaaccccagtggggccctcaggtcacgcaggacggagccagctgggtgggtcccaccaactcggcatgaatgagacgacggatgaaccgcagccccagcatcaggaggggcgcctgtgtcaacacccacgtgggctgggaccccgtgaatgccagtctggggccgacggacccccagggaaagcctgggtgcaggccaccttgtgcgctgcccaagcctgcaggccccgagaggtcagcctgaggaggcagcctcggctgccggtaatgctgcctgcttcatctgggccacctcccgctccaggtcctcgccggctcgctgcaggagctcacacctctgcctcagcacgttgcccgcctgctgcagccgctggttggcagccacgtaggcccggctttgctggtagagctgctctcccggggcctccgcatcctccatcatcctgaagggaactggggggtcttccggggccaggatggtgaacactggatcctctgccggcgcaccccgcacatcctccaggatctgctccaccgtggggggcgctgggcgggtgggcagcagcacgcgcttctttgccttggagcccatctctctgcctcagtttccccgcggtcaccccagtcgccggcctcttcccacctgggcgcggg

SEQ ID NO: 69447 - DNA, 640 bp, Homo sapiens; identical to SEQ ID NO: 68705

SEQ ID NO: 69448 - DNA, 912 bp, Homo sapiens
aggagctggctagtcaggaacttattcattaaccaccaaacctctacctcttctctccttgactgtcacctgtaggacagtttatcagtcaactacctttcctccagactttacttccaggctctcctcttcagtagctggatgactttagcagaaaggactggtaaatacaagccttgggtttcagaatgaattagaaacaaataactcttactgtcttccctcccagctttgtttattttgtgcttttagacttttcagtgttttctttttccagcccactgtataaacttggattgtccattcctcctgaagaaatcaagttggtatttttgatgtggaaaagggaacaaaagtggaaacatggctacttttggggagtgatattttaaaaaataagttgtctatgggcacaaagttttcttcatttgtgtagcaaacttcttgtgaatgtggattacaaaatggtataattgtgctactctcccctgggtggtttgcagccctaatgaaattatgtctaggatgattcagtctatttcccatttactagcagagtaacttgttaagatcagctggctttcttgttaaagttatttaagttttgaatgctctactacttcaagtctttaaatttcttgagactagaataattttaaataatatgaccctttgtcttctaatgaaataaagattgaagaggttgagtcaggactgagctggtgaagaaatcttgtgggtattctggaaatttgatacggagagaacttggtgagctatgaattactctcagtctcctttttacagggttgttgtgatccctcttttccagaaaattctgtggaatgtttctgtaggactttgttctccacaagcttgaattaaagcaggattcagtttgcaaaaaaaaaa

SEQ ID NO: 69449 - DNA, 1392 bp, Homo sapiens; identical to SEQ ID NO: 68706
  misc_feature (1)...(1392): n = a,t,c or g

SEQ ID NO: 69450 - DNA, 908 bp, Homo sapiens; identical to SEQ ID NO: 68707

SEQ ID NO: 69451 - DNA, 996 bp, Homo sapiens
atctcctgggtttaagcaatccgcccactgcagtctcccaaggttctgggattacagatgtaagctaccaagcctggccttgtgggtggattttaaggattccttaatatcttcataaaaaccaagaaactttttactcaaattagcaaaataaattgaattttatgttggttctcatatagtggatagtggacacaattcaattagttgcctcatatgatttataactaagatacctcttagccataaatggagtatcttattgacaattttgaagcatttccacagatttattcattcatttatatgaaatatttcaaaacaaaaatatttactgagtccttatttgaaactttttattttcttcagagcatttatatctatatagcattttgctcatttacatgtttgtttattactatgaacagatacacaagatcccacctttcgtgaagcttacattctaggaagataacaaacttgtaaataagtgagcaaagtaatttcagatacatattatcagttcaatgaagaaagtaaaacatgataatcatgtaatagaagctgctcagcaacttcagagctatggtcagggagggcctggggatgtgtgtttgacctgggaagacctgggaaaaggcaggcagaggaggcagaggaccatcaagtgcaaagactctaaggtggaaacacatttggcaaattcaaggaatataaaaaccgccaacgtgtaaaagaaaacataggggaaaagcttcatgacactggccttggcaatgatttcctggacatgacaccaaagaccaggcaacaagaccaaaaataaacacatgagactacagcaagcaagcttccccacagcaaaggaaacgattaacagagcaaaaaggcaacctatggaataggagaaagtacttgcaaaccacatacctggtaaggggttaatctccaaaatacataaggaatatctgcaactcaacaacaaaaaaacctgat

SEQ ID NO: 69452 - DNA, 935 bp, Homo sapiens
cggacgcgtgggggaaaattctatagccacaagttcagccttatcaatcattggcgtgttcacactggagaaaggccttatgagtgcagtgaatgtgggaaattttttagccaaagctcaagcctcatgcaacatcgaaaagttcacactggagaaaaaccttttaagtgcaatgaatgtgggagattctttagtgagaattccagccttgttaaacatcagagggttcacactggagcaaagccttatgagtgcagggaatgtgggaagttttttcgccacaactccagtctttttaaacatcgaaggattcacactggagaaatgcagtgattgtgtgaaatcctttagccagcgtttcaacctcattcaacaccagaaagttcacagtggaaaaaatcttgaaggtaacagatggaaatccgttagccacacctccagtctcattcaacactggacagtttacaatgtggacaatgtagtgaatatggaaaaaggtttcagccaaaggcctaaccctattcaacaccagaaagtttagaatggagaaaggccttagggtgacaggttatgtactgtctctgaatcaatatgacctcacttaaaacagaaactctgaggatggcctttatgagggagctggcaattgaacatcattcatctaaatatgcacactggaggcaagatgagaattcctgacagattgtccttcctgagaagacagccctctgccttggagctccagagagagggagccctgtattcttggctgtacccgtcgaatggagttttgatctcgctgagtttggagttgggggaggaaaggagtggtcttggttcaaatgtgactcacttttgctgttcttgtgaatgttagatcttctttaataaatatttatttcccatacacccttatgaccattaaaaaaaaaaaa

SEQ ID NO: 69453 - DNA, 732 bp, Homo sapiens
ggagacgaatccatggccaagaatgcagactgggaaaaccagctaagccaggcgcgcaaggagttggagaccctgcgggtgaggctggggcgggtggtaggccaggcgcccaagaacaggccagctgaggcttctaggcttgacatctccctccaccccgggaagaagatggaggcttggtgccaaggagcctgctggtgggcactgacccctcccgtggggttcgtaggagcgcttcagcgaatcgaccgccatgggcgcctccaggcgtcccccagagcctgagaaagcgcctcccgctgccccgacgcggccctcggccctggagctgaaggtggaggagctggaggagaaggggttaatccgtattctgcgggggccgggggatgctgtctccatcgagatcctccccgtcgctgtggcaactccgagcggcggtgatgctccgactccgggggtgccgaccggctcccccagcccaggtgcgcaggagcttcaggctggcggggatgcggggcagggtctggaggggagcccaggggcatctgtggcgggcagagttgggcgagggaggtttggattgtaggctcggctcaggtaggagcgcatgcgtagagcggagaggcggagaggggcccacccaagtcaaggagctgactcgcgcctcccccacgccgcgccctcgctggctcagatctcgcacctgcagcagagccggctcccggagcagac

SEQ ID NO: 69454 - DNA, 1031 bp, Homo sapiens
tgctacgtggaaagtctcagatgtattacgcctttgctcagcttaccatgaacacttcctaatgtaatatccccagcagcagaagacagaaatgatgattctgtataaagatacttggctttcagcaaaccatcttcggtagatacagtaacagaacttccctgcagtttatctatggtcacagcacttttatctgatgcatgaatatctatatttccataaactgttcccagacagatcacttcgcctccttttgtttgaacatgcaatttttgacccttaacagactgcaagatactagtcccatgctctgtttcaattttgcaattatcaccctcaatactttgaacttttacacagccagaccctgatgacttgatatctaaacctccacggacgcctgggggtggatagtatcagacacaatggccatctcctccagatcctcgtcgtacttcacctgcaggccgtccaggccccgcacgccgccctccacgccgcacaccgcgaccagcacgcggtcgccatccgggtaggtgagggggtccaggggcctcacggccaggtggcacgggagccgcgcccgcagccgaccaaacgggctcacctgcagtgtccactccttcagagttcggcgcgccgggccaggcggagggacctcagtctccgatccgggccagcgctcgctcccacctgagctgtacggcctggcttggcaagcccagcaagcccagcgcccagcgccagcccacagtcggacctgacggagacagagacggaagcagccaagctcccaacctgagcagggggcaagcatggcgcgcctctctcgccagtcctcagaacacttcagccacagggagggtcacttgccacggccaatcgacttggccactgtgccgcctcaagtcaaataggagacgtaagtcagggtttgctgaaacaagagcgagccggttggcttgactaggcgttctaaacatcagccgcgcaatccccaggggcaagttgggatttgaaagctcacgaaa

SEQ ID NO: 69455 - DNA, 567 bp, Homo sapiens; identical to SEQ ID NO: 68712

SEQ ID NO: 69456 - DNA, 522 bp, Homo sapiens
ttatttagttccttcatcttgatccatctgagtttgcagctttgcaaaccatgagaaaaactgctgtgcggtttcaattctttcttcttccattcctaaggaagtgaagcccttcaagagaatgtcttctgtagattcaggcactactgaagtcagttcaatgggcagtgactgggatgttaaactgcacaagtcttcaattggaagctcagctggcaccggcaagttctctgccgccgccttcagctccaataccgagtccgtctgcctgtcggtcagcggcgccgtcgtgtccggtctccgatcccagagagccagcttttccctagcgtcccgctccgccgccgcctcaggcagcagcaacagcgccgcctccgccatcgccgccgccctcgcggccttcagcagcagcgagatggaggggaccccgacagagagacctgggccacttccgggagaaccggagcttccaacactgcaccggcggcggggcgggacggaatgcccacgaaatcgtcgact

SEQ ID NO: 69457 - DNA, 601 bp, Homo sapiens
ctccaccttcctggcctctctggctagcgcctgcctcagcttagctgcctctatcttgagctcgctcacctctgcccgcctggcctcctcccactccctggcctgggcggaggcggcgtcatagcgctccagctcgaggtcccgctcctccagcacctgaaggttgtagacaaagtcctcctgcagacaccgcagtttcccctgcgcctcctccagctggctccgtgtgtcctgcagagccgcctcctgcagctgggtgcggtgtgcctgcagcgccctccactcctcctccttgcgaagcagcagctcattcagggcgggctctgagcccagtggcagcatggtggccgcctgtggtctgacctctctccaggcaggcggtgttggaactgaaccgaaggacacccgccgagtctgcggcagaactgactgctcatgtgctggtgaaaacctccctctcccaccacatttgatcacagaagtcttcctctgtgctgatgattcttgtggtatcagagtagaggaaaaacagtttcagttttccagaaataccctaacgcccgccagcagcgctggccaggtcccgccgcgttgcacgaaa

SEQ ID NO: 69458 - DNA, 1262 bp, Homo sapiens; identical to SEQ ID NO: 68715

SEQ ID NO: 69459 - DNA, 1055 bp, Homo sapiens; identical to SEQ ID NO: 68716

SEQ ID NO: 69460 - DNA, 388 bp, Homo sapiens; identical to SEQ ID NO: 68717

SEQ ID NO: 69461 - DNA, 888 bp, Homo sapiens; identical to SEQ ID NO: 68718

SEQ ID NO: 69462 - DNA, 414 bp, Homo sapiens; identical to SEQ ID NO: 68719

SEQ ID NO: 69463 - DNA, 929 bp, Homo sapiens; identical to SEQ ID NO: 68720

SEQ ID NO: 69464 - DNA, 387 bp, Homo sapiens; identical to SEQ ID NO: 68721

SEQ ID NO: 69465 - DNA, 438 bp, Homo sapiens; identical to SEQ ID NO: 68722

SEQ ID NO: 69466 - DNA, 511 bp, Homo sapiens; identical to SEQ ID NO: 68723

SEQ ID NO: 69467 - DNA, 668 bp, Homo sapiens
ggcccacagatgaccccctacctctgacatttgataaagctgggggtgacctagggcgaggggcagcagtggcagtccacgcccctctctccactgcagcccaccgttgcagatttccttaacctggcctggtggacctctgctgccgcctggtgagtcctgagcgggaggtgggtagagaaggtgctccctggccgggagggctcagaagagaagtagggcatggcatcgtcctctgctgaccacctgcactcggctccccgtgcgctgcaggtccctgttccagcagcttctctacggcctcatctaccacagctggttccaagcaggtaggtagggctttggaggcgcctcctcaagtccgggtccccaatctgagctaagacgactccatggggagggtggggtctacgactgagggaggccggagaccttgccagggtctgtgggcggagctgaggcgctctgggccctcgcagaccccgcggaggccgaggggagccccgagacgcgcgagagcagctgcgtcatgaaacagacccagtactacttcggctcggtaaacgcctcctacaacgccatcatcgactgcggaaactgctccaggtgctggcagtggggcgggaccagaggccaagggcggaacctgtgagcggcctcatgccgaa

SEQ ID NO: 69468 - DNA, 1891 bp, Homo sapiens; identical to SEQ ID NO: 68725
  misc_feature (1)...(1891): n = a,t,c or g

SEQ ID NO: 69469 - DNA, 2242 bp, Homo sapiens; identical to SEQ ID NO: 68726

SEQ ID NO: 69470 - DNA, 507 bp, Homo sapiens
tctgaggccccaagggaagaggctgcactccacctctctgccccgttcgttctgtgtatgcccctacaagaatgctcacctcttgccctcaggttgcatttttcaactccgctggagccaatgcccaggaggagcaggcacggttatgagagcaggtgaaagagcagagggtgtgctgccagcgcatggctcacctggtggcctcagcccagcagaagccagaggcagcggtcccagccccagtgactaggggccagtctgtgagtggggagacccaccgggccatgcaggaggtcatggagaagctggaggtgactgagtcctggcatgggccaagaagggcaggggtgggtgttgctgccgagatgtgaccccattattttggctccagagtggccttatggacctcctggaggagaaggtggacctgagggagcgagcggagaaactagaacttcgattcatccagtactggaaagacagaagtcatcagttagtgggaattcc

SEQ ID NO: 69471 - DNA, 481 bp, Homo sapiens; identical to SEQ ID NO: 68728

SEQ ID NO: 69472 - DNA, 1723 bp, Homo sapiens; identical to SEQ ID NO: 68729

SEQ ID NO: 69473 - DNA, 489 bp, Homo sapiens
  misc_feature (1)...(489): n = a,t,c or g
ntgatatgattgtatacctagaaaaccctaaagactcctccaaaaagctcctagaactgatagaagaattcagcaaagtttccacatacaaaatcaatgtacacaattcagtacctcccctatacaccaacaggaaccaagctgagaatcaaatcaagaattcaacccctttctcaataactgaaaaagaaatactcaggaatatacataatcaaggaggtgaaagacctctgcaaggaaaactacaaaacactgctgaaagaaatcatagatgacacaaacaaatagaaacacgttccatgctcatggatgggtagaatcaatattgtgaaaatggccatactgccaaaagcaatctacaaattcagtgtaatccctatcaaaatatcatcatctttcttccgnacgcgtgggtggacccgggacctccatnccnnangcncntgcgnacgtcgtcagtcaccagggnnnncgggcnccgctcctccc

SEQ ID NO: 69474 - DNA, 623 bp, Homo sapiens
aagaaacaccgcatcttgcccatgcgagcctggtcatgccaacctgtgcgtctctgttaatttccgtgttttcacgcccacctgcgtgtctgtgaatttccatgttttcacgcccacctgtgcgtctgtgaatttccgtgttttcacgcccacctgtgcgtctgtgaatttccgtgttttcacgaccacctgtgcgtctgtaaatttccgtgttttcacgcccacctgcgagtgtctgtgaatttccgtgttttcatgcccacctgtgcatctgtgaatttccgtgttttcacgcccacctgcgtctgtgaatttccgtgttttcacgcccacctgcgtgtctgtgaatttccatgttttcacgcccacctgtgcgtctgtgaatttccgtgttttcatgcccacctgcgtctgtgaatttccgttttcacgcccacctgtgcgtctgtgaatttccgtgttttcacgcccacctgcgtgtctgtgaatttccgtgttttcatgcccacctgcgtctgtgaatttccgttttcacgcccacctgtgcgtctgtgaatttccgtgttttcacgcccacctgcgtgtctgtgaattaccgtgttttcatgcccaccacgcgtccg

SEQ ID NO: 69475 - DNA, 523 bp, Homo sapiens; identical to SEQ ID NO: 68732

SEQ ID NO: 69476 - DNA, 871 bp, Homo sapiens; identical to SEQ ID NO: 68733

SEQ ID NO: 69477 - DNA, 2219 bp, Homo sapiens; identical to SEQ ID NO: 68734
  misc_feature (1)...(2219): n = a,t,c or g

SEQ ID NO: 69478 - DNA, 770 bp, Homo sapiens; identical to SEQ ID NO: 68735

SEQ ID NO: 69479 - DNA, 850 bp, Homo sapiens; identical to SEQ ID NO: 68736
  misc_feature (1)...(850): n = a,t,c or g

SEQ ID NO: 69480 - DNA, 949 bp, Homo sapiens; identical to SEQ ID NO: 68737
  misc_feature (1)...(949): n = a,t,c or g

SEQ ID NO: 69481 - DNA, 703 bp, Homo sapiens; identical to SEQ ID NO: 68738

SEQ ID NO: 69482 - DNA, 439 bp, Homo sapiens; identical to SEQ ID NO: 68739

SEQ ID NO: 69483 - DNA, 458 bp, Homo sapiens
aatcaatctgaactgaatcaggctggccgtcagggcctccaaagtactgcttctgtctggtcagcctgctgctacagccttggccagctaggccctgctgctcatggtgccagcccagagaggagccagccaggagatggtgagtgctgtgggggtggggagccccaaggagaaggcactgaggaggaaaaacaggattagcagctcaaactgccagagacagaaagcaagctcaaatgagtgacctgaaacagcaagtggtagatttagaacagaaccaaaaacttttgctagaaaatcagtttttacaagagaaaatgcatggactcgtagttgagaaccatgagtgaagacagcacttggggatggatgctctggttactgaagaggaggcgaaagccaagataattccatctatttgatgcttgacatccctaacggacgcgtgggtcgaccgg

SEQ ID NO: 69484 - DNA, 761 bp, Homo sapiens
gcctctcctaactttttaaagccgcctctcctaacagttttttttggctgtgtatgaacttataagttgatcatttttgtcagcactttaaagacatcaaagtattttgatatcttcagtattaatatcttttggctttttttgttccttgtgaaagacagctttcagtctgttgttcctttataaataattgattttttcctctatgcttttaatcatttgtcttcagtgttcttaggtttcactgtaaaatgtgtaggtgtagatttgtcactacttatactatttgggattcactgagctccctgaatctgaggattcatgtctttcatcaattctagaaaattctcattcattatgttttctttaaatatttactatactccattttcttttcttctagaattccagttagctatgtatgttgcatctacttagactaacctctatgttttcaaattctctttctcgttttctattctgttgtctttctatactggattctgggtaatttctctagtgctgtcttctggttcattaattccttctttagctgtgtctaatccattgaggtttctagtttcattattattcacactttttcatttctagaagttttatttggttgtttttcatatctaccctcccgttttaatagttttttgttcttttatcctttttaagtctttaaaaaccttttttttgacatattaaacaaactccttttattttttataactgaaccccttttttctttttcc

SEQ ID NO: 69485 - DNA, 630 bp, Homo sapiens; identical to SEQ ID NO: 68742

SEQ ID NO: 69486 - DNA, 716 bp, Homo sapiens
  misc_feature (1)...(716): n = a,t,c or g
aggcgaaagggggcaaaggaggaggagctacagcaagaagaggaggaggacagcacatagaagagatggagcaggaggaagagataaggaggaggaggaagagatggagaaggaggaagagatgcaggaggaggaagagatggaagaggaagagatgaagaggaggaggaggaagagatagaggagaaggagtaggaagagatgtaagaggaggaggaaaagatgcaggaggaagaggaagagataaagaggaggaggaagagatgcagtaggagaagcaagagatgaggaggaggagaaggaagagatgaaagaggaggaaaagatgggggaggaagaggaagagatgaagaggaagaggaagagatggaggaggaggaggaagagatgaagaggaggaggaggaacacctgaagaggaggaggtggaagagaccaagaggacgccgctgcactcctgccccggaggccgtgcctcactctgtctcaacnnnnnnnnnnncannnnnnnnnnnnnnnnnntaagaggtcccgcccccccctcccctgcttcccccccccnnnnnnnnnnnnnggggccccttattttccttnnnnnnnnnnnttttttcccccgccggcccgggaaacccccggccctcccccattttatccccctccgccccctccctttttccccgctgggttttttcctaagcggccccccccaactttatc

SEQ ID NO: 69487 - DNA, 1578 bp, Homo sapiens
tagaaaccttcgtagaccctagtcagtgtggtggaattccttccgacagcccccatccagtcatcaccccgtcacgggcctcagagagcagcgcctcttccgacggcccccatccagtcatcaccccgtcacgggcctcagagagcagcgcctcttccgacggcccccatccagtcatcaccccgtcacgggcctcagagagcagcgcctcttccgacggcctccatccagtcatcaccccgtcacgggcctcagagagcagcgcctcttccgacggcccccatccagtcatcaccccctcatggtccccgggatctgacgtcactctcctcgctgaagccctggtgactgtcacaaacatcgaggttattaattgcagcatcacagaaatagaaacaacgacttccagcatccctggggcctcagacacagatctcatccccacggaaggggtgaaggcctcgtccacctccgatccaccagctctgcctgactccactgaagcaaaaccacacatcactgaggtcacagcctctgccgagaccctgtccacagccggcaccacagagtcagctgcacctcatgccacggttgggaccccactccccactaacagcgccacagaaagagaagtgacagcacccggggccacgaccctcagtggagctctggtcacagttagcaggaatcccctggaagaaacctcagccctctctgttgagacaccaagttacgtcaaagtctcaggagcagctccggtctccatagaggctgggtcagcagtgggcaaaacaacttcctttgctgggagctctgcttcctcctacagcccctcggaagccgccctcaagaacttcaccccttcagagacactgaccatggacatcacaaccaaggggcccttccccaccagcagggaccctcttccttctgtccctccgactacaaccaacagcagccgagggacgaacagcaccttagccaagatcacaacctcagcgaagaccacgatgaagcccccaacagccacgcccacgactgcccggacgaggccgaccacagacgtgagtgcaggtgaaaatggaggtttcctcctcctgcggctgagtgtggcttccccggaagacctcactgaccccagagtggcagaaaggctgatgcagcagctccaccgggaactccacgcccacgcgcctcacttccaggtctccttactgcgtgtcaggagaggctaacggacatcagctgcagccaggcatgtcccgtatgccaaaagagggtgctgcccctagcctgggcccccaccgacagactgcagctgcgttactgtgctgagaggtacccagaaggttcccatgaagggcagcatgtccaagcccctgaccccagatgtggcaacaggaccctcgctcacatccaccggagtgtatgtgtggggaggggcttcacctgttcccagaggtgtccttggactcaccttggcacatgttctgtgtttcagtaaagagaagacctgatcacccatctgtgtgcttccatcctgcattaaaattcactcagtgtggcccagaaaaaaaa

SEQ ID NO: 69488 - DNA, 462 bp, Homo sapiens
  misc_feature (1)...(462): n = a,t,c or g
aaactaaatgagcttagtgagactgcaaaataaagatcaatatatataaagcagatgattttgcatgaactagccatgaacaatctgaaccttaaaaccttaaatgccatttataacnccataaacaatatgaaatacatagtgatgcatctggcaaaagaagtgcaagatgtatagtataaaaattaaaaacacttctgggagaactttaaaaaagacctaaatagagatatactatgttcagagactacaagactcaataccattaatatgtcaattctttccaacctgacctatagattcagtgaaatcccattttgaatattcaggaggctttttgttttgtagaaattgggaactcaattctaaaatacatatggacatgcaaaggacctagattagtgaaaacaacttttaaaaataattctgaaagttggaaaataggctgggcgcgatggctca

SEQ ID NO: 69489 - DNA, 419 bp, Homo sapiens; identical to SEQ ID NO: 68746

SEQ ID NO: 69490 - DNA, 1052 bp, Homo sapiens; identical to SEQ ID NO: 68747
  misc_feature (1)...(1052): n = a,t,c or g

SEQ ID NO: 69491 - DNA, 936 bp, Homo sapiens
aactcccagggctccagggccctcctccggccccaggcctaccccagtcacggacgggtctcgctctgtcactcaggctggagtatagtggcatgatcacggctcactgcagcctcgacctcctgggctcagttgctgttctctgtgtctgtgacttatccccagcacagtgtgacatcaactgctgctgtgatcccgactgcagctccgtggatttcagtgtcttttctgcctgctcagttccagttgtcacgggcgacagccagttttgtagtcaaaaagcagtcatctattcattgaattttacagcaaacccacctcaaagagtatttgaacttgttgaccagattaatccatctattttctgcattcatattacaaactataaacctgcattatcctttattaatccagaagtacctgatgaaaacaattttgatacattgatgaaaacatctgatggttttacattgaatgctgaatcatatgtttccttcacaaccaaactggatattcctactgctgctaaatatgagtatggggttcctctgcagacttcagattcgtttctgagatttccttcgtccctgacatcatctctgtgcactgataataaccctgcagcgtttctggtgaaccaggctgttaagtgcaccagaaaaataaatttagaacagtgtgaagaaattgaagccctcagcatggctttttacagcagcccggaaattctgaggtgggcccttcagaaagaaagctgcagctctactggggaggcaagagcttgtcattgaggaggcttgggccagaggcaggaagaccagttaggagtctgtggaaatcgcctgggcaagcaatggtggccttccagcaaggacaggtgcagtgagagtgaccaggagtgcaagaactgtgctttccacagtgctattggccgga

SEQ ID NO: 69492 - DNA, 762 bp, Homo sapiens; identical to SEQ ID NO: 68748

SEQ ID NO: 69493 - DNA, 857 bp, Homo sapiens; identical to SEQ ID NO: 68749

SEQ ID NO: 69494 - DNA, 2080 bp, Homo sapiens; identical to SEQ ID NO: 68750

SEQ ID NO: 69495 - DNA, 1908 bp, Homo sapiens; identical to SEQ ID NO: 68751

SEQ ID NO: 69496 - DNA, 964 bp, Homo sapiens
  misc_feature (1)...(964): n = a,t,c or g
ctagttctagatcgcgagcgggcgccaaaagaataatgaaggaatacacaaactactctacacgcatagtttttanaacttaggttaaatagaccagttccttaatgagcatgaactgtcacaactcacccaataggaaatagactacttgaataccctgtaactataaggaaattgacctagtaatttataatctcccaaaaaagaaatcttcaggtttcactggataattctaccaaacatgtaaagaagaattaacactgattctacgcaataccttccagaaaacagaagaggggggatcatgtcctaattcattttgtgaagctagtattaccctgataccaaaaccaggcaaaaagaacagaaaaagaaaactacagaccaatatccctcgcagattcagatacaaaactccttaacaaaacataaacaaatagaacacagcaatatataaaaagattgacacactgtagccaaatgggacatattctgagatgcaaggctggtttagtatttgaaaattcattcatgtaatacactatactaacaggctaaagaaaaagctcacgactatatcagtcaatccaaaaaaagaataaaaagagtttggcaaaattcacatcattcatgactcaaaacttccagcaaaatagaagacaggtactccttcaaccttacaaaaagcatctaaaaagccccacagctgacagcactctttttcaacatagttctggaagttctacagagacataatacaagaaaaggaaattaagacaacagatgagaggaaagaaataaaactgtccctttttgctggtgacatgatcatctacgtagaaagccccagggaatcttgagtctgctgctgacatgattgtccaaacagaaaatcccagggaagaggcggagcttgcagtgagctgagattgcaccactgcactccagcctgggcgcacatgtg

SEQ ID NO: 69497 - DNA, 992 bp, Homo sapiens
agacttcatagctgatgaggtggacctgacctcagccctgacccaatggtcactctgaagacgccgctgatctcctcccccatggacactgtgacagaggccgacctggccatcgtgatggctctgatgggaggtactggtttcattcaccacaactgcaccccagagttccaggccagtgaggtgcagaaggtcaagaagtttgaaccgggctttatcacacaccccgtggtgctgagccccttgcacactgtgggtgatgtgttggaggccaagatgcgtcatggcttctctggcatccccatcactgagacgggtaccatgggcagcaagctggtgggcatcgtcacctcccgagacatcgactttcttgctgagaaggaccacaccaccctcctcagtgaggtgatgatgccaaggatcaagctagtggtggctccagcagtgtgaggttgaaagaggcaaatgagatcctgcagcttagtaagaaaggaagctgcctatcgtcaatgatcgcgatgagctggtggccattatcacctgcaccgcgctgaagaaccgagactaccctgtggcctccaaggattcccatgagcagctgctgggcggggcagctgtgggtacccatgaggatgacaaataccacctggacctgctcacccaggtaggcgtcaatgtcataggcttggactcgtcccaagggaactcggtgtatcagatcgccatggtgcattacatcaaacaaaagtaaccccacctccaggtgattggggggaacgtggtgacagcagcccaggccaacaacctgattgacgctggtgtggatgggctgggcaggggcatggactgcgcggctccatctacatcaaccaggaagtgatagcccgcagtcagccccagggcactgccctgtacaaggtggccaagcatacccaaaactaaaatgtgcccgtcatagccgatggtggcatgcagacctgccgcctgggtaa

SEQ ID NO: 69498 - DNA, 1419 bp, Homo sapiens
ttttttttttcttgatgcaaatgtttttatttgccacttaaactacagtttccctgtgctatcctgatggtgtgggggtgtggaacaggctgctggaaccatggtttacagtagtagcaggtagatgattagtagcatgagtggtgaaatgctgcatctaagtgcctgtcactttgctcccaggggaatatcatgcagcccaggaatagtgttagactgggaaggactgtggcaggaacagtcactgtctctcctcattttggtgaggaatgggtcccacataatggagagctcaacagaagcatccagtcttgttctgaatggagcaggtcagtggcagcagcctcttgctttcatttacccctttgggctgcttgcctaaagtctctcttccttcacctccccaggccttttggcaagagggaagacactgccattcctggctctttccctggatcagtgtctgatctggtggaggtagcttgtggggcctgacttcctccagttccggcggatcctggcacttttcttcctagagtgcagatactgctcactggaggctgtctctgtggcactctgtgggttggccagtgcagagtggggctccaggattctgaggcggctgcagtggtgtagcgagtggcccaggggtttctgccttgggggcctcttcctgcgcagcctcttgagggcctcagccacacggtggtcccctgcacattcccagatgatctgtgcccgttcctcggccagctggtccccgctgcgttgaaacagggcttggatctgcagcagctcggcgtcctggaagatgttggccgaggcctgcttgcggccccgggcctcaatcggggcctgccaagggggtggctcactgaccaccgaggctggggtacccattgtggatgctcacactgaagggcagctccgacagacctcaaatggggatggggcaagctaagatgcgcccactccaacctcttccacagccttcagaaagggcaggcgcagctctgggcttcctgctgcgaaggtgcttacaagggccagtcggtgatcacgggcagcacaagagcatggcagagggtatcctggccgaggtcctaaggcgacatctgcagcacgaggaggccccgggactcagacgtggccgcttcgcagaacgacggggtcctaagtggatctggcggtcgcgtcccgctggcaccccggctctgactgtcgccctccggctcccaccgcagcgccgagctgggccgccgacctacgtacctggttgcttgaggcaggccgcacgcagccccaaactggtccgggccacttgggtcacagccgcggttcccgggagaaagcgctccctagccccggaacagccaatcctcggccctagccaggtatgagctcccaggcgagccttcc

SEQ ID NO: 69499 - DNA, 733 bp, Homo sapiens
gtgagtgctgggggtagggccttgagctgcagcccccgagactcccacgtgcctgccagacaccacgccccaccccgcaccggtggtctgctctgccgacccgcagtaaggaggagagggaggactggtgagcctcctgggccaggtggccaggggccggcctgagtaagcagcagggtctgctgccgctgcaggttggctcttgagtccctggaccctcgcacactgcggctgctgacattaggaacccctgcctgagcagggtgggggctgctgaggtcacccctcctccaggagctcccacagtcaggagaaactcctgcagaaccaggtccagaagctgatccaggagttgaaggaacagaaggagcgagcccagtgggtgaggcaggggcacagggagtgggcagggtcctggtgttggggagccaggctggggctggcctgggggccttctgcagaagacacccccccaccaccaaccacaggccctctcggagcaggagaaggagcacctggaggagcggctgctgcagaccacccgcacgctccaagagatggaggccgagctgcagaacttgcagaagtcctgcctcctgcagctggcccgctcctcgtgggtgggccgcatgctacgatcccagactggcagtgtggaggtgagcctgtcccccaagccctcctgccccaggctgccctccccagccctccccatctcgtcggaattccacgt

SEQ ID NO: 69500 - DNA, 759 bp, Homo sapiens
aagcaagatctttttattctctatttctgtagctatatatacacttttgacaatttagtggccatcattgcaagctaactgataatccaatgtctcctttagatacaaatttgaaaaagatggaagtatacacagactcattataaaagattgcaggctggatgatgagtgtgaatatgcttgcggggtagaagacaggaagtctcgtgctagactttttgtggaaggtacatattaagtgaaaaaacaattctaatgttaccaattttttaaaattgttaatcaaaatgtaaacatatttgtatttatttcacattttctttccagaaattcctgttgagatcatcaggcctccacaagatattcttgaagcccctggtgctgatgttgtctttttagcagaactcaataaagataaggtggaagtccaatggctaagaaataacatggttgttgtccagggtgataaacaccagatgatgagtgaaggaaagatacatcgactacagatttgtgatattaagccccgtgaccagggtgaatacagatttattgccaaagacaaagaagccagagctaagcttgaactggcaggtcagtccctttattttaaaatatccttccaatatcacagagtttagatttcagatttcacagttatttaatgaggtaatccttgtgagggtctttcatttctagcaagccctacccacatgttaacaactctaattttgctcactacaaagtaagtggaattcc

SEQ ID NO: 69501 - DNA, 773 bp, Homo sapiens
accgtcgtggaattccggacccacagaacgaccgacggaccgagggttcgagggagggacacggaccaggaacctgagctaggtcaaagacgcccgggccaggtgccccgtcgcaggtgcccctggccggagatgcggtaggaggggcgagcgcgagaagccccttcctcggcgctgccaacccgccacccagcccatggcgaaccccgggctggggctgcttctggcgctgggcctgccgttcctgctggcccgctggggccgagcctgggggcaaatacagaccacttctgcaaatgagaatagcactgttttgccttcatccaccagctccagctccgatggcaacctgcgtccggaagccatcactgctatcatcgtggtcttctccctcttggctgccttgctcctggctgtggggctggcactgttggtgcggaagcttcgggagaagcggcagacggagggcacctaccggcccagtagcgaggagcagttctcccatgcagccgaggcccgggcccctcaggactccaaggagacggtgcagggctgcctgcccatctaggtcccctctcctgcatctgtctcccttcattgctgtgtgaccttggggaaaggcagtgccctctctgggcagtcagatccacccagtgcttaatagcagggaagaaggtacttcaaagactctgcccctgaggtcaagagaggatggggctattcacttttatatatttatataaaattagtagtgagatgtaaaaaaaaaaaaa

SEQ ID NO: 69502 - DNA, 724 bp, Homo sapiens; identical to SEQ ID NO: 68757

SEQ ID NO: 69503 - DNA, 1949 bp, Homo sapiens; identical to SEQ ID NO: 68758
  misc_feature (1)...(1949): n = a,t,c or g

SEQ ID NO: 69504 - DNA, 464 bp, Homo sapiens
acacatcctgggggtccgactccaaggtcagattttgcaaccagagggagccggagtggtcctggccggggaaagtcggccccgccccaggatccgctccccctccctactccgctgattcctggctcccgagtcaccgcggcccgccccgacagcagcgtggctcagggccctccagtgcctccccgaaacccctgcccagggcgaggcgcagtgaaaggacgtttttttaccaatgccggttccccgggtcgcgccgccgccaactcctcaaggagccgaagccaagcccggccgccaccctcctccttctcctcctccccgccgcctgggccgcctagaatcgccgctgccgccttctcctcccccggccgttgtggttgtggttgtccctgccacctccttacagccgagccgccgccacgaaatcgtcgtcccgggaattccggtccggtgcaacggca

SEQ ID NO: 69505 - DNA, 955 bp, Homo sapiens; identical to SEQ ID NO: 68760

SEQ ID NO: 69506 - DNA, 668 bp, Homo sapiens; identical to SEQ ID NO: 68761

SEQ ID NO: 69507 - DNA, 1562 bp, Homo sapiens
actaggggtcggcccacagcttcctcaagccaagctccccaggcccaggtcaggcctcacggtggcctctccaggatgagctcctgccctccgatggcatctccaggccccaaatggtctccggtcggtgggctcctccacgccaaggttgggcctcccggcgaccgccgcaggcccaagttgtcctgaagtcgggctctcccggctgcatctccaggccggactctggcccgactccaggtcccaacaacgtctttggactcagctcctgcccagctcccagcggccctggtaggcccacaacttccctaagccaagctccccaggcccagctcaggcctcgcggtggcctctccaggctcagctcctggccctccgatgacatctgcaggccccaaatggcctccggtcggtgggctcctctaggcccagcttgggcctcccggcggcctccgcaggcccaaatcgtcccgaagtcagtctctccaggcttagctccagcctcccggcggcctctgcaggcccaagtcgtcctcaagtcggcctggaagtgggcctggaagagcagcaagtcggcctccctgggcccagctccgtcctctcgacggcctctccaggtgcaaaacttcctcgagtcagcctctccaggcccagctcctcctgcctcccagtggcctctttcggcccagcccagctcatggctctcggcggccttcccaggccccgcttttgacttttggcagcctcttcaggcgcagaacttgatctccagtcggcctttgcaggcccggcctcctgcctctcgaaggcctgcacgggcccggcctcggcctcggcctcacagcggactctccacgcccagctagctctcgcctcactgcggtctccccagtccaaagctcctgcctttcggccacttcggcaggtccagctcctgcctgccagtggcctctttaggcccagctcattcctcacgtcggccattccaggccccgtttttcccttccggcagcctcttggcctctaatttgtttatcttttgtgtataaatcccaaaatattgaattttggaatatttccaccattatgtaaatattttggtaggtaatttatttggagtgagtttctgcgccaagcccgaattttttattttattttccttattatttggtgttaaacaggtttaactgaccggtcatggcaactttttggcacagtgaaaaatatcgcccatgatcaacgtgttctgttctggggaagggggcaaaggcagggtgaatcactttcttaaaaagtatagctcaagttgggagtgcagagggaatggggagaaaaccctcccgctgcctgtgtcgaagtgtaggagcccccacccccatactcacctgagtccagcccctctggggaaagaaggggtgcatgaactccccctagtccacaggcacctccctgtggcccaaggctctcttcacactccatcttgaagccccagcaggagctattttccaaaaagtgaaaagctctgaaggtcccacaattcatggaagtgacctcacaatgac

SEQ ID NO: 69508 - DNA, 436 bp, Homo sapiens; identical to SEQ ID NO: 68763

SEQ ID NO: 69509 - DNA, 1246 bp, Homo sapiens
ttttttttttcactgagaatgcagctttctttcatttggtcacttcacctcttcatcgaccccagagagggagtggggaccctgcatgctgccccctccccgcccccggggtcttctggcaggactggggaagggagcctctcagggggtggcggtccacgcccagtagcacctgggagctgtgggggccgaggcagtccgaaggtgtggggtagctctgagctcatgtgcaggtccggtaccccgagcgccttgcagcgggagccggggcccatcagtaatagtgcatgcggcccagggtgcccgtggccgtggggctgggccccagcgtgcctgtgcccagcaggtccggctgcccggtgcgccagatctcccgcaggatccgttcgcgctcctccagccgctgcgcccgctccagctcctccgccgacgtgaagacgttgacgttgaggggcccgtccggctctgcggacagctcggggcccggcagcgtgtcgtcggggcccagccgagtcaccgtgtcctcctcgtcctcgtcgtcgtcctcgggctccagggtgctgctgcgggggtcccggcgctgagccgggccccggggccgcgggcggggcgcccacgagatgctgatgacgagcaggcagagggtgagcagcaggccgaagcagacgcccagcacgaagtagaggccgaagctctcggggttggcgcggatgtgcgcgtaggcagccaggctgttgctgagcaactccatgtcccttcgcggggcatccatgctgctctggggggcagcttcccctaccagcctgcgaggtcagcaaagtcagatccttctcccagcctggagcccaccccgaccccttccgcgggcagctcctctcccgggagccgcgggcccaggttccaccctggagagagcgcttccctaacttcgtggcggcccggggccctgtcggggggaacccctctcccgggcgcggacgcccctccagtcctgggagcagcgccggggaccgcgggaggccccaccccctggtgaggtccccagctgaggcccggttccgccgtcccggggcgggatggaggatagggacgctgagcctccacgccccaggcgggctccgggaagggaagctgcctctctcctcgcccggccgccccgcggggacccaccggcccggggccaggcccactcaccgtcagcgccccgcttcccggctgcccggccccagcgcgtcccgcggccgct

SEQ ID NO: 69510 - DNA, 349 bp, Homo sapiens; identical to SEQ ID NO: 68765

SEQ ID NO: 69511 - DNA, 607 bp, Homo sapiens; identical to SEQ ID NO: 68766

SEQ ID NO: 69512 - DNA, 800 bp, Homo sapiens
  misc_feature (1)...(800): n = a,t,c or g
tttttttttaatctgaaaaacagttttgccacaattcttcaaatgtttttattggatttaaaattcatttaaggggtatacagatatacaactagtttgatcagctactaatatattttggtgtccctttatttttgtacccaagagccagttcactttttctccatgttcaatatttagctttggtaaaatgttgccatgttcttcctcatctgttactgaagcgttagtatttccaccctgcttggtgcaagttcctcttttaggtttcttcctgtgggtacgttttgtgggactcttctgttttttctcaacttcactgtttgcatcccacaacgtgatcttcccatcattccctccagtaagcagcaaataggattctgggagaaagcagacctgggatacccctgaagtgtggcccttaaatcccagttcctgttcacacttaactcccatcacccgaaagattcgaaccttaccatcttctgcaccacaactaaaaatattaccacacgaagccacagagatagaatgggctagggcagggtttaagagctgaccaggtgactgtgggccttccatttcttctgtttcatcctcctgtaaatttgtaatccagagtggtcgggctttttgaagactccacagcatcacctgcatatccagtccacatgacaccaggctctgagcctctgaggccgaaaagccactgaggagcagatattggaatgtctcttcaaggatctgataactntcttgttttccaagtctaggattttgattgccccagagtcgtcagc

SEQ ID NO: 69513 - DNA, 930 bp, Homo sapiens; identical to SEQ ID NO: 68767

SEQ ID NO: 69514 - DNA, 599 bp, Homo sapiens; identical to SEQ ID NO: 68768

SEQ ID NO: 69515 - DNA, 504 bp, Homo sapiens
attagaatctgaagatatatttaggagtaattcgaagaatgattacaaaatagtcattcaaaatgactttcctaactcagtccataaggccaggattagccagacacgaaaaccaaacgaacatcttgagaaaacaatggagcaatatcccttatgaatataaatgcaaaactcgagaaaataccggcaagctaaacccaacaacatagaaaaaggattatatcccatgaccaagtgggactcaccctaagaacaccagggtggttcaacatcagtgcaatacaccatattaacagacaaaaaagcagttattttgacagagtagaaaaagcattttgacaaaatacaacactcttgcatgatacaaaattcaataaactaagaataaaagggaccctctttagtctgataaaggacatctagtaaaagctcacagctaacaccatcactctttaacatcacagttaaacagtaaaagacggcctcgtgccaagctggcgttgc

SEQ ID NO: 69516 - DNA, 432 bp, Homo sapiens
agctcactgtcaagcagagttgaatgcgtagttgggtgagaggagtgtagggcagcggcgggcagcaacacaataaaccaactagatctaacacacatccagacattctaccaagaacaatagcagcatatacatccttctcaaataagcatgagtcattttccaggatacaccatctgttaggccacaaattaggtctcaatcaattttaaaatgtaggtatcatacaaactcttctccaaccacaataggataacgttagaaatcaataacagaagtaaaactgaaaaatccacaaatttctggaagttaaacaacacactcttaaacaaccaacagtccagagaagaaatcacaagggaaaaagaaaatacttagaatgaaaacgaaaacgcagcagcccagcacttacaggatgctgcaaaagcagcc

SEQ ID NO: 69517 - DNA, 1393 bp, Homo sapiens
ttttttttttgccttctggatttttttttttttaaagggaggttggttcctgcatttccactctttgaccataggaacgcctggctacaaaaggggctgtaattggctgctgcctataggggccccaggtccttcctccaattgcaaggcagcaactccgaagttctaagtcccatggaaagtggcagtggttgggctggactgtggctggaggatcaccgggcctcggttctcaagcaccatctgtctggctgcagctgggcccttcagctgggggccagtgttgctttccagctgcccccaccgggtcagatcatctctggcaaggaagagctgctggcatctcttactgtccttctcgcaggccttcctccaccttgggtgcctcctgacgcctgccccggaagtcttcatctgaaaaggagagggaagctgcctcatcctctaccctgcagggcctcgctcaggcacggcccctagactgggcaagagagctgacccgactctctctgcccccttcatttgggacccatgcagatccccccaggtagacgatgcatgggtccagggagagaggcagcaggacactcaggtgctggccagggtccaccactgagctctgagaccttggacaagttctcccctcgtctttgggcctcaaatttcctcatctataaaatgggatggaaaagctggactatctagatgacctctgaggcccttccagtccttgtttctggatgcctcctgaccctcgaatgtggcatgaggatcagggttcagctgcgggcccaggagggtctgaggcagagtcttctggcccacgtggcctttggaagggactgggtgaaagttgagaagcctctgggcccacagactgaagctgcccagtgcttggttctcaggccgagggtcccccatgggggcaggcctgtctgccacctcacacccaaaagaatattccccagaaacagtacctggcacttcatgctacaggtacacatctaggtggaagtagggctagggccccttttcaggggttgcagaaagggggaagcaatgtcgaccaagtcagggggatccatatctttgggtcacctgcccaccaaccctcagtgtgttcctccaggggacagggcgggtgctcccatgaaacacccaggaactccgctgggagatccccgatcatagagaagttggagcttcgatctcccctccagcctccccacacgcgtggccctccacatcatccaggaggttggctgttgacgcgacagcccccagcctgccaggccattcaggaaaaccgtcccagggatgaggggacactgccctagtcctcccagtcccactgactctctgccccacccctcaaagctctggaggtacctga

SEQ ID NO: 69518 - DNA, 1312 bp, Homo sapiens
ctggcacctggctctggccgagttttctggccagaggcccccactttcctaactcgagctcccttccgccttcttttccgtactgtgaagaaagaactctccaccccagctcccaccctgccctggcctgggtggaggaactgcgcctccatccccagaagaaacagccccctctgctgctggggtgggactgtctgtgtgccctgtgggggtccgtgtgagcaggcccacctggctccagacccgcccccaacctgagacagaaccaggctgagccaggccctcacccccaacccccgtttgctgggggcttctccagccggcccccatgggaagaggcctggtaccgcctcacccacagaggtctgtgccaggtgcgcttctgcaggtggagccaagctctccctgaggccagaggcggggcctgggccgggagcccaggggaaggccaggctggaccccggctccacacccacatccagcctgcaggcctctctgcagtcctctcaccctccctcagctccccttcctctgcagtcaccctcagctccccttccttgcccgcctctccccccgccgccccaccagttaaacggatgaccaaagacctttcttatgccggaagcaaaaaccaaaactttttgttggctttttcctttgtcgcctccccagcacctgccctcccagtctcccaccccggccccaggctggaagccctccctccacttaagttattgttttaaaccaaagtttacagtgtctgttggtggccaagaccttctctctccacccctcctccatccaccctgaggaccctggggctcagtggaggcagggccctgcccccctcccttccgctcctgcccagcctgggggaaggagaaaggaggggagaaagcgggctctcaccccctcaggagtgggcacgggagcccttctccctgaccctgggctgcttcctgggggctctccagacccctctctaggaccaagtcacccgtcgtgctgggagtgtggattctagcaaaagagctggaaaaaagtcagactctccacagaccccctatgggggacccccaactcaaggccaaggactgggcgtatcggatgctcataacacccctggcctggcccctttactgagaagactccttggatatttcccaagaaccccccacatacacccctcacaagccacccctcctgagaggcagggggccctccgccccctccccatgtattccccacctgtgttccgtttgaccagcacagaaatattaaacgtcctctattcactgggaaaaaaaaaaaa

SEQ ID NO: 69519 - DNA, 595 bp, Homo sapiens; identical to SEQ ID NO: 68773

SEQ ID NO: 69520 - DNA, 1609 bp, Homo sapiens; identical to SEQ ID NO: 68774
  misc_feature (1)...(1609): n = a,t,c or g

SEQ ID NO: 69521 - DNA, 660 bp, Homo sapiens; identical to SEQ ID NO: 68775

SEQ ID NO: 69522 - DNA, 1072 bp, Homo sapiens; identical to SEQ ID NO: 68776

SEQ ID NO: 69523 - DNA, 1330 bp, Homo sapiens
ttttttttttatggggcgggaactttttatttgaagcaagttaatcatagcattgccccccagtaccctggtatcctgctacaaggagcatcacaccatttgggcacatggtgtgccctctccactagcctggcatctcagcagacagcagagggcagcagaagctcagctagtggggcccctcccaccagcccccacccggtccactgaaaggcagtgctcctgggggcctctgtggactggtggggccagggctgcaacacgccctcaggccaagctccactctgggcaccctcgcaggtaactcaggtgcttgcagctcggccagctctctaatccacccaaggagcccgcccagctcaagggccacatcccaaagacagggtgaaccaggggacagtccaagcctgagaaagcgacagctacaggaaggaaggcagaaaggctttcagatgaggggaggtcttctgtccatgggtgagctgggattcacggccatgaaggaaacgccaaggagaacagagacagacacccctggcagctccccgggattgcttctgctgctgttgttattgcttcgggcagaggggctttgcccccaggaggccaagcaggccctcagaagctggcaccaccattctcatccttatcagttccggggggggcacgctgggggtgagcagagggggccccctccaagcagagaggcaaggtaacaggagagcctggtaggcagtgctgaatctgcttgtatgcacacgtgccctgacatgtttatagatggacaccgggtgcagtcggggcgtgtgagtgtgtaatgagtgtgtccgtccgcgtccatgtgagcatgcagacggggtggggcaggggtgagtggccccggggaagcatgacagatatggctgtgggctacagcggggagcaagagcaggtaaacaatgcctggagcaccaacaggaaagaccagaggggcagaaggagaagcacaaggacaggaggatgcggcccccctcgctcccagcaccccgcaccactcgtgcatgagacagggggcagagcatgggaaaggctgcagagtagggggggcctgcagttggggtcacgggaactgggcgttaggtgtcccaggggtgcctggtgttcatgctgattgcagtgatgatgcacgtcctcctgggccagtccacggggtgcgcctgtacacactgggcgtgtgcggatacaagggcatgaatgcaggttggtcgcttgtcttcacacaggcatacgtaatgttcgcagagacaaccccccatcctccagtggccaccctgagcgaacgcgtgggtcg

SEQ ID NO: 69524 - DNA, 826 bp, Homo sapiens
taccacaatcatgactatataaggagtagctatacttacgataagagactttgtatcaaacacagtagggatgaaatcaggaagaggatacaaaaattgtaaatatatatgcccccaatatcagagcacccagatatgtaaggcaaatattattagatctaaaggggaagacaatacaataatacaataatacttgtggacttcaacaccctactttcagcaatggacagatcatatacatagaaaatcaacaaagaaacaccaagtttaaactgactttagaccaaatggacttaaaagacactaacagatcttttcatccgacagctacagaatacatattttttttcataagcacatgcaatattttcaaggagaggccacatgttaaaccacaaaacaaatcacaaaaattaaaagaattaaaatcacatcaagtacctttctgaccacaatgaaataaacctagaaatcaataacaagaggaacttttaaagcagcacaaataaatggaaattaaataacatgattctgaatgaccaatgggtaatgaagaaattaagaaacaaaatttaaatgtcttaaaatgagtgaaaacagaaacacaacatataaaaatgtatgggatgcagcaagagcagttttaagagggaagtatttagtaataaacacctacatcaaaaacaagaaagatctggctgggcatggtggctcacacctgtaatcccagtgctttgggagcccaaggcaggaggacgacttgatgctgggtcaagaccagcctgggccatatatatagcaagaccttatctctaaaaaaaaaaaa

SEQ ID NO: 69525 - DNA, 837 bp, Homo sapiens; identical to SEQ ID NO: 68779
  misc_feature (1)...(837): n = a,t,c or g

SEQ ID NO: 69526 - DNA, 888 bp, Homo sapiens; identical to SEQ ID NO: 68780

SEQ ID NO: 69527 - DNA, 677 bp, Homo sapiens
gcgccggggcatcagcatccttttaagtttatcaaaacatgcccggtgtggctgcagctgagtctgggccaggcagaggtggccaggatcctgcaccgggtggtggctgggatgttcctggttcgccgggacagcagctcgaagcagctggtgctctgtgtccactttccttctctgaacgaaagctcggccgaggtgctcgaatacaccattaaggaagaaaagtcgatattgtacctggaaggctcggctcttgtgtttgaggacatcttcagattgattgcgttctactgtgtcagtagagacttactgcccttcacactgcggctaccccaggccatccttgaggccagcagcttcacggaccttgagaccatcgccaacctgggtctgggtttctgggactcctcgctgaatcctccacaagaaagagggaagccagcagagcccccaagagaccgggcccccggattccccctagtctccagcctcaggcccacagcccatgacgcaaactgtgcctgtgaaatcgagctgtcggtaggaaatgaccgcctgtggtttgtgaatcctattttcatcgaggactgcagcagcgccctgcccaccgaccagccacctcttggaaattgccctgcacgccctttaccgcccacctctgatgctctcctgcctcc

SEQ ID NO: 69528 - DNA, 404 bp, Homo sapiens
gccatgtcagtgcctgggcaggaggagcatatggtccgggtgcacgatgtcattcaacagctgccgccaccacattacaggtaaaccagaaggggcagggcgggtcttggtggtattccaagggggttgaggctcaggtgccccctctgcttcctcccccaggaccttgtagtacctgttgaggcacatggcccgcatggcgagacacagtgccaacgccagcatgcatgcccgcaacctggccatggtctgggcacccaccctgctacggtccatgaagctggagtcagtgggaatgggtggcgcggcggcgttccgggaagttcgggcccagtcggtggtggtggagtttttgctcacccatgtggatgtcgtgttaagcgacaccttctcctcctgcctcc

SEQ ID NO: 69529 - DNA, 763 bp, Homo sapiens
ctcaggtaggcgctgatggtctggggatcagtctccatgtggattgcctgctgcagggccagggctgtggtgctcctgacgctgtcgaacagaggcaggcgaggcaggtcccgcagcagccactgatagccctgcagcacatctgtgtcccccacatcctcctccatggggggctccttctcctccccgtcccgcaggctgccctccgaaagcaccagcgacaaacccttcatggccagcacgcgggaggccacctgggaggagccgaggcgccgcaaaaagtagtccagcacctcacacgtggtttgctcatcagccttcgggcccagtagcaggtcctgcaggcggcccagcagctgccgctgcttttgttgcctctgccgcttcttggccttctgctccttgctctcgccctcgtcgtcctcctccccggaagcagcatcgtccacagcatcgtgcagcaggaactcgcacagacactgcacgggcagcacgtccagggagccctcgctggactgtaccaggtccgccagccagggcatggactgcgaggaggcctgccgctggatgatgtggaggagaaagtcagggtttcggctgcggcacaagaggtgcccgaggcggagggactggttgaggcttttcacttgatccaggatgtgagggggaggcctccgggggggcccctgggggtccaggctggtgagctgcgacaggaggaggctgctgctctcagtgatggtctgcttggtggacgcggccc

SEQ ID NO: 69530 - DNA, 580 bp, Homo sapiens
gtgcaattcaagtgctacaccacgaggacgggcagatgaacaccatctggccagcctcggtgcaggtcagcgtcaatgccacgccgctcaccatcgagcgtggcgacaacaagacctcgcacaagccactctacctgaagcatgtgtgccagccaggccgcaacaccatccagatcaccgtcaccgcctgctgctgctcccacctcttcgtgctgcagctagtgcaccgcccatccgtccgctcggtgctgcagggcctcctcaaaaagcgcctcctgcctgctgagcactgcatcaccaagataaagcggaacttcagcagcggcaccatccctggcacccctgggcccaacggaggggacggggtggagcagacagctatcaaggtgtccctgaagtgccccatcaccttccgcaggatccaactccctgcccgaggtcatgactgtcgccacatacagtgctttgacctggagtcgtacctgcagctcaactgtgagcgggggacttggaggtgtcctgtgtgcaacaagacagctttgctggagggcctggaggtggaccagtacatgctgggcat

SEQ ID NO: 69531 - DNA, 944 bp, Homo sapiens; identical to SEQ ID NO: 68785

SEQ ID NO: 69532 - DNA, 982 bp, Homo sapiens; identical to SEQ ID NO: 68786

SEQ ID NO: 69533 - DNA, 603 bp, Homo sapiens; identical to SEQ ID NO: 68787

SEQ ID NO: 69534 - DNA, 697 bp, Homo sapiens; identical to SEQ ID NO: 68788

SEQ ID NO: 69535 - DNA, 859 bp, Homo sapiens
cctgtggaagaagagcaggatggagagcatggtctggtcgatgttgcggttgcagatgccctcgttgatcaggtagcaggggtcccgcagcaccggctctagcgaatcctgccgcattatgctgttgagcttgtcggtattgaggttctcaaagaccagcttttcctgcagctgccgaaagttgctcactgtagggctgcccgggttgttgttctccccgctgctgcctcgctggagcccactccgatgggccaggtccaggcagcagttgcagcagtcgaggccgacaggtgagcggcaatcgagcttggactgggccatcttctcaggctcggaggtcgcctggcctgcgaggtcaggggcggctggcaggtgcgcgcccaccgagctggcctgaggggactccagggtgcctggaaaagacaagctgtgaggaaaagagttggaaattagcgcctaaagccagccaccttcggctcggcccccttctggctgtactgctccgggtgcgaatagaaacagctggacaaacagctccgagcggatccttcgggctcacttcctcctcttcctccttctcctccccctcctcttgaggccgggggccgcccccctgaggtgccacacgcggccccagcgcagtcccaagtttcccaagtgtgagcggggattggggcggacctgtggaggcaggaagggcgggcagcagggcagagggagagccagggcgcgcccttgctccctccctcctttgctccctccctccccggtttgcaggctctcaggctctcgggctcccctgggctgtgacggctgagcggtggcaggagctgagagcgagtgagctacgaaatcgtcg

SEQ ID NO: 69536 - DNA, 1569 bp, Homo sapiens
ctctcttccccgctcttccgaggaaaggcggggcctgggcgcccgcgggaaacccgggcccgttgcatccgctgggtgtagccgtggggatggcaggttcggggaggctggtcctacggccctggattcgggagctgattctggggtcagagacaccctccagtccacgagccgggcagctgcttgaggtactacaggacgccgaggccgcggtcgcgggcccatcccacgcccctgatacgtccgacgtcggggccacgctgcttgtgtctgacgggacccacagtgtccgatgcctggtgacgcgggaggccctggacacctcggactgggaggagaaggagttcggcttccgcgggacagagggccggctgctgctgctgcaggactgcggggttcatgtccaggtcgctgagggcggcgcgcccgcagagttctatctccaggtggaccgcttcagcctgctgcccacggagcagccccggctacgggtgcctggttgcaaccaagacttagatgttcagaaaaagctctatgactgccttgaggagcacctttcagagtccacctcgtccaatgcaggcctatcactgtcccagcttctggatgaaatgcgggaggaccaggagcatcagggggcactcgtgtgcctggctgaaagctgcctgacactggagggcccttgcacagcaccccctgtcacccactgggctgcctcacgatgcaaggccacgagttcatgtcccacagggagaagctgtgtacactgtccccagctcaatgctgtgcatctctgagaatgaccagctaattctgagctctctaggcccctgtcagaggacacagggccctgagctgcccccaccagacccggctctgcaggacctatctctgaccctcatagcctctcctccttcctcacccagttcctcaggaaccccggccttacccggccacatgtcatccgaggaaagtggtaccagcatcagccttctgcctgccctgtccttggctgctccagacccagggcagagaagcagctcccagccctcaccagccatctgctcaggcccctggccaccctgacccccaggtccccacacgccagccgtacccccagctccccactccagagctgcactcccagtctctcaccccgtagccatgtccccagtccacaccaggctcttgtgaccaggccccagaaacctagcctggagttcaaggagtttgtagggttgccctgcaagaatcggccgccttttcccaggaccggagctaccaggggagcccaggagccctgctctgtctgggaacccccaaagaggcatcgtgatggttctgccttccagtatgagtatgagccaccctgcacgtccctctgtgctcgggtccaagctgtcaggcttcctccccagctcatggcctgggccttgcactttctgatggatgcacagccagggtctgagccaactccgatgtgagacgtcacgcaggacagataccgctccacactctgcttcctttgagttttttaataaaataatctcatgcggcaaaaaaaaaaaa

SEQ ID NO: 69537 - DNA, 661 bp, Homo sapiens
  misc_feature (1)...(661): n = a,t,c or g
ccggtccggaattcccnnnncacgatttcgttgatccttgtgctaaatccacggcagcatcagacgttgctgaatagctggtgcgggaggctgcagctggccatggggactgcagcccctgcctccggggctcactcctgggcgggcagacggtggctaaggcagacaggcagttcttatggagcttcaggctgcccggggaggcgcagaagattgatcgcatgatggaggctttcgcttctcgctactgcctgtgcaaccccggggtcttccagtccacaggtcagtgcagagcccacagcctggccccttgccaggcacagcctccagctctggagggggcggcccctgtgggcacagcccagcgtgtgttcctggggacctgccttccctgagcgaggacgacctgtggggccgggcacctcttgcaggcgggcccccagcacgcggggtcccactgtccactggaggttctggctgagcccagcaccccggactcgttgcagacacgtgctacgtgctgtcattcgccatcatcatgctcaacaccagcctccacaaccacaacgtgcgtgacaagcccacggcagaacggttcatcgccatgaaccgcggcatcaacgagggcggggacctccctgaggagctgctgagggtgagc

SEQ ID NO: 69538 - DNA, 713 bp, Homo sapiens
atagggatggctctgccagggccagccctgctggggaaaggggacaatgacggaccccagggccccccggaaagcaaacaggattggatggataagccaagaaggatgtaataaatgatgcactatcatgaatccccgagcgctagaatcgttctttccgtgcgcccccatcctgtgccctctgtccagcgccaccttccccaagcaccaaaccagcaagttccattttgtgtcgctcataagtccacactcacatccagccacaggccttcgtccgtaattccccacgctccaccaagtgtccacagcttccaagtaacaaagggaaagctcctcatggataaagggtgggcgcagccctttccccttctcctgaaaaccctgaccccaagctcaaggcagcaccgagagcaattcccagccaccagcgtcacccccagcgccacagcctgcctcccctagaggctcctctctcttccgacgcccatctccttgtttacatccccagcccggtttcccgctgcccaggcggggaccgcggcgcagctgaccgcggaggaccgcacacacccactgaacacacaaaacccggcgctcccggcgctccagagatcggtccccaccgagcctcgcccctcctcggaaaaaggagccaactttgcccacctccccagccgcctacatgcacagccggtcccctccgagacacgaaa

SEQ ID NO: 69539 - DNA, 949 bp, Homo sapiens
  misc_feature (1)...(949): n = a,t,c or g
gcacgttnccagnagggnattccaagcttcntctgcaaaactcctttccgctgtgaactctggctcagacagtggctctgatgcagtctctgggttccggaaggccgtccctgggcattgggggtgtccgctgtccccccgctggcccacgcttagtgcctgctcccacttctgcagagcttcctcaaacagctccatgccttgcatgtacaggctctctgcattgccgtcgctggtggtcagagactcctccatccctctggcatcccatagtcccgagcacgcggctgtggggctggatgagttcactgccatcatcgaggccacactgtgggaggagccccgagtgcttgctgggctcaatggaagagatgccactcagggtgtcgttgctcttgctgctggggctctggactctccggctggagtatcctttcttcactgaagggaccttcctggccaagaggatagggaggggcaccgtgcccagctgctcccctcccatctcgggaccaacctgcttcttcctcctccgtcgcctcttcagctggtgggcagccagggccagggccacagtccccagggccgtggcaaagaggactttccgcaggcctggcgtcaaccgtagctgggagaatgcagactgcccaaacgtcgtgtacaggaacacggggatctcggccaccgtcatggccagggcctggatcatagacgtgccctcggccctccggaacgccatggcagggccaatgccccaggcaaagtcctcagggccaagagcttccaaggagaacgtcttcaactggttgccagctgggtcccaggcaccatccacgccccagaaggacagggacacacataccagagggcccctccacagagccgggatgccatcgctgcggaagggcagcgtctccttccccacgaaatcgtcgacccgagtttccgg

SEQ ID NO: 69540 - DNA, 990 bp, Homo sapiens; identical to SEQ ID NO: 68794

SEQ ID NO: 69541 - DNA, 1145 bp, Homo sapiens; identical to SEQ ID NO: 68795

SEQ ID NO: 69542 - DNA, 595 bp, Homo sapiens; identical to SEQ ID NO: 68796

SEQ ID NO: 69543 - DNA, 403 bp, Homo sapiens; identical to SEQ ID NO: 68797
  misc_feature (1)...(403): n = a,t,c or g

SEQ ID NO: 69544 - DNA, 1436 bp, Homo sapiens; identical to SEQ ID NO: 68798

SEQ ID NO: 69545 - DNA, 1044 bp, Homo sapiens
agtgccctgcgcaaggaacaggactcatttctgagaaggatggacgcagccccaacaaatcagacaaggaccacatccggtggcccatgagtggcgctcatgatcttcagcaggcggcaccaggccctggcggggcgcaccagggtcaccccaaccaggataaccggaccgtcagccagatgctgagcgagcggtggtacaccctggggcccaatgagatgcagaaataccacgacctggccttccaggtgaaggtggcccacttgcaacaaggaccgaaagaagtccagctcagaggccaagcccacaagccaggggctagcaggagtgtaacaagggctcgtgggagcggagcatataagagacgggcactgccactgcccctggggtgtcctctgaactccagtcagttgcagcccaaacacttcagagctcggataccaaggagcagcttctgtggggcagaatggctgcacacagtcagggaacctggcttagcctggcccaagccttctcccacagtggggtacacagcctggacggcagggaaatagaccgtcaggcactacgggaaccgacacaggtggtgtctggcactgcatcatactctggcccaaagccttctactcagtatggagctccaggccactttgcagcccctggtgagggaggtgaccagtgggcagccctgctgctgcccacctgagctgctcattcccagcacatggccagtgaggacatagcaagtgacgaggagcacacggtcatccatgaggaggagggggtgatgatgtcattgctgatgatggctttagcaccactgacaccgatctcaagttcaaggagtgggtgaccgactgagagtggggacaactctggggaggagccagagggcaacaagggctttggtgggaaggtatttgcacctgtcattccttcctcctttactcctgccgccccttgctggatcctgagcccccagggtcccccgatccacctgcagcttttggcaaagtctatggtcccaccttgtcctccacgaaa

SEQ ID NO: 69546 - DNA, 1046 bp, Homo sapiens
acgaggagtttgaaaagttggcggaggactgtaagcggagcatggacattctgaagcaagccttcgtccggggtctccccacgcccaccgcccgctttgagcaaaggaccttcagcgtcatcaagatcttccctgacctcagcagcaacgacatgctcctcttcatcgtgaagggcatcaacttgcccacacccccaggactgtcccctggcgatctggatgtctttgttcggtttgacttcccctatcccaacgtggaagaagctcagaaagacaagaccagtgtgatcaagaacacagactcccctgagttcaaggagcagttcaaactctgcatcaaccgcagccaccgtggcttccgaagggccatccagaccaagggcatcaagttcgaagtggttcacaagggggggctgttcaagactgaccgggtgctggggacagcccagctgaagctggatgcactggagatagcatgtgaggtccgggagatccttgaggtcctggatggtcgccggcccacaggggggcgactggaggtaatggtccggattcgggagccactgacagcccagcagttggagatgacgacagagaggtggctggtcattgaccctgtgccggcagctgtgcccacacaggttgctgggcccaaagggaaggcccctcctgtgcctgcccctgcaagggagtcagggaacagatcagcccggcccctgcatagcctcagtgtgctggcgtttgaccaagagcgtctggagcggaagatcctggccctcaggcaggcgcggcggccggtgcccccagaagtggcccagcagtaccaggacatcatgcaacgcagccagtggcagagggcacagctggagcaggggggtgtgggcatccgacgggaatacgcagcccagctggagcggcagctgcagttctacacggaggctgcccggcgcctgggcaccgatggcagcagggatgctgcaaaggaggcgctctataggcggaatctggtagagagtgagctgcagcggctccgcaggtgaggagcc

SEQ ID NO: 69547 - DNA, 1413 bp, Homo sapiens; identical to SEQ ID NO: 68801

SEQ ID NO: 69548 - DNA, 942 bp, Homo sapiens; identical to SEQ ID NO: 68802

SEQ ID NO: 69549 - DNA, 726 bp, Homo sapiens; identical to SEQ ID NO: 68803

SEQ ID NO: 69550 - DNA, 1042 bp, Homo sapiens
  misc_feature (1)...(1042): n = a,t,c or g
tattgggggaaaacccctggnactcccncccggaaacctattggganctggatcaacaatttccggtaaaggttggcggggatacaaatccaacataccaaaaatccaggtaggcatttcctatatgcccaacagaaaacaatcctggaaaaagaaatcaggaaaggaattcccatttcccaattgcccacaaataaaataaagtaccctcaaaattaacttaacccaaagaagagaaggatttctacaatgaaaactataaaccactgatgaaagaaattgaagagggcaccaaaaaatggaaagaaattccatgttcatacattagaaaaattaatattgttaaaatgttcacactacctaaagcaatctacagactcaatgcaatccctatcaaaataccaataacattcttcactgaaatagaaaaaaaaatgctgaaatttatatggaaccacaaaagacccagcgtagccaaagttatcctgagcaagagaacaaaactggaagaatcacattacctgactttaaattataccacagagctatagaaacaaaaacagcatggtagtggcataaaaacagacacatagatagtgggacagaataaagaactcagagctaaatccatatagctacagtgaactcattttcgacaaaagtgccaagaacacacattggagaaaggacagtctcttcaaaaaaatgatgctagaaaactggatattcatatgcagaagaatgaacctagacccctatctctcaccatattaaaaaaatcaaatcaaaatggattaaagacttaaacttaagacctcaaactatgaaactactaagagaaaacattggggaaacactccagcacactggantaagtgaagatttcttgattaacacttcacacagcacaagtaaccaaagcaaaaatggacaaacgggatcatatcaagtaaaaagcttccacacagaaaagaagataattaacaaagtgaagagacaacccatggaatgggagaaaatatttgcaaactcccggacgcgt

SEQ ID NO: 69551 - DNA, 959 bp, Homo sapiens; identical to SEQ ID NO: 68805

SEQ ID NO: 69552 - DNA, 970 bp, Homo sapiens
ccgggtcgacccacgcgtccgcccacgcgtccgcccttgcgtccgctttcgcgtccggggatctgaggggtgagggtgggccccctcctcacgccttcttcactgcccccctcagagtgcacaatacgagtttgttcctgcctccactctcccaccccgttctggcctccctgtctcaagatactgagcctctcacctcccagccctcagccacccccatccctgccccttctgagactcacagcacccctttccttcctctcctcccacctcctccctcagcccctcattctccttgggaatctgcagagggctctgggactcactgccggatgtgaaatccaggcgtcagctgtttcctaggcaagggcaggaaagtggtctccagcccttgctccactcatgcctgggggcctggggctgagtggtatccctacctggcctccccctggcctctgggcctccagcgctgggtttgtcgagtgagagagagagaggagcttgggttgcttccctgtccccgccccctctgtggcattgtccctcccactcttatttttctaccaattgctatttttccgaacaatccttgtagagtatgtaccatccaaaggcaggagggcctcgccgtggccggctctggttggagatggtacagttttattgtacaggtgctaaaacaacaacaacaaaaaagaaaatggaaaaaaaaaagattaaaaaaaaagggaaaaaaaaaaagccagttgggggaggggacaatctgttttttaaaggctcctgagccatgcgggagcattggtggttattttctttgtattgtgtttgttctttgttcctgggggggaagttatcggcccccttctgtaggactgctccccacccccaccatactgcccagttggttttgaacagttgttttccctttttaagaaaaaaaaatacacatatatacccccacataactata

SEQ ID NO: 69553 - DNA, 408 bp, Homo sapiens; identical to SEQ ID NO: 68807

SEQ ID NO: 69554 - DNA, 881 bp, Homo sapiens; identical to SEQ ID NO: 68808

SEQ ID NO: 69555 - DNA, 582 bp, Homo sapiens
aattaagtgtagagaaaatgtatctcgacacaaaaaagaaccgtgtatgacaagctcttagctaacattattctcaacagtgaaaagtggaaagcttttcctccatgttcagagacaagacaaggatgaccagtctcaccacttcttttcatcgttaacagtggaattcctaggcagaacaattagccaagaaaagaaaagcatcctactcagaaaaaagtgaaattatctctaattgcagacaacatgatcctgtatacagaaaaccctaaatattccaccaaaaactgttagaactgatgcatgaattcgataaggtttcaggatacaaaataatctaacaaagatcagaagtgtttctgtatacaaataacaaactacctgaagaaatttttttaaaaatcccaagtatgatagcaacagaaattaaatacttaggtgtaaatttaagcaaaaaattaaaggtcctgtatatgaaaaactataaaaccccaatgaacaaaaatttaaaaacacaagtaaatgaaaaaaaaattcatgcttgtggatgggatgaattaatattgtgaaaatgaacaaaat

SEQ ID NO: 69556 - DNA, 418 bp, Homo sapiens
ttgttggggctccaggctgggctccgcctcacgctccccaggtcggtcagctccgagactgtggctctccgagggggcagcacctggcctggcacagggaggttaatcctatgacgtcactgccaacctccccacccccatgcccatcccttcgggttcgcgctgccccgagcggctcagctcccggggttctgccttcgctcccggccctgcgtcctgtcccggctctggttccctgctgaggcctgcggcgcgacggggacgcggaagggaaggaggagggggtcctgcgtcagcctcgagtcagggcccccgggaaggagagggtgtctgtgccagaggatggccctcgtccccggtgccggctcccacccccagccccgcagcatgggggctctagtcacccttgcggacgaaa

SEQ ID NO: 69557 - DNA, 442 bp, Homo sapiens
aaggggtgcaaataaccagatatcagaaggaatttctgtaaaacgatttctggaaagatctgcttgggtggtgtccgtcaggtcgtagccgctgcccgggaagtctcggagtttccgaccactgaggctcaggatgccggagctgcccgcctcttccagggcccggtccaggctcctcacggtgtgctgaggctgcaggctccccgggttccacggcggcccgttggggaacggctgaccgaaaagagtcggtaccgggatgggaaccaccagggtcccgccgccgccgccgcctccccctccagccccgccacctccccctccagccgtgccacagccaccgctacttccacctccaccacaaccgccgcccccactgttaccgcctcctccctgactcgccgccatgttcctgggagagagaatagcccccgacacgaaa

SEQ ID NO: 69558 - DNA, 884 bp, Homo sapiens; identical to SEQ ID NO: 68812
  misc_feature (1)...(884): n = a,t,c or g

SEQ ID NO: 69559 - DNA, 597 bp, Homo sapiens; identical to SEQ ID NO: 68813

SEQ ID NO: 69560 - DNA, 421 bp, Homo sapiens; identical to SEQ ID NO: 68814

SEQ ID NO: 69561 - DNA, 1834 bp, Homo sapiens
cctactctgatgccattatcttgagatgtcttagatatgaataaaaagtcattccactcattatgagaactgtctttagaagaaaattatactgaattataccataggaatatctctaggttttgaaaatcatatacccagagatgattccataaataaggaatcaggcaaaaaaccaaaggaattcattggtgagaggagagtgttagggatctcattcccctgcaactactggctgaccccaaccctgcattgcaaaacacttggccccctctgacctcaaaaagcatttggtgcttcctcattaagctctatttattgtctttactattcacccatctgcctcagtctgggccaaatctattgcccaatcttcaattggttgcgacttttttgtctcttcccgattctggcattccagagggtcaataggttccttctccacgtgcttttgagggaaatgcccccccccaaaaaacttttcacaccaccttgaacagactctaaacttaggcactacagttactaagcagcctttggattctttgtttttgaagttagatcttttcagctattagtggaaaatgtgcctcactctactccaggattaccaatagaaatgaaaggacagaaatggcattagtgtttagagaagattatgtatatatggctgtgtgaacactgaaaattatgagggtcaacataaaatcagcattacaggtactaaaacataaatcctgatggctttcaccgttttcttaagagcaaaattgcaaaaagtgatattaacagtcatcctagacgaatatgagcaaatgatttgtttttccttaaaagagcctccaagtgtattgtgatcattttcacactgatcaaagagagcacccttctgtcaacaggtatctgcagttttcaggacctggcagaaattcttctatgttctgcctttaaaggtcaggtacaaaagcagagacagctgccaggcccctctgcccagagctaagtgtctgggaccatgagtgggaaggacaggcttgagcctccttggtcctccagacagcatggggcgctacttgccccttctgcagctgcgcgcggcaaagctgtggcctggccgtggcctcctgccccatgcaacagttggtggacagaccgtacctggcacacggcgccttgtgcactttccaacattttgatgctaaccgtcgctagtcactgagccctgacatttgatctctggccttgaccgcagatttcggaaacttctggcagcccagtgtctactggaaggcccaagccgcttgccagaaagctgcgccccgcccaaaagcactgggttctgcagtccaggggccttcctcagctcccaggtccaggagaactgcaacggtcacctacttccacaggaagcactgggtccgcatccggcccctccgcaccactcctcccagctgggactacacccgcatctgcatccagagagagatggtccccgcccgcatccgcgtcctgagagagatggtccccgaggcctggaggtgctttcccaacaggctgccgctgctgagcaacatcaggcctgatttctccaaggctcccctggcctacgtgaagcggtggctttggaccgcccgccacccccacagcctgtccgcagcctggtgaccgtgaaaatcgccccgccagagagcagaggaagcccgacgcccaggccatctgccttcaggtctgtgatgagaaacggagtggcctgttccgttgtgcccaggtctaggccgctgagcagagccctcactcccaggcagagttgtctgaatccttcctggcggccgct

SEQ ID NO: 69562 - DNA, 909 bp, Homo sapiens; identical to SEQ ID NO: 68816

SEQ ID NO: 69563 - DNA, 564 bp, Homo sapiens
agcccactgctaaatctgttttctgacagatgggttttggggagtcgcctgctggcactaacatggaggaaaggggactcccattggcccttcccttttctcctaacagtccctttggtctggtctgtcctgggctgtctgtgtgtgtgccattctctggacttcagagccccctgagccagtcctcccttcccagcctccctttgggcctccctaactccacctaggctgccagggaccggagtcagctggttcaaggccatcgggagctctgcctccaagtctacccttcccttcccggactccctcctgtcccctcctttcctccctccttccttccactctccttccttttgcttccctgccctttccccctcctcaggttcttccctccttctcactggtttttccaccttcctccttcccttcttccctggctcctaggctgtgatatatatttttgtattatctctttcttcttcttgtggtgatcatcttgaattactgtgggatgtaagtttcaaaattttcaaataaagcctttgcaagataaaaaaaaaaaaa

SEQ ID NO: 69564 - DNA, 606 bp, Homo sapiens
ccccagcattagaaaacatggcacccacccgtttccacccacctagagcagcccctcgggctcctgtaggccactgtatagcgcatagccaatgtcgtcaatctcctcctcacgcaagctgctgaagaggttcacgctggggttgaagtggcagggcaggctggcctgctccaggctgccgatgagcagctccagggcttgcaggaagcgctcacccaaggcctcctccgtccaatccacgttgtcctcccccagacgcaggaccacctgggtcaggtgaccccggcctagctgccccagagccgagcaaccacggcagacagcacacagcagcagcagcagccgccggcgagtcccagcgtcatggtcgtccagggctcgcagcctagcagcctccactggatacaggtcctgcagccagaggttccccgccagcccctccaggggccaggccaagaggaggcggtcgtcagcatcgaccccagggactgccacaagcacagccacagtgagctccaggcgttcgtgctgcacctcgagcagcagctcctccgaggccatgctgggccggatcaggcacccgagaaggctgcccggacgcgtggg

SEQ ID NO: 69565 - DNA, 394 bp, Homo sapiens; identical to SEQ ID NO: 68819

SEQ ID NO: 69566 - DNA, 1102 bp, Homo sapiens
acctttgtcagaaaagatcagggagattaaaacaagaagtgctatgtatcaaaaacacgaattgttagaaaacaagccatgtggttaataaaaacaaagacctaggtacaaacccacagaggctttataaacaacgtacggggaaaaagcaaaacaaggtgtggttattacaacaccggtttgatttacaaaaaggaagcttcaattaccaaacgggcgggtagttaaaacaagcccttggggtaacccccaccactgcggcgctcattctccaggtacaactccagcaacagcaggtccacagaggcaccatcccccaccacacgcaccgctcgggcctggggaacccgggccagggacaccaaggtcccctccaggcccagattctgggcctgctcctccaggacacggacatctgcctcagaaaggggcttgggcaactggaccagagcccggtctggccgggggctggccaaggcacagcaaggctgtactgggagccccgaggcccgcagcaaggcctggacatgctgctccaagcgctggggcgtggtgccagggggcagtccttggagcagcaggcgtgcaggggctcgtggtggagctggccgcaggctcagctgggcaccatgtagttcgtgatctgcctgggccaagaccctctcggcgtctgcaggctctctgaaggtgaggacgcccccacagcccagtctctgccagctcaacacaggtccccctccagagcgtcggcggttttcaaagtagagagtgagcagctcgtcgggcacggcagggggcagtccacggacctccactgccacccctgcctctgcctccgccattgcaaccattccccgtggccgctaggcagcctcaggccatgagctcagccaggactcctgtgcctgcccctcagcaagcctaacccccactggcaggcaccggcagccgatccaggcccgatccccccaccccggagccaggggccgttgggccctgttgttgggctcgcgggggtgggggggctcgggcctttgttggtcacagatggcccggggatttcctgggaatagaaatagccgccggcacgaaatcgtcgact

SEQ ID NO: 69567 - DNA, 1946 bp, Homo sapiens; identical to SEQ ID NO: 68821

SEQ ID NO: 69568 - DNA, 839 bp, Homo sapiens
tccccagagatagccctgggatccaggtgattcgagatgggctataggaaccaaggcctcccccagcgtgaaattaccaggtgtgagcggcgccaccccactgtggggaggcgggtcccacgggcactgggcacctggctgtgcctcattcctgagtctcccacagcctcacaccacagcaagagacaaggcggccctgattcacagcccagctctgccctgtgccaacgcagagccctgggcgcaggacggggccactctgtgccttagcttcctcagccatgaagtaggatagacggggacccggtgccctcctacaggcacagtggggagggaacacaccatcggggcgcaggacgcgaacgctccaagcctgtctgtcccggctgttcccactgcacgccagagagccagaggccttggggccaggtcactgcccagctcagagcccagggagccccgagcagtggccctgcacctcctgccacttctgggtgattctagaggagtccccttacccagggcccctctggcctctccccaaggggcacaaaacggcccccgagaaagctcccagactcaagcctatgactcttcacagcctcctgagacactggcccagtcccggggctccctgtggtagggccctacatcccacgagggtttggaggggactgacaatgggggtctggctgcccagccttgtgaggagctctccccatctgcccagcccgtggcccccaagccgtctctgccgaactccatcagtgacccagttggagaaaggccagcttgacaaatgctctctgcgggacaagcaggatgagtgggcgtttcta

SEQ ID NO: 69569 - DNA, 2249 bp, Homo sapiens; identical to SEQ ID NO: 68823

SEQ ID NO: 69570 - DNA, 1346 bp, Homo sapiens; identical to SEQ ID NO: 68824

SEQ ID NO: 69571 - DNA, 1603 bp, Homo sapiens
tgtcagcagctatcaccacaaagacagccgctctcagggtttgccaagaactcaagagtgtgccaggccggagctgaggcccctcctgtgccccagggccctgtggccggtcacacggctcagctacagatgcccgtggcaggcgccgaaagcaggcatcggaacgaaggccaagccgtcggagtctcacctaaaattgcatcctggatggccctctctggatcgtcaaggtgaaccagcaactctcggtacaggtactggacactgctctgatagtaggattttgcgttggcacccttgacacactgcagccaggtgaccaaggtggaggcggctgccatcctcacatcgttggacacgtcatctaggcgttttaagagttcaggataaatcttgatgagtttctctggatccgtcatgccgcccgaggtttttaagaacgtgttgataatacggcatgagatcagtcgcgtcatcttcgaatcctcctccagggtggtcaggacctggggcatcagtgtttcctgcacgtcccgtatctgctctgccgacaggacctcgctgctggtgagcgcccagaggcaggacacggcagccgtgcggatggccgcggctgtcctccccgcatgccactgcagattgggggccaggatgtcctttgtcaccgtctcgaggtagctgggaaactgcccctgggagttgatggtgtccgtggctctgagcagcacggtggacaggatggagaacagcttcaggcgcatctgcgggtcttgggagggctgcagacaggccctcagcgtgggcacgacgtgtggcagggcttctcccagggcagggcctgactgtgcgacgatgacactgaactgcaggagctccggcgagtgtgcggtccagtcaaggtgcgacgcggtcacccgctccaggaggggaccaatgtgcttgcggtagaggtcctggcagctgctgacaccctccaccatggccagtgagtccatcgtctcctgtgccttgtccctcaggccggtagcacctgcgagggccactattgtcagcagcacgtccaagagctgcaggctggccacgccacagtcctcatgacacacagacaccagagcctgcacacacagcagcaggcgctccaggtagaggtcgttttcagatgcctggcagatgtgggcctgtgccagctctgtggcgatggctgccaggtgcggctggagggcttctcgggggcaaccccgcatggcggaggccagcaccaggaggccggaggcagagggcgtcttcttcagcgtcgataagatcagcttcagaaacacctcagggctgacaaacgtcccgacgagctctgcggatctggtacaactttggaccacggctgcctcctcgtcggtgcaggcctggaacagggtccggaggacgacctccaggtgctgcgtggcgtggtcctcggcatgcagcagcagcactgggagcagctgtgccgacttcactcgggtccccaccacccagtcggtgatgtcgtggcacagggcagggaggatctggagaggttcctgaagacgagctcccggcagcccgaattccaccacactgcactgtg

SEQ ID NO: 69572 - DNA, 967 bp, Homo sapiens
cggccgccctgggagcgagcggaggagcaagcgccggagatgatgactttgaccagtttgataagcctggcgcggaacggtcgtggagaagaagagctgctgatgaggactgggacagtgaacttgaagatgatttacttggagaagatttgctatctggcaaaaagaatcagtcggatttgtcagatgaagagctaaatgatgatcttttgcagagtgataatgaagatgaagaaaatttcagttctcagggtgttacaattagtctgaatgctacatctggcatggttacatcatttgaactctctgacaacactaacgaccaatctggagaacaggaatctgagtatgaacaagaacaaggagaggatgaactggtttatcacaaatctgatggatcagaattgtatactcaagagtacccagaagaaggacagtatgaaggccacgaagctgagttgacagaagaccaaatagaatatgtggaagagccagaggaggagcagctttacactgatgaagtgttagacatcgagatcaatgaacctttagatgaatttacaggaggtatggaaacattggaacttcaaaaggacatccaaagaagaatcagatgaagaagaagaagatgatgaagaatctggacgattacgtttcaaaactgaaaggaaagaaggaacaattattaggctctcagatgtaactagagagagaaggaacattccagaaactttgggtaacttttttgcctgtctcccatcctcctttactctcatttcaacttcctccatagtattgctgtaattaatcaaagtaggcaaagaaggttgactaggtaattgcggctgccgtccggagagtggccggactttggagtgagtgctgtttatggtactgtaaaactcattctttaaaatcattgctgtttatggatttaaaatgcttgaataaaatgtttaagataatt

SEQ ID NO: 69573 - DNA, 783 bp, Homo sapiens
aagctctgggtgagctccaggaggtgccgccgcagcagggcgctctgcacatctgacggccgcttcttctgcacgccctgcaggggagagagggccaggcccttgctgcgcttcacaccacaccaggctccctgcgtccccagcccctgccccacaaaccatataccttgagcagccgtttgagcagcgccttgtcgcggtggaggtgggccgtgtaagcggtgtagaggcctggcgggagggcacagctggcgccccacccttcaagggcctccctcccacactcctgcagccccacagaggagccagggtgggggtttcatctgcctgcagccccatgcccttggctgcacctgaaaatctcacccacccaccccccagacaccgagacccactgaagagaagagagcgacccctccccaagggttctgagctctgctgctgagtcctggaagaggatcaggggtctgggggcctggctgccccacccgagagacccgccaggtacaagacaggcctctccacggtggaggggctccaggtcgaggggagcacagacctggcttggtgtccagggtcttcaaccttgaaggctttttcagcttgacttgcttaggcaggtctcctacgagacacgcccggtggccaggcctcagtgcccgcagctctggccatccccacgggctttgaggcggccccacactcaacgaggcttttgagcagcaccccctgcacctcaccgggagcctgacctgacatcttgggctccccgactcggaggcc

SEQ ID NO: 69574 - DNA, 449 bp, Homo sapiens; identical to SEQ ID NO: 68827

SEQ ID NO: 69575 - DNA, 1033 bp, Homo sapiens
ttttttttttttactttggaacgtttttaataagaaaagttttaaacaatttatttttggcaaaaacaggtagggcaaccaccaccccacagccctgaagtggaataggaagacttggaaaagcacacgaagagggcagggacatgagggtgtccatcttgtagcagcttctgaggaaagagctcagtcccaatggcaagtttcaagtccacggggttgaaacagccagggatgccctcccagccccctgtggtgcctggatccaggggcgtgaagctgtgcacgtgcctccaacttgagtccggccagggggcccccccagcccgggccacgcgccgggctcagctccatgggctaggggccagggcgggccaggggctccggggaaggagggcgggggcccggggcatgctcggcttgggcgagagctgtcatcccggctacagaacagctccaccaggcgggcgaaagagtcggaggacaggcggaccagcttgctgcgcagggcggggtccgaggccagcttctggttaatgacttctgcctcctcctccagcagggccaccagcctccgcagtatggcttccttctctgtcgatgggggaccctgtaattctgggctgggcggagatttcagctgctcttggaccagctgttccagccgctgggccaccaaagcatagaagtctggagtagctgggccaggctctaaaccatagcaggggcggatgggcagagagcaaggccgaggggactcagagggggctgctcctcgccccagggagcagggaagacatcttcgaaggcggctcaggaagtctgttggctcttcttgggcagggcttctaggtggagttggaacaggagacccggcagcctcaccacgcctaaggaaggcagctaggaccctcagcgtgtcttcccggagccccagctcttcagagcctgccatggaggcacctggtccggggccccaccgccgcctcctccactcaacttgcggtctcctccactgaacgaattccaccacacg

SEQ ID NO: 69576 - DNA, 1054 bp, Homo sapiens
gtgcggtggaattccctggtgctctgggatggtccttctcttaggccctgaggggtgacctcggggccattcccaggatgggccttcctcactggtaccccacccctctcccgccaggcatggccgcctttgccaccgcccacctcctctacgtctgggccttcggcttctctcccctgcagcccggcctgctgctgctcatcatcctggcccctggcccctacctcagccttgtgctccagcacctcgagccggatatggtcctgccggtggcagcctatgggctgatcctgatggccatgctgtggcgcggcctggcccagggcgggagtgccggctggggcgcgctgctcttcacgctctctgatggcgtgctggcctgggacaccttcgcccagcccctgccccatgcccgcctggtgatcatgaccacctactatgctgcccagctcctcatcacactgtcagccctcaggagcccggtgcccaagactgactgactagggagcttgaagggccggtgttcaggccctctcctcctgcaaggacctgggcctcccagcccagcccagcctgagaaataccctcagcagcgaagcttcctgacgcctgtctgcaggcgccgctgccgccgtcgcttctggctgaagacgtttgaggacgatttgcggaattccaagtccactactgggttccagctgccttcccccggttctgactccagatccctggctcctcagccaggcccacatggagccctcccagccaccagcctgcctccatgttcactgtcggccccacagcctgcccgccccctgctgctgctctgaatccgttttccctgtgggtgtggaaccgtagatgttgctgttaccgtaggagaggcctcggggagggtcatcattgtgataaaccatcgcggttaatgacagcagaaggttctttgtcgctccccatggaccaggcctggtgcccagtgggaccctccatggccctctggtggggggccccggggggataaagtgaggattgtgcagaactgaaaaaaaaaaaa

SEQ ID NO: 69577 - DNA, 557 bp, Homo sapiens; identical to SEQ ID NO: 68830
  misc_feature (1)...(557): n = a,t,c or g

SEQ ID NO: 69578 - DNA, 1040 bp, Homo sapiens
aacggcagagcctgactccccatctcccgtgctccagggcgaggagtcctcagagagggagagcctgccagagtccttggaactgagctcccctaggtcccccgagactgactgggggcggcctcctggaggcgacaaagacctcgccagccctcacttaggtcttgggtctccgagggtctcccgggcttccagccctgagggtcgccacctcccttccccacagctaggaaccaaggccccggtggcccggccccggatgagtgcccaggagcagctggagcggatgcgcagaaaccaggaatgtggacggcccttccctcgcccgacctccccccggcttctcaccctgggaaggacactgtccccagccagacgccagcctgacgtggagcaaaggcctgtcgtaggacactcgggagcccagaaatggctcagaagctctgggtcctggagtagtccaaggaacaccaccccttacttgccgacttccgaaggtcaccgggagcgggttctcagcctctcccaagccctggctactgaggcgtcgcagtggcacagaatgatgacaggtggaaatttggactcccagggagaccctcttcccggtgtgccgctgcctccttcggaccccacgcgccaggagacccctccccccagatctcccccggtggctaattcgggttccacggggttctctcgccgagggagtgggcgtggaggaggtcccaccccctgggggcccgcgtgggatgccgggatcgcccctccggtcctgccacaagacgagggggcatggcctctgcgagtcactctgctacaatccagcttctaatccgcccaaaagcggcagccaatcggagcgcgaggacgtggtctggaggtaccgccggagatctgggaccactcagggcatcagggggcgtggtctggtccccattgcgggcccgggaggggaatggtttctatggccaaaagtttggttttctcaacactgtctaaatttggattaaaacttttgaacttttaaaaaaaaaaaa

SEQ ID NO: 69579 - DNA, 1145 bp, Homo sapiens; identical to SEQ ID NO: 68832

SEQ ID NO: 69580 - DNA, 694 bp, Homo sapiens; identical to SEQ ID NO: 68833

SEQ ID NO: 69581 - DNA, 663 bp, Homo sapiens; identical to SEQ ID NO: 68834

SEQ ID NO: 69582 - DNA, 575 bp, Homo sapiens; identical to SEQ ID NO: 68835

SEQ ID NO: 69583 - DNA, 1080 bp, Homo sapiens
  misc_feature (1)...(1080): n = a,t,c or g
aaggtcaggggttttgtcagtttcattcactgctgaatccccagggcctgactgcggcccatgggaggtgcttaataaaggttaacaaatgaatgaaggggacncctggagcctggagagaagtgagtcgctcaaggtcatagccatccagaatgaatgactttcatcttagaacgaataaagcaccgagtccacagctccagcccaaggtccttctcacagccgtgccaggtcctggacctcaaccccaggacagagccaagggataccccaacctcagggagtgcctgtcaggctctgccaggactggagtgctcacacaaccaagtcagggggccacatggaagaggagcaggaacggtggaagccaaagcagccatggccaaggccaggagccatctcccctcccacccctccagctgcctgagtgcaggcatgacagacagcggctgggcccagaagcccgactctctggggccaggggagaggcctgcagttcccatcagaagagcagaagacgcagagctgctgcgggttgccccagcaccaatgggagcttccctatggcccatgcttccttcctggtgttggccccaacccagcagagagcatcctggccaagtccaggctctgccaccttgcgccctctggtggccacattggttagtgccagaggggaacccaggatctcccccagcccctcccaggcggttcctcttcccctaagccagggtttcagctgcacaagagatgatccaaagggccgggggacatcagcagcccttggactggctgggcccaccctgaccagcaaggtgaggctggtaatgacttcggggatgaccacatcagccccaacaggtgagcactcactgtgagccgggctcaggctaggccactctatcaccatccagccacaatgaccgaagagtagattaaggcccaggaaagggatggcacccacccaagatcacccagcacagaggtgatgctggatcggcctgactcctcacctgtcctcccctctctgtccctccaattgctcaaccatagatcaggaagcctcctcccaggccagct

SEQ ID NO: 69584 - DNA, 611 bp, Homo sapiens; identical to SEQ ID NO: 68837

SEQ ID NO: 69585 - DNA, 1525 bp, Homo sapiens; identical to SEQ ID NO: 68838

SEQ ID NO: 69586 - DNA, 423 bp, Homo sapiens; identical to SEQ ID NO: 68839

SEQ ID NO: 69587 - DNA, 650 bp, Homo sapiens; identical to SEQ ID NO: 68840

SEQ ID NO: 69588 - DNA, 725 bp, Homo sapiens; identical to SEQ ID NO: 68841

SEQ ID NO: 69589 - DNA, 512 bp, Homo sapiens
  misc_feature (1)...(512): n = a,t,c or g
cggcccnaaatgagacctatggaagngcggtggaaatcgcgcgccccgagcccccgcgccatgaagctcgccgccctcctggggctctgcgtggccctgtcctgcagctccgctgctgctttcttagtgggctcggccaagcctgtggcccagcctgtcgctgcgctggagtcggcggcggaggccggggccgggaccctggccaaccccctcggcaccctcaacccgctgaagctcctgctgagcagcctgggcatccccgtgaaccacctcatagagggctcccagaagtgtgtggctgagctgggtccccaggccgtgggggccgtgaaggccctgaaggccctgctgggggccctgacagtgtttggctgagccgagactggagcatctacacctgaggacaagacgctgcccacccgcgagggctgaaaaccccgccgcggggaggaccgtccatccccttcccccggcccctctcaataaacgtggttaagagcaaaaaaaaaaaa

SEQ ID NO: 69590 - DNA, 802 bp, Homo sapiens
catagggagaagtgttcattattggaagaaagttttgccattgttgaagataataaaaaagaagaacagtattcctgaacctattgatcctctgtttaaacattttcatagtgtagacattcaggtaacagagttcctttatgaatttattggagatgggaatttccagtttataaacaaagacatggagctatacactgcttaaattaattgccttgttatttaacggtaatcttgttttctaaattcactagctctcacagataagatatgacagagaagagtaatgagatgtttgtctcttaagatcatataaaatctttggaaaatcatttgggttttatattctgagtataaacaatttgactaaaaactattctgtgtgtttaggcatcagaaattgttgaatatgaagaagacgcacacataacttttgctatgttggatgcagtaaatggaaatatagaagatgctgtgactgcttttgaatctataaaaagtgttgtttcttattggaatcttgcactggtaagtagatgcagtacttgagctaaaagttgtatttatttatttattattttttttaaaagacggggtttctctgttggccaggctagagtgcagtggcacaatcttggctcactgcaacctctgcttcccaggctcaagcgattcttgtgcctcagctcccgagttgctgggattacaggcatgagccaccatgcgtggccaagctgaaagttttttgttttaaaaagcttatggattcatggaagcccttattgattagattttcacagga

SEQ ID NO: 69591 - DNA, 622 bp, Homo sapiens; identical to SEQ ID NO: 68844

SEQ ID NO: 69592 - DNA, 307 bp, Homo sapiens; identical to SEQ ID NO: 68845
  misc_feature (1)...(307): n = a,t,c or g

SEQ ID NO: 69593 - DNA, 401 bp, Homo sapiens; identical to SEQ ID NO: 68846

SEQ ID NO: 69594 - DNA, 371 bp, Homo sapiens; identical to SEQ ID NO: 68847

SEQ ID NO: 69595 - DNA, 1169 bp, Homo sapiens
cctgctttttaattttctgaaagagacagtacagacttggtatcatttctaccttaagtatctcgaaaaatgcacatcagtgaatccatttggtcccggcactttttttggaaggttttattattattaattttattgagatggagtctcactctgtcacccaggctggagtacagtggcacaatcttggctcactgcaacctccacctcccaggttcaagtgattcttctgcctcagcctcctgagtagcttggactatacacgcatgccaccacgcccggctaactttttgtatttttagccaccgcgcctggtcttggaaagttattaattactgcttcaatttatttaatagatatatatgcctactgagatctaccttttatgagctttgagagaatgcatcttgcaaggaattgatccattttagctaagttatcaaatttatggacagagttgtccatatttctttctaatccttttggtgaccataggatcagctatgatggcctctttcacttttggtattagcagtatttgtcttctgttttttcttaatctagctagaggtttatcaattttacccaccttttcaaagaacagttttgggttttattgattttctcttttcaatttcactgatttttactctaatttttttccaggttactttggatttaatttgctcttctttttctagttttccaaagtggaagcttagattacttgtgtaatctagggtcaccagactgtaaaatcttagattatttgtatgatctgatcatgtaatgtagtgtacaatcttcacactgtcaataaaagccccatgccagcttgattctggctcttctccagcctcaaccctcctcttcatattctcaaaagtctctgaaggcccagatccctgtctgggtacaatgagcaatgaaatgacagtccaacagccctgggcagcaactgggctgtatgtgtgggcctctttccagggccctgtcttggagagcagctgcttaaagaaaatttggactatcacttacgctgaaggctggagtgttcacatatgtaccccaggcagttcatggcatgggatgagccacaggtagtaagagaaagggagtaacatggaggcaggcctagatcttcacacgtacaggatagattttttttc

SEQ ID NO: 69596 - DNA, 383 bp, Homo sapiens
ttgtgtcaaaggagtgatggctataaatacgaatccacactgatttgtggtcagcagcagatggtttgactggaaattcagaaacttagaataaggttgggaaacttgtggtaagatatagaaaagagctatgtcaataaactattctcaaaaaggacaaagtgtgagggtatttgtgtcccatgtaaatgatgaccaatgtataatctcagcagaggaggctctcaataaccaagtggacaaaatgactcattattttatcagccactgtttcccttgctcagaacgctaatgaacaaagttcatatcctactgtgagagcagcaggaatgaaggtcatgcatgtgctcagtgacacaggcttccacctgtcaagaatgaca

SEQ ID NO: 69597 - DNA, 565 bp, Homo sapiens
aaaaggcctttgctcagcgccacaagtcaccgtgactgaaagaagcatttcattccgtccagacagttactgagcttccgttctccaggcactgcacaaggtgccgaggacaaggcaggggaacggcctgggcagcctttggattggaggagtggccccaaagcccacgtatcagttaggcggcgcctgcgtctcccccagagcccacgtatcagttaggcagcacctgtgtctcccccagagcccacatatcagttagatgggcctgcgtctcccccagcgcccgcgtatcaatcaggcagtgcctgcgtctcccccagatcctgtgtatcagttagacggtgcctgcatctcccccgtgcccacgtatcagttagacggcgcctgcttctcccccagagcccacgtatcagttagacggcgcctgcttctcccccagagcccacgtatcagttagacggcgcctgcttctcccccagagcccacgtatcagttagacggcgcctgcttctcccccagatcctgtgtatcagttagactgcgcctgcttctcccccagtgtatt

SEQ ID NO: 69598 - DNA, 582 bp, Homo sapiens; identical to SEQ ID NO: 68851

SEQ ID NO: 69599 - DNA, 436 bp, Homo sapiens; identical to SEQ ID NO: 68852

SEQ ID NO: 69600 - DNA, 1101 bp, Homo sapiens; identical to SEQ ID NO: 68853

SEQ ID NO: 69601 - DNA, 495 bp, Homo sapiens; identical to SEQ ID NO: 68854

SEQ ID NO: 69602 - DNA, 613 bp, Homo sapiens; identical to SEQ ID NO: 68855
  misc_feature (1)...(613): n = a,t,c or g

SEQ ID NO: 69603 - DNA, 1337 bp, Homo sapiens; identical to SEQ ID NO: 68856

SEQ ID NO: 69604 - DNA, 394 bp, Homo sapiens
aatggcggggcctgtgcaactgcctgggtttgtgaaatggctgctgacgtttccgattccaatagggctgcctgcaaaggagacccaaggaacagagccaagttagatgctgattacctactttgagtcctttattgtggagtctgttcattaccaatagagtactgtgaatatatgcctgatgttgctaaatgtagccaatgattagagaagaattttccaaatgaatatgcaaaacttactgtggaaaattcacccaaacaagaagctggaatctgtcaaggtcaaggaacagcaggggaagaagaggagaagaaaaaacagaagagaggtggaaggggtcaaataaatcaaaaaaacaaagacggtaccacaaaaggttactatagccaaa

SEQ ID NO: 69605 - DNA, 562 bp, Homo sapiens
ttttttttttttagagtctatccattcctgttttgtagtcagttcttgaccatcaccagctgcaagccaggagccccgtgggtcaccgccaggcacctgctgtctgccacgaaacaggggctgcaggtctcttgctcagactgttgtgtgggcagggcccaggtcgatggggtcagagggtccttggaggttattttcatgcaggggtcttcagaggtgtgcatgcttcagaatcatggaggagcatgttcaaatgcccaccagcatctaagaacagctgatcttgtctattggtcttcttctatgattgaggaaactgaggcccggggggtctggatgatggtgactgctgaaggccatagcaggttcaagggtgtcaacttgatgccaatccccctagtcccatagattggtctgtcaatatggccacaagccacacccattcagggggtggaggggggctccttagcgagcccctggaggtgttggttaggtgcacaggcagtctctcccctacatcctttctgcgtcctgcagcagagcagtcaccaggccgaattcc

SEQ ID NO: 69606 - DNA, 891 bp, Homo sapiens; identical to SEQ ID NO: 68858

SEQ ID NO: 69607 - DNA, 1184 bp, Homo sapiens; identical to SEQ ID NO: 68859

SEQ ID NO: 69608 - DNA, 743 bp, Homo sapiens
aaattcccatctaacgtgatcacattttggttgggtttctctcctcctatcaggccccgggatgttgggccagcctcacctggagcaaacgtcagaggatcaagcaacgcttccttaggacctgctcaaaattagctatgcagccacagggtttggcagcttttatccatgactgaaccccacatcgaacgaccccaatcacggttgttccgagcatcacgtgcctgtccctagaaaagaaaatggtatgctgcctgcgctccaagaggctcccagatgtcactgctcgggtgtgcttcatggtgctataggcagcgtccaccagtggttgcattagtccctcctcctcttgttacaatagttcctcccctattaccataatccctccccgccattaccatagtcccccctcctccattaccgtagtccctccttccgttaccatagaccctcctccgttaccacagtcccttctcccgttaccgtagtccctcccattaccatagtccctcctccattaccatagacccttctacttctgttaccatagtccctcctccattaccatagaccctcctcccgttactatagtccctccttccgttaccatagtccctcctcccattactatagaccctccgttaccacagtccccccttctcacattaccatagaccctccttccgttaccatagtccctccttcataataccacagaccctcctttcgttactatagtccct

SEQ ID NO: 69609 - DNA, 1161 bp, Homo sapiens; identical to SEQ ID NO: 68861
  misc_feature (1)...(1161): n = a,t,c or g

SEQ ID NO: 69610 - DNA, 394 bp, Homo sapiens
ctcaagcgtggatgtgcggaagcggggagaaaggaaagggctggtggggatgtcttcctcccgacgccgtgactgccggcagaacccctccgaaagtgcctggggttttcctaccgtcctccccacaccgaccttgggttccgccgcacctcccaccgctcacgcgggtccgtgcacccctcgctcccgcctctgcccactgagccatggcccctccacccacctcggcggcaggagcaggctcgggagacgatgccaccggttcctctccgccgccaccagcagcaccgacaccgcagaggccgccgccatgtccctggagcccggccactccgtgactccccagtacagaggcagctgcgtcccacacgccaaacccgttcggacgcgtggg

SEQ ID NO: 69611 - DNA, 643 bp, Homo sapiens
ttttttttggatttcacgaactcacatttattcacagacagacaaagggacaaggacagacctttgctcactggggacccccagggtctggcagttccaaagaggtgatggtgtccagtgtgtgaaacgggggacagggaggcgggggcgtccccaccagtctccatccctctggccaactgtccgccgcctttttttccaagtcgtcctgccttaagacacatgttggggtgagcggttcctaaccagcatcaggggttctgggggcgggcgatgggggaggaaggggcagtccagggccccccactccttagtgtcaagggcgtgaaggggacgggtgggtagacagaggaggtggctccttcaacttccctcctccattctgcaaaccggggagctcaggcggagcggcggagggcagggcggcgaaggtcaggaggccaggccccccagcccgcgcaggtgagctttgctgtctacctcttcctcctccatctcgaaggctgagtggtcttggctgtcgaaacaggaggcgctgaggaagacagggggagccggcggggactggggtggggtccccggagagggcggctcttccttaatgtttgcgaggggcagcgggagcccttcttcctcctgctcg

SEQ ID NO: 69612 - DNA, 512 bp, Homo sapiens; identical to SEQ ID NO: 68864

SEQ ID NO: 69613 - DNA, 421 bp, Homo sapiens
gagcaattcagtccaattccgtttctgaaggaatgagcgaattccccagagagcaatgaccgagactcaggtggttgtctgtttttcatccacatgcttcacagatgacatatcccccccttaagccctgcaacagagcgcgaggcggatagtcccatccacacaggagtcacactcaggccaactgaagcgtgattctggattccacgttctttgccctctgcaaaggtgcctgttgctcaagtttctgccccccgaaagcgtgaccatgttgactgtttgttgcccgagctctgtggggtcccagaaacttccaggaatgcctggaagacccgcattgtgtcggtgctctcctttccagttttcaaacagaatatattgaaaactccccattttgcaggaaacaggaatcacgaaaatc

SEQ ID NO: 69614 - DNA, 1019 bp, Homo sapiens; identical to SEQ ID NO: 68866
  misc_feature (1)...(1019): n = a,t,c or g

SEQ ID NO: 69615 - DNA, 528 bp, Homo sapiens; identical to SEQ ID NO: 68867

SEQ ID NO: 69616 - DNA, 1190 bp, Homo sapiens
  misc_feature (1)...(1190): n = a,t,c or g
tttcgtgcgtgcgcgcaggtgtgcgtgaccatgtgcttgaaacggcagtagcgcagcgagaaggatcgccatcacacggcgcactggtgcggcttctcccccgagtggatgaacatgtgcttggtgtcgtttttccttgagctgaacgtcttgcaacagtggccgcacgcatagggctgaccccacattggacaccgctgcatccatgtccatcacacaacacagctgccgtttcttctgcctgcttatgggaaagacccctcttctcctccgttttcttctcttcctgccctatcacaccgtgcacttctccctttccttaaagaaccaccatcaactttaggaggagggaaaggggtggctctggcaggaaaagccagaatcccctctagccagcagagagagagagtcaagggtctgtttgggtggcagggatagccacttctgaaggtagaaaggaaaataagccaccaaattggtacctttctgtgaaatggacatcgtgctcagaatctccattttccccacaacctggaggagtaagtactgtcatctgcattttgtagctgaggaatctgactcaacaaaattaaattactcgcctaagcaattagcaatcaaccaagtctttctgactcagaaacccagctattgcctgttcatatccagcccctgtattggggtcaagatctggcctgttctcaatgcagcaagatccaggcagatcacactggactcccagcactgaatctggctcgaggggacatcaaatttgactgggtcatggggctcaggagcatcactctcaaaaatagcagtacaggaagaggcaatggccctaaacagcacttgcaggcagatccccaatgttaatcataagggccaggactctctcacttttctgtctctctctctgtctctcctctagggctgaccccacattggacaccactacatccaatgtccatcacacaccacagctgccttttcttctgcctgcttatgggaaagtgggctcaggaggtctggatctggggtggggatctggagtggaaggggaattcatttgttcattgtctatccttttgtattgattgaattttttatatatatatgggaattttcacaataaaatttttttccaaaataaaataaacaaaaggggctttttgcaacccanaaaaaaaaaa

SEQ ID NO: 69617 - DNA, 719 bp, Homo sapiens; identical to SEQ ID NO: 68869

SEQ ID NO: 69618 - DNA, 1442 bp, Homo sapiens; identical to SEQ ID NO: 68870

SEQ ID NO: 69619 - DNA, 569 bp, Homo sapiens
gtcgacccacgcgtccgcccgactctgaatcccgggcgggaggaggacccccgcaccgccccctccccagcgtgtaagtggctctgctattgtgcgtccctggaagtggggacccccttgtccctcctccctcccctgttgtctggccgtcgtcaaccccaccttgactgagtgttgagcccgtccttgggctctggtccctgcggggcaggctctcccgggcccacggggcggacgctgcataccaatttgccctgcaccgcctgtcccggagacggagcccgaaggcctgccatggcggctgtgtcgaggatgcgtggcgcctgccgtggcgggacagcgtgggcaggctcatttctgcccccaacccgggccccaggacaggtcagcgcgccctgccccggtgcccaccgctgccccccatccgccctcctgccacttgcccctgacccccctgccgtgcctcccgcagccctcccatgccgttccactcctccctgcctctgagccgaacatgataataaaagctattattgagcgcttactgcatgccaagtaaaaaaaaaaaa

SEQ ID NO: 69620 - DNA, 875 bp, Homo sapiens; identical to SEQ ID NO: 68872

SEQ ID NO: 69621 - DNA, 831 bp, Homo sapiens
  misc_feature (1)...(831): n = a,t,c or g
ggaagtcgccgnttttnnnnnccatgatttccctactcagtgncgnggaattcggttgttgtgaggattaaatgaggtagaaatatggcaagtgcttanaagcaagccaggtatatggtgggcactcaataaactgttgcaaaggtgatgatctctgtatcagcactgcccagcactaggtctgacctgcggtagcaatcagtgcaggtccctgtcgagggaacacaccccagcctctagtctggagaggcccgtggcccaccagacaacccctcgctgagcagtagctggagccactgcctcaaccccacagccctgccctggtcctgccaccaagacactactcacgggaaggtagatgcagcaaagcagagaatggagatcaagcccaggcccacgctggcctcgtcccagccgtcctgggcacattcacccaacacatcccatatccactggatggagccactggggcagctggagaagttgcgggagcccagtttcttccagaccatggctgtggaggaggggcccccggccaggcagggctgcaccggagggagggcgctggtgttctgaggccagcaagggttcctaagcacggcgtgggaggaggcagtgtaggccctcggtccctgcagacctggggagattgtggagggaggagcgtcccagctcggggctaccacccactccaggcctcggcgtcctcggccacagctccctcctggtgactcagcccggcgcgggccgccacgtccagatccgccgccagggcccagcttctgggtcaaggcccgccgggtcagctgaccgcgcgccaccgcccccgcg

SEQ ID NO: 69622 - DNA, 439 bp, Homo sapiens; identical to SEQ ID NO: 68874

SEQ ID NO: 69623 - DNA, 898 bp, Homo sapiens; identical to SEQ ID NO: 68875

SEQ ID NO: 69624 - DNA, 865 bp, Homo sapiens
tctctgaacttcttcttttagtgtcttgaagccttcgtgtacgtccccaacatcagatgcctggataaggatgaccttctcctctcctgacttttctccaggagggaaggtttgcatgttatcattgcagatatgtggaatatcccactcatctttgcctttgaccatcagctgtctcactcgaaaggccaggacgcagcccttggggatggttacagcctccttgtgatttatggatccctgtagccccaatggggcgaagaaggggagggagaagcaggcctctgccttgccggctcgctccagtgtgacctcctgcaccgtctccaccacctccatcaccacatacaggttctccccttgatcttgcatctccttcaggaatgggtggtctgctgccagcttcctcttctgcaaggtctccagggccttggcagccacactgagtgtctggccctccagagtgctgttctgcgagagccctgccgttcccttcaccttcaccgtctttggtacatccacatctcccaccactcgggtgtccagcatattcttaaagccaaaattcccagtgtctgttgggtctgaaggtgagcagccgggctcaagcacatccagcagtgtgtagtcggtgcggacgtaccgggccccccagaagagcgtgctcttcctcttcctcagctccaggcagaagggatggaagcgcttgaagtcgatgaggctgtcaagtggtgtcaggtcccctcgagggtttagctgtctggccagggcccgggtgacattttcaaacatggtcattgtctctgggagcggggctgggtcctatccagcagctgggtctgcggtgagggcctagggctcactg

SEQ ID NO: 69625 - DNA, 957 bp, Homo sapiens; identical to SEQ ID NO: 68877

SEQ ID NO: 69626 - DNA, 1069 bp, Homo sapiens; identical to SEQ ID NO: 68878

SEQ ID NO: 69627 - DNA, 514 bp, Homo sapiens; identical to SEQ ID NO: 68879
  misc_feature (1)...(514): n = a,t,c or g

SEQ ID NO: 69628 - DNA, 716 bp, Homo sapiens
  misc_feature (1)...(716): n = a,t,c or g
ggggccgcagtccgtgcacacgtggcgccgctggccggcctgagcatccatgctgggtatgggtgccgggggctgtgctcctgtggtcgggtcccaggcagcatttttgggtggctgtgcccgtgccggggccacgctaatagctgggtcagggttgcgttccaccagcacttcaggactctccttcacaggagcctttctaggccctttggctcttgggacttcctccggttcctcttccttcctgtttgggacatctcctctccgagctcctcccagtctttcccccttctcaggatcctgggcggcggggctccaagcctcactctcctgttccatccaagagatgagggctggtttggggcctgggaatcctgggagagaacagggatcacagcgcgggcctgagaggccatcgtgggaagatggcattcccctccaggctgagggcaccccctcggagcttatactcaacctggaaggggctgcagtgctgctgcctgaatgaaatggatgcgggtgaaaacactcccgagggggtacctgaagccctgggaacgggaggtggctgctggtgttggtgcaagagtgcgggattagggctcacagtcctctcggnccttctacatcatctcccctgtgaacccagtgaaagaagaggggctcggacccgggctctcaccgagcgcgcccaggtggccgtaggtcttctgcat

SEQ ID NO: 69629 - DNA, 623 bp, Homo sapiens
gtgtgaaattccattggattactgaatcaagtaagccataaaagttaaacccaagtgaaactagataattgtgcaattttcttagatggactccttcttaagttcacctggctctctactggggaccaaatcttatatttctcaattatgtatgcaaactggaatcacctgaaaatacgtttaaagacaaaaattgcagcagagaagccagggaaggggtagagtggattcttccagcacatgagttcacatgactgcttccccttctcaacaggggccagagcctgccaggacctcaaagaggagagcttcagaggcccagctgacatactaggcataggggccaaagagtctaccttgagaaaggtttttatatctcaaatttgacccactcttgaatgacagctctaagaaattggcttctcaggaaactgagacaaacagcatctgtgatgctaccatgccttccttaggaagtcggcctgaagcaaagccggtggaatctgatttctagcgactccgggtgttcgtgttcctgtgatagggcctcccttatgtgtccattggccccattgtggatatactgcagtttagccagaaagacctggatgtggaggttaaag

SEQ ID NO: 69630 - DNA, 428 bp, Homo sapiens
tctgcactctcaggtattccctgctcttactccaaaaagatggacccaggtccgaaggggcactgccactgtggggggcatggccatcctccaggtcactgcgggccaccccctggccatggcccagggccctgcgggccacccccccaccatggtccagggccctgcgggccaccccctggccatggcccagggtcctgcgggccacccccccaccatggtccagggccctgcgggcctccccctggccatggcccaggtcacccaccccctggtccacatcactgaggaagtagaagaaaacaggacacaagatggcaagcctgagagaattgcccagctgacctggaatgaggcctaaaccacaatcttctcttcctaataaacagcctcctagaggccacattctattctttaaaaaaaaaaaa

SEQ ID NO: 69631 - DNA, 738 bp, Homo sapiens
  misc_feature (1)...(738): n = a,t,c or g
caatttgatgtatttgagtcagcattcagaaaatttaaatgattttattcacaaaagatnttctgagtctcctttggcaaattcccaatgatacacgattaattcaataaatttctacaagcaattattcattccaganccataaaacttctaagatggaatttgcaaagcaatgaaacagtcattttacattgtgtactgcactacacagattgctttttatatttatgaagtttaaatgcagggaataagtcaatatttaactaaaaaatggattcaaaactaaccaagtctggcataaggacagaaatttaggtgagtggaatagaaccaagaatctagaaataaacccatacatctatggtaattgatttctaacaaagttgccaagacaattcaatggggaaagaataatcttttctatatatagtgctgggataatatctcatatcaaagaatgaatttggactcctaccttacatgtacctcacatatataaaaattacttcaaactggatcaaagatctaagtacgttaagagctaaactataaactttttacaagaaaacataggtgtaaatctttgtgattttggattagggaatgatttatttgatatgacacttaagcattagcaaccaaagaaaaaaatagataaagtgaacttcaaaatgaaaaacttctgtgtgtcaacagacacaatcacaaaagtgaaaagacaagagaatgggagaaaat

SEQ ID NO: 69632 - DNA, 419 bp, Homo sapiens
aactttcacggggccaaaattttaatcttgatggagtccaacttcagttgacccaagcagaaggaacgaaataataaatattagagcaaaaataagtgaaataaagaccccaaaaccaataaaagaaatcggtcaagcctaaagttggttctgtgagaatagcaacagaattgacagaaacttttagctgggccaaccaaggaaacaagaaagagggtgcagatcactgcagttgggagtgaaagagacactagctgaccttccagagataaaggctgtaaaggaatactacgaacagctgcatgccgaaaattaataacggaggtgaaatgaacaaactcctgaaaagacaaaagctaccaaaactgactcaagagaaacacagacaacctgagtagacccacagaacagcaaagaca

SEQ ID NO: 69633 - DNA, 2369 bp, Homo sapiens
atacagagatgtgatgctggagaactataagaatctagttgcagtagattgggagagtcatattaataccaaatggtcagcacctcagcagaattttttgcaggggaaaacatccagtgtggtggaaatgaattcagagtaaaagggagaatctcaatgaaataaatttggaaaacttctatgaaccatcattaattttcaccaacaggagagaaaccattttggagaggaactgtttgactttaaccaatgtgaaaaagccttgagtgaacactcatgccttaagactcacaggagaacttactttagaaagaaaacctgtgagtgtaatcaatgtgaaaaagccttcagaaaaccctctatctttactttacacaagaaaactgatatcggagaggaacttcctaactgtaatcaatgtgaaacagccttcagccaacatctacatcttgtttgcaagaaaactagccaaaatctacatcttgtttgcaagaaaactcacactcaagagaaaccatataaatgcagtgactgtgaaaaaggcttaccttcctcctcacacctcagagaatgtgtaagaatttatggtggagagagaccatatactcataaggagtatgacgaaaccttttctcattctacagccctttttgtacacatgcaaactcaagatggagaaaaattctatgaatgtaaagcatgtgggaaacccttcactgagtcgtcatatcttactcaacatttaagaactcatagtagagtgttacctatagaacataagaaatttggcaaagcctttgctttttccccagatcttgctaaacatataagacttagaactagaggaaaacactatgtttgtaatgaatgtggcaaagaatttacttgtttctcaaaactcaacattcacataagggttcacactggagaaaaaccgtatgagtgcaacaaatgtgggaaagccttcactgattcatcaggtcttataaaacacaggcgaactcacactggagaaaagccttatgaatgtaaggaatgtgggaaagcttttgctaactcttcacatcttactgtacatatgagaactcacactggtgagaagccttatcaatgtaaggaatgtggaaaagcctttattaattcctcttcctttaaaagtcacatgcagactcatcctggtgtaaaaccctatgactgtcaacagtgtgggaaagccttcattcgatcctcatttcttattcgacatttgagaagtcacagtgcagaaaggccttttgaatgtgaggaatgtgggaaagcctttagatactcctcgcaccttagtcaacataaaagaatacatacaggggagaggccatataaatgtcaaaagtgtgggcaagccttcagtatctcatcaggccttacagtacacatgagaactcacactggtgaacggccctttgaatgtcaggaatgtgggaaagcctttactcggtccacatatcttattcgacatctaagaagtcatagtgtggagaaaccatataaggaatgtgggcaaacctttagtaattcctcatgccttactgaatgtgtgtgaattggggctgatacttggaaagaatgtggtaaagccactacttcctcacacttactgaacatgtactcattcatagtggcaatgtacacagtcataaggaatgtgggaagccttccttggtgtctcagatcttaacaattccaatagaagagaagacatatgaatgtaaggaatgtgggaaaatcttggctccttccataggccttactattcatgtgtctgtgcatcctaggaaacaaactgaacgtaggaaacctgtcgatgcttacatcttactgagtctgtttgaactcatgctggagagaaatgctatgaatgtgaggaaggtggaaaagctttcattattttcctcgggccttactgagcttgtgagcacattggatataaatgcacgtcctctggctgtaaggaatgtgttgaaacctttcactctgccttataccttaatattcagctgtgatctcacaagtgtgaaaaatcttatgaatgtaaaatgtgtggagattcttctttgtttttagcttccactttgggaacatgtcaaagcacacattgagaagtcccatgagtgaaagagatgttggaaagcccttgaacttggtcgttaggaaacatccacactgaagaggaacctgactgtatggaaggtcaaaaaggctgtattaatttacatgcaaaaagtcacactagaggaatgccatatcagaatgcttttggtaaatatacatgttttaaagaggttatatatcattaataaaaatatctagctggtctgaaaaaaaaaaaa

SEQ ID NO: 69634 - DNA, 2784 bp, Homo sapiens; identical to SEQ ID NO: 68890

SEQ ID NO: 69635 - DNA, 444 bp, Homo sapiens; identical to SEQ ID NO: 68891

SEQ ID NO: 69636 - DNA, 775 bp, Homo sapiens
acgggccccagtgcccctgctggagccggcggtgggcacctgcggaagctgattctccccacaccccgatgcaagggaaacgtccgcctggaagcctggtcgctcctgctgctcttgtgaaagcggcccagggagcgctgtgtccctcaggcactgtggttcctctcccgcgcgcagctgtccgatgtgtcactgtctggttcaaagtcaccgaggcctgtgccctggcttctcacgcagcaggcagcacagagatcccggctgcaggctccaggcagccctgacagcagtggagaaaggatggggcggaggtgaaggcacccggctggtgtccccgtcagctcctccctgaaccagccctcaccatgtcaagtgctgccctgccctgcggaagccgcagccagcgccgggccggcccatcttgcgaagcacagttcaggaaaaaggcccaagttccgcaccttctccaaggatctgggcgcagcttcaaggccgccagcgagggccctcagcagggtcagctctggggcctcagccctccctgtccctcctgttcgctccccgcccagctccaacgtcgccccctgggaaatcttcatgccctggcacacgcacgggtgcctccgcgggcttcagtgccggtccacacccttccgctacgccctggcgtggggttcgccaagcgcacaaagccacgtctccccgcgggtgagcaccccagctgaagaggcaccacgcactgctgtgagctatcagcttgtgcagtttcagcgcc

SEQ ID NO: 69637 - DNA, 691 bp, Homo sapiens; identical to SEQ ID NO: 68893

SEQ ID NO: 69638 - DNA, 670 bp, Homo sapiens; identical to SEQ ID NO: 68894

SEQ ID NO: 69639 - DNA, 522 bp, Homo sapiens
atgtctggccaaataatggtttttaatataatgattattcccagaaataaaggttatttcagaatgataaaggggtcaaataatcaagaggacaaaactgtaaatgtttctgcatctaataacagtgcctcaaaatacaggaagcataaacagacagaattttaaggagaaagagaacaaacccataacaatcattgcagacttcaacactcctttctcagtaatcactagaacaagcagacaggaaatcagcaaggatagggaagaccttaacacgatcaaccaacttgacctaattattatttatgaaacactttacctaaaggcagcagaacacatctttcctattacaaactgaacattgacctaaacaaacaatgtttcaggccatatacaaacctctacatttttttttaattcatcataacgagtatgttccctaaccataatggaattaaattagaaaccaacaacaaagatgtctgggaaatccctaaacccacgcgtccgcggacgcgtggg

SEQ ID NO: 69640 - DNA, 1629 bp, Homo sapiens; identical to SEQ ID NO: 68896

SEQ ID NO: 69641 - DNA, 732 bp, Homo sapiens; identical to SEQ ID NO: 68897

SEQ ID NO: 69642 - DNA, 530 bp, Homo sapiens
  misc_feature (1)...(530): n = a,t,c or g
tgtgactgcctggcttttgagtttgtgtgataacatgtgagtgtgtccatctggctgagggaatcaaagtgtccacggcnatctagcagtgtgtgacgggtcctgagtgggtgaacacgttgacatttccaagtatgtcagtgtttgtatgaatgggtctgtgaatgtgtgggggttggcttcccggagcacagtgggtctgtgcgcctctgtgagtacacgtgtgtgtactacatgtgtgtgtccgtgtctgtgtctatgtatgggcagattaatcataatttctgttggtgaatgtgggtctgccagtggtgcctgagtgtacatgtgtctgtggtatgtgctgtgcctgcgtgcctggatccgagtgtgcatgtgtctatgtgtgtgtccacacgtgtatggcagtgagagagactgacccagtgttgcctgatgtctgtgaaatccacgcagctcctcgtttaactccatcttgccacttgtttggggtccacaccactttccttcgaattccaccacacggacta

SEQ ID NO: 69643 - DNA, 775 bp, Homo sapiens; identical to SEQ ID NO: 68899

SEQ ID NO: 69644 - DNA, 1699 bp, Homo sapiens
ttttttttttttaaataaagcgtttattgattagtagaagcatgaacagtgtgcataatattttcaatacaatatcagggagggatgatgggaacccctcaaaaggcactagaggcgcagatcttcgggacaagagggaagagatgcgccagagaccagggctggggcagctgggggtccctgagtgccaggcgccaccacacgtcctgtgggtcaaggcccctcctctggggagcaggtctacggcacggaggatgcagggctgggaggggaccccacctcggggacccaaaaggagtccatttcttgccctgccccccgcaaagcagcatggggagggggccctgggggttccttggggtggggggtttcccagggcctgggcccattcctggcttggacccttgtcccagggaacaagaagcttgaggagggacgaacagccaggcccaagagtgatttacaaaggacattccaaagaagggatttggttttttcagaggggggtgacttggtgactgagaggcagcagaggccaaagcctgaccccagaccctcagggagggcccacccaacctgtacccctcaggagccccgtccggctccccaggcaaccactgaggacctcggggtggcctgtagaagacagaacccagccccattacaccccttgctgccgctccatccccaaccaccagagggacagggaccagagggagacctgtgggccaggcgggcaggagggaggcaggctggggccgggagaaggggatacacaggcccataaaacctcaggctccccataaccctcactcagccatctcactcactcactcactcccagcatcccccaggatgggggtcccctccttcactcaggacacttcccctccgcagacctgcacgttctgggcctttctcatttcaccccaggcctgcccaccccatgaggcaccccctaaatctcatctctccacccagcacccccagcctggctccagcctgaagaccccctccttccccttccctccagaacagtggggaaagcgaggctcggtccacccctaactgcggaaggagcagggccaggagggcagcagtgctccctctcccggtcctggcccagccagctcctgggtgagtgggcgggaacccactgggctcacaccagctttcacctccctctctccaggaaggatggcagcacccatgaggggatggaggccacagaaggacaggaagggaggggctttccagccccccagcagtgtccagcccttggcacaagcaggaaaaccccaaaaccagcccctgcatttgagatcatcccacagaagagaaaacagggagcaagaaagtgttgactgaacccaataaagtgactcaggtgggcccgctccctggcggtgccacacagccctgccccgcctccacccacaaggcacagaccagggtgccctccccagagctgagcctgcctgggtccggaagggaacggcctgtgccatgtgcagcagtcagggacccactggcctagaactcagtctgcacccctgcactgtcctcggtggtggtgtgaagggcggggtgactactggggctggacacctgctctccagtctccagatcgataagcttggggggaacaaggtccacagcctttccaggcaggaggtgggcagaatttccgacgctctat

SEQ ID NO: 69645 - DNA, 787 bp, Homo sapiens; identical to SEQ ID NO: 68902

SEQ ID NO: 69646 - DNA, 1438 bp, Homo sapiens
  misc_feature (1)...(1438): n = a,t,c or g
ttttttttttttgggtgatagaaagtntttctttatttgaatgtcattccacctgcactgaagcttaaacccagcagcagcagaaggggtcaggaccaaaataaatgttaccaaattagacaatgaacagcgaggacacactcagacaaaacttactaatggggtatagacaacaccaagctatcctaacagcacacagcacaggccctcggaggcctgcccatcagagctctgcggaaggctcccttgttccctgttcaggaaactccagtcccacccaaaggttagctgtgggccaggcaggggcctgcagaagtttctggtgctgggaagatcccagcttctccaaagacagggtttccctttctctttctcagttcacactggaagctggagaaaggttattccccgtgtgcccaagcaggatgctcaaaaggccagggactctccccacagccttatctaaaagttctcatcatcttgggctatcaggcctgaaaaggatcttgattctttggtccctcacccccctcaaggaaagttttcccttccatgggtaccggtccccaaagacgaaagttttcatagccccggttcccagaaggactcaactgaccagactgtgggccagggactgaaccacccctaggctgtggctgccgtggcctctcctgagtccccagatcaggcagagaaaagcgggcaatggcagacccctgatcacagttaggggggtcacagttagggggggacttctcttgggacctgaagccggaaggctctaggttggggcccaacaaggccctcctggggtcagaaacaggcactgatctcctctgcttacctcctcctgaaggctaaagccagatcgcccgacgagagcagaggcaaaccacaaagcccccttcccatgatgtctttattgccccaggagggccatcagggcctcacctggggcccccactggagcacctgccacctgccccatccacacctctgcagaacccagggccccagtctatggtttggtccccactctgacttctaccccttgcctgtgtcaccctggggttcccgcagacttcagcccacacaactctgccttcctgactccaaactccctggtgcatctccccctggctctgccaagatggcagctggccaggtgcggtggaatgggaatgttgccaggctaccccaccagggaactagcctccctcctctccacccggcgctgacccactcctaagtcagctggacccactacgtcctctgaagtggcttccttcactccagttcttcccaaaaggatgcggccttggctgcctgtgccccgggcctccagcctctgaaaggtcagttctatcccccgcaccagggcacaggtttggtgggtgtccttggggaacaaggtgtggcaaggacacctggtggcagg

SEQ ID NO: 69647 - DNA, 839 bp, Homo sapiens
gtagcacaatacttgatgttagatttaattacattaaatgctctttggacaaaatgctccagttaaaagacaaggtgtgttttatatgctattaacaaaaaaaaaaaatgaaattaaaaatacacaatttacaatagactaaaagaaacataaaatatttacaaatcaaacttaagataagcaagaccacaatggacaaaaatataaaatcctattggtaaaccttaaagaagacccaaatggaaagagaggtaaaccatgttcatgaatcagaaaactcaatattgtaaagacgtcaattttcccaaaactgattgatagctataataaattcccaaactatcaagtgcatcattgttgttggaattgacaagctgattttaaaacttatatgggagaaaaaccttacatgaaaatacaaagagccagaatagtcaagacactctcaaagaagaaaaataaggtggaaaagacttactttatcagatctcaatacataattgataataatgaagacagcttgatattggcacaagaacagacagactaatggaacagaggaaagaatccaacaacagatctacatatgtcatatgtggacatatgacagaggtggcattgcagatgggcgcagaaagttagattacaaacaatgataggacaggtgtgtaaccctatggagagaaaaaaatgaaagtgaatccttacctcacaccatatgcaaaaaaccaaatctaggtgaattaaaggcctaaatatgaaatttacatttataaggatttcagaatataatctaagagactatcttcacggacgggtgggtcgacccggaaatgaca

SEQ ID NO: 69648 - DNA, 378 bp, Homo sapiens; identical to SEQ ID NO: 68905

SEQ ID NO: 69649 - DNA, 520 bp, Homo sapiens
aatgtaaacacacctgacacaggagccccagttattaaagtaagagttattcgagcaacagacagagacagacaataataggtggggactccaacacccactttcagcaacagacacaccctctaggcagaaaagtaacagaccagactgactccaagagaagtcaaagggacctcacaggtaattacagaacatttcacccaccaactgcagaacgtgcattcttctcatcagctcacagaacattctccaggatagaccacattttaggccacaaaacaaatctcaaaagagcatttaaaaagtgaaaatcatagcaagtatcttctcagaccaaagagaaacattggaaactctccaggtacatggtatataaataatggtaatggtcagtgaaaaaatcaaaaggacaaaaacatttcttggaaaaaaaaggaaacgagagaaaaaaatgcatatagtaggtgtttttgaagtaaaaaatacagagcaataaaattcaaagatacaatgaaagaaa

SEQ ID NO: 69650 - DNA, 716 bp, Homo sapiens
cctctgccccatgggactcgggccccttggctcgtcctggccagatgcctccaaggggtctgtacgctctcctcgcacctctggagagccccttctcgccctgccccagcccctcttgaggtcctggccgcctggcttctctgcttcctatcagcaagagctccttccgtgcccagcctccacagtgcccttgttagggtgccggacccgggcgccacctgggggcaggtctcagcttcctctcacgctcctccggcagttccccatgcagatggccacgcctgggcccctcctcctagtctgtgaatgtggtctgtcccatggcacagccttgggctcccacatgcccctcagggccttaccaaccccacatgtttaagtgctgcccccttcggggatggctcacttgctgggatcgccatcctccctttgttcaggccggacccctcaaagccacctctgactcccacagcagggagcctgtcagcccggtgctctgccttcagaccctgagccagccctccccagggccccctgcacccatctcctcccaccacagtagtgaccagcagcccggcctgcacctccagtcactgcccacgaagcagcccgaggcaggcgcagggaaggagtgggctctgactcctcagccctcctgggaggagggaggcctgacaccacactcagttctaatactcctggcccggacgcgtggg

SEQ ID NO: 69651 - DNA, 678 bp, Homo sapiens; identical to SEQ ID NO: 68908
  misc_feature (1)...(678): n = a,t,c or g

SEQ ID NO: 69652 - DNA, 702 bp, Homo sapiens; identical to SEQ ID NO: 68909
  misc_feature (1)...(702): n = a,t,c or g

SEQ ID NO: 69653 - DNA, 1465 bp, Homo sapiens; identical to SEQ ID NO: 68910

SEQ ID NO: 69654 - DNA, 1297 bp, Homo sapiens; identical to SEQ ID NO: 68911

SEQ ID NO: 69655 - DNA, 1328 bp, Homo sapiens
tcctaaagtgctgggattacaggtgtgagccaccgtgcctggcggacatagtcttttacaaatcctgttagtaaacgtcacatcattcacaaactcatcctttcagcaaacactgagcatctatcctgctagccacagtgccaagcggtttaccttgatccaagctatcgtctatttcttggaatctcactcttcgcttagatggtttgtgttgcatttgggcaggatgatctcctacagtatcattcctcttctttaatatggagaccaatccttcagtaggaacaacctctgcaatctctatccttttggcaagatcatcaagagaaagacagctctcatcagaaggcagattctcctggagactataggatgcttcttcaggagagagatcttgaaggagatcggagtcgtcgtcttggttatcttcataggaaagggaatcttcagtatcttttaaacatccttttaaaaggctgttcaaatagtcttctgtttctttgttgagttggtcgtctttatctcccttttcctctggggccatacacacctctggaagcagtatgcctaagtcagatatttgattatttccacagagcacattctcagaaccgtctgagtcagcctgcgcctgtggtgattttccatcactgtctgtaagatcaggctgctgcagctcatttaattcattgttctcaagttggtctgtgggcaacgcctcagaagcatcccgaagtggcaaacggagttctttcctctgagcctgtgaatatttaccctcagaaatcaatgcaggaggtatacggtcacagcctggtgaaatcaacggctctgtctttgacttgctggaaagaaacaccttagggtcttcagcaatgccctctattctggccacatcctggcaggcctctgtttgagccagctgcaagcgactgtcatcctcacaagcatcctcagaagagtctggcccagacgggctccctgctgtctcggaggactgggtgtggagcgctaacgtggcttcagcgctgcagagcagctcctccatgtggtcctttcctgcagttaccgaaaggcttggggaatctgtttgcacgtccatctgatgacagcagggactgctccccaggggctccactgtatgttggctttctttacttgactctgtgccgagacaagttttactctctaaagatgaagaaaaataaattgttaaaaattcaaaacaacactttgtataggaaggaaaagaagggacatatgaatatgtgtaatacagcaatattctaaccctttcaaatggaaatctgtctgttgcataatagtgt

SEQ ID NO: 69656 - DNA, 444 bp, Homo sapiens
gcaatgacaagatcccactgtacagctattaagatggccaaaatccagaacactgacaacatcaaatgctgacggagatgcagagcagcaggaactctcattccctgctcgtttgaatacaaaatggtacagtcactctggaagacaggttggtagtttctcagaagactcctggcatatgatccagcaattgtgctctttggtcgttacgtaaataagttgaaaacgtctatccacaaaaaacctgcgcacagatgtttgtagcagctttactcataatttccaaaccttgtaagcaaccaagatatccttcagtaggtgagtgcataaactgtggtgcattcagacaatagaatatgcagtgctaaaatgaagtgcgctatcgagccacaaaaacctaaccaaagcaacatggaggaaccttacatgcatatgttctaccag

SEQ ID NO: 69657 - DNA, 2320 bp, Homo sapiens
gcggccgcagaagctgcggttgaagccgtgggcgcagatgtcaggcactgccggtgccgtcgtgccgtggtacagcacctgctccaccgggcgccgctcgcatcgctgcagcaggcgctcccggtacagctcatactgctgctgcagcagcgggtgcgacacgcgctccacacgaacgacgcggatgctgctgcgggcagcgtccagggtgtcgtagaaggcccgcaccacctcctggaactccccggtgttctctgccagacgctccaggttgttccagggccccttcagcgtctgccccgccaaggtagggcctgaagctgccaagggaaaggccaaactctgatcccaggggccagccagaagtgccaccaagtggcgggcagcacgggcagggtgggccccgaagccacggaggatggtgcagtcaccacgcagggcaacactcacaccatggcaccgctccaggcgagcacgcagctctgcaggcagtgtgcggcgccagggccccaccgtctcctcctggacgtggacctccaaggcagccctgagcgcccggtccagctcctccacatcctgctcaaaggccgagtgcaccaccagctgggccttgccatcagtccccccatctgggggctcttctgcctccaacgggggctgctccagcagggagagggttagggcttgccgcagggcagcagcctcctcctgctcagccacctgaccttgaggctccagtgaccggtggagggccagctgcagagcggcctcctcctccagccacctgggtgccacagtgctgggggccacaggctcctcctcctcatgccctggggtcacctcctcctctggctgctcctgaggcccttcctcctccagctcccgaggcagccagtcctccccgtctaggtctaggccctccagggtggccagcagttctcggacctcctccaggctcacgtcctcctggtcaccacctgtactgtctggggtccacagggtgtgggcgttgccagggagcactgggagggcctcggtagggtccacctcttcaaggcctgtgtccaacgtggctgtggccaggcgctctgtcccaaagacacactggaactgagcctccagcccctggagaaggtgctgcccttctgggcccaggagaaacctggcgctgcccgggtgctccaggcacaacacatggcagctaatgctgcccagcaggctccgcagaaactcctcagccgcctggcaggaagcctgggctccacagagccgaaagccagtcatatccggtccttcaagtggcaagagagcgacgtctcccaggcccgcaagaaggtcctcatggtagagctgcaggaagcgcatcgcccctggctccatcaatagcaccatctccaccaggccctcctgccctgccagcttcacacatcctgggctcacaggccctgccttctccagagaccccatggtgatctccatgggacccaccagcccctcttgctctggtgagtccatggcaatttccaccaggccctcctgccccagcaaccccttagaggtctccactgggcctgcagaccccacaggccccaggctcatgggcccctcctgttcctgcaaccccacaggcctcaggcttaccagcccctcatgttccagagaccccatgggcatcgagctgacttgctctgcctgtcccagagaccccatgggacctgtcctcagagaggtccctgactgccctggttcctggccagagcctgttgtcataatccctctaccctgcaccatgggacctgtcctcagagaggcccctgactgccctggttcctcgccagagcccattgtcacagtccctgcaccctgcagagccgtcaccaaccctccggtcctcaggagagcatgcttggtagccctaggcccctgggtggacgggtggtcccctccactggtgttctcagccagctcctcgggctccaggatgtcgtagtgggggacaaggctcagctctgagccctgcaaccggtgctcctgctgcaacactcgttctgccacttgccactgctggaaggaggcaacagtgcccaggggcccgggtaggcgttgcaggtcctccaggggccccccaccactgcggcgctcattctccaggtacaactccagcaacagcaggtccacagaggcaccatcccccaccacacgcaccgctcgggcctggggaacccgggccagggacaccaaggtcccctccaggcccagattctgggcctgctcctccaggacaccggacgcgtgggtcgacaaggaattcggggatcgc

SEQ ID NO: 69658 - DNA, 708 bp, Homo sapiens; identical to SEQ ID NO: 68915

SEQ ID NO: 69659 - DNA, 417 bp, Homo sapiens
ttttttttttgagatggagtctcgctctgtcacccaggctggagtgcagtggcgcgatctcagctcactgcaagctccgcctcctgggttcacgccattctcctgcctcagcctcccgagtagctgggactacaggcacccgccaccacgcctggctaattttttgtatttttagtagagacagggtttcaccatgttagccaggatggtctcgatctcctgacctcgtgatccgccagccgtggcctcccaaagtgctgggactacacgtgtgagccaccatgcccggccttgtttttgtttttgccaagtttcaccatgttgcccaggatatcctcaaactcctgggctcaagtgatttttcagcctcagcctcctgagtagctgggaatagaagagcatgccactgtgtctggc

SEQ ID NO: 69660 - DNA, 706 bp, Homo sapiens; identical to SEQ ID NO: 68917

SEQ ID NO: 69661 - DNA, 438 bp, Homo sapiens; identical to SEQ ID NO: 68918

SEQ ID NO: 69662 - DNA, 382 bp, Homo sapiens
acaccatgatcaagggatttatcccaggaatgcaagggttcaacatacaaaaatcaatcaatgtaatatgccatgttaatcgaataaagggggaaagccacaatatcatccaaattgatgcagaacattttttttgacagattccaacattcatgataaaaatattcaacatccttggaacagaaactccctcaactagataagggacatctatgaaaaacccattgcttaacatcatatttactggtgaaagaccaaatggcttccccactaataacaggaacaagactagactgcaattaccaaataaggtatctggattggaatggaagaagtaaaactatctctattgaaaaatgacatatccggacgcgtgggtcga

SEQ ID NO: 69663 - DNA, 1172 bp, Homo sapiens
aggccgcacttactgggtgcactggcacatgctggagatcctgggccctgaggaagccactgaggataaggcttcagcagctgtggagaagggggcaggggctactgtgttgggcacaggtgagcctaagaggggacatggatagcatgtctctgaacagaggattagtgactgggatgaagccacttctgaccaggagcagccctaggggtccagaaatagaccccattcctgaggggtgctgatgcccgccatgcctgtgtcctcagcatttccctcctgggactggaatcctatggatgggctgtaccctttgccgtacctccagcccgaacctcagaagaatgagagagtgggatatctgacccaggctgaatggtgggagctgcttttctttatcaaaaagttggacttgtgtgagcagcagccaattttccagaatctttggaagaacctggatgagaccctgggtgaaaaggccctaggtgagatctctgtgtccgtggaaatggccgagagtctgctgcaggttctcagtagtcgatttgagggcagcactctcaatgacctgctcaactcccagatctacaccaagtatgggctgctgtctaatgaaccaagcagctcgtctacttcacgaaatcactcctgtaccccagatccagaagaggagtccaagtcggaggccagcttctcagaggaagagactgagtccctcaaagcaaaggccgaggcccctaagacagaggccgagcccaccaagacaaggaccgagacccccatggcacagagtgattctcagctgtttaaccagcttctggtgactgaggggatgaccctgcccactgagatgaaggaggcagccagtgaaatggccagagccttgcggggtcccggtcctcgcagctccctggatcagcatgtggcagcggtcgtggccactgtgcagatatccagcttggacacaaacctgcagctttcagggctctctgccctctctcaggctgtggaggaggtcactgagcgggaccaccctctggtccgtcctgacagatcgctgagagagaagctagtgaagatgctggtggagctgctgaccaaccaggtgggagagaagatggtggtcgtgcaggccctgcgcctcctttacctgctcatgaccaagcacgagt

SEQ ID NO: 69664 - DNA, 419 bp, Homo sapiens; identical to SEQ ID NO: 68922

SEQ ID NO: 69665 - DNA, 349 bp, Homo sapiens; identical to SEQ ID NO: 68923

SEQ ID NO: 69666 - DNA, 432 bp, Homo sapiens; identical to SEQ ID NO: 68924

SEQ ID NO: 69667 - DNA, 904 bp, Homo sapiens
cagagagagaggtgcttgtgggattctgctggctggagccaggaggtaagtgtgaacagggaggccaaagatgaaagttatctgaaagagcccgtaccccctataaacacggcagaggaatgtcttaagagccaccaacagtaattccctttccggatgttaacaggttatttgtatcttatgtggcgtcgtaaagcattctggagtggcacacaacgtcatccccttcccggtggtctgaagaggaggaggagaccagggaggggtccttggccagcccctggcggccaaggggtgggtccttctgctctatagaaggcaggaagcccgccagctaaccgcccgggtcagggggagcaggcctgatctctcccaagcctgtgaccgaggtcctgcctgatgtccaaggggcccctgtgccagtacccccacttcccacgccccccagccttcctcacctccagaatcagccgcccaggtgcagcactatctcctttctttttcttggaagccgtctcaggggcctgagtgacgggcctgaccgtccccgctaccgcctgctgccatgcgaccagatggctgacccggcccggcttctcagggcccagaccagcctggcctcgtgcccacctgcttcgctcccaacctcaccaccaggcaagggtttccagaaaaccgagacacgcaaacacccaccaccacgacaacaacacaaaccaaagtgcactgcgaaccgccctttggcctccttcttgtaggtgccttgaaacttcaatgttgagatgaatgtgattaactacttggtcctattttctgtttgtctattttcatagaaaatgtccaagtccacttgccttgttctttcttgaaataaatagaaagatttaactttaaaaaaaaaaaa

SEQ ID NO: 69668 - DNA, 317 bp, Homo sapiens; identical to SEQ ID NO: 68926

SEQ ID NO: 69669 - DNA, 1120 bp, Homo sapiens
cacgaggcggttgttgccacacaagatgggctgcaggccggcccagagctgtacgaagtctgagcactggccctacagcgtgtccggggtggccagtgctgcagcagagggtgcgccctcctcagcggtggcgttggggcccatgactgcccctgccccagtgccattggccgccccacccgcaccactggctgggggtccgggggtccggccagtgcaggcaccctggggcagtagcagggccagggccgacaggacatccacatcctgcagaaccttctgggcatccagcaggtcccccagaagcgcctgcagcctccgtgggggtggcgcctgtggcgaggagtccgagccgttgggggcatccaggcccagctgctgggagaccttggccacgtccagctggttccggagctcagcagacagcccagagaagcgcctggcacgcgcagcagcctgcccactgcagacagcatcccggtagccctgcagggctcccttctgactctcaggcacagtgaggatccggcccagctcccccgagcccggcgtgcaggtgagctgctccaggagggcaggagccagcagcagctcctccatccggaacaggggattgccccctaggcggctccagggctcctgacccttgtggaggccagactgtgaatccagggcagatgagggaccaaagagcaggtggtagacctcgggcgggtccacacgggcggccaagagtgcttgggccgtgctattgggcagcgacaagttttgcgtcaggaaacgccagagctcctgcgggtttctggccaccgagtccagagagaaggaagacactgtggatctgtccaggtggctccccgaggtgcccgggcccgcactgagggcctccagatgctggcgtagggcctcgagctctgagcccaggctgggccgcgctgggtcaaacaggttgccttcctccaccacgcggtccaggcgctcaagcagctgcgtgaccgtggagttggcgtactgcaggaagccgaactcgtctcgctggccgtccgggcacagcgattgcatgacaggcaggatgccggcagacgtcaggggcgccgctgtgtagaaggcttccttcacg

SEQ ID NO: 69670 - DNA, 885 bp, Homo sapiens; identical to SEQ ID NO: 68928

SEQ ID NO: 69671 - DNA, 655 bp, Homo sapiens; identical to SEQ ID NO: 68929

SEQ ID NO: 69672 - DNA, 2616 bp, Homo sapiens; identical to SEQ ID NO: 68931

SEQ ID NO: 69673 - DNA, 1445 bp, Homo sapiens
  misc_feature (1)...(1445): n = a,t,c or g
tttcgtcaggcggctgcggctgctacggcggcgcatgctaggggattctgccgggtagaagagctgggcctggaacccagccctgaggacatcctgcggcccaggggcaagtgacacctgctgagagaggcccaggatggtggaggctgaggaactggcacagctgcggctgctcaatctggagctcctgaggcagctgtgggtggggcaggatgctgtgcggcggtcagtggccagggcagcctcggagtcaagcctggaatccagcagcagctacaactcagagactccatcgaccccagagacgtcctcaacttccttgagcacctcctgcccacggggccggtcctccgtgtggggcccaccagatgcctgtcgaggggacctccgtgatgtggccagatcgggggtggcctctctcccacctgccaaatgccagcaccaggagtccctgggccgaccgagaccccactcagcaccctcgctgggcacctcaagcctgagggacccagagccctcagggaggctgggtgatccaggaccccaggaggcacagaccccgaggtccatcctggctcaacagagcaagctgtccaagcccagggtgaccttctctgaggagtctgcagttcctgagaggagctggcgcctcaggccatacctgggctatgactggattgcagggtctctggacaccagctcttccatcaccagccagcctgaggccttcttctccaagctgcaggagtttcgggaaaccaacaaggaggagtgtatctgcagccatcctgaaccccagttgccaggcctgcgtgagagcagtggcagcggcgtggaggaagaccatgaatgcgtgtactgttaccgtgtcaaccggcgcctgttcccggtgcctgtggatcccggtaccccctgccgcctgtgcaggacaccgcgagaccagcagggccctgggaccctggcgcagccagcgcacgtcagggtgagcatcccgctgtcgatcctggagcccccgcaccggtaccacatccaccggcgaaagagctttgacgcctctgacacactggccctgcccttgtgagcagccacgtggggctggatggtgatgagggcggggctggctcagactggcccagatccccagggagggtcacagagcgagactgggctcgacaagggtgagcgcccaagtctctggagcacagcctgggcctcttccatcacccacacctgtacctaagggaggtaggacccccgctccacgtaccccggtgcttccagggtgatctgcctgcaggctggcatgacatgaatgggtcctgtttattgcgctcttgtgtactgcaggcacagtccttagggggcttatctcatggagcccccacagcagccaggagtgtaggcactgctgtacccccaccctgcaggtggngagaccgaagcag

SEQ ID NO: 69674 - DNA, 567 bp, Homo sapiens; identical to SEQ ID NO: 68933

SEQ ID NO: 69675 - DNA, 865 bp, Homo sapiens
ctgggtctgtcatacgcacaccgtcagtacaaggcttgggtgggaaggggattcgtggtcagttgcccctggggccacaggcgcctctccctgatttcctctctccccacctcaatgtttacaatacgcggtactggggtcttctcactgctcactgctgtatctgaggatgggaccctcctctccttcctcgcagagcccctcatcccctcccctctggcacagcaataccaatagctcagcagctgcagccacccagacacggtgcttccccagtgatcctgcaatccccatggcagcccagagggtgggcccaggaggttcctgcttttcagaggcccctgcttcccttggctttctgcgtctggctcctggttgggggtgcacaggctcaccacccccatggaaggaaggacctccccctccaggtgtcccctcccatggcccctgctgccctgagaacctgagcatgatgaggagggggaagctgaaggcgtgggagcccaggtagtggagggcacgctggccaatgggcgggagcccaagggccaccagctccgggaccacttgccagggtgctgagtagttggtgaagaggccgcagtcccaggaggagtggatgctggcgagagatggccaagtggggctggcatcagggtcctgggtgagaaactgcccctgccagcctctgggtgcccccctcctcttcccctcacctgctgaccacatagcccaggggcactgcagccagaagcaggcccaggaggagcactagctggaagaagaaggtggagctggaggcacggaagggccgcgaagatgccctggagttcttcaggagggtgtactgggggcgcaagcaata

SEQ ID NO: 69676 - DNA, 628 bp, Homo sapiens; identical to SEQ ID NO: 68935

SEQ ID NO: 69677 - DNA, 1060 bp, Homo sapiens; identical to SEQ ID NO: 68936

SEQ ID NO: 69678 - DNA, 606 bp, Homo sapiens
cctatctctcctctttggggagaaaaatgtcctgtgatgcttacttggaaccctgagcttcaacgatggctcatcttgtacttgaaagatttagcacaccaaacatctccacctgtcccccagtcccctggatttcaggagcaaacccgtcatcctgcaactccttccagaagtcaccagtttcccacgcacccctcttcactactcaagagctccccaccccttccaccatctctcctcagttcacggctccatggacccctcaattcctcaaagaatttccccatctctttgcaccaagactgagaatcccctagaaacaagctggccctgccctggtctcccccatctccaacggcaggtatactcatcccaacatactctctttccggaccagcctcgaccccggtaacttcccggccttctccacttcggaccctacccaacattttctggcctcctcgcccaagtctccccacgtcccaagcagtcatcccaagcttgttccaaaagcctcctcttccgcaccagctgcttgggcaccacggttactccggcccgcatctcagccccctctgcatgtcctcagacccttcacctgcctcc

SEQ ID NO: 69679 - DNA, 921 bp, Homo sapiens; identical to SEQ ID NO: 68938

SEQ ID NO: 69680 - DNA, 893 bp, Homo sapiens
tgtcgactagtgattttcccgggtcgacgatttcgtatgaggacaggaattctgtcctgctcaccaccatgtcccctggccaataacagtgaatggtatctagtaggcctcaagaagtatttgttaaacaaaaatgaagagatgtggccggcacggggagagtacaaatctacataaaacaataaaacgaggaactgaaaaaaggaaagaaaaccacgctgagatgtacaagctgacaggactcaaagctatcatgccagctcggaggtctggtggacatttttcagggtggacaggtgcttcacacctatctaagcgcatagagcccttccaggaagaagaaaatccacagagaggtgtccagatagctgtgagcagctcccagaaaagtggacacaatcaccaccctaacagaaacgtggcccaggtcgggagaaaaaaacaatacaccatacatctcggcccagatgaaaaattacacgaatccccagcacaatcaaaccaagccaccaccttcagcctgacacgtaagagcagtctcctttagcctggctgggcagtcgcctgcaacccagcaaacccttcccacgcccaacacttttccctcgcaaagaccaccgccaccgccggtccgaggggcgagggaacggggggaacagcctgacgatcagctttctccacccccgcccgagcccagtccccttcaaagcgcaaacgtttcccattctcgcctgtctccgaggcccggacccctgccccgagcccctcctgcggtccctcactcacgtgtagatgatagccatgaaatgcatcagccacagcaccaagaagaggacgaacccgaagacggccattccctcctgcctcccgtcgacccaggaattccggccgag

SEQ ID NO: 69681 - DNA, 606 bp, Homo sapiens; identical to SEQ ID NO: 68940

SEQ ID NO: 69682 - DNA, 1923 bp, Homo sapiens; identical to SEQ ID NO: 68941

SEQ ID NO: 69683 - DNA, 1490 bp, Homo sapiens
  misc_feature (1)...(1490): n = a,t,c or g
ttttgagggggcctccacattttattagggatacggcagaagcagaggcaggaagcagagcagccgcattttaaacaacacataaattaaccgcagtgcggggctgggggctgggggctgggccaggcgcttcaatatataaaaacaacaacaaaaaagacggacgaacagaccccaaaggcatggggcagaggagggcagcaccatccagacagcagggaggaccagggcagagagagaaggcaacttgtccccctggcccccaaactccaccagcacgggggcctccaggagggcctcgcgagggcttcggggcagaggagcagccgggttgggcagagatggcacggctggtgggcaggaagcccagcaccacaagatggctcagcctgaagtagggactggagggctgcgacacagtggcctttaacccccagtcccttccaggaagagccttactctgggtgagagaagggaccaagggcggggtctctccctgagctgagcacggtcatctcatccgccgaagcagtgggtggtggggtgtgccagggacccccttttcaccttcttatccacctgcctccttggtcccttcagggaggggtccccgtctccgggggctgggcatgaagagagccggtccagtctgtggtccccagctccagcggggccgtggcgtggcgcagcccctcagcccntgactcccacaagaggacagcgagtcgtagagtgagtcactgagagactccgaggtctccagccctggggggcccccgctggccactctgccttcctcggccatgtccgaagtgctgggggtgcggctacccccgaaaggtgggccctggggcgtaggggacgggcggctgggctcctggcttcgcttccggtccacgggcagggcctgggaaaggaggggcagctcgggaggaagctcctctccacctttcggcccagcctcagaggcactgagctctgaggggcgtctgtgcacctgatggggggctgctccagagggggcccaaggtggggtatacttcagaggaaccaggctggaggtacaactgagaacagtcctacaaggttctggggaaggacagaaacctttccccacgagagaagtgcaaggagggcagtgtggagggccgctcacagggcatcccaggggtcctcctcccagagggtgcagcactgagactgtgcgacacacaggccgtaccttactggagaaactggtctccccacatcactccctcctgctcccgagtcctttccctttcctctgctgcaattctcaccatgggggtcctgggcagcccctccagttgtcggggtgggcacatgagagggtccgaggagctgccggctgccctagtattggggaaggtccagttcttggccagctggacaggaggggtggggcctgggtcttcacagggatcatcaggacaggtctcatggccccggcgcgcccgggaattacgggg

SEQ ID NO: 69684 - DNA, 374 bp, Homo sapiens; identical to SEQ ID NO: 68943

SEQ ID NO: 69685 - DNA, 2143 bp, Homo sapiens; identical to SEQ ID NO: 68944
  misc_feature (1)...(2143): n = a,t,c or g

SEQ ID NO: 69686 - DNA, 950 bp, Homo sapiens; identical to SEQ ID NO: 68945
  misc_feature (1)...(950): n = a,t,c or g

SEQ ID NO: 69687 - DNA, 575 bp, Homo sapiens; identical to SEQ ID NO: 68946

SEQ ID NO: 69688 - DNA, 1904 bp, Homo sapiens; identical to SEQ ID NO: 68947

SEQ ID NO: 69689 - DNA, 421 bp, Homo sapiens; identical to SEQ ID NO: 68948
  misc_feature (1)...(421): n = a,t,c or g

SEQ ID NO: 69690 - DNA, 415 bp, Homo sapiens
tcttcttatcaaagatcattaaaatttaggcctaaggggaccctgcctcaaggaaattcccaaagaatcaaaagacccagaagtcttagtttgggaaaaatatgtggctgatactgtggtggtattacaaaacaataaatttggaactattatagactgggcccctcaaaaccaattatattatggttgtatgggccagactcactcatgttcacagaccccatctgtctggcccactaatccggcctatgatagtgatttaactgaaaggctagaccaggtttatagaaggctagaatcaccctatccatggaaatggggtgaaaaggggatttcatcacctcaaccaaagttagttagtcctgtaactgctccaaaacatccagcattatgaaagcttactgtggccacgata

SEQ ID NO: 69691 - DNA, 831 bp, Homo sapiens; identical to SEQ ID NO: 68950
  misc_feature (1)...(831): n = a,t,c or g

SEQ ID NO: 69692 - DNA, 823 bp, Homo sapiens; identical to SEQ ID NO: 68951

SEQ ID NO: 69693 - DNA, 473 bp, Homo sapiens
  misc_feature (1)...(473): n = a,t,c or g
caatggagtaaaattgtgaattaattccaaaaggatccttcaaaagtaaacaaatacatggaaattaaataatctgctcctgaatgatctttcagttaacaaagatatcaagatggaaattaaaaaattatttgaactgaacaataatagtgacacaacctatcaaaacctctgggatatagcaaaagcagtgctaagaggaaagtatacagcattaaatgtgtacaccaaaaagtctgaaagagcacaaacagacaacataaggtcacacctcaaggnnnnnnnnnnnnnnnnnnnnnnnnnnnnnnnnnnnnnnnnnnnnnnnnnnnnnnnnnnnnnnnnnnnnnnnnnaaatgaaagtgaatcaaacaaacaaaaaacgcaaaaagtaagtgaaacaaagagctggttcttgaaaagataaataaaactgatagaccatgaacgaaatcgtcgaaaggggaattacgaag

SEQ ID NO: 69694 - DNA, 895 bp, Homo sapiens
cttgaggaggtctttccttctacacggcctaaccaggacccaaattcctcaagtagaaagggagctttagacgattctcaccggtatctcctcgcaagtattaaaagagcctctcagaaacccatcaacttgtctaagacgaccgacgttgtccaaaagcccgataagtcaccaagaacgttttagagcgcctccaggaggcttatcggatttacacccctttttatcggatttacaccccttttgacccggcagctcccgaaaatagccttgctcttaatttagcatttgtggctcaggcagcccaggatattaaaaagaaactccaaaaactaaaaagattttctagaataaatatcagtcagcttttagaaatagcccaaaaagtttttgataatcaaaagcttaaaaaacaaaagcaacacaggcaactggaaaggcagctgataaagcattcagaagacaaacaaaaatcttagtggcagctatccaagaagtacagaatgaagtagcccgttaatttagcattaactgaagcccctgctttagccctccctaatatctgcataaaagccaaggagttgctaaagacgtgcttactcagactctaagaccctaaagctgcccagtggcctatttatctaagatgctagatcctgtggcctgtagatggccaagttgtctgcgagccgtagcagctacagcaagcctggcccaagaagatgataagttaactctaagccaaaatttaacccttacagctcctcatgccgtaaagaccttactacaaaatgcttcggcaaatagatgtcaaatgctcgcatcttgcagtatcaaaatttactgttagatcagcctcgtttgactttctctcccacaaagtgtttcaatctag

SEQ ID NO: 69695 - DNA, 535 bp, Homo sapiens; identical to SEQ ID NO: 68954

SEQ ID NO: 69696 - DNA, 456 bp, Homo sapiens; identical to SEQ ID NO: 68955

SEQ ID NO: 69697 - DNA, 2379 bp, Homo sapiens; identical to SEQ ID NO: 68956

SEQ ID NO: 69698 - DNA, 725 bp, Homo sapiens; identical to SEQ ID NO: 68957
  misc_feature (1)...(725): n = a,t,c or g

SEQ ID NO: 69699 - DNA, 980 bp, Homo sapiens
  misc_feature (1)...(980): n = a,t,c or g
gtgggtctccttgaaagtaggcttcctccccagtgtggttaaccccttggtccactatcagtgctggtccaggtgcctagggccagaaccctggtcctgcgtggtctgggttattattccccatcggccagtcctggaagtgttcgtgtgtcaggggggtccgatccctgcctcagnccccgggtgaggggtcaagatcgcccgctttgagtttggcccggatcttggttctgtgtgcctctggagcagtttgtccctcaggagagggatcctcacagcggcctcttgggaccatgaggagaattaataggatgaccccaaggtagctaccgtagccctgtgcaggcccaaccgtgtgtctccaccgccagttcccttccgtctgtgctcccaccaactgtcacatcaccagcctttattttctttttcttagacccagacaacgagtgccccactggcctcggcagccccttctctaacttgtcctcaaatcagttcctcacggacagccctgaccagccattggcatgaccaaaaccccaccaaatagaacccaactttcctattaagctgtgcagagcagtcccagccccacttcccacaggctgacctcattcgccatgggatccgtggttctcacctggggctgggggtgcccctggcatctggtggggagtgtcagggatgcccttccaggtccaggatagtcccccagctggtggccgacagacagcagcacacagcctgatgtccctgtggcttccggttccccgaggccagctgtgctttgctgcctcttcatcttctcagacgggtgccctctctccaccttcgctggttagcaatgttcatccattagagctcaaaagcactgcctgctggcagcacagccccttctcctggccctccgtccgcctgtgccccacggtctgtgccgtgtccccgccttccgcctgtgccgcatggtctgtgccaagaaa

SEQ ID NO: 69700 - DNA, 1496 bp, Homo sapiens; identical to SEQ ID NO: 68959

SEQ ID NO: 69701 - DNA, 819 bp, Homo sapiens
ccgatttcgtgctggagggggcctaggattccagaagcctggggaggcacaccctaggctcggggaaggagagaggtggagaggggctagcactcctcaccgtgattatctttctgcccgatattgtgcgtgcggatgagagaggagagtctcctcacatcccccttgaagacgcactcgtgcaccgggtagtgtgcggggcaactgcctccatccgcgacgacagcaacggggttggtgccggccagaagggccggggactgggagttggcagtcacggaggaattgtgcagcggcagagccggggcgccggggggattggaggaggccggagctgccttcagctgtagccggtggtgatggttactgaagatcttatgacaagctttgccgcccttgccaatcctgcttctggtaaaggtaccgccgagggcagccgccgcttcctcatccccgggctccagcaggtccccttcttctttgctgggcttgtggtccctccgcagtgagcggatcttctccccggtcatcgccgccgccaggggcaagggggggaatcgggaggctcaccgctggcgacggagctggcgctgcggcggcacaaggcgattagagcggtggccaagagcctccagcgcagcatgaactcccactgagcccccgagcctgggacaaacgcatctcccggggaagagccggctctcgcctaggcacgaagggacgcgcgctcgctgggggaagctagaactcaggtgcccacgacaccaggatctcagtctcgccgtcgcagccgccgtcgctgccttacaccgaaaaaca

SEQ ID NO: 69702 - DNA, 1149 bp, Homo sapiens; identical to SEQ ID NO: 68961

SEQ ID NO: 69703 - DNA, 444 bp, Homo sapiens; identical to SEQ ID NO: 68962

SEQ ID NO: 69704 - DNA, 551 bp, Homo sapiens
gggccgcagcctcagctccctgctctgcggcttcatccacaaggcggcgtcaggcgttcctcagcaaccagatgcgggatgcccagggactggtgaacagcaaggcgggcagcggtgcggccagtgagctagcgtggccgaggccgtggtggtcctatgtcccatggagaccatcaaggtgaagttaatccatggccagacctctccaaatccaagtacaggggattcttccacagggttaggagattgtgcgggaacaccgggacttaccggggccccacaggccccgtgctgaagcagggctggaaccaggcaacttgtttctttgtcctgacatccctgcgcagctggtaccgagcggacagccccaacaaactcatgaacccgctggtcgctggggtcttcggagccattgtgggagcggccagtgtcttcggaaatgctcctctgcacgagatcgagccccagatgcgggaccttcctcaagctatccgcaccaccctctcttccatttcatgcgaaacgaaatcgtcgacgcgggaattccgaag

SEQ ID NO: 69705 - DNA, 407 bp, Homo sapiens; identical to SEQ ID NO: 68964

SEQ ID NO: 69706 - DNA, 1276 bp, Homo sapiens
ttttatttttgtataatggtttatttaatacagtatacattatctttcatatactttgttacaatgttaaaaaaacttcatttttcataatataggaaataaagttggaaacaactctggtgggaatacttcagatagagcaagaaagcattcacagcaaggcctataatcagtaagatgtgtgaaaagttgggtagccacaggaggtgttcattaaggatatgattccatttatatagctatttctattgcataaccaggacagttttattgttttgaggtcaatgttcttttaaaatttgattttctgtaagaagaggctttttggcccagaaagccttacttattttacatcttccagtttgtccatcccatgagttagagttcgtcttgactctgcaagcttgtatggaatggaagtggtgcctctggggtcccagacacgggagagaggaagcagcccaggggctgggagaagtggtgagacccagaagaacggtggacccagtcaggaagggtcctgccagcagggcgtgggccagcctcggggtcttccccaaaaggcaggtaggggcctccagcaagcttcccacctccgtgaggctggagaagaggccccctggatgagaaggaagaggccggcaggtccggcgggcgcaggcacaggtagacttctggtgggaaaagcgtgactcagcctcctccagcggctgcaggacgtccccccgctagaaagggccgggctccctttgctgacccagagtcaacccagcgattcctcccggggaggcggggggccccggccccggcccagagcgcatgcctatgccgggagctgggcgaggacagggcacagccacagctgggtgcccaacgggaaaggcggccgttccccctcaagctgcacctgaaggggtccccagggtcgaggccacttctccttcggctcagggttgaccttcagtgaccactgtggcctgcgggcatcccctgggagggacggagggggatggaggaaaactccaaagggaaaggccgaatcctgcagggtctggtcgtcggaaagccaaccatacagtcagccctccctctcctcgggctgccgtcgccatccgggtccacacgggctctaagacaaaaccccaattgcccccaaggccccataggaggggcgctgccagaatcgcctatttttagtgaaagagaaccgggccgggagacagcggcagggggccggagcattcccgagacgacatcgtcgactcgggagttccgg

SEQ ID NO: 69707 - DNA, 451 bp, Homo sapiens; identical to SEQ ID NO: 68966

SEQ ID NO: 69708 - DNA, 482 bp, Homo sapiens; identical to SEQ ID NO: 68967

SEQ ID NO: 69709 - DNA, 425 bp, Homo sapiens; identical to SEQ ID NO: 68968

SEQ ID NO: 69710 - DNA, 1083 bp, Homo sapiens; identical to SEQ ID NO: 68969
  misc_feature (1)...(1083): n = a,t,c or g

SEQ ID NO: 69711 - DNA, 1750 bp, Homo sapiens; identical to SEQ ID NO: 68970

SEQ ID NO: 69712 - DNA, 503 bp, Homo sapiens; identical to SEQ ID NO: 68971

SEQ ID NO: 69713 - DNA, 1452 bp, Homo sapiens; identical to SEQ ID NO: 68972

SEQ ID NO: 69714 - DNA, 651 bp, Homo sapiens
  misc_feature (1)...(651): n = a,t,c or g
ttttttttttttttatttacatggattttcttttttaatagtaaagcatcatttattggtcccgttattcccgacaccaaacccatctccactttacagttgaggaaactgaggctcagggagtctacaaatcctggccaaggacagtggcagaggcgctatctgtctccaaagccccaaggtgttggccccnttcctgctttggagctccaggctcctgtgaatgggagtctctggtctgccccacttggaggagccaggagaggcagggaactgggggaggatggaagctcaccccgcacagccagtgcgaagatgcagcgtcggcagaaccaaggtgtgagcaggggctggtcagcactgcccgctatggggatgtggcactgctggttggtaacccaggccacacttcccgcagatgaggatctcattcagcggccctgatgtcttccctaggcagatgttgcacttgggctcctctcctggaacaccggcatgctgtatgtccttccataggacccagtatttggaattatcttcgaaagtcacgaggcagctttgcttagagctgctgaccctcttgatcttcccgaggtagtacaggccatctgtccaccggcacagcacatactggccctncgtcagtttgga

SEQ ID NO: 69715 - DNA, 698 bp, Homo sapiens
tcagtgtggtggaattcaagaacctgagcgggactatgagaacgagtctgagtcttcggagcccatactgggcgaggaatccatggaaggggatgagcacattcacagcgaagtgagtgaaaaagtcctgatgaatagtgagaggcctgatgagaaccacagtgagccctctcaccaggacgtcatcaaggtgaaggaagaatttacagaccccacttacgacatgttttacatgagccagtatggactgtacaatggtgggggtgccagcatggccgccttgcatgagagctttacatcgtctctgaattatggcagccctcaaaagttctccccagaaggtgacctatgttctagcccagaccccaaaatctgttatgtgtgcaagaagagtttcaaaagctcctacagtgtgaaacttcactacaggaacgttcacttgaaagagatgcacgtctgcacagtggctggttgcaatgctgcattcccctctcgccgaagccgagacagacacagtgccaacataaacctacatcgtaaactgttgaccaaagaactcgatgacatgggcctggactcgtcgcagccctcccttagcaaggacctccgcgatgaatttttggtgaagatatatggtgcccagcaccccatggggctcgatgtcagggaagacgcctcctctcccgcagggactgaag

SEQ ID NO: 69716 - DNA, 436 bp, Homo sapiens; identical to SEQ ID NO: 68975

SEQ ID NO: 69717 - DNA, 746 bp, Homo sapiens
gtgggctgaagctgcgcaagtcggagtccaagagcagcctggccagccaacgcagcaagcagagctcctttcgcagcgaggcgggcatgagcaccgtcagctccacggccagcgacatccactccaccatcagcctgggcgaggctgaggccgagctggcggtcatcgaggacgacatcgacgccaccaccaccgagacctacgtgggcgagtggaagaacgacaaacgctccggcttcggcgtgagccagcgctcggacgggctcaagtacgagggcgagtgggccagcaaccggcgccatggctacggctgcatgaccttcccggacggcaccaaggaggagggcaagtacaagcagaacatcctcgtcggcggcaagcgcaagaacctcatccccctgcgggccagcaagatccgcgagaaggtggaccgcgccgttgaggccgctgagcgggccgccaccatcgccaagcagaaggctgagatcgcggcttccaggacctcccactctcgggcaaaggccgaggcagccctcacagcagcttagaaagcccaggaggaggcgcggatcgcccaggatcactgccaaagagttctccccttccttccagcaccgggaaaacgggctggagtaccagaggccgaagcgtcagacctcctgtgacgacatcgaggtgctgtccaccgggacacccctgcagcaggagagccccgagctgtaccgcaagggcaccactccctccga

SEQ ID NO: 69718 - DNA, 747 bp, Homo sapiens; identical to SEQ ID NO: 68977
  misc_feature (1)...(747): n = a,t,c or g

SEQ ID NO: 69719 - DNA, 438 bp, Homo sapiens; identical to SEQ ID NO: 68978

SEQ ID NO: 69720 - DNA, 509 bp, Homo sapiens; identical to SEQ ID NO: 68979

SEQ ID NO: 69721 - DNA, 998 bp, Homo sapiens; identical to SEQ ID NO: 68980

SEQ ID NO: 69722 - DNA, 1523 bp, Homo sapiens; identical to SEQ ID NO: 68981

SEQ ID NO: 69723 - DNA, 1219 bp, Homo sapiens; identical to SEQ ID NO: 68982
  misc_feature (1)...(1219): n = a,t,c or g

SEQ ID NO: 69724 - DNA, 377 bp, Homo sapiens; identical to SEQ ID NO: 68983

SEQ ID NO: 69725 - DNA, 1468 bp, Homo sapiens
  misc_feature (1)...(1468): n = a,t,c or g
agttcnnnnnnnnnnnnnnnnnnnnnnnnnnnnnnnnnnnnnnnnnnnnnnnnnnnnnnnnnnnnnnnnnnnnnnnnnnnnnnnnnnnnnnnnnnnnnnnnnnnnnnnnnnnnnnnnnnnnnnnnnnnnnnnnnnnnnnnnnnnnnnnnnnnnnnnnnnnnnnnnnnnnnnnnnnnnnnnnnnnnnnnnnnnnnnnnnnnnnncctagagttcttagagaatttctagcttctgtttctttaaacatgttttattagctttctaaattatgaaagtaaatacaactggaaaaatacaaaatccaaagtcaagggagtaaaaaaatgtaactcccttgtttcccctccccgcgtaaccgtggttaacagtcggtgtgcacccttacagatgttttttctatgaaaatacaaacattcgacttgtttcttggactttacctcgcagtccgaggagaatcatgtgaacagcatgaaagcagcatggtccgaagactgcaaaccataacatttccatatctactgactctgaattcctgtttctagaggacccgcacccacgtggctctgtgcatccgcagcaacttggtctttcttcctttgctgagtttggttaagggaaagggccgattattgagtgggctcagttcacaggtgcctgaaattcctacttagcaatgttcctttccagctgattccgcctccgagagccttaggaaaaaatgctaacagttaggagcgaagcgtccttaattgctcagtccaattatctagatgggtccaggttcggtttcgattcagagataaggaccagggggcggggacgcttccaggtgagcccctggttaggcttgcctccccgcggagcgcacgcgggtctcgctggctggactgggcctttcaagaccaggtaacttctccatccggtatcgccaggcttacctgggggcctcagaattgtgtcagctgcgtctctgagtcaccttggaacccctcgaaggagcgcggggctaggagggcgcatcggtgggcccggggaccccgctgctaggtgtggttggcgccaaggccgcctctggccggcggagccctgcagtgtccggagggtgcggtcagagtccggccctttaggccttgcctcggtatccgccttgccccttgggccgcggcacgggttcgggccgagcgcccggcatcttgcgtttctggcttcctgagacgggcgtgggacctcgaggaaaccactctgcatgaccccacgaagagaactaaggaccaccccccacccttcctgtcctggacggcttcataagccagaggatccagtggcagtaccaagcagggcaccactctgggtcgtgagcacctaagaggtggagcaaaggtcagaccccagggtggcccaggcctccctcccccgcctccccggcggggccattcctcacccggaattccaccacgctggactagag

SEQ ID NO: 69726 - DNA, 852 bp, Homo sapiens; identical to SEQ ID NO: 68985

SEQ ID NO: 69727 - DNA, 1760 bp, Homo sapiens; identical to SEQ ID NO: 68986
  misc_feature (1)...(1760): n = a,t,c or g

SEQ ID NO: 69728 - DNA, 518 bp, Homo sapiens; identical to SEQ ID NO: 68987

SEQ ID NO: 69729 - DNA, 1213 bp, Homo sapiens; identical to SEQ ID NO: 68988

SEQ ID NO: 69730 - DNA, 1124 bp, Homo sapiens
gggcccgatcccgagcccgcggccgtggaggttcccgcggggcgcgtgctcagcgcccgggagctcttcgccgcccgctcgcggtcgcagaagctgccccagcgctcgcatggccccaaggactttctgcccgacggctcggcagctcaggccgagcggctgcgccggtgccgggaagagctctggcagctgctggcagagcagcgcgtggagcgcctgggcagcttggtggctgccgagtggaggccagaagagggcttcgtggagttgaagtctcccgcgggcaaattctggcagaccatgggcttctcagagcagggccggcagcgccttcacccggaagaggccttgtatcttctggagtgtggctccatccacctcttccaccaagacctgccactgtctatccaggaagcttaccagctgctgctgaccgaccacactgtgaccttcctgcagtaccaggtcttcagccacctgaagaggttgggttatgtggttcgacgattccaaccaagctctgtcctgtccccgtatgagaggcagcttaacctggatgccagcgtgcagcacttggaggatggagatggcaagagaaagaggagcagctccagccctcggtccattaataagaaggccaaggccctggacaactccctgcaacccaagagtctggcagcctccagcccacctccctgcagccagcccagccaatgcccagaggagaaaccccaggagtcaagccccatgaagggcccagggggcccctttcagcttctggggtccctgggccccagccctggcccggccagggagggggtggggtgcagctgggagagtggcagagccgagaacggagtcacgggagccggtaagcggcgctggaacttcgagcagatctccttccccaacatggcttcagacagccgccacacccttctgcgcgccccagccccagagctgctcccggccaacgtggctgggcgggagacagacgctgagtcctggtgccagaagctgaaccagcgcaaggagaagctctccaggcgggaacgggagcaccacgcggaggccgcgcagttccaggaagatgtcaacgccgatcccgaggtgcagcggtgctt

SEQ ID NO: 69731 - DNA, 837 bp, Homo sapiens; identical to SEQ ID NO: 68990

SEQ ID NO: 69732 - DNA, 964 bp, Homo sapiens; identical to SEQ ID NO: 68991

SEQ ID NO: 69733 - DNA, 1353 bp, Homo sapiens
tttttttaaagttcacaaaccccttgaactttatccatgagattttctgatgacccaatgacttaatcctgctactgacttaatcaaaacccagtccctacagaagagacctgctcccccgtcacagcgccccccaccggccccccatgccgcttattttaaaagcgcagctcccacaggctgcctttccttcagtttctgtccatgcccccagccccaggctgccctctcttggcggcaccgtcccaccccgcctgctgcactgagcccgctgggcctgggggactcttgctcagtagaacccgaggccagcaaaagctcttagcccaggatggctgcagcagcgacagtcctgaaggctacagagacacctggaaagggaacaaggagagcacgacagtccctgtgctgaggatccagggtggtggcggcaggggttagtgtacagtctcgagaaaacagggcggcggcagggggctgcactgacctctatacaccgagagggtttttaaagttgaatgacaagggcacagctacaggaacgaccccaggaagaagtcccgtgacggctggagtcagaagcccctgaaacaagcacctccccagtgaggccccaccgtgtacccagggtgctcatgaccacccccaggctctgcagcctggccagagaccaccgaggccccaggaggggcttcagagatggagatgaagctgcatctccgagccatgaggcccagtggggcccggacagagggagcctggtgttcacacaccacatctgttttccaacaaagtcaaaacacggtgggtcctttcagaagatccccagcacccgacacttcaactcagactccaggcgtcgggcgaggccagacccaggagatcacagcctgtagcggggacagaaaggtgtgcactcctggaagcgtccagcaacttctctcttgttcaagtggcaccccaggtccagagcggggcttgtggggagaggagcacgggggcttcgtcctcggaggcgcggagctccaagcaagggctgagcagcagctgggagtctcccggaggccagaacattactggccccgtgtgcacatgcgccttcttggagtcccaaaaggcagataccacgtatcccaccaaatatctacttacagattgggaaattgaggcaaaaagctcaggtaattcccacaaggccacagagctggtaagcggtggggttgagattcagtggcaacgggccgaggtctcctgggtgtggtgtggaccctgatggtgagcagggtagggacctcctcgagcccccatggaatcaggctgcttaccatcacgaaatccaccgcgctattcagg

SEQ ID NO: 69734 - DNA, 1081 bp, Homo sapiens; identical to SEQ ID NO: 68993
  misc_feature (1)...(1081): n = a,t,c or g

SEQ ID NO: 69735 - DNA, 2446 bp, Homo sapiens
  misc_feature (1)...(2446): n = a,t,c or g
ccccaagcaattgggcgaacatcttcccgcctagcnccaaatcctggctttcagcacccaggcccagctcagcagagccagtgtaggctgctaggagacaaatgcccaggctggactatgctctccacagtacctggggcccccatcctgctaaacgctacagggggtctgcccagccccacctcacctgtccccatgctcaggcactgccttccctgttttacccccagagtgtacagagatgccccctactctcctcccctgctttaaaatccttcaatcacaattccacagaggactcaccttgcctatgtgtataaaaacaaagccagggcatgcccacaagcaggagatgggaacatcacccgcacctggccgaatggctctgaagcgaagactccaccaggcccagattgtatggagtggaaggtgggggtgggggaggagcagcagagtgcagatttaaactggctcttacaatccatctccagggtttgcacctgtttccccatgtagtttttaatagcatcccgcttcatactcagaagtgtcccagggtggacaagacattgtgtggcacccttgcaatggcccgcgctgagcagtgggagtaggggatggggagggcggggggcaggtgcccctctccactcaccttcccagaaggccccacccacctccctcagcaccatctccagtgggtggggcaacatctgtcctggcctcagattgcccaagacaccatttgctcacggaggccaccatgccccaatatgtacttcccgtttcgggaccaccaagctctggggactggaatgcaggcagtggaagccccagattgacttaacctgttgacagatcttcagagaaactgctggtaggaggcagctggggaaggtggcgatggccagtgggcaggcaggcctggccccagagccactgtggtacaaagaggaagtctgacagaagagcagcctcgggcaaaacgggggagccaaggcggccacgggggagaagtctctccaccgtgccctgtgtctggtgcctgggagggtggcccagtgtccatcttgtcccactgatgctgccacatcccaaggctcatgtctcagaacgagagctgctgaagggctggacgttctgagacttcttaagatgtaagtcatttggcatctgtagctggtgaatttcaggtctctaggggagaatctcagcaccccaaaatccttggaacaggggctgagccgtccagcatccccatgtagcatccagaggggttgaggggctgggcttctgggatgtcacagtatctgagcccagagcaggagggagggaaccagggccgaggccaaggaggccactcacagagccagccctggctcaaatgcacctgccccagacccagccacaacagcccactgtcccccagctgggctagatgacctcaaagtttggagagtcagggacagggtccagggatgggaagaagacgtctccggggcctggaggagacaggggggtgctgggctccgaaagcagatgccgcccagactcagaaggctgccgctgggccacataggacagggggtgcctgactttggcctcgggtatcccctgggcaggtggtgaggcttcaaagccggggttttcaatcccttgaatgttgctgtccatccgcaccagctcctgggcacggcggttggaggctgcctgcctttgcttgtagaccaggagcaggatgagggggaggcagaggattcctacgatgcaggcacccgtagccagggctgcagccgtgatgttttcactctcctgggaggaggatgggtacaccacacagttggatggtgcatctttgcctgtctgcacctgcagttccatggcaccatggaccctgtgctccgagtggtggtgcctgatctccaccaccaggcagcagtagaggccgctatccagcagggtcaggttgcgcatggtgatggagaagttgccatggtggtcggaggccgactccagcccgtggcgctgagccaggtcgtggctggtgttggcagcctggtggcctccatggtgcaggtgaaggtcctggaacgtgaggttgcggatgggccggcgctctgagcaggtctgcacctcgcccctcgagctgcggtaccacgtcttgtagaaggtcacatcgtgccctttgtccacagggcccaagagcctgcaggtgagggtgacgttctgcccctcgggacagacatacagggaatacggcgtggcgaccttgaaggctgccaccggacctagggacgcagccaggaagagagcgaagagcagggatccccagcgccagctgccggcctccagggccgtggggacgcccatgtcgccgtcggacgcgcagaggaacttctggtgccggggagcgggcgggacgcggccggcgcggggaagcctcccg

SEQ ID NO: 69736 - DNA, 781 bp, Homo sapiens
  misc_feature (1)...(781): n = a,t,c or g
aaaacacagatganaatgagatgtccttcaagtctacagtggatctgaagggagggctattattttctgtgagacgaagaagaatgtaactgacatggccatgaatccgcacaaaacagaatgcactgtgtttacatggggacattgcacagtcacaaagagaaattacactaaaaggcttcagagaggtaattataaagttttggtggcaaccaatgtggctcctcgtggtttggacattcctgtagttgacctggtgattcaaagttctcctcctcaggatattgagtcctatatccatctctctggatgcgtgggtaaagctggacagacaggggtttgtatatgtttttatcaaccaagagaaaggtcaactaagacatgtggaacaaaaaacacaaattacttttaaatgtgtaggtgttccttctacaatggatttagttaaatttaaaagcatggatgccataaggtctctggcttccatttattatgcagctgttgatttttttccaaccatcagctcagatactgatagaagagaaaggggcgatagatgcattggctgcagctttagcccacatttctggtgtatcaagctttgaaccatgatctttaatcaactctgataaggggtttgtggccatgactctggaaagcctagaggaaatacaggatgtcagctgtgcttggaaagaacttagaaagaagaatagtaatgcagtgtctcagattaccagagtgtgcctcttgaaagaaaatgaattccaccacgctggac

SEQ ID NO: 69737 - DNA, 970 bp, Homo sapiens; identical to SEQ ID NO: 68997
  misc_feature (1)...(970): n = a,t,c or g

SEQ ID NO: 69738 - DNA, 616 bp, Homo sapiens; identical to SEQ ID NO: 68998

SEQ ID NO: 69739 - DNA, 673 bp, Homo sapiens
taccgtgcggtggaattcccggaactacactcatggagggacagcagtcagacccctcccccatgtcttatccgtagacttgaccacatcgtgatgacggtgaagagcatcaaagacaccaccatgttttattccaagatcctgggcatggaggtcatgacttttaaggaagaccggaaagcactgtgttttggagaccagaaatttaacctccacgaggtgggaaaggaatttgaacccaaagccgctcacccagttcctggctccctggacatatgtctgatcacagaggtgcctttggaggaaatgatccagcacctcaaggcttgtgatgtccctattgaggaggggccagtccccagaacaggggcaaaagggcctatcatgtccatctacttccgagaccccgacagaaatctgattgaggtgtccaactacatctcctcgtgatggaggctggacctcctccattctgtcccccttgatgtcgccctctcctttccttcctgcaaacccccacccaggcccagagatctccaaagactgaggacttaggcacttcacacatcctgctgaggggggacccaagacaggtttgggaccaaacctacatgtctgtatgtcatcaaagttggcctaataaatgcataacctctcaatgaaaaaaaaaaaa

SEQ ID NO: 69740 - DNA, 1120 bp, Homo sapiens
cagcagcggctcaggacaaagggcaggtggggccaggggctgggcccctggaactggagggagtgaaggtccccttggagccaggcccgaaggcaacagagggcggtggagaggccctgcccagcgggtctgagtgtgaggtgccactcatgggcttcccagggcctggcctccagtcacccctccacgcaaagccctacatctaagccagagagagacagggcagctggggccgggctctcagccagtgagatggccagccccctcctgctgccacaccacgtaagttctcagtcccaacctcggggatgtgtgcagacagggctgtgtgaccacagctgggccctgttccctctggacctcggtctcctcatctgtgagatgctgtggcccagctgacgagccctaacgtccccagaaccgagtgcctatgaggacagtgtccgccctgccctccgcaacgtgcagtccctgggcacggcgggccctgccatgtgctggtaacgcatgcctgggccctgctgggctctcccactccaggcggaccctgggggccagtgaaggaagctcccggaaagagcagagggagagcgggtaggcggctgtgtgactctagtcttggccccaggaagcgaaggaacaaaagaaactggaaaggaagatgctttatgaacatgttttgcttttttaacatatatatatatttataagagatcctttcccatttattctgggaagatgtttttcaaactcagagacaaggactttggtttttgtaagacaaacgatgatatgaaggccttttgtaagaaaaaataaaagatgaagtgtgtttcttgggctcagcccatgggtagaagggctgggtggagggagatgaagaaggagtggccctcgctctggggaacaagggcccctcaacaacccctgggcttgggcagccctcccaggtgtcctgacctgggtgccatccaccctatgcttgaatgaggtgaggctgggcccaggtgggagcagggctgcctctggcctcggacaaggacgggtcagggagcctcaccttccccaggccctgtcttctgccagcaggggctctggcccatgtgcggctgggagaggc

SEQ ID NO: 69741 - DNA, 584 bp, Homo sapiens; identical to SEQ ID NO: 69001
  misc_feature (1)...(584): n = a,t,c or g

SEQ ID NO: 69742 - DNA, 791 bp, Homo sapiens; identical to SEQ ID NO: 69002

SEQ ID NO: 69743 - DNA, 443 bp, Homo sapiens; identical to SEQ ID NO: 69003

SEQ ID NO: 69744 - DNA, 710 bp, Homo sapiens
ggctgtgcttagcgaccgcactcctaggaacctccacgccttcctcatctccgtccgtggcagcttcgcggagagcggcgccaccaagaacctcctggactccatggcgcgcaatgtcgtgctggatgccctgcagctgcccaagtcctggctgaacggctcttccctcctgcagcacatgaaattcaacaacccgttctacttcagtttcagccgctgtaccctgtcaggcggccatctgatccagcaggtcatcatcggcgggaaggacctgcggagcctggccagcttgaacctcagcggctgcgtccactgcctgtccccagactcgctgctccgcaaggcggaggacgacatcgtcagcagcatcctggagacgctggtggcgtcctgctgcaacctgcgccacctgaacctctcggccgcccaccaccacagctcggagggcctgggccgccacctctgccagctcctggcccggctgcgtcacctgcgctccctctccctgcctgtctgctctgtcgctgactccgcgccgcgcgccgaccgcgcgcccgcccagccggccatgcacgcagtgccgcgcggctttggcaagaaagtgcgtgtgggcgtgcagtcctgtcccagccccttctcgggccaggcgtgcccccagccctcctccgtgttctggtctctgctgaagaacctgcccttcctggaacacc

SEQ ID NO: 69745 - DNA, 1026 bp, Homo sapiens; identical to SEQ ID NO: 69005

SEQ ID NO: 69746 - DNA, 1753 bp, Homo sapiens; identical to SEQ ID NO: 69006
  misc_feature (1)...(1753): n = a,t,c or g

SEQ ID NO: 69747 - DNA, 1500 bp, Homo sapiens; identical to SEQ ID NO: 69007

SEQ ID NO: 69748 - DNA, 1729 bp, Homo sapiens
tctactctagcgtggtggaattcctcggcctcgcggcgacggcggcggtggcggcttggacgactcggagagccgagtgaagacatttccacctggacacctgaccatgtgcctgccctgagcagcgaggcccaccaggcatctctgttgtgggcagcagggccaggtcctggtctgtggaccctcggcagttggcaggctccctctgcagtggggtctgggcctcggccccaccatgtcgagcctcggcggtggctcccaggatgccggcggcagtagcagcagcagcaccaatggcagcggtggcagtggcagcagtggcccaaaggcaggagcagcagacaagagtgcagtggtggctgccgccgcaccagcctcagtggcagatgacacaccaccccccgagcgtcggaacaagagcggtatcatcagtgagcccctcaacaagagcctgcgccgctcccgcccgctctcccactactcttcttttggcagcagtggtggtagtggcggtggcagcatgatgggcggagagtctgctgacaaggccactgcggctgcagccgctgcctccctgttggccaatgggcatgacctggcggcggccatggcggtggacaaaagcaaccctacctcaaagcacaaaagtggtgctgtggccagcctgctgagcaaggcagagcgggccacggagctggcagccgagggacagctgacgctgcagcagtttgcgcagtccacagagatgctgaagcgcgtggtgcaggagcatctcccgctgatgagcgaggcgggtgctggcctgcctgacatggaggctgtggcaggtgccgaagccctcaatggccagtccgacttcccctacctgggcgctttccccatcaacccaggcctcttcattatgaccccggcaggtgtgttcctggccgagagcgcgctgcacatggcgggcctggctgagtaccccatgcagggagagctggcctctgccatcagctccggcaagaagaagcggaaacgctgcggcatgtgcgcgccctgccggcggcgcatcaactgcgagcagtgcagcagttgtaggaatcgaaagactggccatcagatttgcaaattcagaaaatgtgaggaactcaaaaagaagccttccgctgctctggagaaggtgatgcttccgacgggagccgccttccggtggtttcagtgacggcggcggaacccaaagctgccctctccgtgcaatgtcactgctcgtgtggtctccagcaagggattcgggcgaagacaaacggatgcacccgtctttagaaccaaaaatattctctcacagatttcattcctggttttatatatatattttttgttgtcgttttaacatctccacgtccctagcataaatattctctcacagatttcattcctgtttttatatatatattttttgttgtcgttttaacatctcccacgtcccctagcataaaaagaaaaagaaaaaaatttaaactgctttttcggaagaacaacaacaaaaaagagtgcatagtttgccctggagaatccactcacgttcataaagagaatgttgatggcgccgtgtagaagccgctctgtatccatccacgcgtgcagagctgccagcagggagctcacagaaggggagggagcacccaggccagctgagctgcacccacagtcccgagactgggatcccccaccccaacagtgattttgg

SEQ ID NO: 69749 - DNA, 983 bp, Homo sapiens; identical to SEQ ID NO: 69009

SEQ ID NO: 69750 - DNA, 378 bp, Homo sapiens; identical to SEQ ID NO: 69010

SEQ ID NO: 69751 - DNA, 842 bp, Homo sapiens; identical to SEQ ID NO: 69011

SEQ ID NO: 69752 - DNA, 1623 bp, Homo sapiens; identical to SEQ ID NO: 69012

SEQ ID NO: 69753 - DNA, 1267 bp, Homo sapiens
ttttttttttttgagtaatgccgactttatatcagcacacccagtgcccccacgttcccgctggcccaggtcccggagaccatgatggcacccacagtggacttcgcaaaggagcgtggggaccccgaaggccaggccacccctcagatgggggtcccatgctaaagcagacggtgccggtgccgcaggctgtctgagacccacggtggagcccgggcctggcgtgcgggaggcggccacgacggcgcctttctcccaggaactccgggagggaccccaggactcagcgccagggcagccttggcaggtgcagtgaggcagtgacttgtgggggttagatgtgggcctgccccacgtgggcagggatcagccaggcatgggggtccagcggatccgagcggggccacagagctctggaggacttttctgcacaatgaatttctgcttaaaaacagagatcaagaggaagctctatcctgcagctccggaaatgggtggctgcgtgcttggggtctccgccacgcgggaggacagcccagaggcaccctggtctcaggcagctggttcctaggctgtgtcctccccactggccgggcaccggctggaacggcacgaggaccagcctcactgttctcagaggggtctcgggccactgggtgtggtggtgctggaggagtcctgcccgctgtgggctctggagggcacggcagcagagcccctggcttttctaggcagagcggcacctgccccatagatcgtgccagctttggctgcaggcgctggggcctcaccgtgtttcctgggggggcccggacccccaagggcctcgatctgaagctctgaggtctcatggatgcctgctcctggtccgataaacgagatggctgtggtggggaggagcctcaggcggcccgggaccctttggcgtccgtcgctgggaggcggagggacccagagccgaggctgtgctcaggactgtcccgggcgccgggcgatgccaacactttgtgctggttcccgccaaggggtcggcctccgggtccctgccgccaagtgcgtggcgtggtctcggcctccaggtcagacattgctgatacgggcctcccccgggaaggcagcgggatccgtggccctgtccaggggccgctcccgcctgacgtagcgcggcttccgtacgggctgactcttgggtccgcctgacccagcaccactgaagcgatggctgctcaggagggcctggcggaggccggctgcgtctgtcctcggg

SEQ ID NO: 69754 - DNA, 500 bp, Homo sapiens
aataaaggagaaaagaaaggaagaagaaaagtgggaggtgaaagaagaaaagaggaagaagaaagaaggagaatagaagaagaggaagaagaaagaaaagaaagaagaggaaagaaggaagaagaatggaaagaaaggaagaagattgaacgaggaagaaagaagaaaaaagaaacattcttagaagaggaagaaagaaaagaaaaaagaaaaagagaagaaagagggaagaaagaaaagaggaagaagaaagatgaacgaagaagaaagaggaagaagaaaaaagaggaaagaagaaaagaataaggaagaagaaaaaaaaggaagaagaaagcagaagaaaagaaagaaaagagggaagaggaagaagaacgaagaaaagaggaaagaaggaggaggagaagaacaaggagaagaagaaagaagaagggagaaggagaagaaaagaaggagaagaggaaaaggaagaaggagaaagaaaaggagaaggaagagaaaaa

SEQ ID NO: 69755 - DNA, 1590 bp, Homo sapiens; identical to SEQ ID NO: 69015
  misc_feature (1)...(1590): n = a,t,c or g

SEQ ID NO: 69756 - DNA, 659 bp, Homo sapiens; identical to SEQ ID NO: 69016

SEQ ID NO: 69757 - DNA, 1071 bp, Homo sapiens; identical to SEQ ID NO: 69017

SEQ ID NO: 69758 - DNA, 759 bp, Homo sapiens; identical to SEQ ID NO: 69018

SEQ ID NO: 69759 - DNA, 430 bp, Homo sapiens; identical to SEQ ID NO: 69019
  misc_feature (1)...(430): n = a,t,c or g

SEQ ID NO: 69760 - DNA, 461 bp, Homo sapiens
  misc_feature (1)...(461): n = a,t,c or g
ccaccaatttccttccttttttttttnataggagtggaggtntaataggcagaagaaagagaaaggaaaatggcatccncaatagtggcaacatcctctccccgacccatgctgccatcagcctttccacctttgtctgaggagataaaccctgtgctgcctgaggcaacagtgatggcctcccctgaggcagttgccaggcaagataatatcgattctcctctagcaccctcaacacctttgtttgcttctagacctataactaaagtcccgatgggcccacagaagtgaggttcagagtgtgacccatggggaggtgagctacacttgaattgagttttctaatttatataagcagaaatttggagaacaggcacgggaatggatattaagggtgtgggataatgctggaaggaacatacagatgcatcaggctgaatttattgatttgggctcactaa

SEQ ID NO: 69761 - DNA, 401 bp, Homo sapiens; identical to SEQ ID NO: 69021

SEQ ID NO: 69762 - DNA, 1148 bp, Homo sapiens; identical to SEQ ID NO: 69022

SEQ ID NO: 69763 - DNA, 719 bp, Homo sapiens
cctgctggcctcggccaaaaggagggtggaggcagcttcctcctgggtgccttccttgactgggagcagctcgataaagggggccccagggggcagaaggtagacgccatggggctgctctggctgtaggtttaggcccagcacccctcccgaggcagcataagcaggagagaagaaggctagtccttggcaccacaaggccccgagggcagccacagcctcggcctggcctcctgcatccagagtcaccaccacctgcagctttggccagagccgaagggccagtccccgtggcccctgctatagggcctcccggagctcagctgcccgttcacggagaggtgctccagggttcccggcagctatcgccccagctagctcttcaccatcagtctccaggcccaagaaaacatccagaagttcgacagccgtcccagcctccagtgccctcagccctggggacctcagtgcgtccagcagcagggccctagggtccttggttccaggggtgcccacctggcccagggtattcccaggccaaggcaggggtcggggccaaggggatgtaagcgtcacacgggcagtgcgtccctgagccagcacttctgggtaggccttgtttagggctgccagacccagcaaggtggcctggaggaggaaagagagaatgttggtctggtgtcagagccagacccagagcccccatttgggggttcttt

SEQ ID NO: 69764 - DNA, 487 bp, Homo sapiens; identical to SEQ ID NO: 69024

SEQ ID NO: 69765 - DNA, 1094 bp, Homo sapiens; identical to SEQ ID NO: 69025

SEQ ID NO: 69766 - DNA, 585 bp, Homo sapiens; identical to SEQ ID NO: 69027

SEQ ID NO: 69767 - DNA, 394 bp, Homo sapiens; identical to SEQ ID NO: 69028

SEQ ID NO: 69768 - DNA, 514 bp, Homo sapiens; identical to SEQ ID NO: 69029

SEQ ID NO: 69769 - DNA, 495 bp, Homo sapiens
agttgtctttctggtaccaccccccatcccgagggctatctaggggcccacttcaagtcacttcattagcataagaggacactcttctcactcaggaaatcccaagagtttttgaacctctgtgccaggaaccacagacaaaagatcagatgtaatctttattatgccaaccaaagacagggagataatcttgaaagctacaagagaaaaatgaccaatagcttataaaggaagccccaataagattaacagctgactctcagtaaaaacaatgaatgccggaaggcagtggaataacacaatcagagcactcaatgaagaaaaaaaaattctcaaccaaaaatcctatatccagcaaagaccatctttcaaaaatgaaggtaaaatacagactttcctagatgaataaatctgaacttcttgttagcaaacccaccttatgagaaacactaaaggaacttcttcagctgaaaacgaggaactccatacagcaac

SEQ ID NO: 69770 - DNA, 509 bp, Homo sapiens; identical to SEQ ID NO: 69031

SEQ ID NO: 69771 - DNA, 472 bp, Homo sapiens
cgcctgaagacaggcaagaagttaggggagttctgatcaaggcgaccaaatccagattctgatgaaggggaagattaggagggagagaggaggaaaagtagtagggtggagctgccattgcccttcccacttctttggtagagaaagaccaagagtcaccccgagattttccttatgaagaggattcaagacctcagtcatggtcttccaaagcagccattcctcccccagtgaaggaggaacaggacagactgagatctccaagccgtcctagcagctccttcctcactaacgtggtgggaacggtggtgcacaacatcatgcagaagcgcggcttccgggaaggctggggcctcggggagcacctgcaggggcttcgagacgcctttccggtggggaagactagcaaatcaggcggcaagatcatcgtggccgacgccgcacagaaagatgcattgaaaggtcaggtcca

SEQ ID NO: 69772 - DNA, 678 bp, Homo sapiens; identical to SEQ ID NO: 69033

SEQ ID NO: 69773 - DNA, 451 bp, Homo sapiens; identical to SEQ ID NO: 69034
  misc_feature (1)...(451): n = a,t,c or g

SEQ ID NO: 69774 - DNA, 830 bp, Homo sapiens; identical to SEQ ID NO: 69035

SEQ ID NO: 69775 - DNA, 369 bp, Homo sapiens
gttgcagcctcagctataaatgcattttggatactcctccaacctatttaccaatagggaaggtttccatctctgagtgggccccagaacaggaaaaggctctttagaaattccagactgcaacataattatagtattccacaactctaggcatcatgtgaagccacaggttaaactccaatagtagaattgtagtgcagacccttagggttcttaaagttatctgaaatagagaactataaatgtttgtaaaaccagtttatggcatgctattaggcacctgtagagttacagagtctgaccacatgacgtcaagtaactatgaggcaagaactgcccatcatgagctgggttgcatccagattcatc

SEQ ID NO: 69776 - DNA, 1310 bp, Homo sapiens; identical to SEQ ID NO: 69037

SEQ ID NO: 69777 - DNA, 968 bp, Homo sapiens; identical to SEQ ID NO: 69038

SEQ ID NO: 69778 - DNA, 510 bp, Homo sapiens; identical to SEQ ID NO: 69039

SEQ ID NO: 69779 - DNA, 395 bp, Homo sapiens
tagaaacctacatgaaatatacaaactctcaggaatacacaaactaccaaaactgactcaaggaaaaacagaaaatctgagatctttaataagagattgaatcagcaatcaagaaacttccaggaaagaggagcccaggactagatggcttcataatgaattctacccaatgtttaaaaaagaattaacaccaatccttcaaattctcccaaaaaaatagaagaggaggaaattcttaattcattctctgagtcccgaattaccccgatactaaaaacagagtaagagatcacatgaaaactactgaccagtatctcttaggaatatagatgcaaaaattctcaacaaaagattggcaaattaaatctagcattatattaaaataaaaacatgcc

SEQ ID NO: 69780 - DNA, 725 bp, Homo sapiens; identical to SEQ ID NO: 69041

SEQ ID NO: 69781 - DNA, 2049 bp, Homo sapiens; identical to SEQ ID NO: 69042

SEQ ID NO: 69782 - DNA, 649 bp, Homo sapiens; identical to SEQ ID NO: 69043

SEQ ID NO: 69783 - DNA, 876 bp, Homo sapiens
gggcgtcgttagcacataggaaggagaccctctcctcccggaggtcaccgccgacacacccgcagagcctgcagatctcctgggacaggcgaaggctgcgggaataaagctccctgtacgtgtggcggccgtgctggtcaaccagggcgattctgtccccaaaggccagggcacgggtgaacaccggggcgctcctgtccgagcgggccactggggctgtgtgcagaagaccacttcctctgtgtctcgcaggcgccagccggcaggaggccaaggcgcagcccaggcgccggaaggtgagcaccacatggggcggcattgcactgacaggcgctcccgggagcctcctggggccgagccagctcccgagccagagagaggaggtaaggggaagttcgcagttcacaagagcggcaggcacagctgcttcagcaggtggaagggcacgataaggtgcaggcaatgcaaatgctcatcctcctggggcaggcaccaggcctggcgctggaacccggaaggccggtgggacacctgtcaacgggcatctgtgctgaggtcccaggctgtgtgtataacgcttcccacaggcacaacactcaacactcaatgggggaagggaagcatgttcatttacaagctaaagacaacattatcaaataaagctgtgagccttatctcccgacaatggccagcagtgaccccatgaccctgtcgagtctcctcccacacaccacgccccctctgtgggatctgtgcccatgttcagcaggttctctctctccagcacatctctttcattaacttgtgaggggaaagctactgtgttattgtctgtggtttgtaataaacagttttgttttctgctcttagtttgaa

SEQ ID NO: 69784 - DNA, 1037 bp, Homo sapiens; identical to SEQ ID NO: 69045
  misc_feature (1)...(1037): n = a,t,c or g

SEQ ID NO: 69785 - DNA, 701 bp, Homo sapiens
ggagacagagtggggaggaatgccctgtctcctctcccaggggccccgaccaccagcctagaccagcgggactctgggctgctcaggcttcagccatctctctcctgccaccatggctctgcccagaaaccgtggatggccctgcccccaaccctagaatgttgcagggctttccggcaggagaggggcacaggagggcgaccatgggctgaggtttctgaatgacattcagcaggatttctgccaatggctcgatggctcgcttccactggtaaggatcaccggtctgcccccaggggccctggacccaaacaggagcatcaggcctgcccaggaaacagacacctcaggtccgtcactcggaggcctggatgtagacgggcacagcgagcatggcacatgggccctcggccccggcctgcagctccgccagagccaggttggagcccagcccctcagcgtgtccaggtaccaccagctcagtttccgcgcccaccgcaccacccacaacgatggacagcaccgcgtccggctctgcgaagggcggcttgccggggacagcctcgggcaccagcccagcccctgtgtccttcagctcctccagccccagcgggtcaggcaagggggtcagcaccttgcgcccaccactgccgcaactgcgggggggctgccctcctctgggggggccgccgggtctacag

SEQ ID NO: 69786 - DNA, 1979 bp, Homo sapiens
ttttttttttcacgtctgcaagtcagcgtttattgctcaagcgtattaaacaaaaatgtagactgaaagagacagttcttttaaaccccatttttccggattttttaagcgctctaaaataagaaaataagaaagtgcaagccagcaaaaacgctccaagtgcctaattctgactctgaaacttgagctctctgggtctgcccccaagaagacatcagcccgccccgggtcgtccctgtggctcccaccccattcccaggagcagaccccgccagcctcaaagctgcagggaggtgggggtggcctgcagacagggtggggtctgcatccggtaccagtgacagcagcctctcctctcccacggtggtgcttgtttggggctgtggccaaagtgtttgcccggcccctgactgtgtccttccggagctgccgaggactgcagagagggcctggcttgtcccctctaggagcagctgggaaggtgtcttgcctgcatcccccttcaatggttgaaaataatgattccacttgtcatgaacaccatgaaggtatcttggcagccagagtcactcctgttccgaagtgggaaacctgggagggtcctcaaaccccctggcagggtctgcaggccgccccatccagctgcatctcccaggcctcctggttctttgatcttgatggccccaggccacagatgcatctccgggcctttccagcagcccatgggggaccagtcaatacaccccacggcggtgaagagaaaacgttcatgtcttctcagatcagaaggaaagaaacaaaaccattgtgaaggaaaacacctgctggaaagtaattatcaaagtaacagcattccagtttcacagtcgccccaactcactgtggatttactgccgtcagctgggaggacccaggcgccctcgggacgaggagacgcagggaaacccactcctggccatggcactacccaaagccagtgttattctcacacccaactgtccctgcagcctggcaggtgggcagtgaccgcctgggctgtaccctaagaccccaaaacagcggagatggagaagaccgctgccctggggccttctcagtgaggatcaagacaaagtacttgctaggaggtagagggcgctgggtgaacctgtgagaattcctgggctctgacctgatctgtcctgcattttgagtaatgggagcaaacacaggagggaggggctcagcttcccccggtcactggggccagggagacgtggtccagccggtttacaaagccttggatgcagccccacccccaagaacactgcctgtcacagcagcggccacgtggcactccaagctgggcatgacagtgcccgggacgtgggcagcggccatgtggcactccaagctgggcatgacagcacccaggacgtgggccggccagtgtggcggtggatccctctagaatgactgggtctaagtagggagacagggcaggcgacccggcgtggactggtgtggatttcacctgggagagcagcggcagcctgtgtcgcttgcgcccaggctctggaggaggggcccctgcggctcccgggccaggacagaggcgcccagccctgctctcactgtccaggaagagccgctgggcagcctgagcctggggcaggtgcaccttgcagggaagtgggtaagatcccactgggctgactgagtacccgggacagaccctaagcgtggagggaggaagcccggtcagagtgggcaggagacgcagggacccacagtctggtcaggtccagagagcccactccagcccaagccatgagagaggcaggaagaggagctggggccagttcaggggtggggctctcaagaggccgagccgggggcccttcctcggcctgggaagttgcggccatgctcctgctgttacgacacgggagccactcggagctgactgatctcactgaggcacagactagccaacattg

SEQ ID NO: 69787 - DNA, 759 bp, Homo sapiens
gggcctccagactccagctcagttaaggtcgccaagcaggtaggatctttctggaacccagatctgatcacacctccctggaggtcccttcaggcctgccctccctgccacaccctcaccagacaaaacacttccctgtgccatccccaagctctcacctcctctcatctgaagcgctgcgcctggcacaccaggctccaccttgcctgcctggccaagccctactaggaaagtaaaatgtcacctccagagagaatcaaccactttattgcctgctctctccagcatctcgcggatttacctacatgtaggagtcccctacccaaccccgggcagcccaggatcctgcacccagtgagccctcatcaatggctaactgaatgggaagctagtgagagggtggggctggcggtggtcagcctatgtcagccctggacagaaggggtctccctcatcctgcagctggtccaggaagcagccctctttggagggctccactgagagctcctgccctgctggctccgtacccacagcagggccaggatggaggacgctgcatgctgtgccagaacgagtgtctagtggacctccccactagactccccactagactccccacctagctccctagcccaccacaggcaccgcttttggttctagggttctgcccagccagcctccctgtcccaaggccaggccatcccagctgagacccctgcccaggatccgctgcatggctggcatctgtgccaacctcct

SEQ ID NO: 69788 - DNA, 1542 bp, Homo sapiens; identical to SEQ ID NO: 69049

SEQ ID NO: 69789 - DNA, 516 bp, Homo sapiens
cccatctcccttgcgcgaaacgagcctcagcacgaaggcgacagaggggccggcagggggcgcccgagccccgtctctggagcacaaagacccccggcccctgcgcgacccggacgagctcgcattcagccaacgactcctgtgagaaacattccagcaagcactcggctgctcccctgcccgccgcgctcacaaccgcgtccattccctcctcactctaaagccagccccccgtgcacctgagaggccagtccaggctgtgacgccgcatcctcacctcccgcaacagggaggtcagcaggcggccgagcagcagggacagaccctcagcctcatctcatcttggcccgggacctgcaaccctcagccttcaaaaccacaccaaagccaagcggcccccagggcctgcacttacgggacagcgagtgggcccctctgggcaggtactcgaacagcagggagccgtcatcccccagcacgtcggccttcagcgacagcaggctgttcttaccggac

SEQ ID NO: 69790 - DNA, 967 bp, Homo sapiens
cgcacagggggaaatgaggctcagggaggcagctctcctggcgtgtgcctgctctgccaaccagctgctcggtggcctggggcaagccgctaagcctcagtttcccgtctgcaacagaacagccacctccgcggcatcagaagctgctgcagagtccgaggcacggagtggtcttccagggcacggcactgtgccctgggcatcagtatctcctctgccttgcacgcctgcgtgttacacaggccaggcccgcctggggggtgacttggaacctcagcttccttctgacctgtaggcaggggcccccctcaagggaagcagctctggagaaaaagtacaacatccttccctgcattctcctgcgttcggcagggacagaaactgggcagctttctggagcgcggtttggcaacatgtgggcactgaaaacacagtgctccctccccagagccagggaccctcagtgtcagagaggagccctgcgagctccctccccagagccagggaccctcagggtcagagaggagccctgcgagctccctccccagagccagggaccctcagggtcagagaggagccctggcttccagcacaaaggcaggtgcactcagtggatcctgcagccctacagcaacggtgggaaccaggaaaacctggacgacagggcctcttgctccccccaccccatctgggaagtgtgtgggaagtttctacactgcgtcaccctctctactactgtttaccttccaaggttgagccatcctagtggctgctgtggccacacctgcagcccacacggccaaccctccacagcatctgtccagaggcccaggcagctcctgccaggaaccccgcagtggcgcctcctgtccctctccccaggttagaagcctctgctgtccaccctgcatcctccatgggaacaagggcctcgcgcggagccaggcctgggtttgaattctgactc

SEQ ID NO: 69791 - DNA, 811 bp, Homo sapiens
  misc_feature (1)...(811): n = a,t,c or g
tggaacccngggagncggaacttttacagtgagcccaaggatcatgccnactgctctcccagcctgggcccatatagcgagagtttgtctcaaaacaaacaaacaaaacactaaaggaaattagggctttaaaaaaatggaacgtcttccccatgcccttggattgttaagatttaatattattgtaaaggcaatactccccaaactcatctacagatttaatacgacccctatcaaaattgcagctgcctattttgcagaaaatgacaaacatcctaaacttcatatgaaaatgagagatccagaagagtcaaaacaatcttgaaaaagaacaaagttggaggactcacacatttcactttcaaaccttactacaaagccacagtaatcaagacagtgtagtactggcgtaaggacagacatatggactgatggaataaaattgagagccaaaaataaactcttaaatgcacattcaactgatttttgacagggatgccaagaccattcaatgggaaagaatagtcttttcaacaaatggtaatggaaaattggataaacacgtacataataatgaagttggatccctacctcataccttatgaaaaagattaactcaaaatggatcagagtattaaatgtaagtgctaaaactaaacacgggtgtaacttttcctgtccttggattaggcaatagtttcttatgacacccaaagcataagcatccaaaggaaaacaatagagatctttaaaattaaaaatgtatgtacttcaaaggacactatcaagaaagtgaaaagacaatccacag

SEQ ID NO: 69792 - DNA, 963 bp, Homo sapiens; identical to SEQ ID NO: 69053

SEQ ID NO: 69793 - DNA, 860 bp, Homo sapiens
ttttttttttgagatggaatctcgctctgtcgcccaggctggagtgcagtggcacgatctcaactcactgcaagctccgcctcctgggttcacaccattctcctgcctcagcctcctgagtagctgggactacaggcgcctgccacaacgcccggctaattttttgtatttttagtagagacggggtttcactgtggtctcaatctcctgacttcatggtccgcctgcctcagcctcccaaagttctgggattacaggtgtgagccaccgcgcccagcccgtttttaagattttttatttgaaaaattgccaattctttaagtgttttctttttcagatttatgaatttctttatcttttaagctatctataccttactgcaatttggtaaagcagacttttgtgaacaaaaattataacatttacttttgctccctacctgactgccacagaactgggcaactattcatgagtattcatatgtttatggtaattcagttatttgcacaagttcagtgagaatctgctgtctttataatgggatatagtttaaaacattggttatattaccaaggctttgattgggatgttatatttgagaaaatacagagaatgatagattaacggagtgtctaatctatcgtgtcaaccccaaatttttacgtatgagatcctttagtccacccaatggctgacagtaacagcatctttaacacaactctttgttcaaatgtactatggtctcttttagagtcagactcctagactcacttgttctcactgtctgttttaatttaacccaggcatgcaatgctagataataaaattgctccctattggctgatcaaaaaaaaaaaaaa

SEQ ID NO: 69794 - DNA, 451 bp, Homo sapiens; identical to SEQ ID NO: 69055

SEQ ID NO: 69795 - DNA, 453 bp, Homo sapiens; identical to SEQ ID NO: 69056

SEQ ID NO: 69796 - DNA, 553 bp, Homo sapiens; identical to SEQ ID NO: 69057

SEQ ID NO: 69797 - DNA, 306 bp, Homo sapiens; identical to SEQ ID NO: 69058

SEQ ID NO: 69798 - DNA, 594 bp, Homo sapiens; identical to SEQ ID NO: 69059

SEQ ID NO: 69799 - DNA, 421 bp, Homo sapiens; identical to SEQ ID NO: 69060

SEQ ID NO: 69800 - DNA, 1194 bp, Homo sapiens
ctttgtggcatcaaatcattatgtttgtatgtttggaaggccacgccatctatcctcccacccagggcaggaatttctgctcccacttttgctttcctggaggtgaaataggaagaacaaggacccatgctcaagtccccaaagaatggcaggatgccctcagtggaggcagactgtatttaaatgcaattcacctctttggggtctaggaaaagccacccgtaggttcatttgctgggaaacacggtctgcgtgcctgaggcagtggacaccagggttgtggccttgccaagagctgactttctccggaggtctgtctgctgtccggagtggcagccacttcggtgggcaaataggacggtcatctctgggcccaaggacgctgcttcaggctgggacgccttgagggtggctggctgttcaggctttccggaggtgggatgggaggtgtaatgtttggtgggaggagggctgtaattctgaaatctcacggttttgacttgcttttcgatgccatttcttgagttttctggtttcaccaggatggatggtggggcagatgcgggcggttttggcagaggctcactcttgatggggatttctttgtcttccataatgagggagctggccgcggagtggatccgggcctcactgcccctgctgatgcacgtgagggcgggctcccccgtgagggcaggcttggaccccatctccaccaccacggctgagggggaggaggggatcccctgtggctggtagaattggaactgctgaggccgaaggaccatggtggggctgcgtctgagggagcctaccacgagagtggggatcccggactggaggggtctctgcagggatccattctttctcatgctgctccgccctttccgaagagacccttgtcctaaagtcccagggccggctgtgcttctcacggggttgactatggcagtgggcacaaagacggatttgaagggacggctttgccgtggatcaccttctgaaatgctgccttgggaggacacagaggaggtggataacgtccatgtggtgtagagaccagggctccgggagtctggaaaactagaggtctttctgaaaatggggatgacggtaatttggtttgcaaagaatgccgacttcgccccgttggaccaagggggacggccccctggaggccagaccgggccctgg

SEQ ID NO: 69801 - DNA, 768 bp, Homo sapiens; identical to SEQ ID NO: 69062
  misc_feature (1)...(768): n = a,t,c or g

SEQ ID NO: 69802 - DNA, 447 bp, Homo sapiens
tggggcatgggaatggattctttatcctgccccagcccaccaggatgctggttaggctccccctagcccttgccgacctctccctcctaggcccttgcagtcccgtttatttctcccatacagccttgtgacaccgaggtaaaagtgtatgtgtgtgcacagggccatgtgtgcgagcacgtgtgcattcctgcatatgtgtgctgcgtccgtgacatgcatgtgcaggagtgcagtatccactgccgtgtgtgtgcatgtgtgcacatgcccctggccttgtgtgtatgaacttgtggggcttgtgcatgtgtatgtgcaagcgtccacgtgtgtgcgtgtgtggggtgccccatcctggggaaggtgtatctgcaggatgctcgtgctaggaagctcagggccatcattttccaacccggctcaagccggggaattccaccacgc

SEQ ID NO: 69803 - DNA, 822 bp, Homo sapiens; identical to SEQ ID NO: 69064

SEQ ID NO: 69804 - DNA, 416 bp, Homo sapiens; identical to SEQ ID NO: 69065

SEQ ID NO: 69805 - DNA, 769 bp, Homo sapiens; identical to SEQ ID NO: 69066
  misc_feature (1)...(769): n = a,t,c or g

SEQ ID NO: 69806 - DNA, 797 bp, Homo sapiens; identical to SEQ ID NO: 69067
  misc_feature (1)...(797): n = a,t,c or g

SEQ ID NO: 69807 - DNA, 411 bp, Homo sapiens; identical to SEQ ID NO: 69068

SEQ ID NO: 69808 - DNA, 1390 bp, Homo sapiens; identical to SEQ ID NO: 69069

SEQ ID NO: 69809 - DNA, 956 bp, Homo sapiens
cctcaaagggccccactgcaggattttggctcctcaaaggtcgtgaacccgaaaggctcatccccgggggcttagtcaaagcccccaatggggaggggcccccacaagaaaggctggaggggccctttagggggtgggtttcccctgaaaagcccgcctctcccccaaaggaaattttcccctaaataaaaaaaacagccctgggcgccaaaacgcccaccttggtgtcaagggttatttgggggggggggaaaaaggggccttttttgggttttttttttgagcccccaaaaaaaaaagaaagggaaaggggtcttaccccaggcaagcggccacccccggcaggagggtcccccggcaggagcgtcccagccactccgcagtcactcctgacccagaaaagaacaaccacagctgggcccagcaccccgggccactccctgcagctgcccacacatctggcagctgggtccacttatgcaatgtggatcgggcttcttacatctgaaatctgcgtctctatccctcctctgagaccagtgtctcctgccagcttccatggccccgggatgacctcactctcccagggtctccctgcgtcctgggagctctggccgaggagcagcaggggctgatggcagagcgggggcaggtcagagctcagcagatggggtcctgaatacacgggggatgtgggaggggccagggggctggggatgcccaggatttggcacgggggtctctgtgtcccacccactcctggcacaaaagccccagcctcaggaccccggtcacaggcacccgggggtgggggtgaccagcagcagttcagaggcaggtgtgggcaatgtgggcctgagtctcctccccactcacgtcactgcccgcggggacacagcggcatttctggggcactcggcatgccgggttcgctcgttccacgcgaggcgtattga

SEQ ID NO: 69810 - DNA, 1505 bp, Homo sapiens; identical to SEQ ID NO: 69071

SEQ ID NO: 69811 - DNA, 705 bp, Homo sapiens; identical to SEQ ID NO: 69072

SEQ ID NO: 69812 - DNA, 627 bp, Homo sapiens
cgaattcggcacgaggttgcacagaggagaggcgccctaagaatgtaagcattgtgggaaagcattcatatctgccaagatcgtttgaatacatgcaaaacacacactggagagaaacctatgaatgtaaggaatgcaaacaagcattcaattatttttcttccttgcatatacatgaaaggactcatacgagagagaatccgtatgaatgtaaggattgtgggaaagcattcagcttgcttaattgctttcatagacatgtaaagacacaccagaaggaaaccctatgaatgtaagcaatgtggcaaaagctttcacttcttccagttcttttcaatatcatgaaaggactcacactggggagaaaccgtatcaatgtaagcaatgtgggaaagccgtcagatcagcctcaagacttcaaatgcatggaagcactcacacttggcagaaactctatgaatgtaagcagtatgggaaagccttcagatcggctaggattctttgaatacaaataatgaatgtaaacaattaactgtttataataactgtatactaacaaatgttattctttttaaataattaagaagctataataaaatatccattggtgtcatgtattagatccaa

SEQ ID NO: 69813 - DNA, 716 bp, Homo sapiens
tggcaacagagcgagactccatctcaaaataaataataaaataaaatggtttcctcctgttttcagtagagatggagatgaatccatcccttttttcctatagtaattccatccattctgtcaggaggaataggtattggaagcctgttgagcatccaggggatcaaggggtgttagacaagtggattcttatctttctcccttctgttctttctccttaggaccagctttatccagggactctaccattcccacccctttggccccactccacgacaaccacttccccatcttctcctctattctggtctcccctgcccccacgccttcccacccagcgtcttccccaggttcccccactacctctccctcagatccaggccctcagctcagcatgggtggttctccctccaggaaagggggaggagggaccaggacctgagttgcatagcggctgcctggatgggcttagaagcctttttgagggacctccctgcccctatcctggggcttggatacctttccaagtccctggaactgcccacccttcccctgccaccccgtcaggagatcctagtatggaggaacatctgtctgtcatgtatgagagactgagacaagagcttcccaagctcttacttcagtcccacgactacagtctgtattccttggatgtggaattcatcgaatgagagccttaacatacgtaccaaggg

SEQ ID NO: 69814 - DNA, 1139 bp, Homo sapiens; identical to SEQ ID NO: 69074

SEQ ID NO: 69815 - DNA, 1112 bp, Homo sapiens; identical to SEQ ID NO: 69075

SEQ ID NO: 69816 - DNA, 881 bp, Homo sapiens
gcggatgtccccggggcacagcgagcggttcctggtgacggcccagagccccgggaccccctggactgttgggcctgcgctgttcttgtaacagcccagaatctgctgggggctgccttcaatcttctcctgctggtgctggtgctagggaccatcttgctacccgctgtcaccatgctgggcttcggcttcctctgccactctcagttcctgcgctcccaggcacccccttgcaccgcgcacctgcgggaccccggtttcacggccctactggtcaccggattcctgctcctcgtgccgctgctcgtgcttgctctggccagctaccgccgcctctgcctgcgcctccgcctagccgattgcctcgtgccctacagccgagccctttatcggcgtcggcgcgccccgcagccgcggcaaatccgggcctcaccagggtcccaggccgttcccacatcaggaaaggtctgggtctaatgaccctcgagtcaagaacaaccctgacgggctgccctcccctcttaattcggccccaaggacttgaagcccggcatcttcccgaccctgccctgccccccacccctgcctgagcggagtcctagcatccccttgggagcagcagcgtcagtggaccccagtgctgagaaaagccccccacatcccggaaaacccactttcctttcacgabcccacatctcaatcctgaacatctaggctggaacctgcacackctccccctcagctccgtcgtgaatgggacaacaatctcgtgccctcgttttatggtgcagcttctctagtatttctggggctggggggcggggctggaggggaaggagtgtccacgcatcaataaagatttaacgaactgaacgcgcaaa

SEQ ID NO: 69817 - DNA, 512 bp, Homo sapiens; identical to SEQ ID NO: 69077

SEQ ID NO: 69818 - DNA, 402 bp, Homo sapiens
cccagaatctaatcaatgccacgtccacatgaattcccaaggcacatcacctgaatctctctagtggtcttcgctatacactgacttacccgttcctatttacaacttatggcccttgctgaattattggcattttaaagtagtgactagtcctagccacagcacccagacaagagaaagaaaaaaaggcatccaaattgattaagaggaagtcaaacttgctgttcgccgatgatataatcatatacctagaaagccctaaagacttacccaaaaagcccctagatctgacaaataaattcagtaaagtttcaagatacaaaattaatgtacacaaatcagtagcattgctatataccaccatcggctaagctgagaatcaaatcaagaactcaacctctt

SEQ ID NO: 69819 - DNA, 374 bp, Homo sapiens; identical to SEQ ID NO: 69079

SEQ ID NO: 69820 - DNA, 640 bp, Homo sapiens; identical to SEQ ID NO: 69080
  misc_feature (1)...(640): n = a,t,c or g

SEQ ID NO: 69821 - DNA, 454 bp, Homo sapiens; identical to SEQ ID NO: 69081

SEQ ID NO: 69822 - DNA, 358 bp, Homo sapiens; identical to SEQ ID NO: 69082

SEQ ID NO: 69823 - DNA, 718 bp, Homo sapiens; identical to SEQ ID NO: 69083

SEQ ID NO: 69824 - DNA, 335 bp, Homo sapiens
tcaacacccactggtgtaaggtcataacgcattggtgtcaggtcatcacgcactggtgccaggtcatcgtgcactggtgtcaggtcattgcgcgctggtgtcaggtcatgatgcactggtgtcaggtcatcaagcactggtgccaggtcatcacacactggtgtcaggtcatcacgcactggttccaggtcatcacgcacaggtcttcacacactggtgccaggtcatcacacactggtgccaggtcatgcactcaggcttgggcgggatgggggcagcactcccttttgagtccaggtggcctggctctggaattcatgctctaaaatcccaag

SEQ ID NO: 69825 - DNA, 457 bp, Homo sapiens; identical to SEQ ID NO: 69085

SEQ ID NO: 69826 - DNA, 489 bp, Homo sapiens
ccgcctttgaggggttaattccggtggttcacccgacggcgtttgtccatcccagtgccgtcttgattggcgatgtgattgtgggagccggtgtctacatcggcccactcgcctcactgcgtggtgactacgggcggttgatcgtgcaagcgggagccaatattcaggatggctgcattatgcatggctactgcgacactgacactatcgttggggaaaacggccatatcgggcacggagcgatcctgcatggttgtttgattggtcgcgatgcattggtcgggatgaacagcgtgattatggatggcgcggtcattggcgaagagagcattgttgccgccatgagctttgtcaaagcgggctttcgcggcgagaaacgccagttgttgatgggtacgccagcccgcgctgtacgcaatgttagtcaaggcgagtaacttgtggtaacggcagggttttaccagtcatcaggatctccgggtacggaca

SEQ ID NO: 69827 - DNA, 480 bp, Homo sapiens; identical to SEQ ID NO: 69087
  misc_feature (1)...(480): n = a,t,c or g

SEQ ID NO: 69828 - DNA, 291 bp, Homo sapiens
tatgtaggggccacaccagtgaccagacacctcccaccacaacaatgaccagacacctcccaccacaccagtgaccacacacctcccaccacaccagtgaccacacacctcccaccacaccggtgaccagacacctcccaccacaccggtgaccagacacctcctaccacaatgaccagacacctcccaccacaccagtgacccagacacctcccatcacaccagtgacccagacgcctcccaccacaccagtgaccagacacctcccactaggccggcaccaacactggc

SEQ ID NO: 69829 - DNA, 888 bp, Homo sapiens
tcttacagactggaacctacctttggcttttatgaaaaagaggctctgtgagaaaattgaaggctccaaatccttagctcagagctggaggatgaaggatcggatgaacacagtcagtgttgccttagttttgtgcctgaatgttggtgtggaccctcccgatgtggtgaagaccacgccctgtgcacgcttggaatgctggatcgatcctctgtcgatgggtcctcagaaagctctgggaaccatcggtgcaaatttacagaagcagtacgagaactggcagccaagggcccggtacaagcagagccttgacccaactgtggatgaagtcaagaagctctgcacgtccttacgtcgcaacgccaaggaggagcgagtcctctttcactacaatggccacggggtgccccggcccacagtcaacggggaggtctgggtcttcaacaagaactacacgcagtacatccctctgtccatatatgacctgcagacgtggatgggcagcccgtcgatcttcgtctacgactgctccaatgctggcttgatcgtcaagtccttcaagcagttcgcactacagcgggagcaggagctggaggtagctgcaatcaacccaaatcaccctcttgctcagatgcctttgcctccgtcgatgaaaaactgcatccagctggcagcctgcgaggccaccgagctgctgcccatgatccccgacctcccggctgacctattcacctcctgcctcaccacccccatcaagatcgccctgcgctggttttgcatgcagaaatgtgtcagtctggtgcctggcgtcacactggatttgatagaaaagtaagtaggatttttaagctcttggggctctctggatctgatgagtttcttttcctt

SEQ ID NO: 69830 - DNA, 1207 bp, Homo sapiens; identical to SEQ ID NO: 69090

SEQ ID NO: 69831 - DNA, 524 bp, Homo sapiens; identical to SEQ ID NO: 69091

SEQ ID NO: 69832 - DNA, 623 bp, Homo sapiens; identical to SEQ ID NO: 69092
  misc_feature (1)...(623): n = a,t,c or g

SEQ ID NO: 69833 - DNA, 408 bp, Homo sapiens
ttttggccgcagagccttcctgcaagcctgcttccttcaccttcttttacatcttcataccttccagaggcaccagccccaccctttgccaaaaccgctcctgccaaggcccccatgacctgcgtgcggagaaaccccacctctatcactacagtcaggtttctgcctgcagggtccccacctcgatcagtgagtctcccttagctcctcacaaagccccagcttctgtaagaccctttctctgactcccactcccctccctgagatcccatgaccaccccaggtgctgcccctagagccaagcctccatcctcgcattaagcctccagcctgtcactgacccccattcccccaacaagtccttgagctccagcctgtcacatcccagtccctgcctgtgtccgtgac

SEQ ID NO: 69834 - DNA, 2219 bp, Homo sapiens
cgggcggtcgggcgggaacgcagtgttgttggagagcgggggcccggcttcgcggcatttcgccctctccggcccttccggaggctccgggtttgtgccgtgtgcgtgcggggctcggcgctggggcgctcggtaggtctcccgcggggaggaggcggcgggggccccgtgtttcttcctccccggccccccacccgcgccgtgtcttatgtcgctgccttctcttcctgtttttcagctgtcacgaccggaggggggactcgcagccttaccaggcacttaagtattcatcgaagagtcaccccagtagcggtgatcacagacatgaaaagatgcgagacgccggagatccttcaccaccaaataaaatgttgcggagatctgatagtcctgaaaacaaatacagtgacagcacaggtcacagtaaggccaaaaatgtgcatactcacagagttagagagagggatggtgggaccagttactctccacaagaaaattcacacaaccacagtgctcttcatagttcaaatttcacattctttctaattccaagcaattaaccccaaggcaaaactttcaggattgcaccttatgattctggcagatgactgggtctggagcatattagctcttctggggaaaagtactactacaattgtcgaacagaagtttcacaatggggaaaaaccccaaagagtggcttggaaagaggacagagacaaaaagaagcaaacaagatggcagtcaacagcttcccaaaagatagggattacagaagagaggtgatgcaagcaacagccactagtgggtttgccagtggaaaatctacatcaggagacaaacccgtatcacattcttgcacaactccttccacgtcttctgcctctggactgaaccccacatctgcacctccaacatctgcttcagcgggtccctgtttctccgtgttccacagctcgccaatacctcccttacttcaggacccaaatcttcttagacaattgctgtcctgctttggaagccacgctgcagcttaataattctaatgtggacataatctataataaatgaagttcttacaggagatgtgacacaagcctcactgcagactataattcataagtgtcttactgctggaccatctgttttcaaaataacgtctctgatttctcaagctgctcagctctctacacaagcccaggcatctaatcagtctccgatgtctttaacatctgatgcgtcatccccaaggatcatatgtttctccaaggaataaggcacacctcaaacttaacacagtccctattcaaacctttggattcagtactcctcctgtttcatcacagccaaaggttagtactccagtagttaagcaaggaccagtgtcacagtcagccacacagcagcctgtaactgctgacaagcagcaaggtcatgaacctgtctctcctcgaagtcttcagcgctcaagtagccagagaagtccatcacctggtcccaatcatacttctaatagtagtaatgcatcaaatgcaacagttgtaccacagaattcttctgcccgatccacgtgttcattaacgcctgcactagcagcacacttcagtgaaaatctcataaaacacgttcaaggatggcctgcagatcatgcagagaagcaggcatcaagattacgcgaagaagcgcataacatgggaactattcacatgtccgaaatttgtactgaattaaaaaatttaagatctttagtccgagtatgtgaaattcaagcaactttgcgagagcaaaggatactatttttgagacaacaaattaaggaacttgaaaagctaaaaaatcagaattccttcatggtgtgaagatgtgaataattgcacatggttttgagaacaggaactgtaaatctgttgcccaatcttaacatttttgagctgcatttaagtagactttggaccgttaagctgggcaaaggaaatgacaaggggacggggtctgtgagagtcaattcaggggaaagatacaagattgatttgtaaaacccttgaaatgtagatttcttgtagatgtatccttcacgttgtaaatatgttttgtagagtgaagccatgggaagccatgtgtaacagagcttagacatccaaaactaatcaatgctgaggtggctaaatacctagccttttacatgtaaacctgtctgcaaaattagcttttttaaaaaa

SEQ ID NO: 69835 - DNA, 403 bp, Homo sapiens
ccgtgggaaactgttacaacagctgcaatgcagaaatatccaagccctgtgaacccgagcgtggtgtgggttgacgtgttaaacagacgtatagatccctccagagagttgcacagacttctccgcacagtgggaactgcaaaactcttactggtgcagcaaaacgcaaaacatatatactagaatattctgtagttaatcctgtagagaaaacaatggaacttaaatctactaatatttcacttacaaatatgatttcagtagatgagagatttatacacaaaccacatcatcgggaccccccaaaaaactattttgactcaagaagccataatcactgaagagaggtagcctcagcagttaccttgaaggactgatggcaagaactataccttcaaatgct

SEQ ID NO: 69836 - DNA, 850 bp, Homo sapiens; identical to SEQ ID NO: 67920

SEQ ID NO: 69837 - DNA, 775 bp, Homo sapiens
ctcctgccccagcctcccaagtagctgcgaccacaggcacgtgccaccatgcctggctaattttttttttctgagacagtgtttcactcttgttgcccaggctgcagtgcaatggcgcgacctcggctcattgcaacctctgcctcccaggttcaagcgattctcctatctcagccttccaagtagctgggattacaggcatgagccactatgccccactttgcccggctaattttgtatttttagtagagatggggtttccccgtgttggtcagcctggtctcaaactcctgacctcaggtgatccacccgacttgacctgccaaagtgctgggattacaggcgtgagccactgcacccgccagccatgtcttttcatgtctccagctctggtgcggctgaagggtgtgggcaggtggacctcagccggcccatctgcccagcgaggatgtgaattcctgcctgagtgcctgtgagtaccccacgagaaggatgggctacctcttgggtgagacaggtggatgcatctataacccccgaggccggaaggtccccactcaaagcccagtgcctccccgtcccctgggcccacatcccagagtagacggccctgccagacagaggggtgagggccacagagatgagtgccggagtccaaatcggtgcaactttaccacgagtgagatctggttggccgatgccactgaatccgggttagaggacgaggaagaggaagacgaggaggaagaggagacggaatttccttccgagaccc

SEQ ID NO: 69838 - DNA, 340 bp, Homo sapiens
aatgacgggccagctgccaacagcatctccgtcaggacccccaccaagggccccaacgaccaccgggtcgttcaaacccacagccgccaatccagcctccgccactaggggcaccactgctgcggtcagtacagaccgctacaaccacaaatgccgcaaccacgaccccgtctaggatcagatacacagccggggaggccagcaccgccccccaacacaaggcaatggcgggtgctacagccagcgccaccagcagcagtgccgccgccgcagccactactccagcccccagcgcgcctgccaccaaagccacgccaagcatggccgcagtcgcccccgc

SEQ ID NO: 69839 - DNA, 356 bp, Homo sapiens; identical to SEQ ID NO: 67923

SEQ ID NO: 69840 - DNA, 994 bp, Homo sapiens; identical to SEQ ID NO: 67924

SEQ ID NO: 69841 - DNA, 358 bp, Homo sapiens; identical to SEQ ID NO: 67925

SEQ ID NO: 69842 - DNA, 400 bp, Homo sapiens; identical to SEQ ID NO: 67926

SEQ ID NO: 69843 - DNA, 933 bp, Homo sapiens
  misc_feature (1)...(933): n = a,t,c or g
ggccgctggtccggaggtagcggtgccggccgagggggtcggggcggctggggcggtcggggccggcgtcctcgggcccagcggtctccatcccggggcacgctggacgtagtgtctgtggacttggtcaccgacagcgatgaggaaattctggaggtcgccaccgctcgcggtgccgcggacgaggttgaggtggagcccccggagcccccggggccggtcgcgtcccgggataacagcaacagtgacagcgaaggggaggacaggcggcccgcaggacccccgcgggagccggtcaggcggcggcggcggctggtgcctggatccgggggaggcgccgcctggttccggtgtactcggggaaggtttaaaagcagccttcgccttatcccagatgatctatccctcctgaaactctaccctccaggggatgaggaagaggcagagctggcagattcgagtggtctctaccatgagggctccccatcaccaggctctccctggaagacaaagctgaggactaaggataaagaagagaagaaaaagacagagtttctgtgagtgagncccagggcccttgggcccctgggagcaggaaagtgagttggaggggtaagcggaggcaggcaggactcttgggtgactcctgaaaggttaagaagaagggatagaaggactgttgagtttcatgtggggaatgaatcgcttggggaaaagaggtggcttaccccggagggtgacagtgaacccttcaggatcacccttgggagtggattctgagaccctagtaatgtgagcttaaggtatggttccaatccagcttccctgtcctctctgtgcttctctttcttcatctataaaaccccgttttatagcctgggagacatggagagaccctgtctctacaaaaaataaaaaaaaattagcctggca

SEQ ID NO: 69844 - DNA, 1606 bp, Homo sapiens
ccagcacatgacgacttctatctcgtagtgtgcagtgcctgtaaccaggtcgtcaagccacaggttttccagtcgcactgcgagagaagacacggttcaatgtgtagaccttctccctctccagtgtctccagcctccaatcccaggacatcactagtacaggtgaaaacaaaagcctgtctcagcggccatcactctgccagcagcacctcaaagccattcaaaacgcccaaagacaatctacttacctccagcagcaaacagcacacagtctttcctgcgaaaggatcaagggataaaccatgtgttccagttcctgtagtcagtttagagaaaattcctaacctagtgaaggcagatggtgccaatgtcaaaatgaactccacaaccactactgcagtttctgcctcctccacctcgtcctctgccgtctccacccctcctttaattaagcctgtcctgatgtccaagtcagtgccaccttcaccagagaagatcttaaatggcaaaggaattctgccaaccaccatagacaagagacgccaaaatggcaccaacagcagcaacaagccttacaggagactttcagagagagaatttgacccaaataagcactgtggagtattggatgccgagacaaagaaaccttgcacaagatccctcacctgcaagacacattcgctaagccatcggagggcagtcccaggccggaaaaagcaatttgacctcctcctggcagaacacaaagcaaagtcccgggaaaaagaagttaaagataaagagcatctcctgacttccacgagggaaatacttccaagccaatccgggccggcacaggattctctgctagggtcttcagggagctctgggccagaaccaaaagttgcatcccctgcaaaatccagaccacccaactctgtacttcctagaccatcatctgcaaatagcataagcagcagcacatcttcaaatcatagcggccacactccagagcccccactcccaccggttggaggtgacctcgccagccgactgtccagtgatgaaggggagatggacggagccgacgaatccgagaagctagactgtcagttctccacgcaccaccccagacctatggcgttttgctcatttgggagtcgcctcatgggacgagggtactatgtgtttgatagaagatgggatcgttttcgattcgcactaaactccatggtagaaaaacacctgaattcacagatgtggaagaagatccctcctgcgacagatagccccctgccctcgccagcagcccacatcaccacccccgttccagcatccgttttgcagcctttcagcaaccccagtgctgtgtatcttccttcagctcccatcagctcgaggctcacctcttcttacataatgacatcagccatgctctcaaacgcagctttcgtgacatcgccggacccgagcgccctcatgtcccacaccacagctttccctcatgtggccgcaaccctcagcatcatggactcaaccttcaaggccccatccgccgtgtccccgataccagccgtcatcccttccccatcccacaagccatccaaaaccaaaaccagctacgaaa

SEQ ID NO: 69845 - DNA, 411 bp, Homo sapiens; identical to SEQ ID NO: 67929

SEQ ID NO: 69846 - DNA, 541 bp, Homo sapiens
tacaagctggagataaggaccttgatgggcagctagactttgaagaatttgtccattatctccaagatcatgagaagaagctgaggctggtgtttaagagtttggacaaaaagaatgatggacgcattgacgcgcaggagatcatgcagtccctgcgggactttgggagtcaagatatctgaacagcaggcagaaaaaattctcaagagcatggataaaaacggcacgatgaccatcgactggaacgagtggagagactaccacctcctccaccccgtggaaaacatccccgagatcatcctctactggaagcattccacgatctttgatgtgggtgagaatctaacggtcccggatgagttcacagtggaggagaggcagacggggatgtggtggagacacctggtggcaggaggtggggcaggggccgtatccagaacctgcacggcccccctggacaggctcaaggtgctcatgcaggtccatgcctcccgcagcaacaacatgggcatcgttggtgccttcactcccatgattcgag

SEQ ID NO: 69847 - DNA, 1743 bp, Homo sapiens
  misc_feature (1)...(1743): n = a,t,c or g
ttttttttttttggagttcattagaccttttttattattctaccttttctgcatatgtttgcagttttcccaccgactcctccataaacaaacattttcctagaaacccaaaatatgtagtggccccaaaggagctccttaagccaaagtacttggtacaaagagacccatattcctataaacatgttaagtttgttcctaagcattccagacttttagaataagaacttcatttccaacttttttatttattaacatggggctaaacttttaagaaacaaccctaggtcttctatttcccaggagctggttcaaagtcttaaatgacaatataacttcattatgaaaatatactgaaaaggtacaaggggctgatgtaaaaacggttaatcaagggttcccaggcatccatggggacttaagggtaacctgaaagaataacccccagcccaggctgcaaccagccaggccaggatgtgctggcttnacgtngatgaggtgctaaggcccatcgaatgcctcagaggaaagccggattcacgggggatcatctcaaccctgaggaaatcggttccttggggggtgatttcttgcccttttttttgtttttgtaaggaagagggttcccttcattccagtaactttagttttcccttaataaatattttcaaaaataaaaccaatcatcatccaaacaaacagggagccacttttgtagggtaagggtaaatcacaggataatgtattgggataactctgtttttttaaaataaaaaagccttacatggtcagggattgatggagtggggatgacaaatgcacatttcagactttcatcaccaatgaaaaaataaagcattttcatagacttaaaactgtcattagtgcattcggcttttggagaagggatgaaaatgtaaaatacttctacaacaataaaatgttaatagaaatcgtcatgtgctgaggtcattttaggtgagctaccattgtttgtttaaatacaagaaaaagtaatttccttggtcccaatttaagtggaaatcctttaaaaaagattgcctttaaaagaaccattatttgagggacaatgttttttccagacacattcctggatgatattccaaattcacttccataacaatccacagattaacccttttaattccacctttccttaaaaagctgtcagatttcccatttccttcgggagacatttttcacccagtgtgttgttcgattcccacaggttaagctttcttcattattattaaggaacttcataccatattagagagattgccattcattgctttcctcgtctttttcggaaaagacacaggccagactttgcttaggctaaagctgacgtctttaaaggcatgcaacaagaatatccccccacaatgattgtaaagaagccacttcaaagtaccaatggacatcgtcaacaggcatatcttgccactccttaaaaagaatagctgaacaagttaaaactgatgttgtaaagaatacataatatattggagtcacaatggaagtgttgaatatatccagggccctatttaggtaattaatctgtgtgctcacacagacgatgaggctcagcagcagaatccaagccaggggatgccgcagcacaggcttccctgcaaacagctccttgatagcaatgcccaggcccttcacacaggagactgaaaacgcgccgattacagagcagattgttatgtacacaag

SEQ ID NO: 69848 - DNA, 670 bp, Homo sapiens; identical to SEQ ID NO: 67931

SEQ ID NO: 69849 - DNA, 323 bp, Homo sapiens
cgaggacaaaccactcaactacaccaaaaggtcagaccaagaccgcgtcggcacgcccaccaccggctcagcataagcatcagcaggcaggaccaattaccaaacctggatccgccagactccaggaactggggatggagtgggtctcagctctttaccgcgatggtaggacattctacacagactccgtgaagggcagattcaccatctccagagacgattccaagaacatggtgtttcttcaaatgaatagcctgcgagtcgaggacacggctgtatattactgtgcgagagatcgtggatatcgtggtggtggtaattgc

SEQ ID NO: 69850 - DNA, 1362 bp, Homo sapiens; identical to SEQ ID NO: 67933

SEQ ID NO: 69851 - DNA, 569 bp, Homo sapiens; identical to SEQ ID NO: 67934

SEQ ID NO: 69852 - DNA, 1488 bp, Homo sapiens; identical to SEQ ID NO: 67935

SEQ ID NO: 69853 - DNA, 429 bp, Homo sapiens; identical to SEQ ID NO: 67936

SEQ ID NO: 69854 - DNA, 519 bp, Homo sapiens; identical to SEQ ID NO: 67937

SEQ ID NO: 69855 - DNA, 396 bp, Homo sapiens; identical to SEQ ID NO: 67938
  misc_feature (1)...(396): n = a,t,c or g

SEQ ID NO: 69856 - DNA, 1400 bp, Homo sapiens
  misc_feature (1)...(1400): n = a,t,c or g
gaacgttgtaaagtgcagtcctccactttagtgtcttctctggaggcggagctctctgaagttaaaatacagacccatattgtgcaacaggaaaaccaccttctcaaagatgaactggagaaaatgaaacagctgcacagatgtcccgatctctctgacttccagcaaaaaatctctagtgttctaagctacaacgaaaaactgctgaaagaaaaggaagctctgagtgaggaattaaatagctgtgtcgataagttggcaaaatcaagtcttttagagcatagaattgcgacgatgaagcaggaacagaaatcctgggaacatcagagtgcgagcttaaagtcacagctggtggcttctcaggaaaaggttcagaatttagaagacaccgtgcagaatgtaaacctgcaaatgtcccggatgaaatctgacctacgagtgactcagcaggaaaaggaggctttaaaacaagaagtgatgtctttacataagcaacttcagaatgctggtggcaagagctgggccccagagatagctactcatccatcagggctccataaccagcagaaaaggctgtcctgggacaagttggatcatctgatgaaatngaggaacagcagctgctttggcaagagaatgagaggctccagaccatggtacagaacaccaaagccgaactcacgcactcccgggagaaggtccgtcagttggaatccaatcttcttcccaagcaccaaaaacatctaaacccatcaggtaccatgaatcccacagagcaagaaaaattgagcttaaagagagagtgtgatcagtttcagaaagaacaatctcctgctaacaggaaggtcagtcagatgaattcccttgaacaagaattagaaacaattcatttggaaaatgaaggcctgaaaaagaaacaagtaaaactggatgagcagctcatggagatgcagcacctgaggtccactgcgacgcctagcccgtcccctcatgcttgggatttgcagctgctccagcagcaagcctgtccgatgggtgcccagggagcagtttctgcagcttcaacgccagctgctgcaggcagaaaggataaaccagcacctgcaggaggaacttgaaaacaggacctccgaaaccaacacaccacagggaaaccaggggacaactggtaactgttcatgggagggaacgattgttaggaagtttgaacagaaattgaaatttgttgaaaaggttttttcaagagaaagtgaatcagctcaaagaacaagtgagcctacctggtcatctctgttcacccacctcacattccagctttaactccagttttacatccctttattgccattaactcgttaacttatgttggctaataaaggcaaattctattaaaaaaaaaa

SEQ ID NO: 69857 - DNA, 386 bp, Homo sapiens; identical to SEQ ID NO: 67940

SEQ ID NO: 69858 - DNA, 1008 bp, Homo sapiens; identical to SEQ ID NO: 67941

SEQ ID NO: 69859 - DNA, 397 bp, Homo sapiens
ccttggaagacattgctgagtggatcctggccatgccagctatgccccgagaggacactggcttcccagccaaggagcctgtccacacccagccctcagagccccagtgacaatatcagagttggcagccaggggcctggtgctgcttggagcacctctgagcgggtgtctgaatacaccccaacacggcccatattcccatattcagaatgccgtccccaggacccgaggctaaagcccagcccccccggccctcccccagtcctgcccttcttcggttctgccatccccaagctcatctccagcccacccctgcgatctggcctgcacatggccccaaggtgccccccaagggtgaagctgggtccctcccaacagccctttccactcacgtcct

SEQ ID NO: 69860 - DNA, 2337 bp, Homo sapiens; identical to SEQ ID NO: 67943

SEQ ID NO: 69861 - DNA, 1788 bp, Homo sapiens
gcggccgctcgcgcgagtgcacgcggcagtggttggtgagcttggacttctcgctgaagctcttctcgcactcggggcacttgaagggccgctcgcctgtgtgagtccgctggtggcgcagcaggtgcgaggggcggctgaagctcttgccgcacaggctgcagatgaaggagacctcatgcttgcccgcgtgcacgcgctgatggatcaccaagctgatgtgcaggcggaagctcttcttgcactcggggcacgtgtagggccgctcacccgtgtgcgtgatctggtgtttggtcaggctggacttgtggctgaagctgctgtcgcactcggggcacttgtagggcttagggccaccgccgccgctaccagagctgggtgacttgggacgcggcttgagcgcgtgcttggggttgaacgtgggcccgcgttcgggtgagacgcagcctccgcgcacgcggtggatgcgctggtgcagcgtgagctgttgcttgtgccggaagctgatctcgcattcggcgcactcgtagggcccctccttgatgtggttgcgctggtggatgatgaggttgatcttcaggcggaagctcttgccgcactccatgcatgtgaagggccgctcgccgcgccggttccgctgctgctggctcgaggccccgcggttctcgctcaggtgccgctcaccgtgcacggagggcgccagccttttcactgcggggtttcctagctgcaggggcggggggctctcctcgccctcgggggacatctccccgggcagcggggtctggtacatactggcctcatatctcccggacagctgcccaagggattgcaagtgctgcggcagctcatcctcctcctcctcttcttcctcctcgtcttgttcctctgtcttgatcacgatcccctccgtgcagttcctctgctgcaccagcatctgcttcagttcgctgaactcgctggagccttccgtggactcctccagcgtgttctctggctcctgcatgtccaggtctggctgttccccacaggggtcacccagctctgagtcctggaagccgtgctcttccacctgtcccatcaggggctcaggtgtctccaaactttctgagccctcgtcgttggtctgtacctcgatcttaatcacgatcccatcgtgcgcagcactgggatctgtcggcgtttcgccctcctcagagtcttcctgctcctgcatggtgggccgctccccgcgctccatctgtgacatgaggtctggtttggaaattgcatagtccatggaaaccagggactcgtagttgcccctcatcacgttcttgtagagctccttctgccactcagacaggtttccccactcctgctccgagaagtgcacagcaacatcatcaaatgtgacagggaccttgggaacttctccattgctgccggggggcagccgcaggatccagaaatttctgtttttcagcaggttctccatgttctccagccgcctctgcagcagcccatactcctgcagcagggtccccaacacgacccacttgctctccagatggttcgcgaactccacggctgtcttctcgcagtcggctatcttcttttcatttgtccccgtcctgccttccagggtcagtagcctcatggcctgggcctccagcttcctctccactgcttggacggcagcccacacagccaagcgggtgatctctgccgtggggagcggctgttccttctggactgcagaagagatctggaaaggggtgtccttttgggaaaccgcccacgcgtccg

SEQ ID NO: 69862 - DNA, 728 bp, Homo sapiens; identical to SEQ ID NO: 67945
  misc_feature (1)...(728): n = a,t,c or g

SEQ ID NO: 69863 - DNA, 4975 bp, Homo sapiens; identical to SEQ ID NO: 67946

SEQ ID NO: 69864 - DNA, 346 bp, Homo sapiens; identical to SEQ ID NO: 67947

SEQ ID NO: 69865 - DNA, 381 bp, Homo sapiens; identical to SEQ ID NO: 38032

SEQ ID NO: 69866 - DNA, 403 bp, Homo sapiens; identical to SEQ ID NO: 67950

SEQ ID NO: 69867 - DNA, 357 bp, Homo sapiens; identical to SEQ ID NO: 67951

SEQ ID NO: 69868 - DNA, 422 bp, Homo sapiens; identical to SEQ ID NO: 67952

SEQ ID NO: 69869 - DNA, 378 bp, Homo sapiens; identical to SEQ ID NO: 67953
  misc_feature (1)...(378): n = a,t,c or g

SEQ ID NO: 69870 - DNA, 351 bp, Homo sapiens
cgccctacacaatggatcgaatatactgtatacagctcgtggatacgtacgcctagcacaggcccccatctcgaatacataagatatgaaggattagtaacgatacatgctgagtcagatatagagatggttcgtcctgcagcgcctcactccagaggagaggtctacgacaacagtgcgtgtgagccacttcgtggaggagttcaagaggaaacacaaaaaggacatcagccagaacaagcgagccgtgaggcggctgcgcgccgcctgcgggagggccaggaggaccctgtcgtccagcacccaggccaacctagaaattgattcactttatgaaggcattgacttcta

SEQ ID NO: 69871 - DNA, 342 bp, Homo sapiens; identical to SEQ ID NO: 67955

SEQ ID NO: 69872 - DNA, 384 bp, Homo sapiens; identical to SEQ ID NO: 67956

SEQ ID NO: 69873 - DNA, 313 bp, Homo sapiens; identical to SEQ ID NO: 67957

SEQ ID NO: 69874 - DNA, 684 bp, Homo sapiens; identical to SEQ ID NO: 67958

SEQ ID NO: 69875 - DNA, 398 bp, Homo sapiens
ggtgaaggataagttgctgcatttagtccctcctacaaccaagaaagagcacaatgcctatctggatttcggagggaacacattcctcatttgggtgtgttactccagcccatttatcgagtgagccgaaaggctgccaattttgagtggagtccagaacaggagaaggctctgcaacaggtccaggctgctgtgcaagctgcttggccacttgggccatacgacccagcagatccaatggtgcttgaggtgtcagtggcagatagggatgctgattggagctgttggcaggcctccataggtgaatcacagtggaggcctctagaacattggagcaaggccctgccctcttcttcagataactactctccttctgagagagagctcttgctcgtgcc

SEQ ID NO: 69876 - DNA, 635 bp, Homo sapiens; identical to SEQ ID NO: 67960

SEQ ID NO: 69877 - DNA, 467 bp, Homo sapiens; identical to SEQ ID NO: 67961

SEQ ID NO: 69878 - DNA, 784 bp, Homo sapiens; identical to SEQ ID NO: 67962

SEQ ID NO: 69879 - DNA, 351 bp, Homo sapiens; identical to SEQ ID NO: 67963

SEQ ID NO: 69880 - DNA, 1468 bp, Homo sapiens
gaaaaaagaagctgccttgttagtaacgggctctatggtttttctcatcaagaggtcatgacgccagtcagatcacactagccttgggcacagctgcctcctaccccagggcctgccaggctctcggggccatgctgtccaaaggagccctgaaccctgctgacatcaccgtcctgttcaagatgttcacaagcatggaccctcctccggttgaacttatccgcgttccagccttcctggacctgttcatgcagtcactctttaaaccaggggctcggatcaaccaggaccacaagcacaaatacatccacatcttggcgtacgcagcaagcgtggttgagacctggaagaagaacaagcgagtgagcatcaataaagatgagctgaagtcaacgtcaaaagctgtcgaaaccgttcacaatttgtgttgcaacgagaacaaaggggcctctgaactagtggcagaattgagcacactttatcagtgtattaggtttccagtggtagcaatgggtgtgctgaagtgggtggattggactgtatcagaaccaaggtactttcagctgcagactgaccatacccctgtccacctggcgttgctggatgagatcagcacctgccaccagctcctgcacccccaggtcctgcagctgcttgttaagctttttgagactgagcactcccagctggacgtgatggagcagcttgagttgaagaagacactgctggacaggatggttcacctgctgagtcgaggttatgtacttcctgttgtcagttacatccgaaagtgtctggagaagctggacactgacatttcactcattcgctattttgtcactgaggtgctggacgtcattgctcctccttatacctctgacttcgtgcaacttttcctccccatcctggagaatgacagcatcgcaggtaccatcaaaacggaaggcgagcatgaccctgtgacggagtttatagctcactgcaaatctaacttcatcatggtgaactaatttagagcatcctccagagctgaagcagaacattccagaacccgttgtggaaaaaccctttcaagaagctgttttaagaggctctggcagcgtcttgaaaatgggcaccgctgggaggaggtggatgacttctttacaaaggaaaatggtagcagcttcagtgagaaactgcccttacaaacagtcccttctctgctgtcaatccaatactgctcccaaatcctgttttcagtgttcatttccctcaaggcaggcgctgggctcccacgacccctcaggacagatctgggccgtcagccgcgggccgctgggaactccactcggggaactcctttccaagctgacctcagttttctcacaagaacccagttagctgatgttttattgtaattgtcttaatttgctaagaacaagttatcagttaatttttaaaaaagcctttctgctgggttggatta

SEQ ID NO: 69881 - DNA, 411 bp, Homo sapiens
tttcgtctctgatccggctcagctttccagtcagctgcggaaggagccacgctttcgggggttgcaagatggcggccaccagtggaactgatgagccggtttccggggagttggtgtctgtggcacatgcgctttctctcccagcagagtcgtatggcaacgatgtgagtatgactcacccacagctcccacccactcagctagcctgggatctctgcaggacctgcctgccactaagttataacttcacgtcctgataatctactgcagaccctctccacttacaccagaaactgcaccttcgttcagttcgttttaatcttggtccacaaacgcaggactaacgcctgtggaagtggttccccaagttggccacgctttagaattactggggagcttttaaacatcccg

SEQ ID NO: 69882 - DNA, 770 bp, Homo sapiens
tgagacctggctcatgccactgagcagctgaacatgctcacagaggcctcaaaaaaacactcgggggctgctgcagtctgcccaggaagaactgaccaagaaggaagccctgattcaggaacttcagcacaagctaaaccaaaagaaagaggaagtagaacagaagaagaatgaatataacttcaaaatgaggcaactagaacatgtgatggattctgctgctgaggatccccagagtcctaagacaccacctcactttcaaacacatttggcaaaactcctggaaacacaagaacaagagatagaagatggaagagcctctaagacttctttggaacaccttgtaacaaagctaaatgaagacagagaagtcaaaaatgctgaaatcctcagaatgaaggagcagttgcgtgaaatggaaaacctacgcatggaaagtcagcagttaatagagaaaaactggctcctgcaaggtcagctggatgatattaaaagacaaaaggaaaacagtgatcagaatcatccagataatcaacagctgaagaatgaacaagaagaaagtatcaaagaaagacttgcaaaaagtaaaatagttgaagaaatgctgaaaatgaaagcagacctagaagaagtccaaagtgccctttacaacaaagagatggaatgccttagaatgactgatgaagtcgaacgaacccaaactttggagtctaaagcattccaggaaaaagaacaactgagatcaaagctggaagaaatgtatgaagaaa

SEQ ID NO: 69883 - DNA, 493 bp, Homo sapiens; identical to SEQ ID NO: 67966

SEQ ID NO: 69884 - DNA, 342 bp, Homo sapiens
tggtaaagcatttaaagagtgttcaggacttagcgcccatcttgtaatccattctggagaaaaaccttacaaatgtaatgagtgtacaagaacttcaggcacaaattttccctcactcaacagagaagtcatactgcagaaaaaccttacacacgtaatgaatgtggcaaggtctttggtcaattgcacggcatcaaataattcatagtacagagaagccttacaaatgtaacaaacgttgaaagcatttagcaagcattcaggacttatggcccatcttctaatccatactggagagaaactttacaaatatagtgaatgcggcaaggtcttcctcgtgcc

SEQ ID NO: 69885 - DNA, 333 bp, Homo sapiens
cgggtgtagaggcagtcggatgtcgtggagtggggggcaggagggggtggagcggctggggcctcgtgggcggtgagggtcggcagggtgggtcttggaaggcaggtgggcggggaagtgctgtagcttataggggtatgggggagtgtgggtcaaggcaggaggacaggtcgggctgctggcagggtagtgcaaagggctattcacgaggggtagagccttctctcccaggccgaattgccaactcccaacacccctcctacagaaaatttggagtcctcgctcattccctggcagcccctacctaatagggtggtgaattaatctcgtgcc

SEQ ID NO: 69886 - DNA, 696 bp, Homo sapiens
agtgccctgcgcaaggaacaggactcatttctgagaaggatggacgcagccccaacaaatcagacaaggaccacatccggtggcccatgagtggcgctcatgatcttcagcaggcggcaccaggccctggcggggcgcaccagggtcaccccaaccaggataaccggaccgtcagccagatgctgagcgagcggtggtacaccctggggcccaatgagatgcagaaataccacgacctggccttccaggtgaaggtggcccacttgcaacaaggaccgaaagaagtccagctcagaggccaagcccacaagccaggggctagcaggagtgtaacaagggctcgtgggagcggagcatatcagagacgggcactgccactgcccctggggtgtcctctgaactccagtcagttgcagcccaaacacttcagagctcggataccaaggagcagcttctgtggggcagaatggctgcacacagtcagggaacctggctcagcctggcccaagccttctcccacagcggggtacacagcctggacggcagggaaatagaccgtcaggcactacgggaactgacacaggtggtgtctggcagtgcatcatatgttggcccaaagccatttactaagtatggagctcccgccctcaaggcagtaagtggtaagccaggtaattcgtggtcagagctcgtgcc

SEQ ID NO: 69887 - DNA, 1089 bp, Homo sapiens
ccagccacgatagacaagagacgccaagatggcaccaacagcagcaacaagccttacaggagactttcagagagagaatttgacccaaataagcactgtggagtattggatgccgagacaaagaaaccttgcacaagatccctcacctgcaagacacattcgctaagccatcggagggcagtcccaggccggaaaaagcaatttgacctcctcctggcagaacacaaagcaaagtcccgggaaaaagaagttaaagataaagagcatctcctgacttccacgagggaaatacttccaagccaatccgggccggcacaggattctctgctagggtcttcagggagctctgggccagaaccaaaagttgcatcccctgcaaaatccagaccacccaactctgtacttcctagaccatcatctgcaaatagcataagcagcagcacatcttcaaatcatagcggccacactccagagcccccactcccaccggttggaggtgacctcgccagccgactgtccagtgatgaaggggagatggacggagccgacgaatccgagaagctagactgtcagttctccacgcaccaccccagacctatggcgttttgctcatttgggagtcgcctcatgggacgagggtactatgtgtttgatagaagatgggatcgttttcgattcgcactaaactccatggtagaaaaacacctgaattcacagatgtggaagaagatccctcctgcgggcagataggccccctgccctcgccagcagcccacatcaccacccccgttccagcatccgttttgcagcctttcagcaaccccagtgctgtgtatcttccttcagctcccatcagctcgaggctcacctcttcttacataatgacatcagccatgctctcaaacgcagctttcgtgacatcgccggacccgagcgccctcatgtcccacaccacagctttccctcatgtggccgcaaccctcagcatcatggactcaaccttcaaggccccatccgccgtgtccccgataccagccgtcatcccttccccatcccacaagccatccaaaaccaaaaccagctacgaaa

SEQ ID NO: 69888 - DNA, 358 bp, Homo sapiens
ccatcgcgcaccgccgcacctcccccccatcccccctccctctcccccctctcccctctcccaccaccccccccctgcctcctcccgcccgccaccctccccgatccctcctctcctgccatcccgctccagccactccctgttcctacgtcatccccgatttatcattttcctttctcatactcccctcacttcacctgattttggtatccagattgtaatttaactttataaaaagagttaagaaagtgttgctgtttttcttttttctggaatggattaagattagcatatctcttcatttaatgtttggtagaacttgttagaacagtctgagtatgtttttatccctcgtgcc

SEQ ID NO: 69889 - DNA, 602 bp, Homo sapiens; identical to SEQ ID NO: 67972
  misc_feature (1)...(602): n = a,t,c or g

SEQ ID NO: 69890 - DNA, 334 bp, Homo sapiens
  misc_feature (1)...(334): n = a,t,c or g
caccccaacaccacaccaaacacccaaacccccacccaacaacccaaaacacacccacacacacaccacaaccaccccacaaaaccaaccacccnccaacaccaaacaaccacaaccaccaacaaacaaacccacacaaccccacaccaaacaaaacacaccaacccacaaaacnnananaannannacnncncnaaaaaccnngtcacataatcnccacatccctattcatctcagtgttgacatctgttgactgtcttttctcattcaagttgttattttctccattcttgctatgatgagtggtttttctactgtgtccagttctcgtgcc

SEQ ID NO: 69891 - DNA, 238 bp, Homo sapiens; identical to SEQ ID NO: 67974

SEQ ID NO: 69892 - DNA, 549 bp, Homo sapiens
cttctagatgttagagacacaagcggcccatctgtgttcacagcaatctaaacaagaattccttagggtctcctttgctaggtccagttgttccaggaccatctccaatcccttctgttactgaaaagaggttatcatctggccaaaataaagcttcaggcaagaggcaaagatccagtggaatatgggagaatggtagaggaccaacacctgctaccccagagagcttttctaaaaaaagcaagaaagcagtcatgagtggtattcaccctgcagaagacacggaaggtactgagtttgagccagagggacttccagaagttgtaaagaaagggtttgctgacatcccgacaggaaagactagcccatatatcctgcgaagaacaaccatggcaactcggaccagcccccgcctggctgcacagaagttagcgctatccccactgagtctcggcaaagaaaatcttgcagagtcctccaaaccaacagctggtggcagcagatcacaaaaggtcaaagttgctcagcggagcccagtagattcaggca

SEQ ID NO: 69893 - DNA, 354 bp, Homo sapiens; identical to SEQ ID NO: 67976

SEQ ID NO: 69894 - DNA, 314 bp, Homo sapiens; identical to SEQ ID NO: 67977

SEQ ID NO: 69895 - DNA, 339 bp, Homo sapiens; identical to SEQ ID NO: 67978

SEQ ID NO: 69896 - DNA, 422 bp, Homo sapiens; identical to SEQ ID NO: 67979
  misc_feature (1)...(422): n = a,t,c or g

SEQ ID NO: 69897 - DNA, 380 bp, Homo sapiens; identical to SEQ ID NO: 67980
  misc_feature (1)...(380): n = a,t,c or g

SEQ ID NO: 69898 - DNA, 347 bp, Homo sapiens; identical to SEQ ID NO: 67981

SEQ ID NO: 69899 - DNA, 1376 bp, Homo sapiens; identical to SEQ ID NO: 67982

SEQ ID NO: 69900 - DNA, 697 bp, Homo sapiens; identical to SEQ ID NO: 67983

SEQ ID NO: 69901 - DNA, 381 bp, Homo sapiens; identical to SEQ ID NO: 67984

SEQ ID NO: 69902 - DNA, 831 bp, Homo sapiens; identical to SEQ ID NO: 67985

SEQ ID NO: 69903 - DNA, 1069 bp, Homo sapiens; identical to SEQ ID NO: 67986

SEQ ID NO: 69904 - DNA, 334 bp, Homo sapiens
ccagtcctcaacccttactacacataagaaagttcatactggagagaaacgctacagatgtgaagaatctggcaaagcctttaagctgcctctaaccttactacacataagataattcacactggagagaaaccctacagatgtagagaacgtggcaaagcttttaaccacccctcaccccttttttcacataagaaaattcttattggagagaaaccatacaagtgtgttaaatgtggcaaagccttcatttcatcctcaacccttattaaacatgagataattcatagaaactctacaaatgtgaagaatgtggcaaaattttaactgttcc

SEQ ID NO: 69905 - DNA, 374 bp, Homo sapiens
cagaactctctccgctcctcctttgactcgtgcggagaactccatccgctcccctctcgactcctgcaggtaactccatccactcctccctcaactcctgcgggtaactctgtccactcctccctcgactcctgcaggtaactcagtccactcctccctcgactcctgcaggtaactccgtccgctcctccctcgactcctgcgggtaactccatccgcttctccctcgactgctgtgggtaactccatccactcctccctgaactccttcaggtaactctgtccgctcctccctcgactcctgcgggtagctccgtccactcctccctcgactcctgtgggtaactccgtccactcctccctcaactcctgcg

SEQ ID NO: 69906 - DNA, 387 bp, Homo sapiens; identical to SEQ ID NO: 67989

SEQ ID NO: 69907 - DNA, 413 bp, Homo sapiens
ggctgccattgccagaaagcctgccaaacctcaaccgaaacttaaacccaagggcaatgtgggaattgggggttctgctgtaccaccacctcctataaaacacaacatgaatattggaacttgggatgaaaaagggtcagtggtaaaggctccaccaacccaaccagttctgcctcctcaaactataatccagcagcctcagccattaattcaaccaccaccattggtgcaaagccaactgcctcaacagcagcctcaaccaccacaaccacagcagcaacaaggacctcagccacaggcccagcctcaccaagtgcagcctcaacagcagcagctgcagaatcgctgggtagctcctcgtaacaggggagcagagattcaaccagaacaatggagcgggcagtgaatgtatt

SEQ ID NO: 69908 - DNA, 691 bp, Homo sapiens; identical to SEQ ID NO: 67990

SEQ ID NO: 69909 - DNA, 692 bp, Homo sapiens; identical to SEQ ID NO: 67991

SEQ ID NO: 69910 - DNA, 1091 bp, Homo sapiens; identical to SEQ ID NO: 67992

SEQ ID NO: 69911 - DNA, 1159 bp, Homo sapiens; identical to SEQ ID NO: 67993

SEQ ID NO: 69912 - DNA, 412 bp, Homo sapiens; identical to SEQ ID NO: 67994

SEQ ID NO: 69913 - DNA, 536 bp, Homo sapiens
attattttatttcatctcatttcattatttcatttcattatgtcatttcatttcatctcattacatttcatctaatttcatttcacctcatttcatctcatcatttcatttcatctcatcatttcatcttttcatctcatttcatctcatcatctcatcaactcttttcatcttatctcatcatttcatcatttcatctcatcatttcatctcatctcgtatcttatctcatttcaatttcatttcattatttcatgtcatctcatctcatctcatcatttcatctcatcacatctcatcatttcatcaatttcatcatctcatcatttcatctctcatttcgattttatttcaatttcatttcactatttcatttcatctcatcatttcatctcaccatttcatttcatcatctcatctcatcatttcatttcatcattcatctcatcatctcatcattcatctcatcatttcatatcatcattttatctcatctatcatttcatctcatttcatctcatctcattccatcatta

SEQ ID NO: 69914 - DNA, 974 bp, Homo sapiens; identical to SEQ ID NO: 67996

SEQ ID NO: 69915 - DNA, 439 bp, Homo sapiens; identical to SEQ ID NO: 67997

SEQ ID NO: 69916 - DNA, 1773 bp, Homo sapiens; identical to SEQ ID NO: 67998

SEQ ID NO: 69917 - DNA, 348 bp, Homo sapiens; identical to SEQ ID NO: 67999

SEQ ID NO: 69918 - DNA, 1276 bp, Homo sapiens; identical to SEQ ID NO: 68000

SEQ ID NO: 69919 - DNA, 918 bp, Homo sapiens; identical to SEQ ID NO: 68001

SEQ ID NO: 69920 - DNA, 1223 bp, Homo sapiens
gcgcatgaaacaccataccactagcagtggtgcttcccactgttatttcatgtgagaatcctggtgaaatattcatgattttgagagatgaagtaattggtgatactgtagaggttgaatttacatcaagtaataagcgcattagaacacggccagccctttggaataagaaagtctggtgcatgaaagctttagagtttcctgctggttcagtccatgtcaatgtctactgtgatggaatcgttaaagctacaaccaaaattaagtactacccaacagcaaaggcaaaggaatgcctattcagaatggcagattcaggagagagtttgtgccagaatagcattgaagaacttgatggtgtccttacatccatattcaaacatgagataccatattatgagttccagtctcttcaaactgaaatttgttctcaaaacaaatatactcatttcaaagaacttccaactcttctccactgtgcagcaaaatttggcttaaagaacctggctattcatttgcttcaatgttcaggagcaacctgggcatctaagatgaaaaatatggagggttcagaccccgcacatattgctgaaaggcatggtcacaaagaactcaagaaaatcttcgaagacttttcaatccaagaaattgacataaataatgagcaagaaaatgattatgaagaggatattgcctcattttccacatatattccttccacacagaacccagcatttcatcatgaaagcaggaagacatacgggcagagtgcagatggagctgaggcaaatgaaatggaaggggaaggaaaacagaatggatcaggcatggagaccaaacacagcccactagaggttggcagtgagagttctgaagaccagtatgatgacttgtatgtgttcattcctggtgctgatccagaaaataattcacaagagccactcatgagcagcagacctcctctccccccgccgcgacctgtagctaatgccttccaactggaaagacctcacttcaccttaccagggacaatggtggaaggccaaatggaaagaagtcaaaactggggtcatcctggtgttagacaagaaacaggagatgaacccaaaggagaaaaaaaaaaaaaagaagaggaaaaagagcaggaggaggaagaagacccatatacttttgctgagattgatgacagtgaatatgacatgatattggccaatctgagtata

SEQ ID NO: 69921 - DNA, 802 bp, Homo sapiens; identical to SEQ ID NO: 68003

SEQ ID NO: 69922 - DNA, 859 bp, Homo sapiens; identical to SEQ ID NO: 68004
  misc_feature (1)...(859): n = a,t,c or g

SEQ ID NO: 69923 - DNA, 438 bp, Homo sapiens; identical to SEQ ID NO: 68005

SEQ ID NO: 69924 - DNA, 456 bp, Homo sapiens; identical to SEQ ID NO: 68006

SEQ ID NO: 69925 - DNA, 1414 bp, Homo sapiens; identical to SEQ ID NO: 68007
  misc_feature (1)...(1414): n = a,t,c or g

SEQ ID NO: 69926 - DNA, 630 bp, Homo sapiens; identical to SEQ ID NO: 68008

SEQ ID NO: 69927 - DNA, 428 bp, Homo sapiens; identical to SEQ ID NO: 68009

SEQ ID NO: 69928 - DNA, 798 bp, Homo sapiens; identical to SEQ ID NO: 68010

SEQ ID NO: 69929 - DNA, 483 bp, Homo sapiens; identical to SEQ ID NO: 68011

SEQ ID NO: 69930 - DNA, 1443 bp, Homo sapiens; identical to SEQ ID NO: 68012
  misc_feature (1)...(1443): n = a,t,c or g

SEQ ID NO: 69931 - DNA, 658 bp, Homo sapiens; identical to SEQ ID NO: 68013

SEQ ID NO: 69932 - DNA, 1050 bp, Homo sapiens; identical to SEQ ID NO: 68014
  misc_feature (1)...(1050): n = a,t,c or g

SEQ ID NO: 69933 - DNA, 672 bp, Homo sapiens
catcccatgctcacgaattaatattaattcattaatattactatatagaatattgggtagaattaatattgtgaaaatgaccatacagccaatagcaatctacaaattcaatgcaattcccatcaaaataccaccatcattcttcacagaacttaaaaaaaaatcctaaaattcatacagaaccaaaagagagcccacatagccaaagcaagactatgcaaaaagaacaaatctgggaaacttcacattacccgatttcaaactatattataaagtcaccaaaacagcatggtactggtataaaaacaggcacacagatcattggagtagaatagaaaacccagaaataaagccaaatgcttacagtcaactgatctttaacaaagcaaacaaaaacataaagtggagaaaggacaccctattcaacaaatggtgctgggataattggcaagccacatgtagaagaatgaaactggatcctcatctctcaccttatacaaaaatcaactcaagatggatcaaagacttaaatctaacacccataaagattctagaagataatattagaaaaacccttctaaacattggcctaggcaaagacttcatgaccaagaacccaaaagcaaatgcaacaaaaacaagaataaatagatgggacttaattaaactaca

SEQ ID NO: 69934 - DNA, 1469 bp, Homo sapiens; identical to SEQ ID NO: 68016

SEQ ID NO: 69935 - DNA, 411 bp, Homo sapiens; identical to SEQ ID NO: 68017
  misc_feature (1)...(411): n = a,t,c or g

SEQ ID NO: 69936 - DNA, 778 bp, Homo sapiens; identical to SEQ ID NO: 68018

SEQ ID NO: 69937 - DNA, 416 bp, Homo sapiens; identical to SEQ ID NO: 68019

SEQ ID NO: 69938 - DNA, 1559 bp, Homo sapiens
cactgctgggatacttaggggtagggctggaagcatgtcattatacactatcttttgtaatcgattttatgtctgcatgtcttgttttcccagagaaagtgcaaacctctctcagggcaggttttggatgttcttttgcatcttccacagaactgagcacaaaaaggtattcagttaatacttcttagaaaaataaaagccaggtgtagcagcccaggctccagccaagcaggggagctgtttctgttagagttaaggaacaaaattttgttttgctatttacctgagctcaacaggatcaaatacaagtttgacatcattaattatgctaggaaggtacttcaaagctgccccctgtaagaaaaacaccaaaggcaaattcattcaaagcattcctgacaaccagctggttcggcagaaacttaactgcatgaccaagatagtagagagcactctttttcgacagtcagagtgcagagaagtgctgctgccactgctgacggaccagctcagcggccagttagatgacaactccaacaagcctgaccacgaggcaagctcgcagcttctgagcaacatcctggaggtgctggacaggaaggatgtgggtgccactgcggtgcacattcagcttataatggaacggctgcttgagaaggatcaaccggacagtgattgggatgaaccggcagtctccccacatcgggagttttgtggcttgcatgattgccctgctgcagcaaatggacgacagccactatagccactacatcagcactttcaaaaccagacaagacatcatcgacttcctcatggaaacttttatcatgttcaaggacctgattggaaagaatgtctatgccaaagattggatggtgatgaatatgactcaaaacagggtttttctccgtgctataaatcggtttgctgaagttctcacaagattcttcatggatcaggcaagctttgaacttcagctctggaacaattacttccatttggcagttgcatttctcacccatgagtcccttcagcttgaaaccttctcacaagccaagcgcaacaaaattgttaaaaaatatggggacatgagaaaggaaatcggctttagaatccgggacatgtggtataacctgggtccccacagaatcaaattcatcccatccatggtgggtcccattctggaggtcactctgacccctgaagtagagctccggaaagccacaatccccattttctttgatatgatgcagtgtgagttcaatttcagtggaaatggcaatttccatatgtttgagaatgagctgatcacaaagctggaccaggaggtagaagggggcagaggagacgaacaatacaaggttcttctggaaaaactgctcctagaacattgccggaaacacaaatacctctccagctctggggaggtcttcgccctcctggtcagcagcctcttagagaacctgctggactatagaaccatcatcatgcaagatgagagcaaggagaaccgtatgagctgcactgtgaacgtgctgaacttttataaaaaaaaaaaa

SEQ ID NO: 69939 - DNA, 587 bp, Homo sapiens
  misc_feature (1)...(587): n = a,t,c or g
tgcttgtaaataagtccatgcccacagtgactcagattcctttggaaggaagtaatgtaccacagcaaccacagtacaaagatgtacccataacctacaaaggagcaacagactcatatattgaaaaagtgatgatatcttcaaatgctgaagatgcttttctgatcaaaatgctgctgagacagacaaggcgtccagaaattggagacaaattcagcagtcgtcatgggcaaaaaggtgtttgtggcttgatcgtcccccaggaagacatgccattttgtgattctggcatctgtccggacatcatcatgaacccacacggcttcccatcacgaatgacggtggggaagctcattgagctgctggctggcaaggccggtgtgctggacggcagattccactacggcactgcgtttggaggcagtaaagtgaaggatgtgtgtgaggacctcgttcgccatggttataactacttggggaaagactatgttacatccggcatcacaggtgagccctttagaagcatacatctaattttggccccgtgtacctatcagnagctgaacacatggtgcctagataaaatg

SEQ ID NO: 69940 - DNA, 411 bp, Homo sapiens; identical to SEQ ID NO: 68021

SEQ ID NO: 69941 - DNA, 682 bp, Homo sapiens; identical to SEQ ID NO: 68023

SEQ ID NO: 69942 - DNA, 389 bp, Homo sapiens
gacaagcagatgctaataaaagaatctgcatctttgtttgttattccatgttaaagggttgaaataaaggtaagagaatatttgtactgttgttatccaaatccatctcctgttctactctctattcaaaataatcgtacagtgactaacagagctttcagaccaacagtattttttatttttcattttaagttcagggtaccaacatttctttccatggatgttgatggacgtgtcatcaaagctgactctttttcaaaaatcatttcctctgggttgagaataggatttttaactggtccaaaacccttaatagagagagttattttacacatacaagtttcaacattgcaccccagcacttttaaccagctcatgatatcacagcg

SEQ ID NO: 69943 - DNA, 918 bp, Homo sapiens; identical to SEQ ID NO: 68026

SEQ ID NO: 69944 - DNA, 545 bp, Homo sapiens; identical to SEQ ID NO: 68027
  misc_feature (1)...(545): n = a,t,c or g

SEQ ID NO: 69945 - DNA, 1209 bp, Homo sapiens; identical to SEQ ID NO: 68028

SEQ ID NO: 69946 - DNA, 1553 bp, Homo sapiens
tttcgtgttttgaagaaggcctccagaacatctctggggcatggaggcaatccaatccagatcctgcacctgcccacccagctggtcaccaattttacagggggtcctgatgacaacttaattgaaggtggaggaacaaaatttgtctgcaaacctggagccagaaacattaccgtcatattccacccattactaagatttattcaggagattgagcatgctctgggtcttggcccagccaaacagtgtcctcttcgagagtttctcaccgtgtacatcaaaaacatctttctcaatcaagtcttggctgagatcaacaaggagattgaaggagtcactaaaacatctgaccctttgaagattctggccaacgcagacaccatgaaggtgctgggagtgcagcggcctctcctacagagcacaatcattgtggagaagacagttcaagacctcctgaacctgatgcatgacttgagtgcatattcagatcaattcctcaacatggtgtgcgtaaagctccaggagtacaaggacacctgcactgcagcttacaggggtattgtccagtcagaagaaaaacttgtcatcagtgcatcctgggcaaaagatgatgatatcagcagactcttgaaatctctaccaaactggatgaatatggctcaacccaaacagctgaggccaaaaagagaggaggaagaagatttcataagggcagcttttggcaaggagtctgaagttcttattgggaacctgggtgataaattaatccctccacaagacatccttcgtgacgtcagtgacctcaaagccttggccaacatgcatgaaagcctggaatggttggcaagtcgaacaaagtcagctttctccaatctttctacatcccagatgctttctcctgctcaagacagccacacgaacacggatctccccccagtgtcagagcagatcatgcagactctcagtgaacttgccaaatcgttccagggatatgggctgaccgctgcttgcttgtcttacatctgggaagtgagggttcactgtttccactatcttatccctcttggcaaaggaggggaactatggccattgtgggttaatgtgggaaagtatggattatgaccccctggtggtcaagctcaacaaagatatcagcgccattgaagaggccatgagcgccagccttcagcagcacaagttccagtatatcttcgaaggcctgggccacctgatctcctgcatcctcattaatggtgcccagtacttcaggcgcatcagtgagtctggcatcaagaaaatgtgtaggaacatttttgttcttcagcagaatttgaccaacatcaccatgtcgcgggaggcagacctggactttgcaaggcagtactacgagatgctttacaacacagctgacgagctcctgaacctggtggtggaccagggtgtgaagtacacggagctggagtacatccacgctctgaccctgctgcaccgcagccagactggggtgggggaactgaccacccagaacacgaggctgcagaggctcaaagagg

SEQ ID NO: 69947 - DNA, 666 bp, Homo sapiens; identical to SEQ ID NO: 68029

SEQ ID NO: 69948 - DNA, 472 bp, Homo sapiens; identical to SEQ ID NO: 68030

SEQ ID NO: 69949 - DNA, 583 bp, Homo sapiens; identical to SEQ ID NO: 68031
  misc_feature (1)...(583): n = a,t,c or g

SEQ ID NO: 69950 - DNA, 2102 bp, Homo sapiens; identical to SEQ ID NO: 68032

SEQ ID NO: 69951 - DNA, 381 bp, Homo sapiens; identical to SEQ ID NO: 68033

SEQ ID NO: 69952 - DNA, 875 bp, Homo sapiens
catcactctggattttgatggtgatgacctcctagaaacaggtaaaaatgtgaaaattacagattctgaagcaagtaagccaaaagatgggcaggacgccattgcacagagcccggagaaggaaagcaaggattatgagatgaatgcgaaccataaagatggtaagaaggaagactgcgtgaagggtgaccctgtcgagaaggaagccagagaaagttctaagaaagcagaatctggagacaaagaaaaggatactttgaagaaagggccctcgtctactggggcctctggtcaagcaaagagctcttcaaaggaatctaaagacagcaagacatcatctaaagatgacaaaggaagtacaagtagtactagtggtagcagtggaagctcaactaaaaatatctgggttagtggactttcatctaataccaaagctgctgatttgaagaacctctttggcaaatatggaaaggttctgagtgcaaaaggtagttacaaatgctcgaagttctggggcaaaatgctatggcattgtaactatgtcttcaagcacagaggtgtccaggtgtattgcacatcttcatcgcactgagctgcatggacagctgatttctgttgaaaaagtaaaaggtgatccctctaagaaagaaatgaagaaagaaaatgatgaaaagagtagttcaagaagttctggagataaaaaaaatacgagtgatagaagtagcaagacacaagcctctgtcaaaaaagaagagaaaagatcgtctgagaaatctgaaaaaaaagaaagcaaggatactaagaaaatagaaggtaaagatgagaagaatgataatggagcaagtggccaaacatcagaatcgattaaaaaaagt

SEQ ID NO: 69953 - DNA, 409 bp, Homo sapiens; identical to SEQ ID NO: 68035
  misc_feature (1)...(409): n = a,t,c or g

SEQ ID NO: 69954 - DNA, 2627 bp, Homo sapiens; identical to SEQ ID NO: 68036

SEQ ID NO: 69955 - DNA, 1086 bp, Homo sapiens; identical to SEQ ID NO: 68037

SEQ ID NO: 69956 - DNA, 1908 bp, Homo sapiens; identical to SEQ ID NO: 68038

SEQ ID NO: 69957 - DNA, 473 bp, Homo sapiens; identical to SEQ ID NO: 68039

SEQ ID NO: 69958 - DNA, 1132 bp, Homo sapiens; identical to SEQ ID NO: 68040
  misc_feature (1)...(1132): n = a,t,c or g

SEQ ID NO: 69959 - DNA, 650 bp, Homo sapiens; identical to SEQ ID NO: 68041

SEQ ID NO: 69960 - DNA, 828 bp, Homo sapiens; identical to SEQ ID NO: 68042

SEQ ID NO: 69961 - DNA, 1405 bp, Homo sapiens; identical to SEQ ID NO: 68043

SEQ ID NO: 69962 - DNA, 1023 bp, Homo sapiens; identical to SEQ ID NO: 68044

SEQ ID NO: 69963 - DNA, 519 bp, Homo sapiens; identical to SEQ ID NO: 68045

SEQ ID NO: 69964 - DNA, 490 bp, Homo sapiens; identical to SEQ ID NO: 68047

SEQ ID NO: 69965 - DNA, 371 bp, Homo sapiens; identical to SEQ ID NO: 68048

SEQ ID NO: 69966 - DNA, 422 bp, Homo sapiens; identical to SEQ ID NO: 68049

SEQ ID NO: 69967 - DNA, 1376 bp, Homo sapiens; identical to SEQ ID NO: 67982

SEQ ID NO: 69968 - DNA, 794 bp, Homo sapiens; identical to SEQ ID NO: 68051

SEQ ID NO: 69969 - DNA, 1095 bp, Homo sapiens; identical to SEQ ID NO: 68052

SEQ ID NO: 69970 - DNA, 589 bp, Homo sapiens; identical to SEQ ID NO: 68053
  misc_feature (1)...(589): n = a,t,c or g

SEQ ID NO: 69971 - DNA, 429 bp, Homo sapiens; identical to SEQ ID NO: 68054

SEQ ID NO: 69972 - DNA, 437 bp, Homo sapiens; identical to SEQ ID NO: 68055

SEQ ID NO: 69973 - DNA, 720 bp, Homo sapiens; identical to SEQ ID NO: 68056

SEQ ID NO: 69974 - DNA, 1174 bp, Homo sapiens; identical to SEQ ID NO: 68057

SEQ ID NO: 69975 - DNA, 1410 bp, Homo sapiens; identical to SEQ ID NO: 68058

SEQ ID NO: 69976 - DNA, 1443 bp, Homo sapiens; identical to SEQ ID NO: 68012
  misc_feature (1)...(1443): n = a,t,c or g

SEQ ID NO: 69977 - DNA, 520 bp, Homo sapiens; identical to SEQ ID NO: 68060
  misc_feature (1)...(520): n = a,t,c or g

SEQ ID NO: 69978 - DNA, 1723 bp, Homo sapiens; identical to SEQ ID NO: 68061

SEQ ID NO: 69979 - DNA, 775 bp, Homo sapiens; identical to SEQ ID NO: 68063

SEQ ID NO: 69980 - DNA, 602 bp, Homo sapiens; identical to SEQ ID NO: 68064

SEQ ID NO: 69981 - DNA, 2239 bp, Homo sapiens; identical to SEQ ID NO: 68065

SEQ ID NO: 69982 - DNA, 850 bp, Homo sapiens
tatgtgatttgaatgccaacactgaatcagaagtaccaggaggtcagagtgttggtgttcaaggggaagcagcgtgtgtcagtattccacatttagatctgaagaatgtttctgatggtgataaatgggaagagccatttcctgcttttaagtcttggcaggaggactctgagtctggagaagctcagctgtctccacaagctggaagaatgaatcatcaccccttggaagaggactgtcctccagtattatcacaccgcagtttagattttggtcaaagccagcgtttcctacatgatccagaaaagttggattcctcatctaaagcactgtcttttactagaattcgaagatcatcctttagttcaaaagatgaaaagagagaggacagaacaccttatcagctggtcaagaaacttcagaagaaaatcagacaatttgaggaacagtttgaaagggaaagaaatagcaagccctcctacagtgatattgctgccaatccaaaggtattaaaatggatgacagagcttacaaaactgcggaagcaaattaaagatgcaaaacacaaaaattctgatggagaatttgtacctcagacacgtccacgtagtaacacacttccaaaaagctttggctcttctctagaccatgaagatgaagagaatgaagatgaacccaaggtcattcagaaggagaaaataccatctaaagaagcaacccttgaacttattcttaaaagactgaaagaaaaacgtattgagaggtgtcttccagaagatatcaagaaaatgaccaaagatcatttggtagaagagaaagcttctcttcagaaaagtcttctttactatga

SEQ ID NO: 69983 - DNA, 404 bp, Homo sapiens
aatacagtctggggaagtgtgtctgtctgtctgctgtctggggcagtttgctgtctgctttccggggcagtttgtctgtctgctgtctggggcagtttgtctatctgtctgctgtccggggcagtttttctgtctgctgtccggggcaacgtgtctgtctgtctgctgtccggggcagtgtgtctgtttgtctctctgctgtccagggcaatgtgtctgtttgtctgtctgctgtccggggcagtttgtttgtctgtctgctgtctggggcagtttgtcatctgtgcaggggaccaactccctgtctttctaggagcctggcacacaggaggtgctcagtaaatgtttgcgaaatgactcaacttatttcagtatcttattttttctgctgggggtggacgaaa

SEQ ID NO: 69984 - DNA, 569 bp, Homo sapiens; identical to SEQ ID NO: 68068

SEQ ID NO: 69985 - DNA, 1041 bp, Homo sapiens; identical to SEQ ID NO: 68069

SEQ ID NO: 69986 - DNA, 432 bp, Homo sapiens; identical to SEQ ID NO: 68070

SEQ ID NO: 69987 - DNA, 853 bp, Homo sapiens; identical to SEQ ID NO: 68071

SEQ ID NO: 69988 - DNA, 442 bp, Homo sapiens; identical to SEQ ID NO: 68072

SEQ ID NO: 69989 - DNA, 1027 bp, Homo sapiens; identical to SEQ ID NO: 68073

SEQ ID NO: 69990 - DNA, 782 bp, Homo sapiens; identical to SEQ ID NO: 68074

SEQ ID NO: 69991 - DNA, 464 bp, Homo sapiens; identical to SEQ ID NO: 68075

SEQ ID NO: 69992 - DNA, 461 bp, Homo sapiens; identical to SEQ ID NO: 68076

SEQ ID NO: 69993 - DNA, 907 bp, Homo sapiens; identical to SEQ ID NO: 68077

SEQ ID NO: 69994 - DNA, 740 bp, Homo sapiens; identical to SEQ ID NO: 68078

SEQ ID NO: 69995 - DNA, 3098 bp, Homo sapiens; identical to SEQ ID NO: 68079
  misc_feature (1)...(3098): n = a,t,c or g

SEQ ID NO: 69996 - DNA, 1710 bp, Homo sapiens
cagtccaaatgacatttattccattttctctgtgggacatccagctaaagaggaaaaagaacgtattttcaaattattctgtctcttagccatagttacctagggaaggagtgaaagccattgagagtccacagacagaactcgcagccctggctcccctgcccctgtaggaggcggggaaggagtgagcttcaggccaggagggtccacggccccctgcagccatcctgcagcttccagtcctcctcctggaccatccctgcactcagaccttctccccggcccaccttccttcctcctctgggatcagacttcggtactgtgtcctcagggaccttcctctgtggccggcacccagtgatccctggctcccagcacacccagctcagaggtcggcagcccctgcccacgagctccagccggccctgcatggccttatgctggaacgtctctggaatcttttccctttctttctgtgttggctgtgtcggggtggtctttgggaagcactatcatccaagggtccctcactccgtggctctctctctgcccttccaggctgagcagcgtgttatgtcccgggtacactctctggagcggcgtctggaagctcttgctgctgaattttcctccaactggcagaaggaggccatgcggctggaacgtctggagctgcggcaaggggctcctggccagggaggtggtggtggcctgagccacgaggacaccctggcgctgctggaggggctagtgagccgccgtgaagctgccctgaaggaggatttccgcagggaaactgctgctcgcatccaggtaggaggtggaatacctcagggtgggaggtgggtgacacccataggaaagcgtgaaggtgcccagcagcagagagaacaagtgtcatttgggatcagacagctctgccattttgcagttaccccccttctcgttttttcctttttttttttctttttgagacaatatctcactctgtcacccagcctggagtgcagtggcgtgatctcgactcactacaacctgtgcctcccaggttcaagcgattctcttgcctcactcagcctcccgagtagctggattacaggcgtgcaccaccacatccagctaattttgtatttttagtagagacagggttttaccaagttggccaggctggtctcgaactcctgacctctagtgatctgcctgccttggcctcccaaagtcctgggattacaggcgtgagccaccacgccaggcctcctcaccttctctaagcctcagtttcctcctctttgatggaggccatcgtgtctcccccacccccatagtgagctgtgcgagtagaaagccccagcatggtacctgacaccgcaaaggtgtgcagtggagctgaagcgggagtcttgcgtggttcagagaaggctgagagccatggctctggaaacaaacagaccttgtttgaattccagttccgccacttcctaagcatgagggtccctataagcatggctctgcccaacctggcctctcacttccgtctcacaagaagaactgcttgccctgaaagcagaacattaccaagacttagaaaacctttttaaagaagaacggcccgggcctttccaaggccattggggctttgcggaacttcagggccctggggatggggttcctggacccccctccaacaatgtttcaacctcgggaccccct

SEQ ID NO: 69997 - DNA, 1144 bp, Homo sapiens
ggaattcgttactcaaggagaaaaggaaagagctgggcccactgcctgatgttgatgacatggtttctcccaaactcaagctgagtaggaagagtggcatttctcctaaaaaatcaaaatacatgactccaatgcagcagaaactaaatgaggtctatgaagctgtaaagaactatactgataagaggggtcgccgcctcagtgccatatttctgaggcttccctctagatctgagttgcctgactactatctgactattaaaaagcccatggacatggaaaaaattcgaagtcacatgatggccaacaagtaccaagatattgactctatggttgaggactttgtcatgatgtttaataatgcctgtacgtacaatgagccggagtctttgatctacaaagatgctcttgttctacacaaagtcctgcttgaaacacgcagagacctggagggagatgaggactctcatgtcccaaatgtgactttgctgattcaagagcttatccacaatctttttgtgtcagtcatgagtcatcaggatgatgagggaagatgctacagcgattctttagcagaaattcctgctgtggatcccaactttcctaacaaaccaccccttacatttgacataattaggaagaatgttgaaaataatcgctaccgtcggcttgatttatttcaagagcatatgtttgaagtattggaacgagcaagaaggatgaatcggacagattcagaaatatatgaagatgcagtagaacttcagcagttttttattaaaattcgtgatgaactctgcaaaaatggagagattcttctttcaccggcactcagctataccacaaaacatttgcataatgatgtggagaaagagagaaaggaaaaattgccaaaagaaatagaggaagataaactaaaacgagaagaagaaaaaagagaagctgaaaagagtgaagattcctctggtgctgcaggcctctcaggcttacatcgcacatacaggcaggactgtagctttaaaaacagcatgtaccatgttggagattacgtctatgtggaacctgcagaggccaacctacaaccacatatcgtctgttattgaaagactgtgggaggattcagctgagaagctccgctctacat

SEQ ID NO: 69998 - DNA, 1408 bp, Homo sapiens; identical to SEQ ID NO: 68082
  misc_feature (1)...(1408): n = a,t,c or g

SEQ ID NO: 69999 - DNA, 480 bp, Homo sapiens; identical to SEQ ID NO: 68083

SEQ ID NO: 70000 - DNA, 1955 bp, Homo sapiens; identical to SEQ ID NO: 68084

SEQ ID NO: 70001 - DNA, 781 bp, Homo sapiens
cctctcggctcccccaggtcctggtgcggttcctgttctccatcagcaaagggtaccggagaatcacctaccacaactggcgccacggcttcaacgtggcccagacgatgttcacgctgctcatggtacgtggctggaggccttcgccatggtgacagccggcctgtgccatgacatcgaccaccgcggcaccaacaaccctcggtttctgctgtgggcgctggggacgcagcgtccgcaggacggcagggccgtatcctgcggagcagggttctgatgcagcgggtgagcactgggtgtgtgagcactgcacctcccttgttccctgggttcaggaagagagcgatgtttcagaagatcgtggatgagtccaagaactaccaggacaagaagagctgggtggagtacctgtccctggagacgacccggaaggagatcgtcatgtgagcgcgggcggagggggcacgaggggtccttccctcgcagggaccgggcccactcaccagctggttaaccctgcaaccctccccagacgctctggagcaggaagagcccgtcgcggcagcttgtcgagggctgtgaaacaaatgcgccgtccttatttccccccagctctcagggagatggtgcagagctggggagcacacaggccctgcattggtctgtagcccttggcagtaacttacttcattttgaccttccactttttcacctgtaaaatggtgattcacaaccatcccctccccaggctggtcccagggacccagtgagaaaatacaca

SEQ ID NO: 70002 - DNA, 2098 bp, Homo sapiens; identical to SEQ ID NO: 68087

SEQ ID NO: 70003 - DNA, 1407 bp, Homo sapiens; identical to SEQ ID NO: 68088
  misc_feature (1)...(1407): n = a,t,c or g

SEQ ID NO: 70004 - DNA, 618 bp, Homo sapiens
attgaggaatggcagtatttctacccgatggtgctaaaaaagaaagaagaatcgaaagaggaagacgagttgggatatgatgatgatttccctgtggcagttgaagtaattgttggtggtgttcggatggtttacccttcagcatttgttttgatctctcagaatgacatcccggttcctcagagtgttgccagtgctggaggccacattgcagttgggcagcaagggcttggtagtgtgaaggacccaagtaactgtgggatgcctctgacccctcccacctctccagaacaggctatcctaggtgagagtggaggtatgcagagtgctgccagtcacctggtttcccaagatggagggatgataacgatgcacagtccaaagagatcggggaagattcctccaaaactccacaatcatatggtccatcgagtctggaaggaatgcatcctcaacagaacccagtccaagaggagccaaatgtcaactccaactcttgaagaagagcctgctagcaatcctgctacttgggattttgtggatccaacccaaagagtcagctgttcttgtatccaggcataagcttttaaaactttgtgcagtcgggcccaatcgacc

SEQ ID NO: 70005 - DNA, 2458 bp, Homo sapiens; identical to SEQ ID NO: 68089

SEQ ID NO: 70006 - DNA, 457 bp, Homo sapiens; identical to SEQ ID NO: 68090
  misc_feature (1)...(457): n = a,t,c or g

SEQ ID NO: 70007 - DNA, 866 bp, Homo sapiens
cctgcgagcactccggcgaggccaaggccttccaggactatatttgctgcagccgcccccagccccgttatggggagtatggccccaggtgacacaatggccgcaggctccatggcggctggcttcttccagggcccccccggctcccagccgtccccccacaaccccaatgcccccatgatggggcctcacggtcagcccttcatgtcaccgcgcttcccagggggcccccggcccaccctgcggatgccgagtcagcctcccgcaggcctccctggctcccagcccctcctccctggcgccatggagccctccccacgagcccaggggcatccgagcatgggcggcccaatgcagagggtgacgcctcctcgtggcatggccagcgtggggccccagagctatggaggtggcatgcgacccccacccaactccctcgccggcccaggcctgcctgccatgaacatgggcccaggagttcgtggcccgtgggccagccccagtggaaactcgatcccctactcctcctcatcccccggcagctacaccggacccccaggaggaggtgggccccctggaacacccatcatgcctagccctggagattccaccaactccagcgaaaacatgtacactatcatgaaccccatcgggcagggcgccggcagggctaatttccccgctcggccctggcccggagggccccatggccgcctatgagcgcgtatggagcctcaccacgtgaacggatccctgggctcgggcgacatggacgggtttgccgagagagttcccccaggcgccagtggccggcctgagcaacgccccggcccaccctgcgggacgacggcgagatggcggccgca

SEQ ID NO: 70008 - DNA, 590 bp, Homo sapiens; identical to SEQ ID NO: 68092

SEQ ID NO: 70009 - DNA, 550 bp, Homo sapiens; identical to SEQ ID NO: 68093

SEQ ID NO: 70010 - DNA, 576 bp, Homo sapiens; identical to SEQ ID NO: 68094

SEQ ID NO: 70011 - DNA, 632 bp, Homo sapiens; identical to SEQ ID NO: 68095

SEQ ID NO: 70012 - DNA, 433 bp, Homo sapiens; identical to SEQ ID NO: 68096

SEQ ID NO: 70013 - DNA, 440 bp, Homo sapiens; identical to SEQ ID NO: 68097

SEQ ID NO: 70014 - DNA, 738 bp, Homo sapiens
gggcggacccagattccagaaacaaggaagaggaaagacaaagggatgggacgggagccctggagaagcccgaccctgtggccgccgggtctcctgggctgaaggctccccaagccccctttgccgggttggagcagctgtccaaggcccggcgccggagtcgcccccgcttttttgcccacccccctgtcccccgagctgaccagcgtcacggctgctacgtgtgcgggaagagcttcgcctggcgctccacactggtggagcacatttacagccacaggggcgagaagcccttccactgcgcagactgcggcaagggcttcggccacgcttcctccctgagcaaacaccgggccatccatcgtggggagcggccccaccgctgtctggagtgtggccgggccttcacgcagcgctcggcgctgacttcgcacctgcgcgtccacaccggcgagaaaccctatggctgcgccgactgtggccgccgcttcagccagagctctgccctctaccagcaccggcgcgtgcacagcggcgagacccccttcccctgcccggactgtggccgcgccttcgcctacccctcgggacctgcggcgccacgtgcgcacccacaccggcgagaagccctacccgtgcccggactgcgggcgctgcttccgccagagctcggagatgccagcccacaggcgcacccacagcggcgagaagccctacccctgcccgcagtgcggccgc

SEQ ID NO: 70015 - DNA, 1948 bp, Homo sapiens; identical to SEQ ID NO: 68099

SEQ ID NO: 70016 - DNA, 1099 bp, Homo sapiens; identical to SEQ ID NO: 68100

SEQ ID NO: 70017 - DNA, 394 bp, Homo sapiens
ggaagccctgcacattccatgtgtcaggggagtctttccacctcaagagaagttgggaaggacttcctggccaagttgggatttctccatcaacaggctgctcacactggggagcaatccaatagcaaaagcgacggtggggccatcagtcacagaggaaaaactcattacaactgtggagaacacacaaaagcattcagcggtaaacacacacttgttcagcagcagagaaccctcactacagaaagatgttacatatgcagtgaatgtgggaaatcctttagcaaaagctacagtctcaatgaccattggagacttcacactggagaaaagccttatgaatgtcgagagtgtgggaagtcctttaggcaaagctctagtctcatctcgtgcc

SEQ ID NO: 70018 - DNA, 1049 bp, Homo sapiens; identical to SEQ ID NO: 68102

SEQ ID NO: 70019 - DNA, 503 bp, Homo sapiens; identical to SEQ ID NO: 68103

SEQ ID NO: 70020 - DNA, 837 bp, Homo sapiens; identical to SEQ ID NO: 68104

SEQ ID NO: 70021 - DNA, 2197 bp, Homo sapiens; identical to SEQ ID NO: 68105

SEQ ID NO: 70022 - DNA, 792 bp, Homo sapiens; identical to SEQ ID NO: 68106

SEQ ID NO: 70023 - DNA, 888 bp, Homo sapiens; identical to SEQ ID NO: 68107
  misc_feature (1)...(888): n = a,t,c or g

SEQ ID NO: 70024 - DNA, 1991 bp, Homo sapiens; identical to SEQ ID NO: 68108

SEQ ID NO: 70025 - DNA, 590 bp, Homo sapiens; identical to SEQ ID NO: 68109

SEQ ID NO: 70026 - DNA, 486 bp, Homo sapiens; identical to SEQ ID NO: 68110

SEQ ID NO: 70027 - DNA, 1061 bp, Homo sapiens; identical to SEQ ID NO: 68111

SEQ ID NO: 70028 - DNA, 1353 bp, Homo sapiens; identical to SEQ ID NO: 68112
  misc_feature (1)...(1353): n = a,t,c or g

SEQ ID NO: 70029 - DNA, 536 bp, Homo sapiens; identical to SEQ ID NO: 68113

SEQ ID NO: 70030 - DNA, 690 bp, Homo sapiens; identical to SEQ ID NO: 68114
  misc_feature (1)...(690): n = a,t,c or g

SEQ ID NO: 70031 - DNA, 243 bp, Homo sapiens
gatatcgaattccttgctggatggcgcgctgaaggcgggtcttaacgaaattcgttctgtgtcgctgggcgtggcgcagccggatgcctataaagacaaagcgcgtaaggcagcgattgataacgcgattcatcaggcgcaggaactggcgaacggctttcatcgtaaactggggccggtatatagcgtgcgctaccatgtttcctccgtatggtcctcatcctgtccgagctcatttcacca

SEQ ID NO: 70032 - DNA, 827 bp, Homo sapiens
cttgttatcccagctacttgggaggctgaggcaggagaatcacttgaatcctggagggcggaggttgcagtgagccgagatcaagccactgcactccagcctgggtgacagactgagatcctgtgtgaaaaaaacaaagttttacatttaatttgatactcatgatcattcgatggggtgagtactattatttattcccgtttcacagataaggaaactgaggcttaggcaggttgggtggcatgcccagggccccgtacagtgggagctggagttcagttgtgtggttctagagcttgtgctcggcctagtgacaggagctctggagtctgggagcacaaagaggggcacagggccaccaagtgggtcttggatctgccctccaggtgtgggcccatcgctggatggatctgtcagaacacggctttgggctggccctgctcaacgactgcaagtatggcgcgtcagtgcgaggcagcatcctcagcctctcgctgtaagtggggtacccaccaggcctgggagctggcatggagaaatgggtcttcccgaccacaactccaacagcttcagcgtggcccctacgcgccctcctcaccccagcttgcgggcgcctaaagccccggacgctactgctgacacggggcgccacgagttcacctatgcactgatgccgcacaagggtgagtgctggggacggtggggccttcctgcagccctagacacctctctgcccttccctgagcccaaaccccagcaacctggcttcctgccccttctagggacaggggagggtagcccccattctccaccagcattgtttcctg

SEQ ID NO: 70033 - DNA, 868 bp, Homo sapiens; identical to SEQ ID NO: 68117

SEQ ID NO: 70034 - DNA, 682 bp, Homo sapiens; identical to SEQ ID NO: 68118

SEQ ID NO: 70035 - DNA, 801 bp, Homo sapiens; identical to SEQ ID NO: 68119

SEQ ID NO: 70036 - DNA, 730 bp, Homo sapiens; identical to SEQ ID NO: 68120
  misc_feature (1)...(730): n = a,t,c or g

SEQ ID NO: 70037 - DNA, 531 bp, Homo sapiens; identical to SEQ ID NO: 68121
  misc_feature (1)...(531): n = a,t,c or g

SEQ ID NO: 70038 - DNA, 774 bp, Homo sapiens; identical to SEQ ID NO: 68122

SEQ ID NO: 70039 - DNA, 568 bp, Homo sapiens
ctctgctgctcaggctctgctcactcatttggaaagagtagtatatatgcttattgactttttccccttcctccgccaacacttccaggagatccgggtcgcccatcttcgccagctcgttaatggcactggtgcctgagaggcagcaggagaggggcagctgagacagacgtggagatctgaggcaggtgctgaatctgactgtgggccgccggagttgctgctgctggacttctaaggggctgctcttccttctgcaggcctcctcctcctcctcattcccctcctccttctcctcctcctcggactccaccgtctctgggcgccacagccagccggccttcctctccggcgggtacttccactcgacccggtcccccacaacctgcttcgcgcgcttggccctgcgcttccccaccctcagccggtagcgctcctgggcgctctcccagtacttctccaggcacctgtccctgtgcctgctcggcagctgatcccgcagccgccactcctcccggtgctcgccagaatcctttccactcctgccctctggcagctttccacgaaa

SEQ ID NO: 70040 - DNA, 711 bp, Homo sapiens; identical to SEQ ID NO: 68124

SEQ ID NO: 70041 - DNA, 768 bp, Homo sapiens; identical to SEQ ID NO: 68125

SEQ ID NO: 70042 - DNA, 402 bp, Homo sapiens
tgtgcctggcatgtcaacatacttattggtaaaagactgaatactttcccatacagatcaggaacaagacaaggatgtatgctcttaccattcctattcaatactatactaaaagatctagtcactgcactaaaaaatcaggatataaaaggcaaacaaatcaaaaagaaataaaactgtccctttttacagaaatgattacccgtgtagataaaaatcaatcatccttttctatacgagcactgattaatctaaaaccaaaatttatttttaaaatgccagtttgcaatagctctaaaacatacttagacatacatatacacaaaaggtgtatatgtctgctgaaaagtataaaaggctgatttcacaaatcaaaagcctaaataataccatgttcatgga

SEQ ID NO: 70043 - DNA, 627 bp, Homo sapiens; identical to SEQ ID NO: 68127

SEQ ID NO: 70044 - DNA, 885 bp, Homo sapiens; identical to SEQ ID NO: 68128

SEQ ID NO: 70045 - DNA, 1465 bp, Homo sapiens
aatgacccaaacaaatagttgtccctttaaccaaggaacaagttagacaagcctttatcaattctggtgcatggcagattggtcttgctgattttgtgggaattactgataatcattacccaaaaacaaaaatcctccagtttttaaaattgactacttggattttacctaaaattaccagtcacggacctttagaaaatgctctgacagtatatactgatggttccaacaatggaaaagcagcttacacagagccaaaagagcaagtaatcaaaactcagtatcaattgactcaaagagcagagttggttgcagtcattacagtgttaataagattttgatcaatctatcaatattgtatcagattctgcatatgtagtacaggctacaaaggatattgagagagccctaatcaaatacattatggatgatcagttaaacccgctgtttaatttgttacaacaaaatgtaagaaaaagaaatttcccattttatattactcatattcgagcacacactaatttaccagggcctttaactaaagcaaatgaacaagctgacttgctagtatcatctgcattcatggaagcacaagaacttcatgccttgactcatgtaaatgcaataggattaaaaaataaatttgatatcacatggaaacagacaaaaaatattgtacaacattgcacccagtgtcagattctacacctggccactcagggaggcaagagttaatccccagaggtctatgtcctaatgtgttatggcaaatggatgtcatgcacggtaccttcatttggaaaattggcaattggtccatgtgacagttgatacttattcacatttcatatgggcaacctgccagacaggagaaaagtacttccccatgttaaaaagacatttattatcttgttttcctgtcatgggagttccagaaaaagttaaaacagacaatgggccaggttactgtagtaaagcagttcaaaaattcttaaatcagtggaaaatttacacatacaacaggaatcccttataattcccaaggacaggccataattgaaagaactaatagaacactcaaagctcaatcggttaaacaaaaaagggaaaaagacagtaaggagtataacacttcccagatgaacttaatctagcaccctatactttaaattttttaaacatttatagaaatcagaccactacttctgcagaacaacattttactggtaaaaagaacagcccacatgagggaaaactgatttggtggaaagacaacaaaagtaaaacatgggaaacagggaaggtgataacatgggggagaggtttttcttgtgtttcaccaggagaaaatcagcttcctgtttggatacccactagacatttgaagttctacaataaacccatcccatcagaaatgcaaataaaagtgcctccacagagacaaaaaacctgcagttgagcatca

SEQ ID NO: 70046 - DNA, 910 bp, Homo sapiens; identical to SEQ ID NO: 68131
  misc_feature (1)...(910): n = a,t,c or g

SEQ ID NO: 70047 - DNA, 1348 bp, Homo sapiens
  misc_feature (1)...(1348): n = a,t,c or g
ttttttttttttaccataaaaacctttctatatcagctcacccacacctccctccgttcctccctgccctttctcgccctgggtgatcatcagggatgctggagtctggcgccccccccacaccaccagagctgaagccgacattcaaggtggacgtggcgccgtggagagccaagggaaggcccagctcctctccttcgtcccccactctctgtggggctcaggaaacacacgctgaccggaaggcagtggcccaggagaggcaggctagggtgcaggctcacgccattggtgcagtccttctggggcagaaaactcaacacgggctccggcttcccatcattgccaggcccgtccgtgtcccacacagagacagccccgctcgtgctgccactcactaggaactgcccggtcgggtccagatcgaagtagatgcgctgattggtggtcacctctcgacccagggaccacagtgggtaaccagactgccggagatcccagcacaggagctcagcatccttgcgggctcctgagaagaagcggttgccatcgggatgaaagcagaggtgggtgatgcccccttggtgccctcccagcaaggcgagaggggagccatcatcccaggcatacagacccagggagcggccgtaggagccacaggcatagaggggctgggctgggctgaaggctatgcaggagatgatgccgctctggccctgcttttttgcaaatgtggctcggacctcgcagtctcgccaggccgggccgtggaaaaaacactgcacaagtccggttgaagccactagaacgagctgggagccatccggggagaagcagagcagaatgggctgccgtcagctcatccaggtggttgtaggcgcagaaaggaagcccggagctctccagtgaatgcgtcccagatatgaatcgggttctcccggctgctgctggccacgtaggaggtgtctggctgggctgaggacatcagagaataccagcagtaatcatagatggtatcaccttccaccattcgaaggacagggaccatttctgcatattccacctgctccccctcatggtacagctctgggggcaggttataaattcgcaagatgttatcagcactattggtcaagatgcaggaaccgtcaggagcccacttacagcctttcaagaagttctcaggttgggtgctgaactctgaccaggacccactgagaaatcgaggcagctgggaaagtttaaagttccaaacggtgtctccctcgtcctctgcagcgggttccccaaaggtctnttnnttccnccgcnntttcgagggtttcaatggtctcgaannnnnacccac

SEQ ID NO: 70048 - DNA, 116 bp, Homo sapiens; identical to SEQ ID NO: 68133

SEQ ID NO: 70049 - DNA, 1362 bp, Homo sapiens; identical to SEQ ID NO: 67933

SEQ ID NO: 70050 - DNA, 820 bp, Homo sapiens; identical to SEQ ID NO: 68135

SEQ ID NO: 70051 - DNA, 630 bp, Homo sapiens; identical to SEQ ID NO: 68008

SEQ ID NO: 70052 - DNA, 970 bp, Homo sapiens; identical to SEQ ID NO: 68137

SEQ ID NO: 70053 - DNA, 398 bp, Homo sapiens; identical to SEQ ID NO: 68138

SEQ ID NO: 70054 - DNA, 474 bp, Homo sapiens; identical to SEQ ID NO: 68139

SEQ ID NO: 70055 - DNA, 522 bp, Homo sapiens; identical to SEQ ID NO: 68140

SEQ ID NO: 70056 - DNA, 1241 bp, Homo sapiens; identical to SEQ ID NO: 68046

SEQ ID NO: 70057 - DNA, 695 bp, Homo sapiens
  misc_feature (1)...(695): n = a,t,c or g
ttccaggtggtgacctcagccaatgacgtggtggccatcagagtcactgntgtggtggacctggtccggaggggccggggctggatcgtgaagctgaagcgctccctgagccatgctgtggatgttgtactggaaaaatcacaggagctggtggatcacttcctgcccatgacggaggaagagctcgcggcactggcggctgaggctgaaggccctgaagtgggttcggtggaggatcagaggagacagcagggctactttgtgcgcctcggctccctgtcagcacggatccgccacctggcctacgagcactctgtggggaaactgaggcagagcaaacaccgtgcccaggacaccctggcccagctgcaggagacgctggagctgatagaccacatgcagtgtggggtgacccccaccgccccggcccgccctgggaaggtgcacgagctgtggggggaatggggccagcgccctccggagagccgccgccggagccaggcagagctggagacgctggtgctgtcccgcagcctgacccacgagctgcagggcacggtagaggctctggagtccagcgtgcggggcctgcccgccggcgcccaggagaaggtggctgaggtgcggcgcagtgtggatgccctgcagaccgccttcgctgatgcccgctacttcagggacgtgccagcggccgc

SEQ ID NO: 70058 - DNA, 672 bp, Homo sapiens; identical to SEQ ID NO: 68143

SEQ ID NO: 70059 - DNA, 798 bp, Homo sapiens; identical to SEQ ID NO: 68144
  misc_feature (1)...(798): n = a,t,c or g

SEQ ID NO: 70060 - DNA, 4975 bp, Homo sapiens; identical to SEQ ID NO: 67946

SEQ ID NO: 70061 - DNA, 1710 bp, Homo sapiens; identical to SEQ ID NO: 69996

SEQ ID NO: 70062 - DNA, 1523 bp, Homo sapiens; identical to SEQ ID NO: 68147

SEQ ID NO: 70063 - DNA, 420 bp, Homo sapiens
ccaaaaatgaaagacagactactgatatttcggttcacgtttgttgccaaatcttgaaacgtgggtcccactatagcaacactcaatcccagccccaggaaggaggcacacagcatcaaggtggtgaaccaccgcagcttgctcccggtcccaccgctctgccaggagaccaccaccacctccggctccggctcattctccgccggggcctccgcctgcaggagccgctgccccgcagccgggggcccggccccacggagctccacctctaactccagctcggcggctccggagaagtcgtcttgctgccgccgcgcttctcagcagaacttctggagctccgagaagagcactggccccgaccccaggcacgggtgtccctccgggcgccacctcccagcggaccgcccggaaacgaaa

SEQ ID NO: 70064 - DNA, 882 bp, Homo sapiens; identical to SEQ ID NO: 68149

SEQ ID NO: 70065 - DNA, 1864 bp, Homo sapiens; identical to SEQ ID NO: 68150

SEQ ID NO: 70066 - DNA, 1876 bp, Homo sapiens; identical to SEQ ID NO: 68151

SEQ ID NO: 70067 - DNA, 544 bp, Homo sapiens; identical to SEQ ID NO: 68152

SEQ ID NO: 70068 - DNA, 1089 bp, Homo sapiens; identical to SEQ ID NO: 69887

SEQ ID NO: 70069 - DNA, 1138 bp, Homo sapiens; identical to SEQ ID NO: 68155

SEQ ID NO: 70070 - DNA, 561 bp, Homo sapiens; identical to SEQ ID NO: 68156

SEQ ID NO: 70071 - DNA, 1078 bp, Homo sapiens; identical to SEQ ID NO: 68157

SEQ ID NO: 70072 - DNA, 594 bp, Homo sapiens
ccaattgttgattttctaacgctgtgtgaaacaccatacccaaatgattttcaagaaccatatgctgtggttgttcttctagaaaaggatttagtacttatagaccttgcacaaaatggatatcctatatttgaaaatccctaccctttgagtatacatgagtcccctgttacatgttgcgaatattttgcggattgtcctgtggaccttattcctgcactttattctgttggagctagacagaaacgtcaaggttacagcaaaaaggaatggcccatcagcggaggtaattggggcttgggtgctcaaagttacccagaaataattattacagggcatgctgatgggtcagttaagttctgggatgcttctgcaataactctacaagtattatataagctaaagacatctaaagtatttgaaaagtcaagaaataaagatgacaggccaaacacagacattgtagatgaagatccatatgccattcagatcatctcctgggtggtccagaaagtaggaattgctgtgcatcgctgggagtttccagctccatgtcatttattttataggtttcagccaagcagggaagttaat

SEQ ID NO: 70073 - DNA, 811 bp, Homo sapiens; identical to SEQ ID NO: 68159

SEQ ID NO: 70074 - DNA, 803 bp, Homo sapiens
  misc_feature (1)...(803): n = a,t,c or g
ggggtaaaacatggcatggtcactgaccagtggactgaggactgacattggaccatagtgctaggcagagccttgctgtgccaaggttaacccttttgttgccagatgaggtctggggttctggagaggaggtggggcaggcagatcagtggtgcagtagctatttggtctcaaatcatagcaatattttaacaactggtacagttccagaaagtgcatcctggctgaacatcatctctggtgatagctctttgcagggcatgggtggtgactcccagcagagctggcaccaacctatgtcactccctagatccagagtatcacagatgagtcacgaggctcaatccggagaaagaatccagccaacacgcggctccgcctgaacgtccccagaagagacggctggtgacagtgaaagagaagcccagaggaggaggtgcaagctgatccacgaatcagaagtgcttccccaaagtgccccaccagttccccgttccccaaggggaggagccctgagggggaaggggagaccagatccggagaaggtgcattttcaccctggacccaaggacaagtcggtggcagagaagaattaagggcccccagtcctgtctcctctgagggcatcaaggacttcttcagcatgaagccggagtgggagaacttgaaccagtccaacgtgcggcgcatgcacancggccgtgcggctgaacgaggtcatcgtgaagaaatcccgggacgccaagcttgttttgctcaacatgcctgggcctccccgcaaccgcaatggtgatgaaaactac

SEQ ID NO: 70075 - DNA, 877 bp, Homo sapiens; identical to SEQ ID NO: 68161

SEQ ID NO: 70076 - DNA, 2009 bp, Homo sapiens; identical to SEQ ID NO: 68162

SEQ ID NO: 70077 - DNA, 622 bp, Homo sapiens; identical to SEQ ID NO: 68163

SEQ ID NO: 70078 - DNA, 859 bp, Homo sapiens; identical to SEQ ID NO: 68004
  misc_feature (1)...(859): n = a,t,c or g

SEQ ID NO: 70079 - DNA, 1068 bp, Homo sapiens; identical to SEQ ID NO: 68165

SEQ ID NO: 70080 - DNA, 678 bp, Homo sapiens; identical to SEQ ID NO: 68166

SEQ ID NO: 70081 - DNA, 2078 bp, Homo sapiens; identical to SEQ ID NO: 68167

SEQ ID NO: 70082 - DNA, 781 bp, Homo sapiens
ctgcccgactcactcgccagggtcaacaacctttttacacccaagcgcgggccaaggagatcgggcagagaatccgcaatggggccgcccggccccagatcaaaatttacatcgactcccccaccaatacctccatcagcgccgctagcttcagcagcctggtgtcaccacagggcggcgatggggtggcccgggccgtccccgggagcattaagaggacagcctctgtggagtacaagggtgacggtgggcggcaccccggtgacgaggctgccaacggcccagcctctggggaccctgtcgacagcagcagcccggaggatgcctgcatcgtgcgcatcggtggcgaggagggcggccgcccacctgaagctgacgaccctgtgcctgggggccaggccaggaacggagctggcgggggcccaaggggccagacgcccaaccataatcagcaggacggggattcagggagcctgggcagcccctcggcctcccgggagtccctggtgaaggggcgagctgggccagacaccagtgccagcggggagccaggtgccaacagcaagctcctgtacaaggcctcggtggtgaagaaggcggctgcacgcaggaggcggcaccccgacgaggccttcgaccatgaggtctccgccttcttccccgccaacctggacttcctgtgcctgcaggaggtgtttgacaagcgagcagccaccaaattgaaagagcagctgcacggctacttcgagtacatcctgtacgacgtcggggtctacggctg

SEQ ID NO: 70083 - DNA, 761 bp, Homo sapiens; identical to SEQ ID NO: 68169

SEQ ID NO: 70084 - DNA, 1415 bp, Homo sapiens; identical to SEQ ID NO: 68170

SEQ ID NO: 70085 - DNA, 561 bp, Homo sapiens
gcttccaaactcagcaggccaagctgatctacaagtgcgccatgtgcgacacagtcttcactcacaaacccctcctctcctcacacttcgaccagcacttgcttgccctggggccaccagcaatgtgtgcccaacctgccccatgatgctccccaatcgctgcagcttcagcgcccaccagcgcatgcataagaatcgacccccccatgtctgtcctgagtgtgggggcaacttcctgcaagccgattttcagacccatctccgggaggcctgtctgcacgtctctcgccgtgtaggatacaggtgccccagctgttcagtggtgtttgggggtgtgaactccatcaagtcccacatccagacgtcgcactgcggggttttccacaagtgccccatctgccccatggccttcaagtctgggccaagtgcccatgcccacctctactcccagcatcccagcttccaaactcagcaggccaagctgatctacaagtgcgccatgtgcgacacagtcttcactcacaaacccctcactctcctcacacttcgaccagcacttgt

SEQ ID NO: 70086 - DNA, 1713 bp, Homo sapiens
tttcgtagcagcttggtcgcgacaggtgcgctaggtagagcgccgggacctgtgacagggctggtagcagcgcagaggaaaggcggcttttagccaggtatttcagtgtctgtagacaagatggaatcatctccatttaatagacggcaatggacctcactatcattgagggtaacagccaaagaactttctcttgtcaacaagaacaagtcatcggctattgtggaaatattctccaagtaccagaaagcagctgaagaaacaaacatggagaagaagagaagtaacaccgaaaatctctcccagcactttagaaaggggaccctgactgtgttaaagaagaagtgggagaacccagggctgggagcagagtctcacacagactctctacggaacagcagcactgagattaggcacagagcagaccatcctcctgctgaagtgacaagccacgctgcttctggagccaaagctgaccaagaagaacaaatccaccccagatctagactcagggcacctcctgaagccctcgttcagggtcgatatccccacatcaaggacggtgaggatcttaaagaccactcaacagaaagtaaaaaaatggaaaattgtctaggagaatccaggcatgaagtagaaaaatcagagatcagtgaaaacacagatgcttcgggcaaaatagagaaatataatgttccgctgaacaggcttaagatgatgtttgagaaaggtgaaccaactcaaactaagattctccgggcccaaagccgaagtgcaagtggaaggaagatctctgaaaacagctattctctagatgacctggaaataggcccaggtcagttgtcatcttctacatttgactcggagaaaaatgagagtagacgaaatttggaacttccacgcctctcagaaacctctatgaaggatcgaatggccaagtaccaggcagctgtgtccaaacaaagcagctcaaccaactatacaaatgagctgaaagccagtggtggcgaaatcaaaattcataaaatggagcaaaaggagaatgtgcccccaggtcctgaggtctgcatcacccatcaggaaggggaaaagatttctgcaaatgagaatagcctggcagtccgttccacccctgccgaagatgactcccgtgactcccaggttaagagtgaggttcaacagcctgtccatcccaagccactaagtccagattccagagcctccagtctttctgaaagttctcctcccaaagcaatgaagaagtttcaggcacctgcaagagagacctgcgtggaatgtcagaagacagtctatccaatggagcgtctcttggccaaccagcaggtgtttcacatcagctgcttccgttgctcctattgcaacaacaaactcagtctaggaacatatgcatctttacatggaagaatctattgtaagcctcacttcaatcaactctttaaatctaagggcaactatgatgaaggctttgggcacagaccacacaaggatctatgggcaacaaaaattgaaacggaggggttttgggagagaccacgcaactttgaaaatcaagggagacccctcaaaagcccagggggtgaagattgccccagttgctaaggtggttgtcctggctcgaattattgagcccaaggctcctcttcacgagagaaaggaggacaagccagctggaacccgaaacttagggtcgcc

SEQ ID NO: 70087 - DNA, 791 bp, Homo sapiens; identical to SEQ ID NO: 68173

SEQ ID NO: 70088 - DNA, 894 bp, Homo sapiens; identical to SEQ ID NO: 68174

SEQ ID NO: 70089 - DNA, 568 bp, Homo sapiens
gtcacacgcaccccttttcacacgcaccccggctcacacgcacccccctcacacgcaccccgggctcacacgcaccccgggctcacacgcaccccgggctcacacgcaccccctcttacacgcaccccgggcccacatgcactccggctcacacacaccctcactcatgcaccccgggcccacacgcaccccagctcccatgtacccctgctcacatgcaccccagctcccatgcatcccgggctcacacacaacttgactcacacgtctcaggttcatgcatccgtcccctggtgcgtctccgggccgccctccaccgggctgtgctggctgccacccccaagcctcttcctggtctcctgggaagcctcccctatcaccctaagctgcttctggggctggctttgctcaaaagccacacccaggctgggcactgtgcccaggtctcctattggctccctgcagccacgaggggctgtgtggtcagagccagcaagtcagcccctgccttggtactcccaatcctggggcccagagcacaggggtgacccctcttcctgcacccagt

SEQ ID NO: 70090 - DNA, 424 bp, Homo sapiens; identical to SEQ ID NO: 68176

SEQ ID NO: 70091 - DNA, 2452 bp, Homo sapiens; identical to SEQ ID NO: 68177

SEQ ID NO: 70092 - DNA, 1229 bp, Homo sapiens; identical to SEQ ID NO: 68178

SEQ ID NO: 70093 - DNA, 411 bp, Homo sapiens
gccgcccaggaacggctcccccagcgggaaatgacaagtccacccaaactggaaaacgcccagagtgagtcataggactcccacaggactggataggaccagttttcccctccccgagaggacaccgagcctcctctgtcccgcgcatcggaggggatcgcctccctggcccagaccccacgcttccggaggcgatctgttctttccaccgcggcgccccgaaagcactgtctcccctcggggttccgggtcaccgaccccatcccacagagcggcgggaggactgcaggcacggccggctcagggtacccgagctcggcggaaaatgcagaggccgcgctcgcccccaactaacggttctggacccgcccagcgcagcccccgacggacgcaggtttcgcgcggacgaaa

SEQ ID NO: 70094 - DNA, 556 bp, Homo sapiens; identical to SEQ ID NO: 68181

SEQ ID NO: 70095 - DNA, 1438 bp, Homo sapiens
cggcgcccgtctgcatcggctcctgcctcgtggacatctcctacagcgagaccaagaggaggcacgtgttccggctgaccaccgctgacttctgtgaatatctctttcaggctgaggaccgggatgacatgctgggctggatcagagcgatccgggagaacagcagggccgagggcgaggaccccggctgtgccaaccaagctctgatcagcaagaagcttaatgattatcgcaaagtgagccatagctctgggcccaaagctgattcctcccccaaaggctctcgcggcctggggggcctcaagtctgagttcctcaagcagagtgcggcacgtggcctcaggactcaggacctgcccgcagggagcaaggatgacagtgctgcagcccccaaaaccccctggggcatcaacatcatcaagaaaaataagaaggccgctccgagggcgtttggggtcaggctggaggagtgccagccagccacggagaaccagcgcgtccccttaatcgtggctgcatgctgtcgcattgtggaggcacgagggctggagtccacaggcatttaccgagtgcccggcaacaatgcagtggtgtccagcctacaggagcagctcaaccgcgggcctggtgacatcaacctgcaggatgagcgctggcaagacctcaatgtgatcagcagcctgctcaagtccttcttccgaaagctgcccgagcctcttttcactgatgacaaatacaacgacttcatcgaggccaaccgcattgaggacgcgcgggagcgaatgaggacgctgcggaagctgatccgggatctcccaggacactactatgaaacgctcaaattccttgtgggccatcctcaagaccatcgctgaccactctgagaaaaacaagatggaaccccggaacctggccctggtctttgggccgcccctggtgaggacgtttgaggacaacatgacagacatggtgacccacatgcctgaccgctacaagatcgtgggagacactgatccagcacttagactggtttttcagtgacgaagaggtacaagggagagagaaccccttgtgggcgacaagggaccttcaggcagtgcccaacattgagtaccttcctgcccaacatttggcaggacagtgccccctggcgacccggggtcagcggacctgttggagatttaaaggattctaccacctgtagttcagccaagtccaagggttcgtgggcccccaagaatggagccgtactgccctgggagatgctggctgatctcctatcagtctctggcctgtcatacctgcaatgcgcaatgaatgctggctgggatggcgcgcggggctgtggcagcagacacctgacgactgactctggagcagtgaggcgcacagagcctggggcgggggccacagcgccggggacatcaggagcggccgc

SEQ ID NO: 70096 - DNA, 676 bp, Homo sapiens; identical to SEQ ID NO: 68183

SEQ ID NO: 70097 - DNA, 1207 bp, Homo sapiens
tcaccgtaacctccaccttccaggttgaagcaattctcctgcctcccacgtagctgggattacaggcatgcaccaccacacccggctaattttgtatttttagtagagctggggtttctccatattggtcaggctgctcttgaactcccgatatcaggtgatccacctgcctcagcctcccaaagcgctgggattatagcatgagccactgcgcctggcctgaggtttttttctaagattccttgtaatattctacgtatacaatcatgtcatatgtaaatataaagttttatttcttctctacgtgtatgacttctatttcactttcttgcctcattgtgcttgatagaagttacagtactacaatgaataagagtggcaggagcaaacatccttgccttgttcccagttttacagggaaagcattcatcttaccagcaaatatatttgctataaatattttgtgcatgttcattcatcaaattgaggaagatcctctcaatgtctagtatggagagtttttatcatggatggatattgcattttgtcaaatcctttctctattattaactgatgttatgtaatttttcttctttagcctatgctgggttaattacattgatcgatttctgaatgttgaaccagccttgcttgtataactcaaataaatcccacttggttattatggtgtatactttttacatgactgttttctatttgctagtattttgttaaagatttttgctactaaatttatgagaggtatatgtctgtagttgtattatttttgtactgtctgtatgattttggcatcaaaataattttttaaatgtgttaagaaatgttccctcttggccgggtgcggtggctcacacctgtaatcccagcactttgggagaccaacgtggacagatcatgaggtcaggagttggagaacagcctggcctgaggtttttttctaagattccttgtaatattctacgtatacaatcatgtcatatgtaaatataaagttttatttcttctctacgtgtatgacttctatttcactttcttgcctcattgtgcttgatagaagttacagtactacaatgaataagagtggcaggagcaaacatccttgccttgttcccagttttacagggaaagcattcatcttaccagcaaatatatttgctataaatattttgtgcatgttcattcatca

SEQ ID NO: 70098 - DNA, 1095 bp, Homo sapiens
ccagccacgatagacaagagacgccaagatggcaccaacagcagcaacaagccttacaggagactttcagagagagaatttgacccaaataagcactgtggagtattggatgccgagacaaagaaaccttgcacaagatccctcacctgcaagacacattcgctaagccatcggagggcagtcccaggccggaaaaagcaatttgacctcctcctggcagaacacaaagcaaagtcccgggaaaaagaagttaaagataaagagcatctcctgacttccacgagggaaatacttccaagccaatccgggccggcacaggattctctgctagggtcttcagggagctctgggccagaaccaaaagttgcatcccctgcaaaatccagaccacccaactctgtacttcctagaccatcatctgcaaatagcataagcagcagcacatcttcaaatcatagcggccacactccagagcccccactcccaccggttggaggtgacctcgccagccgactgtccagtgatgaaggggagatggacggagccgacgaatccgagaagctagactgtcagttctccacgcaccaccccagacctctggcgttttgctcatttgggagtcgcctcatgggacgagggtactatgtgtttgatagaagatgggatcgttttcgattcgcactaaactccatggtagaaaaacacctgaattcacagatgtggaagcacagaaacccgagccacagggcatcaggtccctcccccctgttcaggacttgcctaaccaatctgctgtcactgagcaacattggggctgcctgggtgtcaactctggagagcgtagcaccccgctaccctctcaacctcgctgcccaaaccccaggccccggcgggcccgaacctggagggatggcagccgatgggggcgtggaagacattaggaagaaaaggaacggccaagactctttttttctttaacaagcatttaactctgcatcaggagccgccaacacagcattctctttcagccaggaagatccctcctgcggcagatagccccctgccctcgccagcagcccacatcaccacacgaaa

SEQ ID NO: 70099 - DNA, 1293 bp, Homo sapiens
ttctctgatgtgctacaagggttgtcttctggcggaaggactttccacattcactacaaatatagggtttctcctcattatgagttttctcatgaagagcaagggttgtcttctgggagaaggatttcccacattcattacaaatatagggcttttcccctgtatgagttctctgatgtacagtaagatttgccttctggtgaaaggacttcccacattctttacaaatatagggtttctcacctgtatggattctctgatgtagagagagtgttgtcttctggaaggacttcccacagtcattacactcatatggtttctctcccgtgtgagttctctgatgacgaatgaggtgtgacttcaatctgaaggcattcctacattgcagacattcatacgatttctcccctgtgtgtgttctctgatgatcagtgagggctgtcttgaggcggaaggacttaccacattcattgcaaacaaagggtttctctcctgtgtgagtcctctgatgatcaatgagatatgatttccttctaaatgcatttccacattgatgacattgatagggtttttcttctgagtgaattccctgatgcagaatcaatactgatttcctgcagaaagatttcccacattcattgcatgtatgttttttttcaatattggttgctcttctttttttattatatacagatgggttttctcctttgtaaggtctactatgtgtaatcaggcctcccctttgaaggaatgatttctcacagtcattatatccaaatgactgtgctggagtttccgttttctgatactgcataagaacttcattatgactgaaagctctggcactttgattatgggatttgacttcaggatgagtagtctcttgtttagtactcaggagtgatttcccatatccattatactcactaagtctctttcttgcaggatttagattactgatgattaattctgaaacatttttcaaaatccttccatgagtatcatattcaggaggtagattttttgaattcacagggtttttgcctagagtaaatgtcttttcatatattttactcttctccttcaccagttttttgtggttgatgcttacaactgatctagaatacttctcttggtgttccttgaatttcactaaaaagtcttcagctttccagttttcttccaagcaggtatgacctgcaaatgatgtccatgggctcttctctcgttccaaccttgagatcacatcaggtttggcatgtgacaccccacagaaatgaggtggcaatagtt

SEQ ID NO: 70100 - DNA, 654 bp, Homo sapiens; identical to SEQ ID NO: 68187
  misc_feature (1)...(654): n = a,t,c or g

SEQ ID NO: 70101 - DNA, 409 bp, Homo sapiens; identical to SEQ ID NO: 68188
  misc_feature (1)...(409): n = a,t,c or g

SEQ ID NO: 70102 - DNA, 1145 bp, Homo sapiens; identical to SEQ ID NO: 68189

SEQ ID NO: 70103 - DNA, 1045 bp, Homo sapiens
cggggaaataggtaaacattagctctacagtcctttcctcgataaccatatgcccactccagtttgagcttctcaggaggcagttccgttctgatgtcatcatagttgtcaacatcggaaggaatgaacatggtaatcgaggaaaggactgtagagctaatgtttaccttcttccgaccggggaaatagtttatttcattgcatcagtagtagtactatttaattatgaggagagaactcagcgacactacctgggccatacagactgtgtgaaatgccttgctatacatcctgacaaaattaggattgcaactggacagatagctggcgtggataaagatggaaggcctctacaaccccacgtcagagtgtgggattctgttactctatccacactgcagattattggacttggcacttttgagcgtggagtaggatgcctggatttttcaaaagcagattcaggtgttcatttatgtgttattgatgactccaatgagcatatgcttactgtatgggactggcagaagaaagcaaaaggagcagaaataaagacaacaaatgaagttgttttggctgtggagtttcacccaacagatgcaaataccataattacatgcggtaaatctcatattttcttctggacctggagcggcaattcactaacaagaaaacagggaatttttgggaaatatgaaaagccaaaatttgtgcagtgtttagcattcttggggaatggagatgttcttactggagactcaggtggagtcatgcttatatggagcaaaactactgtagagcccacacctgggaaaggacctaaaggtgtatatcaaatcagcaaacaaatcaaagctcatgatggcagtgtgttcacactttgtcagatgagaaatgggatgttattaactggaggagggaaagacagaaaaataattctgtgggatcatgatctgaatcctgaaagagaaatagaggttcctgatcagtatggcacaatcagagctgtagcagaaggaaaggcagatcaatttttagtaggcac

SEQ ID NO: 70104 - DNA, 559 bp, Homo sapiens; identical to SEQ ID NO: 68191

SEQ ID NO: 70105 - DNA, 449 bp, Homo sapiens; identical to SEQ ID NO: 68192

SEQ ID NO: 70106 - DNA, 428 bp, Homo sapiens; identical to SEQ ID NO: 68193
  misc_feature (1)...(428): n = a,t,c or g

SEQ ID NO: 70107 - DNA, 506 bp, Homo sapiens
agaagatgtgaagtcgtattatacagtacatctaccacaattagaaaatatcaatagtggtgaaaccagaacaatatctcactttcattatactacttggccagattttggagtccctcaatcaccagcttcatttctcaatttcttgtttaaagtgagagaatctggctccttgaaccctgaccatggacctgtggtgatccaccgtagtgcaggcactggacgctccagcaccttctctgtggtacacacttgtcttgttttgatggaaaaaggagatgatattaacattaaacaagtgttactgaacataagaaaattccaaatgggtcttatctcagaccccagatcaactgagattctcatacatggctataacagaaggagcaaaatgtgtaaagggagattctagtatacagaaacgatggaaagaactttctaaggaagactccctcctgcttttgatcattcaccaaacaaaataatgactgaaaaatacaatagga

SEQ ID NO: 70108 - DNA, 1116 bp, Homo sapiens; identical to SEQ ID NO: 68195

SEQ ID NO: 70109 - DNA, 181 bp, Homo sapiens; identical to SEQ ID NO: 68196
  misc_feature (1)...(181): n = a,t,c or g

SEQ ID NO: 70110 - DNA, 1892 bp, Homo sapiens
  misc_feature (1)...(1892): n = a,t,c or g
cggacgcgtggggccagctgcctgaaggagcgccaggtcctccttgctggcaggtggcgaagcccattggggcggcggtgcagaccgcggcggcggctgcggcggtctggctcgggaggcgttcctggggccaaggccatggccccgcggctgcagctggagaaggcggcctggcgctgggcggagacggtgcggcccgaggaggtgtcgcaggagcatatcgagaccgcttaccgcatctggctggagccctgcattcgcggcgtgtgcagacgaaactgcaaaggaaatccgaattgcttggttggtattggtgagcatatttggttaggagaaatagatgaaaatagttttcataacatcgatgatcccaactgtgagaggagaaaaaagaactcatttgtgggcctgactaaccttggagccacttgttatgtcaacacatttcttcaagtgtggtttctcaacttggagcttcggcaggcactctacttatgtccaagcacttgtagtgactacatgctgggagacggcatccaagaagaaaaagattatgagcctcaaacaatttgtgagcatctccagtacttgtttgccttgttgcaaaacagtaataggcgatacattgatccatcaggatttgttaaagccttgggcctggacactggacaacagcaggatgctcaagaattttcaaagctctttatgtctctattggaagatactttgtctaaacaaaagaatccagatgtgcgcaatattgttcaacagcagttctgtggagaatatgcctatgtaactgtttgcaaccagtgtggcagagagtctaagcttttgtcaaaattttatgagctggagttaaatatccaaggccacaaacagttaacagattgtatctcggaatttttgaaggaagaaaaattagaaggagacaatcgctatttttgcgagaactgtcaaagcaaacagaatgcaacaagaaagattcgacttcttagccttccttgcactctgaacttgcagctaatgcgttttgtctttgacaggcaaactggacataagaaaaagctgaatacctacattggcttctcagaaattttggatatggagccttatgtggaacataaaggtgggtcctacgtgtatgaactcagcgcagtcctcatacacagaggagtgagtgcttattctggccactacatcgcccacgtgaaagatccacagtctggtgaatggtataagtttaatgatgaagacatagaaaagatggaggggaagaaattacaactagggattgaggaagatctagcagtgtggcaaaggaactcattgctctcgaaatgcatatatgttggtttatagactgcaaactcaagaaaagcccaacactactgttcaagttccagcctttcttcaagagctggtagatcgggataattccaaatttgaggagtggtgtattgaaatggctgagatgcgtaagcaaagtgtggataaaggaaaagcaaaacacgaagaggttaaggagctgtaccaaaggttacctgctggagctgagccctatgagtttgtctctctggaatggctgcaaaagtggttggatgaatcaacacctaccaaacctattgataatcacgcttgcctgtgttcccatgacaagcttcacccggataaaatatcaattatgaagaggatatctgaatatgcagctgacattttctatagtagatatggaggaggccaagactaactgtganagccctgtgtaaggaatgtgtagtagaacgttgtcgcatattgcgtctgaagaaccaactaaatgaagattataaaactgttaataatctgctgaaagcagcagtaaagggcagcgatggattttgggtggngaa

SEQ ID NO: 70111 - DNA, 1245 bp, Homo sapiens
tgcgctatacatggggctgcatcatagacaggctggtttctcagtccatttctcctcggggacgtggccttctcagggctccacccctggaaacagggttttcccaggagctaccatgtggtgggcaggcccttctcgtggctctatccagggaggaggtctcgggaggactccactcccccaacgacatggtattctcagggctccacccctgtggacagagttttcccaggacctcaccccctggtgggtggggctttctgatggctccacccatgggcgggacttgatgaataccccacccccacaggacgtgctattctcagggctccacccctggggacaggattttcccacctggtgagtttgaccttctcatggctccaccccagggcggggcctcatgaggactcaaccaaccccacaggacatggtattctcacagttccacccctgggtacagagttttcccaggatgtcactacacagtgggtggggtcttcccatggctccacccaggggcggggctccatgagaactccaccccccacagggcgtggaattctcagagctccacctcccccaggcggaattcagacaccgggtcgtccaccatactccaggtcctgtttcagggcctcctagcctcccaggtcattccccggaagtcctggccctctattgcgtgcccctctcaccaggcaggaacttgagtgcctgtagcatctgccgctcttgcgcgaagtccaccatgaggtgactcatgttgtcactgaccttcgctttcaatgatagccggaaggcaggggccatggtcactccatctttgatttgcttggcagcctgaggaaagtcctcgctgtccatggcctgcagagtctggttggctgtctccagaagctcctcggagctctccagggcccgcgtgcaggcagccagctggttctgcagctcgtaggtgcggctggcacggtcctgttttatcttcataagcatgccttctttcagctcctccaggagggagaagagggactggaactctgcttcgaggtcctcctgcaccttcgccgagttcgcctccacgttcagcagcatctgtttcagggagtagataaagctctgaatttcttcattcttcacagccagtgttttgatgatcttcctcagggcctccctctgttcttccatggctgcagcccaggtcaccccggcccggccccgggcaccgcgcacgctgggtcccca

SEQ ID NO: 70112 - DNA, 564 bp, Homo sapiens
gggctggccagagccaagcaagaggcatcgagaaagggggatgctaaggggtggggggtgggaagggatgtcaatgcaaccaagaagtgatcggaggggaagagaggtcccctcacccttcacattcccagcccggcgcccccactctccgcccccacacttgagcccccaagtggctcccgtgcgcttcccttgtttaggggcaacccttccattccgccccttttcagttccttcccctctcacctcatcttgggactcctgcccggtacccagccgatcaggctcctcttggccacgcatcctgccatctcctccgagcccgcctctgcccttctccccaggccagctggggtaccctggggtccccgaccttcctgggatcgcccagatctgcacgtcaatgcccccgctcactacaccctcgccccgtcttcaactggggcctgcaagactcctactcccttcaaagcccctcccggacaccgcgtccctcagggtgccccagggatgcaccggggtccaccgtcctcacctgagtccgctcgaagctctcgcacgaaa

SEQ ID NO: 70113 - DNA, 441 bp, Homo sapiens
ttaatctgagcggccacgaggaacaaacagaaaggaaaagcgacagggttcccatgctcctaactccaccctcccgcgctcagcccggagaaggcccagtctcgctggctgctgcccctccttccacctctttccaaacccaccgagcggcgccaggaaaggtcccgccgccctcttctcccctcccccaaactaggggctggggaggcccaaggaggttaacagcttccgttccttccccgcctagaagggaaggggtgggaagtgggattgcgagctcgtcccgtctcggcctccctcgccctccacccttacccggagctccgtttccgccccagcccgagactcactcgtcagtcccgcagccaccgcagccgggtccccgcgtactgccacagcccctatcccagggccgcccccccaccgccagctgccacgaaa

SEQ ID NO: 70114 - DNA, 692 bp, Homo sapiens
  misc_feature (1)...(692): n = a,t,c or g
aaagtctagccatacctcannctcctcctctcccctttcctacccagggccttcctccggatgctcttccccgagaagctggatggagacaagaaggggcgccccagcaccgccggctccaagatcaaggtgggcctggggtgtacaatggggagctgggcctgcagagggctgagttccaccctacctggggtccggactctgtttctctcattccaacgtctgtctgtctaccaatcctggggcttctgcctctgactgtgacgtcatctgttcagcagggtcttcctccagctctgggtttagggagcttgaaccagcttcttggaggtctccatcaactctatgtgccaaggtaagtggtgagtgcggtagacgtgagagctccttgtcttgggttccagggtcaggcagacaccccacatcagtcccactagtgtggtgtgcactagtggaggtgcacacagaccagggacatctggcccctgtggcttatctgttaccagccctcacccacccccagtctctgtctattgggactgtatccagggtggaaaaaagaggggccagagggtcccatctctgtgccccccacccacccgtcttcacttctgcctcagaaacaagccaacgacctggtggccacactgatgaggtgcacaccccattacatccgatgcatcaaacccaac

SEQ ID NO: 70115 - DNA, 891 bp, Homo sapiens
  misc_feature (1)...(891): n = a,t,c or g
gccttccctaatccagtgtggtggaattccgctgaccttccgggcgctccggcgcgcgctctgtcgcctgcccctacccgtgcacgtgcgcgccgaccccctgcgcacctggcgctggcacaacctgctcgtctccttcgctcactccattgtgtcggggatctgggcactgctgtgtgtatggcagactcctgacatgttagtggagattgagacggcgtggtcactttctggctatttgctcgtttgcttctctgcggggtatttcatccacgatacggtggacatcgtggctagcggacagacgcgagcctcttgggaataccttgtccatcacgtcatggccatgggtgccttcttctccggcatcttttggagcagctttgtcggtgggggtgtcttaacactactggtggaagtcagcaacatcttcctcaccattcgcatgatgatgaaaatcagtaatgcccaggatcatctcctctaccgggttaacaagtatgtgaacctggtcatgtactttctcttccgcctggcccctcaggccctacctcacccatttcttcttgcgttatgtgaaccagaggaccctgggcaccttcctgctgggtatcctgctcatgctggacgtgatgatcataatctacttttcccgcctcctccgctctgacttctgccctgagcatgtccccaagaagcaacacaaagacaagttcttgactgagnnctgagtgaggggcacagagcctgggacaacaaaaacggacaaggccagaaacagcttcatatggacactgggacttagccccaagcctgggtgtcctctgaggccagcctctccaccttctgagcctgcgcccacactattgaaaacactaatgaaagtaaaaa

SEQ ID NO: 70116 - DNA, 444 bp, Homo sapiens; identical to SEQ ID NO: 68203

SEQ ID NO: 70117 - DNA, 1086 bp, Homo sapiens; identical to SEQ ID NO: 68205

SEQ ID NO: 70118 - DNA, 582 bp, Homo sapiens; identical to SEQ ID NO: 68206

SEQ ID NO: 70119 - DNA, 812 bp, Homo sapiens; identical to SEQ ID NO: 68207

SEQ ID NO: 70120 - DNA, 1521 bp, Homo sapiens; identical to SEQ ID NO: 68208
  misc_feature (1)...(1521): n = a,t,c or g

SEQ ID NO: 70121 - DNA, 831 bp, Homo sapiens
ctggcaaggcagacagggatggtgataaaatggctccttcagttgaaaagaagattgcagaactcgaaatgggactccttcacttgcagcaaaatattgaaattccggagatcagcctgccgattcatccaatgatcacaaatgttgcaaaacagtgttatgagcgtggagaaaagccaaaagttacagactttggtgataaggttgaagacccaacatttcttaatcagttacaatctggagttaaccgctggatccgagaaattcaaaaagtgaccaaactggatcgagatcctgcatcaggaactgccttacaggaaattagtttttggctaaacttggaacgtgcgttataccgcatccaggagaaacgggagagcccggaagttctcctgactctggatatcttgaaacatggcaagcgcttccatgccaccgtcagttttgacactgacacaggtctaaaacaggctttggaaactgtgaatgactacaatcctctgatgaaagatttccctctgaatgatttgctgtctgccacggagctggacaaaataagacaggcgcttgttgccattttcacacatttgagaaagatccgaaacacaaaatatcctattccagagggccactgcgtttggtggaggcaatttcaagagacttgagttctccaattactccaagtattgggcactaggaaatttgatgcatgttgccttatgaagaattttgaaaaagttatggtagcatgctttgaagtttttcagacttgggatgatgagtatgagaaacttcaggtattgttgagagacatcgtcaaaaaaaaaaaaa

SEQ ID NO: 70122 - DNA, 363 bp, Homo sapiens; identical to SEQ ID NO: 68213

SEQ ID NO: 70123 - DNA, 1122 bp, Homo sapiens; identical to SEQ ID NO: 68214

SEQ ID NO: 70124 - DNA, 342 bp, Homo sapiens; identical to SEQ ID NO: 68215

SEQ ID NO: 70125 - DNA, 998 bp, Homo sapiens
acctgggcaccgtgtcctatggcgccgacacgatggatgagatccagagccatgtcagggactcctactcacagatgcagtctcaagctggtggaaacaatactggttcaactccactaagaaaagcccaatcttcagctcccaaagttaggaaaagtgtcagtagtcgaatccatgaagccgtgaaagccatcgtgctgtgtcacaacgtgacccccgtgtatgagtctcgggccggcgttactgaggagactgagttcgcagaggctgaccaagacttcagtgatgagaatcgcacctaccaggcttccagcccggatgaggtcgctctggtgcagtggacagagagtgtgggcctcacgctggtcagcagggacctcacctccatgcagctgaagacccccagtggccaggtcctcagcttctgcattctgcagctgtttcccttcacctccgagagcaagcggatgggcgtcatcgtcagggatgaatccacggcagaaatcacattctacatgaagggcgctgacgtggccatgtctcctatcgtgcagtataatgactggctggaagaggagtgcggaaacatggctcgcgaaggactgcggaccctcgtggttgcaaagaaggcgttgacagaggagcagtaccaggactttgaggtgagccgactcccaggcatcccatcctcctacgacggtgccttccttacgctgaaattagttcttcctgtctttgtatgaaattagagctgggatcgctatagtctaggagtgaaggcagcttcgctcagcaggagcatggggggatcctgtctgcatttctgtttccaccatttctccagcttgctggggaaggagggttacagaagcaaagaagtgccagtttccttagaattgtgcttgataactcctcaatgatcacacgccagccgagctgagtacacataagagtatgtgcacataggcgcctccccctctgtccccagagcccatgcg

SEQ ID NO: 70126 - DNA, 708 bp, Homo sapiens
ctttaaattacttacggagtttaaacaggctatcaatcaatatggaccaggttctcatttcgtaatgggactgttaaagaatgttgctgtttccagtcagatgattcctactgacggacactcttactcgagcttgtctaactcctgctcagttcttacaatgtaaaacttggtgggcaggtgaagcttccattcagcctacttgcagcgcccaggcccaacctcaaattaatataactgcagaccaacttttgggggtcagcggctgggttggtttagatgcacaagtggtcgtgcaggatgatgccgtagaacagcttaagaggagtgtgcattagagcttgggaaaaaatcacttcatgtggagaacaatacccttcctttagtgcagtaaaacagggaccaaaaaaaccatacatggattttatagctcggttacaggagtctcttaaaaaggtaactgcagattcgactgctcaggatatagtgttgcacttattagctttcaacaatgctaatcccgactgcctggcagctctgcgacctatcagagggaaagcacatttagttgattataccaaggcctgtgatggtattggaattaatctgcataaggctactctgctagcacaggcaatggcaggactaagagtggataaaggaaatattctatttcctggagcttgttttaactgtgggaagcatggt

SEQ ID NO: 70127 - DNA, 561 bp, Homo sapiens
aaaatcacctcgggaccctgatgcaaaactgggattcttcttcccgtgtacctttttcaagtgggcagcactcaactcaatctttcccaccctcattgatgtcaaagtccaattcaatgttacagaaacccactggcctatgtgcggcccatggacggacaggagtccatggaaccaaagctgtcctctgagcactacagcagccaatcccatggcaacagcatgactgagctgaagcccagcagcaaagcacatctcaccaagctgaaaataccttcccaaccactggatgcatcagcttctggtgatgtgagctgtgtggatgaaatcctaaaagagatgacgcattcatggcctccccctctaacggctattcatacaccatgcaaaacagaaccttccaaatttccttttccaactaaggagtctcagcagtccaattttggcactggagaacaaaaaagatataatccttctaaaacttcaaatgggcaccagtctaaatctatgttaaaagatgacttaaaactaagcggctgtgcagacattcaattgttatta

SEQ ID NO: 70128 - DNA, 739 bp, Homo sapiens; identical to SEQ ID NO: 68219

SEQ ID NO: 70129 - DNA, 744 bp, Homo sapiens; identical to SEQ ID NO: 68220

SEQ ID NO: 70130 - DNA, 423 bp, Homo sapiens
gatgtgaagcccttgaggacctcttattgtcatccaatatgttgcaacaattgcctgattctatagtttatctttattagaagaatttgactgtagctgtaatgaactggagtcactaccttctactattggctaccttcatagtcttcggacattagcagttgatgagaatttccttccagaattacccagagaaattggaagttgtaagaatgtaacagtcatgtctctacgctccaacaaattagaatttcttcctgaagagattggacagatgcagaaactaagagtcctaaatttgagtgacaacagattgaagaatttaccattctcatttaccaaacttaaagagcttgcagctttgtggctttctgacaatcagtccaaagcccttatccctttacaaacagaagcccatgtatt

SEQ ID NO: 70131 - DNA, 726 bp, Homo sapiens
cctacaattgtccagaaatgtctcgaaatctatgacatgattggacaagcaatcagcagttctcgccgggctggtggtgagcactatcagaatttccaattgctgggtgcttggtgcttgttaaacagccttttcctcatactgaacctcagtcctactgcgttggctgataaggggaaagagaaggacccactggctgccctccgagtcagagacatcctttctcgtactaaagagggagtgggctcccctaaactggggcctggaaaagggcatcagggatttggggtactctcagtaatattggcaaaccatgccatcaaactgctaacgtctctctttcaagacctacaagtggaggcccttcacaagggttgggagacagatggcccccctgcagccttgagcattatggcccagagcacctccatacagaggattcaacggctgattgactctgtcccactgatgaacctgctcttgacgttactttcaacttcctacagaaaggcatgtgtcctgcagcggcagagggaagggctccatgagcaggcgatgccagcgcctccaccgactccaatacttactatgagggacgatttcagtaggcacggagggagggacagcagccaaggacggatggacagtgaggcctattttggggggcaatggttttgagggagattattttcttcccagttaaaggaggaaagcaggcaccttccg

SEQ ID NO: 70132 - DNA, 672 bp, Homo sapiens; identical to SEQ ID NO: 68223
  misc_feature (1)...(672): n = a,t,c or g

SEQ ID NO: 70133 - DNA, 668 bp, Homo sapiens; identical to SEQ ID NO: 68224

SEQ ID NO: 70134 - DNA, 864 bp, Homo sapiens
  misc_feature (1)...(864): n = a,t,c or g
ttttttttttttgagacacagtctggctatgtcacccaggctgagtacagtagcatgatcctggttcgctgcaacctccacctcccaggctcaagtgatcctcccacctcagcctcctgagtagctaggactacaggtacgtgccacaacacctggctaatttttttattttttgtagagacaagggtctccctacgttgtccaggctggacttgaactcctgggttcaagcgatcctaccaccttggcctcccacagcactggggttacaggcaggagccactgcacctggccctgtctttactgatggtcctgccccatgcctcccacacctaaccctgggcacccactcccgaagctctcctactggctgcagggtctgcctctgtgaggacagtgaagccgatgacacgggaggtgaagtcgaaggccgtctgctggccatcgtggatcactgagatgcagtggcggtccccgtagctggcccgtggcatgccaccctggaagatggtgaagggcaacccctgcctagtggtcagccagaggattctggtaatcgctttgcaaggaaagggaccgtaaggcacgaggctgcggaggggctctggttgctgggcttcgctggacacgggcccactggcagtagctgccgtcagagtgacagctgacgagcaggcggccgtcccgctgccaccagatgttctccagttgctggctgctgaggaagtggtagagcacgcggctgccctgtaggtcccagatgacaacgaggcctcggctgtagccgatcaggatctggttggggtcttcaggtgcttcctgcatgctttcaccatttngaacaaacagccggtgggggccctc

SEQ ID NO: 70135 - DNA, 438 bp, Homo sapiens; identical to SEQ ID NO: 68225

SEQ ID NO: 70136 - DNA, 533 bp, Homo sapiens; identical to SEQ ID NO: 68226

SEQ ID NO: 70137 - DNA, 1327 bp, Homo sapiens; identical to SEQ ID NO: 68227

SEQ ID NO: 70138 - DNA, 1008 bp, Homo sapiens; identical to SEQ ID NO: 68228

SEQ ID NO: 70139 - DNA, 847 bp, Homo sapiens; identical to SEQ ID NO: 68229

SEQ ID NO: 70140 - DNA, 400 bp, Homo sapiens
cgtcttaaaatgagggaagagaaaggcccaagcaaaggcaaggggcatcaatcgcagtgcgcctggtaacaaggttttggagggaaatctgtgtacctctcctgcgcgcactagcgcctttcaagatactctaaaaagaaaaaagtcccctttcccccaaaccggggaccaaccacctcgcccccagcggcccaccctccagcttcttcgccccaacaaagactcgacccgacccctgccccgcctccttccggagacccggccccgcctcctcccgttgtcttcccagacctcccgctgcaaaatgagaaacccaaatccgggccgtgcagtctgccggaggcccggcccgacccgcccccgagctccccacatcacacacacacgaccccctacgaaa

SEQ ID NO: 70141 - DNA, 991 bp, Homo sapiens; identical to SEQ ID NO: 68231

SEQ ID NO: 70142 - DNA, 734 bp, Homo sapiens; identical to SEQ ID NO: 68232

SEQ ID NO: 70143 - DNA, 1234 bp, Homo sapiens; identical to SEQ ID NO: 68233

SEQ ID NO: 70144 - DNA, 864 bp, Homo sapiens; identical to SEQ ID NO: 68234

SEQ ID NO: 70145 - DNA, 436 bp, Homo sapiens; identical to SEQ ID NO: 68235

SEQ ID NO: 70146 - DNA, 1617 bp, Homo sapiens
  misc_feature (1)...(1617): n = a,t,c or g
gcactgtcgtggaattcccgcatcccggagcctgagctgtggctggcggcggggcctcggcaggatgagacgtttgttttgatagtgtgccggngcctggctgacctgcgggactactgccagcctcatgccccaggggccctgctgaaggcggccttcatctgtgcagggatcgtgcatgtccactcggaactccagctgagtgagcagctgctccgcaccttcgggggcggctttgagctgcacacctggtctgagctgccccacggctctggcctgggcaccagcagcatcctggcaggcactgccctggctgccttgcagcgagccgcaggccgggtggtgggcacggaagccctgatccacgcagtgctgcacctggagcaggtgctcaccactggaggtggctggcaggaccaagtaggtggcctaatgcctggcatcaaggtggggcgctcccgggctcagctgccactgaaggtggaggtagaagaggtcacggtgcctgagggctttgtccagaagctcaatgaccacctgctcttggtgtacactggcaagacccgcctggctcggaacctgctgcaggatgtgctgaggagctggtatgcccgacttcctgctgtggtgcagaatgcccacagcctggtacggcaaactgaggagtgtgctgaaggcttccgccaaggaagcctgcctctgctgggccagtgcctgacctcgtactgggagcagaagaagctcatggctccaggctgtgagcccctgactgtgcggcgtatgatggatgtcctggccccccacgtgcatggccagagcctggctggggcaggcggtggaggctttctctatctgttgaccaaggagccacagcaaaaggaggccttggaggcggtgctggccaagaccgagggccttgggaattacagcatccacctggttgaagtggacactcagggcctgagcctgaagctgctggggaccgaggcctcaacctgttgccctttcccatgaagctggcttctctctgcaacaggagaaaacctggagctacagtgtcccccaccttccttgccccatgggaacctccacctcctactccccacccacctctgcgaatctgctcccaaaggaagctgaccagagcaagatctgggcaagcagagagtgcctgggacaggactgtgacctggtggacaggggcctagatgtagcctctgttcctcctggacataggaaggtcccaagcttagtatcccacgtggcctttacaaatcctatggctggccttctcattccacaagggccctggaaagggttgacagccagccttggcatatggctgggagtcccttagcaaggccaaccctgaagaggccctttgaggcattccctatggcttagagttgtagacttacactcaaccctcatgtgagcgtgggagtgagggtggcggtcccttgccaagttggtagcagtgacccagtgattcactgccatcccaggccttaactagcaaaactacggagcgtgccaagtgacctggtgcctgtgggaagtgggttctcaggactggcattcttggaataaattcactctgtccttaaaaaaaaaaaa

SEQ ID NO: 70147 - DNA, 481 bp, Homo sapiens; identical to SEQ ID NO: 68237

SEQ ID NO: 70148 - DNA, 1069 bp, Homo sapiens; identical to SEQ ID NO: 68238

SEQ ID NO: 70149 - DNA, 461 bp, Homo sapiens; identical to SEQ ID NO: 68239

SEQ ID NO: 70150 - DNA, 627 bp, Homo sapiens
gaattcccgggcacactttagtaaaaggcaaagtcaggatttgaatccacacacttatctagtacactctaagacacaggggcagattttagtaaacagtaggagatggactctcagaatttggtgcctggggagagggaagaggagagagatgcctggtgacaagcccagcccttgcctctccacaggagagtgggaacaatgaggtcatcttcatggccttggacttggccagtctggcctcggtgcgggcctttgccactgcctttctgagctctgagccacggttggacatcctcatccacaatgccggtatcagttcctgtggccggacccgtgaggcgtttaacctgctgcttcgggtgaaccatatcggtccctttctgctgacacatctgctgctgccttgcctgaaggcatgtgcccctagccgcgtggtggtggtagcctcagctgcccactgtcggggacgtcttgacttcaaacgcctggaccgcccagtggtgggctggcggcaggagctgcgggcatatgctgacactaagctggctaatgtactgtttgcccgggagctcgccaaccagcttgaggccactggcgtgcacctgctatgcagccccacccagg

SEQ ID NO: 70151 - DNA, 1456 bp, Homo sapiens
aggcatcaccacaagattatcaacgcctgatgactgtggcagaaggcatcaccacacttttgttcccatttcaatggcaacatgtttatgtgcccattctacctgcttctctgctacattttcttgatgctcctgtcccttatctgatgggccttcagtcaaaagaaggaactgaccgttctaaactagaacttcctcaagaggctaatttgtgttttgtggacattgacaaccattttattgagttgcctgaagaatttccacagttccccaataaagtggattttatccaagaactctctgaggttcttgttcaatttgggatccctcctgagggcagcctacattgcagtgagagtaccagcaaactgaagaatatggttctgaaagacttggtcaatgacaaaaagaacggcaatgtctgtactaataacatcagcatgtatgagttactgaagggcaatgaaaccatagcccgctttgcaggctctggccaagcgtactggtgtgggctgtggaaaaaatgggacctctctggcttctctggggtgaaaaagacaaggatttaaaactgcattgtgaagaggcagaactaagggactaccagctcaatgtacagctccgagaggtcttttgctaaccggttttacacagatgtttgcagattacgaagcatttggtcattcagactgcgcaggacatggaatcctggctgaccaaccgggaacagatgcagaactttgacaaagtaaaaagaaccatagttttccttttgtggttattagtggctttattattgattttaacatttttaaattttttattcttctgtgcctatgcttacccatatattattgattttgttaaccttttttaaatgcagactttttgtcttccagccccattaagaacttttctttaccaagtatttttacattagataaaataattttacaagcaaataaaccagctcattgaactggtcattaaattgtgcgttaaattgcctgtaatctcattttcaatttttctttaccttaaagatgcttaaattatagaaactcaggccgggcacggtggctcatgcctgtaatcccagaactttgggaggccgaggcggacggatcacaaggtcaggagtttgagaccagcctgggccaaaatggtgaaaccctgtctctactaaaaatacaaaaattagccgggtatgggtggcaggcacctgaaatcccagctgctcgggaggctgaggcagaagaatcgcttgaacctgggaggcagaggttgcaatgagccaagattgtgccactgcactccggcctgggcaacagagtaagacaccatctcaaaaaaagtaataataattaaaataaaaatacaaataagagaccagagccagcttaaagtgcttcccactggctgagtttgggacaatctgagcttcaaaataaataag

SEQ ID NO: 70152 - DNA, 475 bp, Homo sapiens; identical to SEQ ID NO: 68243

SEQ ID NO: 70153 - DNA, 437 bp, Homo sapiens; identical to SEQ ID NO: 68244

SEQ ID NO: 70154 - DNA, 917 bp, Homo sapiens; identical to SEQ ID NO: 68245

SEQ ID NO: 70155 - DNA, 420 bp, Homo sapiens; identical to SEQ ID NO: 68246

SEQ ID NO: 70156 - DNA, 435 bp, Homo sapiens; identical to SEQ ID NO: 68247

SEQ ID NO: 70157 - DNA, 728 bp, Homo sapiens; identical to SEQ ID NO: 68248

SEQ ID NO: 70158 - DNA, 1122 bp, Homo sapiens; identical to SEQ ID NO: 68249

SEQ ID NO: 70159 - DNA, 568 bp, Homo sapiens
cgacccctgtctcattccctccaccacatgcagcacagtccaggaggctggggtccaagagggccatggctggcacccggcttagtgctgagtccccagtgcccagcaagcctggcacccaggaggtggtcagcaaacgcttctgaacgacaggaagtgggactcttcagccatcgatgatccgctgtgcggccacaggtccgtgtctctgtgtgtgtctttccatgtgtgtctgtgtgtgtctctgtttctgtgtgtggacctgtgtctgtgtgtttgtgtttccgtgtatcttctctgtgtgtccgtgtgtcttcatgtgcatgcatgcgtgtctccatgtgtgtcgtgtgtgcgcatgtctgtgttcgtgtttccatgtatctgtgtctccgtgtcttcatgtgcatgcatgtgtatgtgtctgtgtcttcgcgtgtgtgcatgtgtctgtgtttccgtgtatctctgtgtgtctccgtgtcttcatgtgcatgcgtgtctgtgtctccatgtgtcttcgtgtgcatgcgtgtgtatctctgtgtgtctacggaattccgccacg

SEQ ID NO: 70160 - DNA, 2228 bp, Homo sapiens; identical to SEQ ID NO: 68251

SEQ ID NO: 70161 - DNA, 631 bp, Homo sapiens; identical to SEQ ID NO: 68252

SEQ ID NO: 70162 - DNA, 992 bp, Homo sapiens; identical to SEQ ID NO: 68253
  misc_feature (1)...(992): n = a,t,c or g

SEQ ID NO: 70163 - DNA, 812 bp, Homo sapiens; identical to SEQ ID NO: 68207

SEQ ID NO: 70164 - DNA, 2912 bp, Homo sapiens; identical to SEQ ID NO: 68255

SEQ ID NO: 70165 - DNA, 1652 bp, Homo sapiens
actaggggaggtgctcaagtgccagcagggcgtatccagtctggcctttgccctggccttcttgcagcgcatggacatgaagccgctggtggtcctggggctgccggcccctacggctccctcgggctgtctttccttctgggaggccaaggcgcagctggccaagagctgcaaggtgctggtagacgcgcttcgacacaacgccgccgctgctgtgccattttttggcggcgggtctgtgctacgcgctgccgagccggctccccatgccagctacggcggcatcgtctcggtggagacagacctgctgcagtggtgcctggagtcgggcagcatccccatcctgtgccccatcggggagacggccgcgcgccgctccgtgcttctcgactccctggaggtgaccgcgtcgctggccaaggcgctgcggcccaccaaaatcatcttcctcaataacacaggcggcctgcgcgacagcagtcataaggtcctgagtaacgtgaacctgcccgccgacctggacctggtgtgcaacgccgagtgggtgagcacaaaagaacggcagcagatgcggctcatcgtggacgtgctcagccgcctgccccaccactcctcggccgtcatcaccgccgctagcacgctgctcactgagctctttagcaacaaggggtccgggaccctgttcaagaacgccgagcgaatgctacgggtgcgcagcctggacaagctggaccagggccgtctagtggacctggtcaacgccagcttcggcaagaagctcagggacgactacctggcctcgctgcgcccgcggctgcactccatctacgtctccgaggggtacaacgccgccgccattctgaccatggagcccgtcctggggggcaccccgtacctggacaaatttgtggtgagctccagccgccagggccaaggctccggccagatgctgtgggagtgcctgcggcgggaccttcagacacttttctggcgctcccgggtcaccaaccccatcaatccctggtacttcaaacacagtgatggcagcttctccaacaagcagtggatcttcttctggtttggcctggctgatatccgggactcctatgagttggtcaaccacgccaagggactgccagactcctttcacaagccagcttctgacccaggcagctgaccctcaccatggacactacaggccctggaatggccagggtggaccaaaagccatgcccagctgggcatgaccccaggcagccagccacaggctgaagggggcttgttggctgagtgatctgcagaggagaaagcagcccccagctctgccccagaggaggcgctgaagtgggacaagcacaggaaagaaggggaccagtctaggaccccaacttgactcactctaaagctacaaccaaatggccttcgattttcaacctggggattaggggaggggagggtgccttccagggctcttactcaggacttaacccttaagggtgagcttagtttctgtcctcttgtgcttatgttttgaggctcccttacccaaaataatacccctgcctgcgtgatattctaccattcattttaattcctttgggtcttgcagtttttcaggaggccttgattaaaatgcaaatacttgtctgaga

SEQ ID NO: 70166 - DNA, 635 bp, Homo sapiens; identical to SEQ ID NO: 68256

SEQ ID NO: 70167 - DNA, 878 bp, Homo sapiens; identical to SEQ ID NO: 68257

SEQ ID NO: 70168 - DNA, 771 bp, Homo sapiens
ttttctagagcagaataatttcactttgggaaattaactaaatcaagaaaatgatatgaaacaaacagagacaaactggacaaagtgcatacccacccctaggctgcaccaacccagcgctcctggaaagaaatcccgaggcagggacgtaggtcacagtcacgccagcgtgcagggcacacgtaacccccgtcacggtcacgccggcatgcagggcacacgtaacccccgtcacggtcatgccagtccccccgaagaaaatcccgacgcagggcccacgtcacagtcacactggtgtgcgggttcacgagtttttccttttctctgccgttatatttatgtggttgcttgcggttcccagagcgaacttgctcacagctccagcaggccgactgggcgcccgactttggtcccagctcctttgtccccagttggggggccacggccacgggggcgaggaagttcctcattgcttttaacatccaacctgctcggcacaaaggagcaagcccaccgcatcgcgctcaacctgcgggagcagggccgcgggaaggaccagccaggacgtctgaagaaagttcagggcattggctggtacctggatgagaagaacctggctcaggtgtccaccaatcttctggactttgaggtcacggcactgcacacggtctacgaggagacctgccgagaagcacaggagctgagcctcccagtggtgggctcacagctggtgggcctggtgcccctgaaggctctgctggatgcggccgc

SEQ ID NO: 70169 - DNA, 778 bp, Homo sapiens; identical to SEQ ID NO: 68259

SEQ ID NO: 70170 - DNA, 1645 bp, Homo sapiens; identical to SEQ ID NO: 68260

SEQ ID NO: 70171 - DNA, 465 bp, Homo sapiens; identical to SEQ ID NO: 68261

SEQ ID NO: 70172 - DNA, 1222 bp, Homo sapiens; identical to SEQ ID NO: 68262

SEQ ID NO: 70173 - DNA, 1546 bp, Homo sapiens; identical to SEQ ID NO: 68263

SEQ ID NO: 70174 - DNA, 1319 bp, Homo sapiens; identical to SEQ ID NO: 68264
  misc_feature (1)...(1319): n = a,t,c or g

SEQ ID NO: 70175 - DNA, 675 bp, Homo sapiens; identical to SEQ ID NO: 68265

SEQ ID NO: 70176 - DNA, 930 bp, Homo sapiens
cgcaatttccggttcgacccacgcgtccgcccaggtacccgagcttggagatctgtgtgatgatttattttaatgagactggggagtccccgaaggcaggaggctgccacagtccctctcccaggagggggacttcacaccagctgccatggggctccttaggggccccttaggggagaaagatctggactgtaatggttttgacagtcgcttcagtctgagcccaaacctgatggcatgtcaggaaatccctacagaagagaggccacatccatatgacatgggtggccagagtttccagcacagtgtggacctaactggtcatgagggggttcccacagctgaaagtccactcatatgtaatgagtgtgggaaaaccttccaaggaaatcctgaccttattcagcgtcaaatagtccacactggggaggcttcctttatgtgtgatgattgtgggaaaaccttcagccagaactcagttcttaaaaaccgtcatcgatctcatatgagtgagaaagcttaccagtgcagcgaatgtgggaaagccttccgagggcactcagacttttctaggcatcagagtcaccacagcagtgagaggccttatatgtgtaatgaatgtggaaaagccttcagccagaactcgagccttaaaaagcaccaaaagtctcacatgagtgagaagccctatgaatgcaatgaatgtgggaaggcttttaggcggagctcaaacctcatccaacatcaaagaatccattctggggagaaaccgtatgtgtgcagtgagtgtgggaaggccttcaggcgaagctcaaacctcatcaaacaccacaggactcacacaggagagaagccttttgagtgggcgaggtggggaaagccttcagccagagtgcacccttgaggaagcaccatacggtcacactggag

SEQ ID NO: 70177 - DNA, 684 bp, Homo sapiens; identical to SEQ ID NO: 68267

SEQ ID NO: 70178 - DNA, 1467 bp, Homo sapiens; identical to SEQ ID NO: 68268

SEQ ID NO: 70179 - DNA, 1129 bp, Homo sapiens
ttttttttttttgagacggagtctcgctctgtggcccaggctggagtgcagtggcgcgatctcggctcactgcaagctccgcctcccgggttcacgccattctcctgcctcagcctcccgagtagctgggactacaggcgcccgctaccacgcccggctaattttttgtatttttagtagagacggggtttcaccgtgttagccaggatggtctcgatctcctgacctcgtgatccgcccgcctcggcctcccaaagtgctgggattacaggcgtgagccaccgcgcccggcccatttactaaatgttaagttccttataattccatctctttcagcacccaatacaggggtttacatagaggaagtactcaatatttcctttctttttttcttttttttctggagatagtctcgctctgtcaccaggctggagtgcagtggcgtaatctcggctcactgcaacctccacctcctgggttcacgccattctcctgcctcagcctcccgagtagctgggactacaggcgcccaccatcacgcccggctaattttttttgtatttttagtagagatggggtttcaccgtgttagccaggatggtctcgatctcctgaccttgtgatccgcccgcctcggcctcccaaagtgctgggattacaggtgtgagccaccgcgcccggcctaaaaaaattttttttttcttgagacaaagtcttgctctgttgcccaggctgaagtgcaggggcatgatatcagctcattgcaacctccacctcccgggttcaagcgattctcctgcctcagcctcccgagtagctgggattacaggtgccctccgccacgtccagctaattttctgttttttagtagagacggggtttcaccgtgttagccaggatggtctcgatctcctgacctcgtgatccacctgcctcagcctcccaaagtgctgggattacaggcgtgagccactgagcccagccccattttatttcatttctctaacagcaatgatatatatacatcccatagtatatcctactgatataatagcccctttccccattcaacacctgtgtaatcaggaaataaaaccctcgtgcagcattggcgtctggatagtcctcg

SEQ ID NO: 70180 - DNA, 475 bp, Homo sapiens
gttccgcccaattggcataatacgccaagccctgtgctctgcagacggccaccagagaaggatccttactctgcgcctgggattgctcgttatcccgtttctccccgcaagtaacctgttcttccgagtgggcttcgtggtcccgagcgtggggtgctgtgtgatgctgctttttggattcggagcctgcgcaaacacaccgagaaaaagaagctcatcgctgccgtggtgctgggaatcctactcagcaagatgctgagaggctgagatgcgcggtgcgcggcggcgagtggcggagcgaggggcggttttcagaggcgctgtgtctgtgtgtcccctcagtgctgaggttcgctgcaacatcggcagaaacctggctgctaaaggcaaccaaacgggcgccatcagataccaccgggaagctgtaagcttaaatcccaagacgaaatcgtcgacacgggaattccggccttgc

SEQ ID NO: 70181 - DNA, 2848 bp, Homo sapiens; identical to SEQ ID NO: 68270

SEQ ID NO: 70182 - DNA, 711 bp, Homo sapiens; identical to SEQ ID NO: 68124

SEQ ID NO: 70183 - DNA, 731 bp, Homo sapiens; identical to SEQ ID NO: 68272

SEQ ID NO: 70184 - DNA, 1634 bp, Homo sapiens; identical to SEQ ID NO: 68273

SEQ ID NO: 70185 - DNA, 873 bp, Homo sapiens; identical to SEQ ID NO: 68274

SEQ ID NO: 70186 - DNA, 483 bp, Homo sapiens
aatagaaccatttccagaagaaagggagaactttcttcagcaattgtacaaatttatggaagatagaggtacaccctattaacaaacgacctgtacttggatatcgaaatttgaatctctttaagttattcagacttgtacacaaacttggaggatttgataatattgaaagtggagctgtttggaaacaagtctaccaagatcttggaatccctgtcttaaattcagctgcaggatacaatgttaaatgtgcttataaaaaatacttatatggttttgaggagtactgtagatcagccaacattgaatttcagatggcattgccagagaaagttgttaacaagcaatgtaaggagtgtgaaaatgtaaaagaaataaaagttaaggaggaaaatgaaacagagatcaaagaaataaagatggaggaggagaggaatataataccaagagaagaaaagacgaaatcgtcgacccgggaattcc

SEQ ID NO: 70187 - DNA, 805 bp, Homo sapiens; identical to SEQ ID NO: 68276

SEQ ID NO: 70188 - DNA, 1260 bp, Homo sapiens; identical to SEQ ID NO: 68277

SEQ ID NO: 70189 - DNA, 594 bp, Homo sapiens
gcttgagctcgagcgacggcgctggcggagacgccggctgctcctcccctccccgccgcttttcctaaaaggattgtacaccttagaagtgcttaaggaagagtgatgaagctctgaatcgtgtcctgcagcagattctgagtgccacccaagatgaagagagggacaagcttgcatagtaggcggggcaagccagaggccccaaagggaagtccccaaatcaacaggaagtctggtcaggagatgacagctgttatgcagtcaggccgacccaggtcttcatccacaactgatgcacctaccggctctgctatgatggaaatagcttgtgctgctgctgctgctgctgctgcatgtctaccaggagaggagggaactgcggagcggatcgaacggttggaagtaagcagccttgcccaaacatccagtgcagtggcctccagtaccgatggcagcatccacacagactctgtggatggaacaccagaccctcagcgcacaaaggctgccattgctcacctgcagcagaagatcctgaagctcacagaacaaatcaagattgcacaaacagcccgacgaaatcgtcgacccggg

SEQ ID NO: 70190 - DNA, 1880 bp, Homo sapiens; identical to SEQ ID NO: 68279

SEQ ID NO: 70191 - DNA, 749 bp, Homo sapiens; identical to SEQ ID NO: 68280

SEQ ID NO: 70192 - DNA, 797 bp, Homo sapiens; identical to SEQ ID NO: 68281

SEQ ID NO: 70193 - DNA, 502 bp, Homo sapiens; identical to SEQ ID NO: 68282

SEQ ID NO: 70194 - DNA, 415 bp, Homo sapiens; identical to SEQ ID NO: 68283

SEQ ID NO: 70195 - DNA, 2462 bp, Homo sapiens; identical to SEQ ID NO: 68284
  misc_feature (1)...(2462): n = a,t,c or g

SEQ ID NO: 70196 - DNA, 1609 bp, Homo sapiens
  misc_feature (1)...(1609): n = a,t,c or g
cgaagttatggccttccttataaggaaaaggggtggattggaggaatcgccaattgaagtttcgaaggatcgctttagctgaatatcagagaaccttgtgaagatcttaaagagcaactaaagcataaagaatttcttctggctgctaatacttgtaaccgtgttggtggtctttgtttgaaatgtgctcagcatgaagctgttctttcccaaacccatactaatgttcatatgcagaccatcgaaagactggttaaagaaagagatgacttgatgtctgcactagtttccgtaaggagcagcttggcagatacgcagcaaagagaagcaagtgcttatgaacaggtgaaacaagttttgcaaatatctgaggaagccaattttgaaaaaaccaaggctttaatccagtgtgaccagttgaggaaggagctggagaggcaggcggagcgacttgaaaaagaacttgcatctcagcaagagaaaagggccattgagaaagacatgatgaaaaaggaaataacgaaagaaagggagtacatgggatcaaagatgttgatcttgtctcagaatattgcccaactggaggcccaggtggaaaaggttacaaaggaaaagatttcagctattaatcaactggaggaaattcagagccagctggcttctcgggaaatggatgtcacaaaggtgtgtggagaaatgcgctatcagctgaataaaaccaacatggagaaggatgaggcagaaaaggagcacagagagttcagagcaaaaactaacagggatcttgaaattaaagatcaggaaatagagaaattgagaatagaactggatgaaagcaaacaacacttggaacaggagcagcagaaggcagccctggccagagaggagtgcctgagactaacagaactgctgggcgaatctgagcaccaactgcacctcaccagacaggaaaaagatagcattcagcagagctttagcaaggaagcaaaggcccaagcccttcaggcccagcaaagagagcaggagctgacacagaagatacagcaaatggaggcccagcatgacaaaactgaaaatgaacagtatttgttgctgacctcccagaatacatttttgacaaagttaaaggaagaatgctgtacattagccaagaaactggaacaaatctctcaaaaaaccagatctgaaatagctcaactcagtcaagaaaaaaggtatacatatgataaattgggaaagttacagagaagaaatgaagaattggaggaacagtgtgtccagcatgggaggagtacatgagacgatgaagcaaaggctaaggcaggtggataagcacaggcaggccacagcccaggaggtggtgcaggtccccagaagcaggaccngcttcttccnggagagggagggnctgtcggaagaggtgggnccgncttggggnccnngttacccagnatncncaatcttttttggttgacccggttggacagggtggacttnantgttttncaaaggngntttttcattccancttgttttngcttaatttngcncaacgnacccacggcctncccggnntgaaaccccccnccctgagggggggttntccccc

SEQ ID NO: 70197 - DNA, 1129 bp, Homo sapiens; identical to SEQ ID NO: 68286
  misc_feature (1)...(1129): n = a,t,c or g

SEQ ID NO: 70198 - DNA, 460 bp, Homo sapiens; identical to SEQ ID NO: 68287

SEQ ID NO: 70199 - DNA, 615 bp, Homo sapiens
catcctatcccgtgtggtggaattcgccgctgactgctgaggtgccacccgagctgctggctgctgccggcttcttccacacaggccatcaggacaaggtgaggtgcttcttctgctatgggggcctgcagagctggaagcgcggggacgacccctggacggagcatgccaagtggttccccagctgtcagttcctgctccggtcaaaaggaagagactttgtccacagtgtgcaggagactcactcccagctgctgggctcttgggacccgtgggaagaaccggaagacgcagcccctgtggccccctccgtccctgcctctgggtaccctgagctgcccacacccaggagagaggtccagtctgaaagtgcccaggagccaggaggggtcagtccagccgaggcccagagggcgtggtgggttcttgagcccccaggagccagggatgtggaggcgcagctgcggcggctgcaggaggagaggacgtgcaaggtgtgcctggaccgcgccgtgtccatcgtctttgtgccgtgcggccacctggtctgtggctgagtgtgcccccggcctgcagctgtgccccatctggcagaagcccccgtcccgcagccgg

SEQ ID NO: 70200 - DNA, 786 bp, Homo sapiens
  misc_feature (1)...(786): n = a,t,c or g
gccaccgtgcccagccagcatccatctttttaatgactattttagtcttaaaaacaataaatttctccggacgcaattcctttgaaaaaaattatgacaacattaaattgaattatgcaattttaaaaattataatgataaatttacatgtctctgggctgggtttgatggttcacacnnnnnnnnnnnnnnnnnnnnnnnnntggttcacactggtaatcccagttcccannnnnnnnnnnnnnnnnnnnnnnnnnnnnnnnnnnnnnnnnnnnnnnnnnnnnnnnnnnnnnnnnnnnnnnnnnnnnnnnnnnnnnnnnnnnnnnnnnnnnnnnnnnnnnnnnnnnnnnnnnnnnnactttaattaatttatatgtgtccttaaccaaattgcatatcctttgagggaagaggctattgagcatccttttgcctccccgtaacttctaacacctaaacttataatgatggatcaattctccaaaggaaagaatatagagcaaagctaaggaatacatgaaaactgacagagagaagcaaggacaataaaattgaggaatataaatccggaaagagaactgaagtattatggcatccccaaaatagacatgtgacccaaaggaacagaatagagagcccagaagtaaatccatgcacttacggtcaattggtttttgacagaggtgccaagaacacacagtaagggaagggcagccttcaataaattgtatttggaaaatgatatatccacatgcagaggactgaaattccatccgaagtccacgc

SEQ ID NO: 70201 - DNA, 4975 bp, Homo sapiens; identical to SEQ ID NO: 67946

SEQ ID NO: 70202 - DNA, 839 bp, Homo sapiens; identical to SEQ ID NO: 68291
  misc_feature (1)...(839): n = a,t,c or g

SEQ ID NO: 70203 - DNA, 1678 bp, Homo sapiens
caagcagctgatcgtgctgggaaacaaagtggacctcctgccccaggatgctcctggctaccggcagaggctgcgggagcgactgtgggaggactgtgcccgcgccgggctcctgctggcccctggccaccaagggccacagcgccccgtcaaggacgagccacaggacggggagaatccgaatccgccgaactggtcccgcacagtggtcagggacgtgcggctgatcagcgccaagaccggctatggagtggaagagttgatctctgcccttcagcgctcctggcgctaccgtggggacgtctacttagtgggcgccaccaacgccggcaaatccactctctttaacacgctcctggagtccgattactgcactgccaagggctccgaggccatcgacagagccaccatctccccttggccaggtactacattaaaccttctgaagtttcctatttgcaacccaactccttacagaatgtttaaaaggcatcaaagacttaaaaaagattcaactcaagctgaagaagatcttagtgagcaagaacaaaatcagcttaatgtcctcaaaaagcatggttatgtcgtaggaagagttggaaggacattcttgtattcagaagaacagaaggataacattccctttgagtttgatgctgattcacttgcctttgacatggaaaatgaccctgttatgggtacacacaaatccaccaaacaagtagaattgactgcacaagatgtgaaagatgcccactggttttatgacacccctggaattacaaaagaaaattgtattttaaatcttctaacagaaaaagaagtaaatattgttttgccaacacagtccattgttccaagaacttttgtgcttaaaccaggaatggttctgtttttgggtgctataggccgcatagatttcctgcagggaaatcagtcagcttggtttacagtcgtggcttccaacatcctccctgtgcatatcacctccttggacagggcagacgctctgtatcagaagcatgcaggtcatacgttactccagattccaatgggtggaaaagaacgaatggcaggatttcctcctcttgttgctgaagacattatgttaaaagaaggactgggggcatctgaagcagtggccgacatcaagttttcctctgcaggttgggtttcagtaacacctaattttaaggacagactgcatctccgaggctatacacctgaaggaacagttttgaccgtccggccccctctcttgccatatattgttaacatcaaaggacagcgcatcaagaaaagtgtggcctataaaaccaagaagcctccttcccttatgtacaacgtgaggaagaagaaaggaaagataaatgtatgagaccgaccttgttcactccagatattaactgtattgaacacaacaaaatacattgaatttgtattaaacatataacgcataaataaagctcccattcttacccttaaaaataaaaggagaatgaaaaaaaaagatgccaataggcatatacgtggttttgggtattccggggtcttcccgtggtctgttcactttgcggtggtggtgatatattaggcagtcggggcgcctgatgtacgccttcttatagaggtacatggttggatgcagcgtcttgacgtgggattcgctttattcgcc

SEQ ID NO: 70204 - DNA, 2532 bp, Homo sapiens
  misc_feature (1)...(2532): n = a,t,c or g
ttatattaatgaattagatttaagttccctcattatgagaagataatctttagcatcactgaaagagttaagaaatgagacaaaaatcagatcatattcctttattacatatatgaaatataaaaacaaattaacaaagcaatatatatatatatttgcaagtccacaggacttcagagaaaaaaaggttctgtatgtgaaattattcatatggcactgtgttcatgttttgtatattcaagtacaaaagaaactatgtatagtggttatgcgtgggtacagaagatgaataataatgaaaaactgtgattttttgactatcacatacattgtgttaaaaaacaggtaaatataatgactattactgttaagaaagacaaggaggaaaactgtttcaatgttcaggtttaaatactaagcacaaaaatataacaaattctgtgtctacaataatttttgaagtgtatacaagtgcattgcaaatgagctctttaaaatttaaagtccatttcccctttagccaagcatatgtctacatttatgatttctttctcttattttaaagtctcttctggtttagttttttaaaaagtttcatcatggctgtcatcttggaatctagcctccagctcaaagctgagacttcacgcatacatattctcctttctggttgcatcttcacctagtttctccaagtattcagagttaaatagcacaacttcttttatatggtcacttttgtccacatgtagtggcagtgctgctgcttcagtaggctttctcacacacccttttccttctttcaacagcagtcaccaaacgttcacaacacaagtggtaggtagtaaagtgctttatacaaggaaatactatatacacatggagaggttccatttaacacctacagaccaaagttcatgcgtaacacacaagagaaggctctttaaacaaacaccttttctgatagtagggttagggattccttaaaacgtcattcattactttaagtagcatcaaacgtaagtaacatcgctgaagctggaaggcgtccttgttagaggtactgcccttaatggattactgctaaatgtcatgctgctattaaaatattcttaatagttaagaatttcagaatcagtcccatagaaaacagatatcagtgtaggggttttcatttctcttcatgaaataaaactgtatttaaacatgggtccagaagagataaattagataagacccatgcattcaaacatttctatatgttttggcactttaaaaaattccagtttcctgtctgaggtcttcttgctctaaagtttgtgttttgtacatagacaagtgccattatgtgctatccatcttaatgctacttgcactctctttttaaaatatccatgacttttcttccaagagaaggtttccagtgctggacaaagcttttcatattcacaattagtttgcctgttcttatatcctcatgtcctgctacaaggtattccaaaccaggattgaggattggacaagtgcatcctctgtccgtccatgattctggatataatgttcgctttcctcggaaaatcttcagtttggtagattttaagacctttttaatcttcacattgacctcaacatgagtacctttatcatgagctgataaaatctttatttttagcacatatgaatatttcattccacagaatgccttggcatttcctaatgtctgttccttacattcgcattttcctgagtgtagaagtgcagaaaacccctgcgcatcctcccactcccaggctggttcgctcttattgtgcacgggacggaagtcaggaacttcatgataccagtctatgtctgtgtggctgctgatgcagtctccggtgatagggtcacagctccccgcacagtcacatggtcgacagccatagtctccgaagccccagtatcccaccatgcacctgtcacaacgtcgccctgccaccccaggcttgcaagggcagtcaccattgctggggtcgcagaaggtcactgagttggcaggaaggacagctgatcctactggatggcaggaacacggtttgcaagcatctggagctgagaagggtctccgcaggtcacgatagaagcctggcttgcacctctggcaatactgtccttctgtgttgtgctgacagtcatcacagacaccaccactacgattccctgatgcctcccacacattaacgtcgaagtgacaggtatcagcatgcccattacacttgcaggttctgcactcgttgggagcccccgttttgccatcagctgcctcccatggccggtcattgtataacggggcacagtgctggcagtggctgcctgctgtgttgtgcttacacatacacttcccatggaccatgtggaatgttcctggggccttgacaggtctgaagccatgaacaggtatgcattgatcagcgtgaacattgcagaagcagctgcccttgacaatgaaatcatagattgcatagtgtgtaaaaccgctnncgccgtcgaagg

SEQ ID NO: 70205 - DNA, 752 bp, Homo sapiens; identical to SEQ ID NO: 68294

SEQ ID NO: 70206 - DNA, 1120 bp, Homo sapiens
gtcagggcattccccacctccacctcaagaaaactgggtcagttttgcagatactccaccaaccagtactcttttaaccatgcatcctgcttctgtccaggaccagacaacagtacgaactgtagcatcagctacaactgccattgaaattcgtaggcaatccagtagttatgatgatccctgggaaaataacagatgaacaaagacagtattatgtaaatcagtttaaaaccattcagcctgatctaaacggatttattccaggatctgcagctaaagagttttttacaaaatcaaaacttcctattcttgaactttctcatatttgggaactctcagactttgataaagatggtgcattgacactggatgagttttgtgctgcttttcatctggtggttgctaggaagaatggctatgatttaccagaaaaacttcctgaaagcttaatgcccaaactgattgatttggaagattcagcagatgttggggatcagccaggtgaggtaggttattcaggctctcctgctgaagctcctccaagcaagtcaccatcgatgccatcactaaaccagacatggcctgagctgaatcagagcagtgagcagtgggagacatttagtgaacgctcttcaagctcacaaactctgacccaatttgatttttacattgcaccagctgatcctgatactgctattgttcatccagttcccattcgtatgactccaagcaaaatccacatgcaggaaatggaacttaaaagaactggcagcgatcatacaaatcccactagcccattacttgtgaaaccatctgaccttttagaagaaaataagataaattcatcggtgaaattcgcttctggtaatactgtagatggttacagtagttcagactcttttacttctgacccagaacagatcgggagcaatgtaactcgtcaaaggtctcattcaggaacgtcgcctgataacactgcaccaccacctccccctccaaggccacagccctctcattctagatcatcatctttagatatgaatcggacctttacagtcaccacaggacaacaacaggctggagttgttgcccatcctcctgcagtgcctccaagaccact

SEQ ID NO: 70207 - DNA, 1888 bp, Homo sapiens
tccacggtggcatccatgatgcatcgtcaggagactgtggagtgtttgcgcaagttcaatgcccggagaaaactgaagggtgccatcctcacgaccatgcttgtctccaggaacttctcagctgccaaaagcctattgaacaagaagtcggatggcggtgtcaagccacagagcaacaacaaaaacagtctcgtaagcccagcccaagagcccgcgcccttgcagacggccatggagccacaaaccactgtggtacacaacgctacagatgggatcaagggctccacagagagctgcaacaccaccacagaagatgaggacctcaaagctgccccgctccgcactgggaatggcagctcggtgcctgaaggacggagctcccgggacagaacagccccctctgcaggcatgcagccccagccttctctctgctcctcagccatgcgaaaacaggagatcattaagattacagaacagctgattgaagccatcaacaatggggactttgaggcctacacgaagatttgtgatccaggcctcacttcctttgagcctgaggcccttggtaacctcgtggaggggatggatttccataagttttactttgagaatctcctgtccaagaacagcaagcctatccataccaccatcctaaacccacacgtccacgtgattggggaggacgcagcgtgcatcgcctacatccgcctcacccagtacatcgacgggcagggtcggccttcgaacccagccaagtcagaagaagacccgggtctggcacccgtcgggaatggcaagtggctcaatgtccactatcactgctcaggggccccctgcccgcaccgctgcagtgagctcagccacaggggcttttaggagattccagccggaggtccgaaccttcgcagccagtggctctggagggcctgagtgacagcggccagtcctgtttgtttgaaggtttaaaacaattcaattacaaaagcggcaagcagccaatgcacgcccctgcatgcagccctcccgcccgcccttcgtgtctgtctctgctgtaccgaggtgttttttacatttaagaaaaaaaaaaaagaaaaaaagattgtttaaaaaaaaaaggaatccataccatgatgcgttttaaaaccaccgacagcccttgggttggcaagaaggcaggagtatgtatgaggtccatcctggcatgagcagtggctcacccaccggccttgaagaggtgagcttggcctctctggtccccatggacttagggggaccaggcaagaactctgacagagctttgggggccgtgatgtgattgcagctcctgaggtggcctgcttaccccaggtctaggaatgaacttctttggaacttgcataggcgcctagaatggggctgatgagaacatcgtgaccatcagacctacttgggagagaacgcagagctcccagcctgctgtggaggcagctgagaagtggtggcctcaggactgagagcccggacgttgctgtactgtcttgtttagtgtagaagggaagagaattggtgctgcagaagtgtacccgccatgaagccgatgagaaacctcgtgttagtctgacatgcactcactcatccatttctataggatgcacaatgcatgtgggccctaatattgaggccttatccctgcagctaggagggggaggggttgttgctgctttgcttcgtgttttcttctaacctgggcaaggagagagccaggccctgggcaaggctcccgtgccgcctttgggttccttgttttcttgttgcttgatctggaccatctttgtctttgccttttcacggtagggtccccatgctgaccctcatcttgggcctgggcctcttgccaaagttgcccctg

SEQ ID NO: 70208 - DNA, 966 bp, Homo sapiens; identical to SEQ ID NO: 68297

SEQ ID NO: 70209 - DNA, 1035 bp, Homo sapiens; identical to SEQ ID NO: 68298
  misc_feature (1)...(1035): n = a,t,c or g

SEQ ID NO: 70210 - DNA, 443 bp, Homo sapiens; identical to SEQ ID NO: 68299

SEQ ID NO: 70211 - DNA, 1712 bp, Homo sapiens
ctttacccaagaatgtggtattcgtgcttgacagcagtgcttctatggtgggaaccaaactccggcagaccaaggatgccctcttcacaattctccatgacctccgaccccaggaccgtttcagtatcattggattttccaaccggatcaaagtatggaaggaccacttgatatcagtcactccagacagcatcagggatgggaaagtgtacattcaccatatgtcacccactggaggcacagacatcaacggggccctgcagagggccatcaggctcctcaacaagtacgtggcccacagtggcattggagaccggagagtgtccctcatcgtcttcctgacggatgggaagcccacggtcggggagacgcacaccctcaagatcctcaacaacacccgagaggccgcccgaggccaagtctgcatcttcaccattggcatcggcaacgacgtggacttcaggctgctggagaaactgtcgctggagaactgtggcctcacacggcgcgtgcacgaggaggaggacgcaggctcgcagctcatcgggttctacgatgaaatcaggaccccgctcctctctgacatccgcatcgattatccccccagctcagtggtgcaggccaccaagaccctgttccccaactacttcaacggctcggagatcatcattgcggggaagctggtggacaggaagctggatcacctgcacgtggaggtcaccgccagcaacagtaagaaattcatcatcctgaagacagatgtgcctgtgcggcctcagaaggcagggaaagatgtcacaggaagccccaggcctggaggcgatggagagggggacaccaaccacatcgagcgtctctggagctacctcaccacaaaggagctgctgagctcctggctgcaaagtgacgatgaaccggagaaggagcggctgcggcagcgggcccaggccctggctgtgagctaccgcttcctcactcccttcacctccatgaagctgagggggccggtcccacgcatggatggcctggaggaggcccacggcatgtcggctgccatgggacccgaaccggtggtgcagagcgtgcgaggagctggcacgcagccaggacctttgctcaagaagccataccagccaagaattaaaatctctaaaacatcagtggatggtgatccccactttgttgtggatttccccctgagcagactcaccgtgtgcttcaacattgatgggcagcccggggacatcctcaggctggtctctgatcacagggactctggtgtcacagtgaacggagagttaattggggcacccgcccctccaaatggccacaagaaacagcgcacttacttgcgcactatcaccatcctcatcaacaagccagagagatcttatctcgagatcacaccgagcagagtcatcttggatggtggggacagactggtgctcccctgcaaccagagtgtggtggtggggagctgggggctggaggtgtccgtgtctgccaacgccaatgtcaccgtcaccatccagggctccatagcctttgtcatcctcatccacctctacaaaaagccggcgcccttccagcgacaccacctgggtttctacattgccaacagcgagggcctttccagcaactgcagggtcttctgtgagtctggcatcctgattcaggaactgacccagcagtccgtggcagttgctggtcga

SEQ ID NO: 70212 - DNA, 839 bp, Homo sapiens; identical to SEQ ID NO: 68301

SEQ ID NO: 70213 - DNA, 1706 bp, Homo sapiens; identical to SEQ ID NO: 68302

SEQ ID NO: 70214 - DNA, 1271 bp, Homo sapiens
actagaggagcgttgcggaattccgaaagatctctcgccagagcaaatgggacattggagctgtgcagtggaatcctcatgacagctttgcacactattttgcggcttcgagtaaccaacgagtagacctttacaagtggaaagacggcagtggggaagttggcacaaccttacaaggccacactcgtgtcatcagcgggtgcctcccaggtcaaatggaataaaaaaaatgctaactgccttgccaccagccatgacggcgatgtgcggatatgggataagaggaaacccagtacagcagtggaatatctagccgcccacctctccaaaatccatggcctggactggcacccagacagcgagcacattcttgctacctccagtcaagacaattctgtgaagatctgggattaccggcagcctcggaaatacctcaatattcttccttgccaggtgcctgtctggaaggccagatacacacctttcagcaatggattggtgactgtgatggttccccagctgcggagggaaaacagccttctcctgtggaatgtctttgacttgaacaccccagtccacaccttcgtggggcatgatgatgtggtcctggagttccagtggaggaagcagaaggaagggtccaaggactatcaactggtgacgtggtcccgggatcagaccttgagaatgtggcggtggattcccagatgcagaggctttgtgcaaatgacatattagatggtgttgatgagttcattgagagtatttcccttctgccggaacctgagaagaccctgcacactgaagatacagatcaccagcacactgcaagccatggggaggaagaagccctaaaagaagatccccctagaaatctcctggaagagaggaaatcagatcaactggggctgcctcagaccttgcagcaggaattctccctgatcaatgtgcaaatccggaatgtcaatgtggagatggatgcggcagacaggagctgcacagtgtctgtgcactgcagcaaccatcgtgtcaagatgctggtgaagttccctgcacagtacccaaacaacgccgccccttccttccagtttattaaccccacaaccatcacatccaccatgaaagctaagctgctgaagatcctgaaggacacagccctgcagaaagtgaagcgtggccagagctgcctggagccctgcctgcgccagctcgtctcctgccttgagtcctttgtgaaccaggaagacagcgcttccagcaacccgtttgca

SEQ ID NO: 70215 - DNA, 1116 bp, Homo sapiens
tttcgtggctggggctcatgttgggggcacttggcctctccaggcctcgaaggcttctcctgggctgatgcgagctggggaacgggagggacggacgtgggagcgagaacgtcacactggaggcagctggtggcacgatgggggacagagtgaaaggtagcaagtcaaggacagtccctcgtctcccgcctcttggctcagggaccagaacttggcctagaacttgtttttgtctggaatcgtgacccaggacgaatggcagggagcgtgcccccttccctgcagctccagaaccttgctgcccttggggaaaggcgccctgatctggttgtggaagtggcccatcccaaaataatccatgaatctggggcacaaatcctgcgccatgccaatctcctggtggggtccccctcagctctaagtgaccagaccacagagcggcagctcttggaggcctcacagcactgggaccacgccgtgtttgtggccgaaggggccctgtggggcgctgaggacatcaggagattggatgcagctgggggcctccggagccttcgtgttcaccatgggccacacaccccgatggcttccggcttgaggggacccctggctgcagcccacagccctggggcctttgcactgttgctcttacggaaggccctgctccgtgggcttctgcccttttgccccgcgaaattccaacaccatggcggcggctgccctggctgcccccagcctgggcttcgatggggtgattggggtgctcgtggctgataccagcttcacggacatgcacgtggtggatgtagagctgagcggacctccgggccccacgggccgaagctttgctgtgcacacccgcagagagaaccctgccgagccaggcgcggttcaccggctccgccaccgtcacggcctctctggcggagccctcctggcctgctgccagctcccctccaggccggggatccatctctgctgagaagcctcctccctcccgagacaagatcatctgcctggcctctcaccaccaccatcccacccctgccctgccccacttccccagggtctcccttctgactcagtaaagatcaccgctgcctccccgcaaaaaaa

SEQ ID NO: 70216 - DNA, 739 bp, Homo sapiens; identical to SEQ ID NO: 68304

SEQ ID NO: 70217 - DNA, 542 bp, Homo sapiens; identical to SEQ ID NO: 68305
  misc_feature (1)...(542): n = a,t,c or g

SEQ ID NO: 70218 - DNA, 833 bp, Homo sapiens; identical to SEQ ID NO: 68306

SEQ ID NO: 70219 - DNA, 801 bp, Homo sapiens; identical to SEQ ID NO: 68307
  misc_feature (1)...(801): n = a,t,c or g

SEQ ID NO: 70220 - DNA, 1007 bp, Homo sapiens; identical to SEQ ID NO: 68308
  misc_feature (1)...(1007): n = a,t,c or g

SEQ ID NO: 70221 - DNA, 828 bp, Homo sapiens; identical to SEQ ID NO: 68309

SEQ ID NO: 70222 - DNA, 925 bp, Homo sapiens
aggaagcgcagggacagagcggtgcagtccgagctttcggaaagggtctttgctgctgcgcccgggcaggggctgccgcggccccaggtcccgcttcgagacgcggcgcggtccaggcgggaggcgactccctaggaagggacccggggcgggaggaggaagtgaggccgcgcggaaggaaggcggcgagccccggggccccgaggccttggccgcgtcacagcacccacatggcctctggagtgggcgcggccttcgaggaactgcctcacgacggcacgtgtgacgagtgcgagcccgacgaggctccgggggccgaggaagtgtgccgagaatgcggcttctgctactgccgccgccatgccgaggcgcacaggcagaagttcctcagtcaccatctggccgaatacgtccacggctcccaggcctggaccccgccagctgacggagagggggcggggaaggaagaagcggaggtcaaggtggagcaggagagggagatagaaagcgaggcaggggaagagagtgagtcggaggaagagagcgagtcagaggaagagagcgagacagaggaagagagtgaggatgagagcgatgaggagagtgaagaagacagcgaggaagaaatggaggatgagcaagaaagcgaggccgaagaagacaaccaagaagaaggggaatccgaggcggagggagaaactgaggcagaaagtgaatttgacccagaaatagaaatggaagcagagagagtggccaagaggaagtgtccggaccatgggcttgatttgagtacctattgccaggaagataggcagctcatctgtgtcctgtgtccagtcattggggctcaccagggccaccaactctccaccctagacgaagcctttgaagaattaagaagcaaagactcaggtggactgaaagg

SEQ ID NO: 70223 - DNA, 604 bp, Homo sapiens; identical to SEQ ID NO: 68311

SEQ ID NO: 70224 - DNA, 398 bp, Homo sapiens; identical to SEQ ID NO: 68312

SEQ ID NO: 70225 - DNA, 394 bp, Homo sapiens; identical to SEQ ID NO: 68313

SEQ ID NO: 70226 - DNA, 531 bp, Homo sapiens; identical to SEQ ID NO: 68314

SEQ ID NO: 70227 - DNA, 798 bp, Homo sapiens; identical to SEQ ID NO: 68315

SEQ ID NO: 70228 - DNA, 541 bp, Homo sapiens; identical to SEQ ID NO: 68316

SEQ ID NO: 70229 - DNA, 525 bp, Homo sapiens; identical to SEQ ID NO: 68317
  misc_feature (1)...(525): n = a,t,c or g

SEQ ID NO: 70230 - DNA, 661 bp, Homo sapiens; identical to SEQ ID NO: 68318

SEQ ID NO: 70231 - DNA, 1199 bp, Homo sapiens
agcgtggtggaattcccgtcctctgtacggccccgggagcaggtgcagcccagtcggcagaggagcaaacaggctcagagcaggtaggaaaccttcccaaggccaaccagctggtcaaaggactgcttccttcctgaactcataccctgtcagctgtggagcttttggtctctgaaatctttctagaaaattgttgataaagctgattccgttttcctgtaggccttcaacttgcatctctccaaggaagaactgggatttgagagggatgaagtggggcttgggcatttaggtcctttgggaggatagatgtggggagcatcagaggtctttgtcctgcttgtgacagacagcatgggggggatgttgagtccaagcatgttggtgctgggacgggagacagacctctgcttagcctggttagtgccaggagccattgccccctcccccactttgttccttccctctctagcaaaaaagcagggccagagcggcatcatctcctgcatagccttcagcccagcccagcccctctatgcctgtggctcctacggccgctccctgggtctgtatgcctgggatgatggctcccctctcgccttgctgggagggcaccaagggggcatcacccacctctgctttcatcccgatggcaaccgcttcttctcaggagcccgcaaggatgctgagctcctgtgctgggatctccggcagtctggttacccactgtggtccctgggtcgagaggtgaccaccaatcagcgcatctacttcgatctggacccgaccgggcagttcctagtgagtggcagcacgagcggggctgtctctgtgtgggacacggacgggcctggcaatgatgggaagccggagcccgtgttgagttttctgccccagaaggactgcaccaatggcgtgagcctgcaccctagcctgcctctcctgggccactgccttccggtcagcgtgtgtttcctgagccccacagagagtgggggacgaaggagaggagctgggccttcccttggctctccacggcgccacgtccaccttgaatgtcggcttcagctctggtggtgtggggggggcgccagactccagcatccctgatgatcacccagggcgagaaagggcagggaggaacggagggaggtgtgggtgagctgatatagaaaggtttttatggtaaaaaaaaaaaa

SEQ ID NO: 70232 - DNA, 440 bp, Homo sapiens; identical to SEQ ID NO: 68320
  misc_feature (1)...(440): n = a,t,c or g

SEQ ID NO: 70233 - DNA, 419 bp, Homo sapiens; identical to SEQ ID NO: 68321

SEQ ID NO: 70234 - DNA, 791 bp, Homo sapiens
gaccttgagccaaggcttttgcaaagatatgtgggtgctcctcttctgcctcgtcatggccagctgccagtactccctgctaaagagtgttcagcctgaccccgcctcaccaatacacggacacaaccaaatcataacatatagcagaccaatctatttttgtgtgctgtgtggccttattttgcttcttgatacaggggccaaagccaggcaccctcccagttacgttgtgtatggcctgaagctcttctctccagtgtttctacaatcagctagggactacttaatagtatttttatattgcttccctgctatttccctccttgggctcttcccgcaaatcaacactttctgcacttatcttttggagcaaattgacatgctgttttttgggggttctgctgtgtctgggataacctcggctgtttacagtgtggcccggagcgtcttggctgccgccctgctccacgcagtctgcttcagtgcagtgaaggaaccgtggagcatgcaacacatcccggcactgttttcggccttctgtggcctcttggtcgccctttcttaccatctgagccgtcagagcagtgacccatctgtactcatgtccttcatccaatgcaggctgtttcctaaatttttacatcaaaatctggcagagtcagctgctgaccctctccccaagaagatgaaagattcagtgacggatgtcttaaaatgggatctcatcgtctgcgccaggggtggttggcttttcattggcaggcaaggccagcactgtattcctgtcattg

SEQ ID NO: 70235 - DNA, 795 bp, Homo sapiens; identical to SEQ ID NO: 68324

SEQ ID NO: 70236 - DNA, 1276 bp, Homo sapiens; identical to SEQ ID NO: 68000

SEQ ID NO: 70237 - DNA, 540 bp, Homo sapiens; identical to SEQ ID NO: 68326

SEQ ID NO: 70238 - DNA, 807 bp, Homo sapiens; identical to SEQ ID NO: 68327
  misc_feature (1)...(807): n = a,t,c or g

SEQ ID NO: 70239 - DNA, 589 bp, Homo sapiens; identical to SEQ ID NO: 68328

SEQ ID NO: 70240 - DNA, 428 bp, Homo sapiens; identical to SEQ ID NO: 68331

SEQ ID NO: 70241 - DNA, 401 bp, Homo sapiens; identical to SEQ ID NO: 68332
  misc_feature (1)...(401): n = a,t,c or g

SEQ ID NO: 70242 - DNA, 484 bp, Homo sapiens
ttttttttttattttttttgctctgacggtgtttactgatggttccagcaacggaatagtggcttacactgggccaaaagaacaagtcattgaaactcaatatcactcagctccaagagcagaattggttgctgtcatttcagtgttacaagattttaatcagcctattaacattgtttcagattctgcatatttagtacaggctacaaaggatgttgagacagccctaatcaatcaaatatagtatggatgatcagttaaatcagctgcttaaattgttacaacaaactgtaagcaaaagaaatttcccattttatattgctcatatccgagcacatactaatttaccagggcctttaactaaggcaaatgaacaagctgacttggtagtatcatctgccttcatggaagcacaagaacttcaggccctcacctatgtaaatgcaacaggattaaaaaacaaatttgatatcgcatggaaaca

SEQ ID NO: 70243 - DNA, 644 bp, Homo sapiens
tgccaaattcaatgtttaaaataggggaacgatcctctttccttcaagagattttgatgtcagaaagcactgactcacgcaaaggtccacattttcagattcactggcaagctggttggtgaggacaagcttttgactgaatcaaagctcagtggttttaaagtggagttgggcagagcctaggctttttgtgagggtgcttaggtgtcactatgaaggccagacgagggagagggtgagtgtgagttgagtgagtgagaccggagcttcagccaaaacagctatacctttggtctatgtatatgcatatgtctatatgtgtatatgtatgtatgtgtatgtgtacatgtatatgatatgcgtggatacatgctcatgtatatgcacttgtgcatgtatttgcatatgtatttgtatatgcatttgtatgtgtatgtgtatatgcatgtatatttatattaaatagtgggtaacttttcatttcccagcaggttcagatgctttagaaacatagtttgagattcactgctttaggaccacatactcatgatgaaagacaaaaacgaaaaataaacagagtcagggagattaaatctataaccaaagacaacatgagtatttaatgtcagctactcaagctccag

SEQ ID NO: 70244 - DNA, 390 bp, Homo sapiens; identical to SEQ ID NO: 68335

SEQ ID NO: 70245 - DNA, 1392 bp, Homo sapiens; identical to SEQ ID NO: 67939
  misc_feature (1)...(1392): n = a,t,c or g

SEQ ID NO: 70246 - DNA, 364 bp, Homo sapiens; identical to SEQ ID NO: 68337

SEQ ID NO: 70247 - DNA, 455 bp, Homo sapiens; identical to SEQ ID NO: 68338

SEQ ID NO: 70248 - DNA, 415 bp, Homo sapiens
cttgtcctcatcgtcaaggccaccaaagcccaggtggaaccatcagagaggaagtgcgggggtgtgctcgaaggcagtctgaaactcaggttgaacatggataaacttaaaatcccccatgttaatgacggctttatctttctggggcacaggctcattcgcaaacgcagtcgttatgcgagatgcgagtggtctcaacgatcccgcaggagaaagccagaagcttcgccgcatcgctgacagctctgttagggaaggtgcgaataagcggggaaattcttctcggctgactcagtcatttcatttcttcatgtttgagccgattttttctcccgtaaatgccttgaatcagcttatttacaccgtttttaagccgggtaacgccaggtctccagcagtcagtacgatgtcggcg

SEQ ID NO: 70249 - DNA, 433 bp, Homo sapiens; identical to SEQ ID NO: 68340

SEQ ID NO: 70250 - DNA, 364 bp, Homo sapiens
gttacaccctatgtggcggtttcggcattgagcgccggggtgatcacgcgcaatacgacgctgtttgacccagggctggtggcaactgccaggttcggaaaaacgttatcgtgactggaaaaaatggggccacgggcgtctgaatgtcacaagatcgctggaagaatctgcggataccttcttctatcaggtggcctacgatatggggatcgatcgcctctccgaatggatgggtaaattcggttatggtcattacaccggtatcgacctggcggaagaacgttccggcaacatgcctacccgcgaatggaaacagaaacgctttaaaaaaccgtggtatcagggtgacaccattccggttggt

SEQ ID NO: 70251 - DNA, 665 bp, Homo sapiens; identical to SEQ ID NO: 68342

SEQ ID NO: 70252 - DNA, 311 bp, Homo sapiens; identical to SEQ ID NO: 68343

SEQ ID NO: 70253 - DNA, 207 bp, Homo sapiens
tgcggactcacctgggaaccccccaggggactcacctggggacccacctggggactcacctggggactcacctggggactcacctggtgactcacatggggacccacctggggactcacctggggaccacctgggcaccaacctgagtaatctcgggaacactagcgtgtgtcacactcctggcgatctacggcgacggacattgaa

SEQ ID NO: 70254 - DNA, 392 bp, Homo sapiens; identical to SEQ ID NO: 68345

SEQ ID NO: 70255 - DNA, 584 bp, Homo sapiens; identical to SEQ ID NO: 68346

SEQ ID NO: 70256 - DNA, 1389 bp, Homo sapiens
gagcctgcaatcctggagtgccaccctccccggggccacccagaaccctccatttactggaaaaaagccaaagttcgaattgatgccaaggaagaaagaataagtatccgtggtggaaaactgatgatctccaataccaggaaaagtgatgcagggatgtatacttgtgttggtaccaatatggtgggagaaagggacagtgacccagcagagctgactgtctttgaacgacccacatttctcaggaggccaattaaccaggtggtactggaggaagaagctgtagaatttcgttgtcaagtccaaggagatcctcaaccaactgtgaggtggaaaaaggatgatgcagacttgccaagaggaaggtatgacatcaaagacgattacacactaagaattaaaaagaccatgagtacagatgaaggcacctatatgtgtattgctgagaatcgggttggaaaaatggaagcctctgctacactcaccgtccgagctcgccctgttgctcccccacagtttgtggttcggccaagagatcagattgttgctcaaggtcgaacagtgacatttccctgtgaaactaaaggaaacccacagccagctgttttttggcagaaagaaggcagccagaacctacttttcccaaaccaaccccagcagcccaacagtagatgctcagtgtcaccaactggagacctcacaatcaccaacattcaacgttccgacgcgggttactacatctgccaggctttaactgtggcaggaagcattttagcaaaagctcaactggaggttactgatgttttgacagatagacctccacctataattctacaaggcccagccaaccaaacgctggcagtggatggtacagcgttactgaaatgtaaagccactggtgatcctcttcctgtaattagctggttaaaggagggatttacttttccgggtagagatccaagagcaacaattcaagagcaaggcacactgcagattaagaatttacggatttctgatactggcacttatacttgtgtggctacaagttcaagtggagaggcttcctggagtgcagtgctggatgtgacagagtctggagcaacaatcagtaaaagctatgatttaagtgacctgccagggccaccatccaaaccgcaggtcactgatgttactaagaacagtgtcaccttgtcctggcagccaggtacccctggaacccttccagcaagtgcatatatcattgaggctttcagccaatcagtgagcaacagctggcagaccgtggcaaaccatgtaaagaccaccctctatactgtaagaggactgcggcccaatacaatctacttattcatggtcagagcgatcaaccccaaggtrtcagtgacccaa

SEQ ID NO: 70257 - DNA, 939 bp, Homo sapiens; identical to SEQ ID NO: 68348

SEQ ID NO: 70258 - DNA, 914 bp, Homo sapiens; identical to SEQ ID NO: 68349
  misc_feature (1)...(914): n = a,t,c or g

SEQ ID NO: 70259 - DNA, 788 bp, Homo sapiens
atgggcgtcatgaataacatgcggaaacagtgatttaaatctaccacccagctgtagttgaatctacaatctgctcagggatttatactcaatgccaatttgatatcatgctgggagggactgattgcagaaccttcttgacaagccacataaatctaaagaaaacgttgtgtgacgtgatcctcatggtccaggaaagaaagatacctgctcatcgtgttgttcttgctgcagccagtcatttttttaacttaatgttcacaactaacatgcttgaatcaaagtcctttgaagtagaactcaaagatgcctgaacctgatattattgaacaactggtggaatttgcttatactgctagaatttccgtgaatagcaacaatgttcagtctttgctggatgcagcaaaccaatatcagattgaacctgtgaaggaaaatgtgtgtggatttttttgaaagaaccaagttggatgctttcaaattgtcttggagaagccagaaaaagttgatcagagcctttccagagtgtggtatgcttttcactgtgtgatgatccttagtggcacatgaatgaacgtccagatgtttgtgcagtagcccacccttatctgcaggatacgttccaagacccccagtgaatgcctgaaactgcagatagtactgaatcctatatatactgtgttttttatgatacatacatgcctatgatgaagtttaatttctaaattagacagtaaaagattaacaacaataataataaaatagaacaactttaacaataaaaaaaa

SEQ ID NO: 70260 - DNA, 810 bp, Homo sapiens; identical to SEQ ID NO: 68351

SEQ ID NO: 70261 - DNA, 431 bp, Homo sapiens
ccctgtaaagaaaactcgttccattggctctgcagtagaccaggggaatgaatccatagttgcaaaaactacagtgactgttcccaatgatggcgggcccatcgaagctgtgtccactattgagactgtgccatattggaccaggagccgaaggaaaacaggtccattgaatttgtgactaaactggcctgtgtaaaacaactagcaaaattttggagagttggtttcttagaaccctctggaggcggggattggatgtattgggtagtttcttactgctgcataccgaggaccagagaactgcttgtgtcatgctttacctttgaattgctagcccactggcataactttagtttttcttgaaactgtttttttacatagccattagttctcacttttggctatgataacagattactgtttatctccca

SEQ ID NO: 70262 - DNA, 359 bp, Homo sapiens; identical to SEQ ID NO: 67566

SEQ ID NO: 70263 - DNA, 348 bp, Homo sapiens
gccttcctcctaccctccagaagcaattccatcctcctctccttcagaaccacccttgaccaccagcgccccctgctgccaccttccctctccgctgagtcctcagccagggggacctgaacaagtctgcacgtcctgtccccactttgtccttgcctcccctactcctgcaccctccactgtcttgccttccgttccacgtaaccctcagcagagtccccactcacctcctgacagctttccttctaaactgtcttactataaaagaaagcatagatagaaaaaagcacataaaccaatataaagcttagtgggtttccataagacaaacacctttgaattccacgc

SEQ ID NO: 70264 - DNA, 365 bp, Homo sapiens; identical to SEQ ID NO: 67568

SEQ ID NO: 70265 - DNA, 380 bp, Homo sapiens; identical to SEQ ID NO: 67569
  misc_feature (1)...(380): n = a,t,c or g

SEQ ID NO: 70266 - DNA, 360 bp, Homo sapiens
ggctataagatcagcatacaaaagtatatactatcatggacacatgaaaattgagatttaaagtacagtagcacttatacttgttcaaaagaaatctaaatactgaactataaattgattaaacatgtacaggacttatgtactgaaaactactaactgctgataaaacaaacaaaagacaacctaaatacatggagatacataactgatataaagtttaatgcaattcctaccaaaaatccagcaagatttttttgcaattataaacatgagtattctaaaattttatggaaaggtaagggagctagaatagctaaaaccagtttaacaaaagaagaaaatagaggaaatcactctatc

SEQ ID NO: 70267 - DNA, 355 bp, Homo sapiens; identical to SEQ ID NO: 67571

SEQ ID NO: 70268 - DNA, 509 bp, Homo sapiens; identical to SEQ ID NO: 67572

SEQ ID NO: 70269 - DNA, 700 bp, Homo sapiens; identical to SEQ ID NO: 67573

SEQ ID NO: 70270 - DNA, 359 bp, Homo sapiens; identical to SEQ ID NO: 67574

SEQ ID NO: 70271 - DNA, 406 bp, Homo sapiens; identical to SEQ ID NO: 67575

SEQ ID NO: 70272 - DNA, 426 bp, Homo sapiens; identical to SEQ ID NO: 67576

SEQ ID NO: 70273 - DNA, 294 bp, Homo sapiens
cggccgcgtcgacatatcgtgcaccaccatgcaagaagtttcctcactaaacaagggtcctctatcattaatccctctttaataaaaacgcttctcaacgccgcttaacttccaaaggaagctagagtcattcactgcaaggggcatcaaaaggcatcagatcccattgctctaggcgacgcttacgctgattaggtggctagacaagcagctagcattccaacttctgtccctcacagccagtttttctccttcacgtcagtcactcccacatactcccccactgaaacttcc

SEQ ID NO: 70274 - DNA, 484 bp, Homo sapiens; identical to SEQ ID NO: 67578

SEQ ID NO: 70275 - DNA, 335 bp, Homo sapiens; identical to SEQ ID NO: 67579

SEQ ID NO: 70276 - DNA, 373 bp, Homo sapiens; identical to SEQ ID NO: 67580

SEQ ID NO: 70277 - DNA, 358 bp, Homo sapiens; identical to SEQ ID NO: 67581

SEQ ID NO: 70278 - DNA, 363 bp, Homo sapiens
cttcatcaaatgtttgatttagccatctctgagaaactaaacaattctaaacccaatcattaatgctcaaagaaaatgtaaggaaatgtgtaaatccatttaattacaaattatttttttaccttacagagtagtaaacatgacaagatgttttctctcagttccatgaagttttatcgtggagtgaaaaagaaaatgaagcctccaacaaggtaaagtttgaaagggaagtgctgaaaggaaaaacttatgggaaaaatatgtctatttaaggatttagggatcagtggcattagtctaactttttataaagtaagttttaggctattttttttaagttgcttcccctgtcacagggttctt

SEQ ID NO: 70279 - DNA, 376 bp, Homo sapiens
ctctgtaccatcctgggcttcccttcccttccctctcccatctcaatgcctcttactccttcctctcccgccatctgtctccaaaccttactcctgtctctacccacctcctgctaattaggcatctccttcctcacccttttgtctaccaactcctctgcctgtgactcctgagtctaacctctactctaccctggccccacccctgccctccagactcacatctccaccaccttgctgaaacttcccaccaggatgcccaccagtgcctacaacttgctgtctgtagctaaactaatctccacagttcaggtgctgccctgactttctcatttcttttgagggcaccaccaccattctcctactcacttgactc

SEQ ID NO: 70280 - DNA, 451 bp, Homo sapiens; identical to SEQ ID NO: 67584

SEQ ID NO: 70281 - DNA, 391 bp, Homo sapiens; identical to SEQ ID NO: 67585

SEQ ID NO: 70282 - DNA, 397 bp, Homo sapiens; identical to SEQ ID NO: 67586

SEQ ID NO: 70283 - DNA, 388 bp, Homo sapiens
agagaacatattcaggtatttgggactctcatcttactactgtgtttagcattttaagaacattagaactatttgttgaatggatttttttaatgtactttttttcaagcttaatgaaagtaaaattgttaaacaagctggagttgccacaaaagggcccaatgaatatattcaagaaatagaatttgaaaacttgtctccaggaagtgttattatattcaggtatgttaattgagctcaaactgttgactttacttatatttaaaatagtttgcatatcctgttaaatttgaataaattactcctaaaaattaaccactttttaattaacattttcagagttagtcttgatccacatgcacaagtcgctgttggaattcttcgaaat

SEQ ID NO: 70284 - DNA, 400 bp, Homo sapiens; identical to SEQ ID NO: 37835

SEQ ID NO: 70285 - DNA, 375 bp, Homo sapiens; identical to SEQ ID NO: 67589
  misc_feature (1)...(375): n = a,t,c or g

SEQ ID NO: 70286 - DNA, 369 bp, Homo sapiens; identical to SEQ ID NO: 67590

SEQ ID NO: 70287 - DNA, 322 bp, Homo sapiens
gggtttttcaatttttccagcccaaagttaaaaggttggaaaatcaattcctctttggtcctagagataaggaagaacatacttcgtttcttagatgcagaacgagatgtgtcagtggtcaagagcagttttccaagcaaagacgccagacactccagtgtgcaccggtagttcacccaactgcattggggaccgccctctcatactccagccaggccgtgacgtgaccgacctccgacttctgcgcaaaggcagcgcaagccgttgggatcccctgctccccctcgctcaacagtcgggccattacacctttcatactgcg

SEQ ID NO: 70288 - DNA, 314 bp, Homo sapiens; identical to SEQ ID NO: 67592

SEQ ID NO: 70289 - DNA, 310 bp, Homo sapiens
cgaaagcacgccagaaaacaaaataaaagcaatacataaccacaaaaataatagcgtatagatgatcaacaagaattaaaacgcgtaacatagtatagtcaaaaagaatacacgaaaaagaaactccataaaaaatgcaatatcatacaggcagatatcaagccagacaatatcctggataatgaatccataactattctaaagcttagcgattttgggtcggcttcacatgttgcggataatgacataacaccttcatcttctcagaccacatccgctgcatcatcgcccccgcggacgctacgccgcg

SEQ ID NO: 70290 - DNA, 122 bp, Homo sapiens; identical to SEQ ID NO: 67594

SEQ ID NO: 70291 - DNA, 316 bp, Homo sapiens
gatttggaattcgcgaccgcgtcgaccagccataaagagaaaattttaaaagcacccagagaaaaaaaggatatgttaaatatggaggaacaaaaataaagccaacaaatttctcatcacaaacaattcaagtgacaaaacagtggagcagtatctttaaaatactaaagaagaaaagccaatttataattctatacccagtgaaaatatcttcaaaacaaagatgaaatcctttttcaaagttagaaaaaaagaaagaatttatcaccaatagtcccctaccaaaagaaatgttaaaagaaattcttcagacaaa

SEQ ID NO: 70292 - DNA, 134 bp, Homo sapiens; identical to SEQ ID NO: 67596

SEQ ID NO: 70293 - DNA, 336 bp, Homo sapiens
  misc_feature (1)...(336): n = a,t,c or g
ntgctttaatcattgtcaaagtggactggtaaatgtatatcattatacagtctctgttgacgtctatgtctgaaacttatatgcaagagaaagtaggagatacttgatataatgactaaaaggtagtatcctatatcactctcgggttgtgctaatatgcgtcaggattaataaggaaattccacggggaacgccttctcgtcctgcgcctgtcatgcattctcctagccgaaagatgactgtaaaggaacatcaagattgtaagattcgtccttgtatttcgtaataaaaaaacgcaaagggttatacattaccattagcctaaggtttggcgtt

SEQ ID NO: 70294 - DNA, 314 bp, Homo sapiens; identical to SEQ ID NO: 67598

SEQ ID NO: 70295 - DNA, 358 bp, Homo sapiens; identical to SEQ ID NO: 67599

SEQ ID NO: 70296 - DNA, 1047 bp, Homo sapiens; identical to SEQ ID NO: 67600

SEQ ID NO: 70297 - DNA, 318 bp, Homo sapiens; identical to SEQ ID NO: 67601

SEQ ID NO: 70298 - DNA, 589 bp, Homo sapiens; identical to SEQ ID NO: 10675

SEQ ID NO: 70299 - DNA, 322 bp, Homo sapiens
cagaaccagggcctgttggtcccgggggttaaaagaaatctgcttaatatttctaccctttttctctatcacaaacagtattctttcatgaccttttttcttatttagagatcctccatagataatgaaaacctggtttcagagagagagagggtgcttttagaggagctggaagcactaaagcagctgtctttagctggaagagagaagctgtgttgtgagctgcgcaacagcagtacgcaaacacaggtagtatggactttgccccacctaggagcaatggatcaccaattcagtaggatttgtttgtctttgttgttgg

SEQ ID NO: 70300 - DNA, 337 bp, Homo sapiens; identical to SEQ ID NO: 67604

SEQ ID NO: 70301 - DNA, 723 bp, Homo sapiens; identical to SEQ ID NO: 67605

SEQ ID NO: 70302 - DNA, 300 bp, Homo sapiens
ttcacggtgacttggcggggcatcagagaattcatactggtgatagcccctatttatgtaaggaatgtgggaaggcaagtagtaatagctatgaacgtggtccacatcaagtcattcaaactggtgagattcgctatgaatgtaaggaatgtggtcagacctatagtagtcattaagatcttattccccatcacagaattcattctggtgagaaaccttatacgactaaagaatgtgggaatgcctttcgtcttcaagcagaacttactcgacatcacatagttcacacgggtgagaaac

SEQ ID NO: 70303 - DNA, 338 bp, Homo sapiens; identical to SEQ ID NO: 67607

SEQ ID NO: 70304 - DNA, 407 bp, Homo sapiens; identical to SEQ ID NO: 67608

SEQ ID NO: 70305 - DNA, 342 bp, Homo sapiens; identical to SEQ ID NO: 67609

SEQ ID NO: 70306 - DNA, 370 bp, Homo sapiens; identical to SEQ ID NO: 67610

SEQ ID NO: 70307 - DNA, 84 bp, Homo sapiens
aggttattggagccccccttaatttattttcccagggttaaactggggttggtttgccctggccaagggtggccaaaaaaaaaa

SEQ ID NO: 70308 - DNA, 420 bp, Homo sapiens
cgctccgcaggtttagcaccgactgtagctctgatcagcaggaccgattaaacggaactgcccctagcggttttaaccgctcctgaccagtcccgttgccgcaccccatcttggaagtatgccctggccagtaggagccacaaagcgcgattagcctcactgcatttcaggtacaggccggcgccagccgtgcctcaccaggtccaccggctccgagcagcagcaagcccggtcggaaagcgaaagtggcctcgccatgtccagaccggccagctcccccgcctacctgaccccgccccgcagccgcacctgggtccgagtcatcgccgcggccgccacggccccgcacaggaaggcggcagcaaagagcgcacgctcgacgcgctgcagccaggacagcgccatggcgcccctcgtgcc

SEQ ID NO: 70309 - DNA, 348 bp, Homo sapiens
ctcagggcttcctggtgccttgcacaaccccctctggcagcacccagcattccacctgcagcgatctcctttgcacatggccctcttccctggctatctcaaaatgcagatcagtggacatccatatggggaaaaaaagaaccttggtccatctcttatgctgtttatgaaaaataaactcagaacatatcatagacctaaatataaaatctaaaactacacaacttctaggagaaaatctttgcaactgtggattaggcaaagatttcttggataggacctaaaagggacaaaccattaaaaacatcaataaactagacttcatccacgtaaaaaacttctcgtgcc

SEQ ID NO: 70310 - DNA, 357 bp, Homo sapiens; identical to SEQ ID NO: 67613

SEQ ID NO: 70311 - DNA, 347 bp, Homo sapiens; identical to SEQ ID NO: 67614

SEQ ID NO: 70312 - DNA, 336 bp, Homo sapiens; identical to SEQ ID NO: 67615

SEQ ID NO: 70313 - DNA, 348 bp, Homo sapiens; identical to SEQ ID NO: 67616

SEQ ID NO: 70314 - DNA, 345 bp, Homo sapiens; identical to SEQ ID NO: 67617

SEQ ID NO: 70315 - DNA, 342 bp, Homo sapiens; identical to SEQ ID NO: 67618

SEQ ID NO: 70316 - DNA, 360 bp, Homo sapiens; identical to SEQ ID NO: 67619

SEQ ID NO: 70317 - DNA, 764 bp, Homo sapiens
ccacatactggagcatagatatacactttgggatgctcatcttttctaacacctcctcaagaatttggccaaacaagttaggagaatctgtaaatccttggggtaagactgtccagcagtattgttgttttcacccagagtgagaatcttcccattcaaaagtgaatatatcctgactatcttcagctaaaggacatgcccagaaggcatctttcaggtctatttctgtaaaccactgatggtcatatggaattttgctgagaatagtatatggattgggaacaacaggatgagtggtttgaacagtttgactaatggcttgaagatcttctacaagtcagtatcaccaatctgactactttacaagtaatattggagtagtatagggagacatgcacagttcaagtagcccatctcagataaggctctcaattagaggttttaaacctaatctaccttctaagggaattggatattggtttcttttcactgtttccctgggagtttttaactttatgtgaattggaggaacttgtagcttccttcaatttccctcccttgaccactcattagcattgatgtagctttcttctgctgtagtaaacaggtttaatgaagtgaagaatccttctgggcttacacgcaagcctatacctaactttgccattaggccacttcctaacaagtttgtcccagccttaggaagtagcaaaaatttaacattggttgatcgggtttcaaatctgacttctgttttttctgag

SEQ ID NO: 70318 - DNA, 363 bp, Homo sapiens; identical to SEQ ID NO: 67621

SEQ ID NO: 70319 - DNA, 324 bp, Homo sapiens
catatcatcatgaaatatcaagcaatatgacttgttaataaagatctatactcatattagatattatctattatagtagtgacataataatactaatatactctactttattgtatacgtcacgatgtgaattgatcatcatgtgctgcgttgtctgtaacagtacagaagagacatacgatatagatgcacaagagtaaagtcaggaagaaacagatgatggtgttgaagaaggtaatatttggtttacatttggttttcatgtaggaactctgtgcacaggctcgtttatggttttctttaaatgtcattaaatctcgtgcc

SEQ ID NO: 70320 - DNA, 318 bp, Homo sapiens; identical to SEQ ID NO: 67623

SEQ ID NO: 70321 - DNA, 333 bp, Homo sapiens
cttcgagtttttcgcggaggggcattatttctattagcaatcgcctgtccatttcataatctgtcctttcagaaatatgtataccatgaagctctagcttgcaaggtccagtcctctgctcaggagggtcagcagggtcttaaatgcaccattgcccagggcggtaagcctctgtaggcagcccagatatcctcggaagagctcccccaggagaaacaagcttgactactatcccatcatcaagtttctgctgaccactgagtctgccatgaagaagatagaagacaacaacatgcttgtgttcactgaggaagttaaagccaacctcgtgcc

SEQ ID NO: 70322 - DNA, 368 bp, Homo sapiens; identical to SEQ ID NO: 67626

SEQ ID NO: 70323 - DNA, 517 bp, Homo sapiens; identical to SEQ ID NO: 67627

SEQ ID NO: 70324 - DNA, 365 bp, Homo sapiens; identical to SEQ ID NO: 67628

SEQ ID NO: 70325 - DNA, 318 bp, Homo sapiens; identical to SEQ ID NO: 67629

SEQ ID NO: 70326 - DNA, 330 bp, Homo sapiens; identical to SEQ ID NO: 67630

SEQ ID NO: 70327 - DNA, 332 bp, Homo sapiens; identical to SEQ ID NO: 67631
  misc_feature (1)...(332): n = a,t,c or g

SEQ ID NO: 70328 - DNA, 313 bp, Homo sapiens; identical to SEQ ID NO: 67632
  misc_feature (1)...(313): n = a,t,c or g

SEQ ID NO: 70329 - DNA, 356 bp, Homo sapiens; identical to SEQ ID NO: 67633

SEQ ID NO: 70330 - DNA, 356 bp, Homo sapiens; identical to SEQ ID NO: 67634

SEQ ID NO: 70331 - DNA, 366 bp, Homo sapiens; identical to SEQ ID NO: 67635

SEQ ID NO: 70332 - DNA, 355 bp, Homo sapiens; identical to SEQ ID NO: 67636

SEQ ID NO: 70333 - DNA, 361 bp, Homo sapiens; identical to SEQ ID NO: 67637

SEQ ID NO: 70334 - DNA, 375 bp, Homo sapiens; identical to SEQ ID NO: 67638

SEQ ID NO: 70335 - DNA, 360 bp, Homo sapiens; identical to SEQ ID NO: 67639

SEQ ID NO: 70336 - DNA, 362 bp, Homo sapiens; identical to SEQ ID NO: 67640

SEQ ID NO: 70337 - DNA, 371 bp, Homo sapiens; identical to SEQ ID NO: 67641

SEQ ID NO: 70338 - DNA, 438 bp, Homo sapiens; identical to SEQ ID NO: 67642
  misc_feature (1)...(438): n = a,t,c or g

SEQ ID NO: 70339 - DNA, 373 bp, Homo sapiens; identical to SEQ ID NO: 67643
  misc_feature (1)...(373): n = a,t,c or g

SEQ ID NO: 70340 - DNA, 354 bp, Homo sapiens
cccaaagtcagagttggtggagacagaaaggggtgtcgagagctggggctggccctatccacccgcaaggtcttttgttcggtttctcctagggtgaccttggacccctgggcactcctggggagcagggcctcattgggcaacggggagagccaggccttgagggtgacagtggccccatgggacctgatgggctgaagggggtcaggggagacccagggcctgatggagaacatggcgagaaaggccaggaagggctgatgggtgaggacgggccccccggcccccctggcgccgcaggtgtccggggtcttcacggaaaatcagggtattgaaggctctctctcgtgccgt

SEQ ID NO: 70341 - DNA, 361 bp, Homo sapiens; identical to SEQ ID NO: 67645

SEQ ID NO: 70342 - DNA, 342 bp, Homo sapiens
ccagtgactgtgagtagcagagtgattaactcgacaagccatcaatcccggagaatggcagactgtcagtatcagccattccagaggaatgccttaagaagctggactcagagcagcagaccaacaccctgctcatcctggtgtgaaaggactctgcgagcgagcaggtcttcaccatcatggcctccgtctgccacacgctgatggttcagcaccgcatgatggtacccaaagtcaggcttctctacagtttagcctttaataccaggtttctgagacatccttggtttctaatatgtgccatgtcaacacgaatgatctcagggtacatggtctcgtgcc

SEQ ID NO: 70343 - DNA, 340 bp, Homo sapiens; identical to SEQ ID NO: 67647

SEQ ID NO: 70344 - DNA, 342 bp, Homo sapiens; identical to SEQ ID NO: 67648

SEQ ID NO: 70345 - DNA, 355 bp, Homo sapiens; identical to SEQ ID NO: 67649
  misc_feature (1)...(355): n = a,t,c or g

SEQ ID NO: 70346 - DNA, 406 bp, Homo sapiens; identical to SEQ ID NO: 67650
  misc_feature (1)...(406): n = a,t,c or g

SEQ ID NO: 70347 - DNA, 318 bp, Homo sapiens
  misc_feature (1)...(318): n = a,t,c or g
ngcattaaacatgaaaatgtatttcacatttggttttgtgttgttgctgttctggtttagtttttgtttgggtattctgtatgtttgtattttgcttaagcatgaagaaagcgtgtaatattacaaccctggtaatattaatagtaagtaaggttacttagttgtttaaccagccatgcatgtattgaatttatttaattttagtgcaaactggctcacttttctccttttccctcccctagaaacggcttttggattcagagtttattgatcctttaatgaataaaaaagcccgaatctctcacctgacgaacagag

SEQ ID NO: 70348 - DNA, 1333 bp, Homo sapiens; identical to SEQ ID NO: 67652

SEQ ID NO: 70349 - DNA, 325 bp, Homo sapiens; identical to SEQ ID NO: 67653

SEQ ID NO: 70350 - DNA, 340 bp, Homo sapiens; identical to SEQ ID NO: 67654

SEQ ID NO: 70351 - DNA, 311 bp, Homo sapiens; identical to SEQ ID NO: 67655

SEQ ID NO: 70352 - DNA, 681 bp, Homo sapiens; identical to SEQ ID NO: 67656

SEQ ID NO: 70353 - DNA, 332 bp, Homo sapiens
gggaggaatataatgcattacccaaatggtcatgccatatgtattgcaaatggacattgtatcatcttgtgaaatagtcataacattaaagtttgggtatagtagttagcatattttcatggccagtattgatgctattttttcccttacctatcagactctttcaaagagaaaagagggagcagttggaattttatgtttgttgttctattttgtctattatgaattgtgacaaaaccattataaaagatgacaagtgtgtgtgtttctttttttctttttaaactgtagggaacatagtcattagtgatctcaaataccgaaagacattt

SEQ ID NO: 70354 - DNA, 394 bp, Homo sapiens
cttcatttaccattcggactatattctccatcagcgaattcacaccggggagaagccccacaggtgctgtgactgcgggaaggcgttcagcaacagctcatatttcattcagcaccacatcatccaaacaggcgagaagccctatgcctgccgtgcatgtggcaagaccttcactcagagctcttcgcttacctagcatcagaggattcacaccggagagaagccctacaaatgcaaggactgcgggaaggccttcacacagagctcatccctcatcaaacaccagcggtgccacaccggggagaagccctataaatgcggccagtgtgggaagttcttctcgcaggtctcccacctcacccgccaccagaaaatccacacgggggctcgtgcc

SEQ ID NO: 70355 - DNA, 395 bp, Homo sapiens; identical to SEQ ID NO: 67659

SEQ ID NO: 70356 - DNA, 382 bp, Homo sapiens; identical to SEQ ID NO: 67660

SEQ ID NO: 70357 - DNA, 717 bp, Homo sapiens; identical to SEQ ID NO: 67661

SEQ ID NO: 70358 - DNA, 1849 bp, Homo sapiens
tgaagaactgctgtgtttagatgtctctgaaaacaggttggaaagacttcctgaagaaatcagtggcctgacttcattaacggatttagtcatttcccagaacttattagaaacgattccggatggcattggaaaactaaagaaactgtcaatcttgaaggtggatcagaatagactcacacagttgcctgaagcagttggggaatgtgaaagtctcactgagttagttcttacagaaaatcagctcctgaccctgccttaaagcattggaaaactaaagaagttgagcaacttgaatgcagacagaaataaattagtgtccttaccaaaagagatcggcgggtgctgcagcctcactgtgttctgtgtacgtgacaacagactaactcggatacctgcagaggtgtcacaggcaacagaacttcatgtcctggatgtggcagggaacaggttgctgcatctacctttatccctgactgccttgaagttgaaggctctgtggctatctgacaaccagtcccagcccctgcttacattccagacagacacagactacaccacaggagagaagattttaacctgtgtcttacttcctcagctgccttctgaacctacttgtcaagagaatctgcctcgctgtggtgcactggagaacttggtaaatgatgtctctgatgaagcctggaacgagcgtgctgtcaacagagtcagtgcgatccgatttgtggaggatgagaaagatgaagaagacaatgagacgagaacacttctaaggcgagccactccacacccaggggagttaaagcacatgaaaaagacagtggagaatttacggaatgacatgaatgctgctaaaggactggactcaaacaaaaacgaggtcaatcatgccattgaccgagtgaccacttctgtgtaggagtttcacctccaagttttacctcctgtgtcttcctctgctgtcgagacgttcctgtctgcttcccgggagcctcacgtgctccttgtcctaaccagcccccgcgcgccatcttcccgtggagtgtggggaagctgctgtctcccaggaagtgccttactcatcccgcaaccagtcagcgcaccagtggtctcccggtgtgattttttttttttttaatttcagttgtttgtaataagtagaatacactactgtaaacatacgacctttgtttttgtcttatgttggggtaaaggaaagcaggaaggggaatttttatcctcctcccttccgtaaagtgctgggatattttgaatcccccaagttcccttggacctactgatgagagatagttttatgtatggggaaaaatggatactttttaaaccttttttggcagctcagatggtgtaaattttaaaattttgtataggtatttcataacaaaaatatgtatttcttttttgttattttatcttgaaaacggtacatattttagtatttgtgcagaaaaacaagtcctaaagtatttgtttttatttgtaccatccacttgtgccttactgtatcctgtgtcatgtccaatcagttgtaaacaatggcatctttgaacagtgtgatgagaataggaatgtggtgttttaaagcagtgttgcattttaatcagtaatctacctggtggatttgtttttaaccaaaaagatgaattatcaatgatttgtaattatatcggttgattttttttgaaaagatgaaccaaaggatttgactgctaatattttattccttacactttttttctgaataagtctctcataatgagtgcagtgtcagactgtgcctactctgatggtatgtgccatttgtaaaataaaatagagcagaaaaacc

SEQ ID NO: 70359 - DNA, 784 bp, Homo sapiens
gcctctggctttttcggacaaatatggtcttggaaccaggcttcagcgaccacgagctggtgcatccatcagtacccttgccggactttcccttaaagaaggagaggatcagaaagagataaagattgagccagctcaggctgtggatgaagtggaacctctacctgaagactattatacaagaccagtaaatttaacagaggtaacaacccttcagcagcgtctgttacagcctgacttccagccagtctgtgcttcacagctctatcctcgccacaaacatcttctgatcaaacggtccctgcgctgccgtaaatgtgaacataatttgagcaagccagaatttaacccaacgtcaatcaaattcaaaatccagctggtcgctgtcaattatattccagaagtgagaatcatgtcaattcccaaccttcgctacatgaaggagagccaggtcctcctgactcttacaaatccagttgagaacctcacccatgtgactctcttggagtgtgaggagggggaccctgatgatatcaacagcactgctaaggtggtggtgcctcccaaagagctcgttttagctggcaaggatgcagcagcagagtacgatgagttggcagaacctcaagactttcaggacgatcctgacattatagccttcagaaaggccaacaaagtgggtattttcatcaaagttacaccacagcgtgaggagggtgaagtgaccgtttgcttcaagatgaagcatgatttttaaaaacctgggcagcccccatttcgcccc

SEQ ID NO: 70360 - DNA, 535 bp, Homo sapiens; identical to SEQ ID NO: 67664

SEQ ID NO: 70361 - DNA, 2262 bp, Homo sapiens; identical to SEQ ID NO: 67665
  misc_feature (1)...(2262): n = a,t,c or g

SEQ ID NO: 70362 - DNA, 435 bp, Homo sapiens
ccccacagtgaatgtcacactcaatggtgaaagactgaaagctttgcctccaagatcaggaagacgaggatgctcacttttgccacttctgttcaacataatattggaagttttagctaaagcaatcaggcaagaaaaaagcatccaaaatgaaaaggaaaaagtataattatctctgctgacagatcacatgatctcatgtaaaaccctacagttaaaaagttaactacctgaaagctataaaatgttgctgaaagaaattttaaaagacataaagacatcctgtattcatggataggaagactcactattgatgtcagttttattctatattgatgtcaacttcatctatagattcagtgcaatctcaaaccagtaaattattttgtggatggtgacaaaattactctaaagtttattatggaatctcgtgcc

SEQ ID NO: 70363 - DNA, 832 bp, Homo sapiens; identical to SEQ ID NO: 67668

SEQ ID NO: 70364 - DNA, 432 bp, Homo sapiens; identical to SEQ ID NO: 67669

SEQ ID NO: 70365 - DNA, 919 bp, Homo sapiens; identical to SEQ ID NO: 67670

SEQ ID NO: 70366 - DNA, 418 bp, Homo sapiens; identical to SEQ ID NO: 67671

SEQ ID NO: 70367 - DNA, 1132 bp, Homo sapiens; identical to SEQ ID NO: 67672

SEQ ID NO: 70368 - DNA, 340 bp, Homo sapiens
taggacctccttggattttggaggcaacatattcctcatatggctttgttactctggcctatttatgaagcgacctgagaagctgctagttttgagtggggtccagaataagaaaatgctctgcaacagctccaggctgctctgcaagctgctctgccacttggggcatatgatccagcagatccaatgacagtggtgcttgaaatgacagtggcatttagggatgttgtttggagctcttggcaggctcccataggtgaaccacagctcaggcccttaggattttagagcaaagacttgccatctcctgcagataaccactctcctattgagaacagct

SEQ ID NO: 70369 - DNA, 230 bp, Homo sapiens; identical to SEQ ID NO: 67674

SEQ ID NO: 70370 - DNA, 2058 bp, Homo sapiens; identical to SEQ ID NO: 67675

SEQ ID NO: 70371 - DNA, 411 bp, Homo sapiens; identical to SEQ ID NO: 67676

SEQ ID NO: 70372 - DNA, 1137 bp, Homo sapiens; identical to SEQ ID NO: 67677

SEQ ID NO: 70373 - DNA, 705 bp, Homo sapiens; identical to SEQ ID NO: 67678

SEQ ID NO: 70374 - DNA, 796 bp, Homo sapiens; identical to SEQ ID NO: 67679

SEQ ID NO: 70375 - DNA, 544 bp, Homo sapiens; identical to SEQ ID NO: 67680

SEQ ID NO: 70376 - DNA, 783 bp, Homo sapiens; identical to SEQ ID NO: 67681
  misc_feature (1)...(783): n = a,t,c or g

SEQ ID NO: 70377 - DNA, 459 bp, Homo sapiens
ttttttttttaacattctgaagatggtgtctgtgtcaagaaggaccttttttttcccctctcccctattttttaagtaccttggaggaggagaggttggtgacatgcatggtggggatctatggcctctggtgctttgtcctgtatttggtttaatgtttttgtcctaatcttcaatcaataaaattgtgcgtatttaactaaaaaaaaaaaaaaaaaaaaaaaaaaaaaaaaaaaaaaaaaaaaaaaaaatgggcccctttaaattaaaagggcccctaaaaaccccgtaaaaccccccgagggggcttttttatgccccccctttttttttttcccccccccccggttttttttttgcctgggggggggcccccccccctttttttttttaaaaaaaaaaaaaaaatccccccctttttttgaagggggggttttttttttggggaagcccccaaaa

SEQ ID NO: 70378 - DNA, 411 bp, Homo sapiens; identical to SEQ ID NO: 67683

SEQ ID NO: 70379 - DNA, 1116 bp, Homo sapiens; identical to SEQ ID NO: 67684

SEQ ID NO: 70380 - DNA, 464 bp, Homo sapiens; identical to SEQ ID NO: 67685

SEQ ID NO: 70381 - DNA, 444 bp, Homo sapiens
cgggggacttgggcttgcccgcctccccagccccatcctcatcctcgttttctgactcctctaagatgggcatgagcccctcctggggaggctcctcagcctcctggcctccaacctggacaaggccctctggctcccagctgggacctcctggggccatgtcgactgcactgcccatcctggctgggaggcccccaggggcgtcgggggaccttccctgacctaggccttcaaggcctgcaggggcattttcatcttccccagtggcaggggcaaccctggcggcctctttggtggtggaagcagcctcatcagcattttttgctccgggatcagcctcgctggcgtccccctgggccggggaggcctgggcagcagctgggtcttcactctccactggggccgctgcccaggccacaccctgctggctccataataaggagg

SEQ ID NO: 70382 - DNA, 495 bp, Homo sapiens
  misc_feature (1)...(495): n = a,t,c or g
gagcggccgcccttttttttttttttttttttttttcattttaaacaagaagtttatttaaacaaccaagacgctttgacttgaagggagwagtgwtctaggattcttttttgttttagngagtaatttaatccctacttaaagacgagattgccctacatnggtaacagctaccgtaccaaaaaagttataaaaantttggccccnggggttttaacaatgataaattgaaaaacattaaaattcatccaattgaacaagggtatgccaaggaatttttatgttgttgttgttgttttgttgtggttgttaaaacagtgagagccaaaataactttactggaatataaagggtaagagctggaatgagcatgccacctaatgggagaaaggggggtattttccacagaatcagtaatttttcccccatcccgggtctcccacttggatggtcaatccaaacctacccattgggcnggtttagttaaaaaaaaaa

SEQ ID NO: 70383 - DNA, 436 bp, Homo sapiens; identical to SEQ ID NO: 67687

SEQ ID NO: 70384 - DNA, 780 bp, Homo sapiens
  misc_feature (1)...(780): n = a,t,c or g
ccatgcataggattaaactgaatgatcgaatgacatttcccgaggaactagatatgagtacttttattgatgttgaagatgagaaatctcctcagactgaaagttgcactgacagtggagcagaaaatgaaggtagttgtcacagtgatcagatgagcaacgatttctccaatgatgatggtgttgatgaaggaatctgtcttgaaaccaatagtggaactgaaaagatctcaaaatctggacttgaaaagaattccttgatctatgaacttttctctgttatggttcattctgggagcgctgctggtggtcattattatgcatgtataaagtcattcagtgatgagcagtggtacagcttcaatgatcaacatgtcagcaggataacacaagaggacattaagaaaacacatggtggatcttcaggaagcagaggatattattctagtgctttcgcaagttccacaaatgcatatatgctgatctatagactgaaggatccagccagaaatgcaaaatttctagaagtggatgaatacccagaacatattaaaaacttggtgcagaaagagagagagttggaagaacaagaaaagagacaacgagaaattgagcgcaatacatgcaagataaaattattctgtttgcatcctacaaaacaagtaatgatggaaaantaaattgaggttcataaggataagacattaaaggaagcagtagaaatggcttataagatgatggatttagaagaggtaatacccctggattgctgtcgccttg

SEQ ID NO: 70385 - DNA, 867 bp, Homo sapiens; identical to SEQ ID NO: 67689

SEQ ID NO: 70386 - DNA, 510 bp, Homo sapiens; identical to SEQ ID NO: 67690

SEQ ID NO: 70387 - DNA, 368 bp, Homo sapiens; identical to SEQ ID NO: 67691
  misc_feature (1)...(368): n = a,t,c or g

SEQ ID NO: 70388 - DNA, 732 bp, Homo sapiens; identical to SEQ ID NO: 67692

SEQ ID NO: 70389 - DNA, 394 bp, Homo sapiens; identical to SEQ ID NO: 67693

SEQ ID NO: 70390 - DNA, 690 bp, Homo sapiens; identical to SEQ ID NO: 67694

SEQ ID NO: 70391 - DNA, 766 bp, Homo sapiens; identical to SEQ ID NO: 67695

SEQ ID NO: 70392 - DNA, 672 bp, Homo sapiens; identical to SEQ ID NO: 67696

SEQ ID NO: 70393 - DNA, 948 bp, Homo sapiens
cgagtggcgaggttcatcatggaggcagacggagtctcgctctgttggccaggctggagtgcaggggcgtgatctcggctcactgcaacctccgtctcccggactaaagcaattatccttcctcacgcttccgagtagctggaattacaggtgtcaagctagggatgcggtccattcccattgccactgcttgcaccatttaccataagttcttttgcgagaccaacctggacgcctatgacccttacctgattgccatgtcttcaatttacttggccggcaaagtggaagagcagcacctgcggactcgtgacatcatcaatgtgtccaacaggtactttaacccaagcggtgagcccctggaattggactcccgcttctgggaactccgggacagcatcgtgcagtgtgagcttctcatgctgagagttctgcgcttccaggtctccttccagcatccacacaagtacctgctccactacctggtttccctccagaactggctgaaccgccacagctggcagcggacccctgttgccgtcaccgcctgggccctgctgcgggacagctaccatggggcgctgtgcctccgcttccaggcccagcacatcgccgtggcggtgctctacctggccctgcaggtctacggagttgaggtgcccgccgaggtcgaggctgagaagccgttgggtggcagatttatgccatggacacagagatcccctaaggtcctggcccaggcctgcccaaagagaagccacatctgcgtttgtcctttgagaggactttgactacaatacaggcatgacatcaatgaaaggaaagtcatgaaatcgatgagactgaatccctacggatttcttaaaagccagatttgtagggagaatgaatgtgcaacgtggctgaaatctattttgtgtaataaaaggtgatacaagtcaaaaaaaa

SEQ ID NO: 70394 - DNA, 1829 bp, Homo sapiens; identical to SEQ ID NO: 67698
  misc_feature (1)...(1829): n = a,t,c or g

SEQ ID NO: 70395 - DNA, 743 bp, Homo sapiens; identical to SEQ ID NO: 67699

SEQ ID NO: 70396 - DNA, 1857 bp, Homo sapiens
  misc_feature (1)...(1857): n = a,t,c or g
ttttttttttgactgttaaaaactgtatttgacttttaattttgaaagcaaattaaatacagttaaattaaaacagaccagatgcagctgcctgggtgccaccctcaccccagcctctgttcttagaactcctagcccctggcctcactcctgtgtggtggggcttgccagcgagggagcagggaacagactgggtttggaaaacagtggtcatcatggacccatttctgatttataacaaactcattcccaataaagatgaaggctgcagtcccccagggttataattataaataaatatacatgcagctaaaagaggatattaggtgaaaacaactgacctagcatctgcccaaagaagtccccattttgttgttcattatcaaagtcctgaaaatgaaccctaggtttttggctaagaaggtggcctcagaccagccaagctgaccttggcacttggctggcttctgtgaggcagtagagtgcccacacataagctcaccacctgtgcccacctcctcccttctctcccatgccaccccacttgcttccaagggcttggtttccaaagtgacatccagggtgtaagaggttggggaaaacgtcctgcaaggtggctcagggatctgattccatcagatggtctcatgaatactgtgggagattaaatccatctcaaaataggcaaccaatgctatattctgaatgttaggtctctggactgagtcccacccacccacccactcaggagtgggttctgaatggccctcagacctctcctggtgagtcttaatggggtgggaggctgttagttaaaaaataaacacctcttcagtaggctggggccctttccttttcctccacttggggggaaaattgtgcttccaacttgcaggagaatgagccggatcaccactagagagcccggccgggccagggggtcagagccctttccagcgggccccagaggcctggggagggcaggagtttgaggcacactgttctttctccaggatggaaagtggacagctggacatgaggtgggctagctctgcatgctcctgacttagggagaaataacattttctttcccttttttgtgtttagaataatttccaaagcagtgtgctcaggcctccctcctgctcagtgtcccagcagcccctgccccctctttcccagcccctctgctactccagagtccctcctcctcagaccaggggcaggagggagttagggaatggccttggcctccctcctctttccaggctgcaggaggtcccaccttgcccaccacccaccgccttgcccaccacccaccgccttgcccactgcccaccatgggctcactccaccctgaggtctgtggctctgaagagctgcaggaaaaggcgctttccctccccagtccagtccaggcgaggggcctagcagccgaggtgggcggtggggaggcagtgtgtggacagtggggccgtggggtttttagtccaggtcaggcagtgacctgtgctggctctagagcctacccctttgcccctgctggaggagaaggggtaaaggaagaggggccggagggggggactctgctcccgccacagcctgaggtacagggggtgcctattaggcccaggctccccccatgcagggctgggtgccctgttgggatccaagacagccttatgcctctgtaaacgtgaaccagaggagagcccacagaggtatgtctgaatttgggggcagcctctcgggaagaagcaggggccccaggcagaggaagcagaagcgnctcgtgaatgcccgtgggtctgctctctggcttcagaattcccctggctgggtgtcctgtgtggtcgt

SEQ ID NO: 70397 - DNA, 516 bp, Homo sapiens; identical to SEQ ID NO: 67701

SEQ ID NO: 70398 - DNA, 498 bp, Homo sapiens; identical to SEQ ID NO: 67702
  misc_feature (1)...(498): n = a,t,c or g

SEQ ID NO: 70399 - DNA, 429 bp, Homo sapiens; identical to SEQ ID NO: 67703

SEQ ID NO: 70400 - DNA, 363 bp, Homo sapiens; identical to SEQ ID NO: 67704

SEQ ID NO: 70401 - DNA, 741 bp, Homo sapiens; identical to SEQ ID NO: 67705

SEQ ID NO: 70402 - DNA, 832 bp, Homo sapiens; identical to SEQ ID NO: 67706
  misc_feature (1)...(832): n = a,t,c or g

SEQ ID NO: 70403 - DNA, 372 bp, Homo sapiens; identical to SEQ ID NO: 67707

SEQ ID NO: 70404 - DNA, 386 bp, Homo sapiens
actctgaaaaaaatcatttaagtgctctgaacctttttttccctcaatattccgtgtaaaatgagaggagctaacttcgcatagtcaggtgaggattaggctggttggtatacatgcatcttagccctgggtctttttaattacagttaatgcacaagctgagtgtggaagccccacccaaaatcctggtggagagatacctgattggaattgcaaagaattgcaacgtaccctatgaccctgactctgtggtcatggtaagtttatcccagaatccaaagaaaaatgagtttgtaggtaggaccttctttggaaaacaaaaaaaacatattctttgcactaacttaaatctgtgtgagtttaagcctttgaccagttctcgtgcc

SEQ ID NO: 70405 - DNA, 363 bp, Homo sapiens; identical to SEQ ID NO: 67709

SEQ ID NO: 70406 - DNA, 1435 bp, Homo sapiens; identical to SEQ ID NO: 67710

SEQ ID NO: 70407 - DNA, 549 bp, Homo sapiens; identical to SEQ ID NO: 67711
  misc_feature (1)...(549): n = a,t,c or g

SEQ ID NO: 70408 - DNA, 399 bp, Homo sapiens; identical to SEQ ID NO: 67712

SEQ ID NO: 70409 - DNA, 1057 bp, Homo sapiens
gagaagaagaacaggaatgcagaccagccattaaaacatcagatatcgacaatcctagccactttgaaaagcaatatgaatctagttcttctagcactcacagtgataggagcagtgacggtgagcaagactttgtttcctccattctaccaggaaacagaccaaattcaacaaatattaaaccacagctgcaccaaaaaagcataatgaaaaagaaagctggtcacaaagctaactccaaacactaagactaagaacagacagtagtagatgtcactgagcagttaggcgattgcaaattagatagtcaggagaaagatgctacatgtgaacttcctttacagaaagtaaatactcagagttcttcaaatagcactttgcctggaagattaaaagcgtcagaaaattctgaaagtgaatacagtaggtcagaaataactctagtaggcataagtaagaaaagtgcagagcattttaagagaaaatttgccaaatcaaaccaagtgtctaggtcagtgtctagttcagtgcaggtgtgtcctgaagttggaaagagaaacttacttaaagttttgaaggagactttgattgagtggaagacagaagaaacattgaggtttttgtatggccagaattatgcttctgtgtgtctgaaacccgaagcctctctggttaaagaagaacttgatgaagatgacataatctcagatccagatagtcatttccctgcctggagggaatctcagaacagcttggatgagtctttaccttttaggggctcaggtacagccattaaaccactgccaagttacgagaatttgaaaaaagaaactgaaaagttaaatctgaggatcagggagttttacagaggacggtatgttttgggtgaagaaaccaccaaatcacaagactcagaagagcatgattccacctttccactgatagactcaagttcccagaaccagattagaaaacgcatcgtacttgaaaagttgagtaaagtgttgcctgggcttctggttcctcttcagattacattgggagatatttacacaca

SEQ ID NO: 70410 - DNA, 1127 bp, Homo sapiens; identical to SEQ ID NO: 67713
  misc_feature (1)...(1127): n = a,t,c or g

SEQ ID NO: 70411 - DNA, 541 bp, Homo sapiens; identical to SEQ ID NO: 67714

SEQ ID NO: 70412 - DNA, 1073 bp, Homo sapiens
actcgtacagagtcggcgaattctctctgaagatcttcctatccttttctgggggaatggggtcgatgagagcaacctcctatggttgttgtgagaattaaatgagataaaagaggcctcaggcaggatctggcatagaggaggtgatcagcaaatgtttgttgaaaaggtttgacaggtcagtcccttcccacccctcttgcttgtcttacttgtcttatttattctccaacagcactccaggcagcccttgtccacgggctctccttgcatcagccaagcttcttgaaaggcctgtctacacttgctgtcttccttcctcacctccaatttcctcttcaacccactgcttcctgactcgctctactccgtggaagcacgctcacaaagggctaatctcgggccttgtcgaaggaagaggctgcagacgttaatgaggttagctgctggattccagtattcgtcgcataaggatccttctttgtctgcgaaggaaaaacacactgattatcataatgaggcacgtgggccgtggcccggctgggtcggctgaagaactgcggatggaagctgcggaagaggccctgatggggcccaccatcccggacccaagtcttcttcctggcgggcctctcgtctccttcctggtttgggcggaagccatcacctggatgcctacgtgggaagggacctcgaatgtgggaccccagcccctctccagctcgaaatccctccacagccacggggacaccctgcacctattcccacgggacaggctggacccagagactctggacccggggcctccccttgagtagagacccgccctctgactgatggacgccgctgacctggggtcagacccgtgggctggacccctgcccaccccgcaggaaccctgaggcctaggggagctgttgagccttcagtgtctgcatgtgggaagtgggctccttcacctacctcacagggctgttgtgaggggcgctgtgatgcggttccaaagcacagggcttggcgcaccccactgtgctctcaataaatgtgtttcctgtcttaacaaaaaaaaaaaa

SEQ ID NO: 70413 - DNA, 459 bp, Homo sapiens; identical to SEQ ID NO: 67716

SEQ ID NO: 70414 - DNA, 817 bp, Homo sapiens; identical to SEQ ID NO: 67717

SEQ ID NO: 70415 - DNA, 729 bp, Homo sapiens; identical to SEQ ID NO: 67718

SEQ ID NO: 70416 - DNA, 469 bp, Homo sapiens; identical to SEQ ID NO: 67719
  misc_feature (1)...(469): n = a,t,c or g

SEQ ID NO: 70417 - DNA, 395 bp, Homo sapiens; identical to SEQ ID NO: 67720

SEQ ID NO: 70418 - DNA, 684 bp, Homo sapiens
acggtaatagtccattttacaaaaggctaaggctaaaatactagaatttgcaacccctaccactaaaaaggaggcccagaaatttattggcttgtttggattgtggagacatcatatgccccacatgggtaacattttacaacctctgcgtgcagtcactagaaaacgctatgactttcactggggacagaaagagagcgtggcttttcaacaagctgaacaagcggtgcaactgaccccagatctatggcccatacgaaacaggccagtagaactgcaagtagctgtcctagatcaacatgctaattggagtcttaggcagaaacaaggtgggaagagggtacctttggggttttggacccagaaactgccataggctggcaaagcttataccccttccaagaagcaattgttagctttttattgggttttgctggaaacagaggacctctgcttcaaccatgaggtctttatgaggcctgaaattcctattatgacgtgggtcatgagtttccccaatactcaccagatagggcacactcaagaaagcagcattataaaatggaaatggtatacacaagatagggctaagccaggaccaaaggggctactgcttttgcataaggatgtacaaaacttgacagtacagagaaccactgagctagcccttcagttaggcaaggg

SEQ ID NO: 70419 - DNA, 1683 bp, Homo sapiens; identical to SEQ ID NO: 67722
  misc_feature (1)...(1683): n = a,t,c or g

SEQ ID NO: 70420 - DNA, 610 bp, Homo sapiens; identical to SEQ ID NO: 67723

SEQ ID NO: 70421 - DNA, 767 bp, Homo sapiens; identical to SEQ ID NO: 67724
  misc_feature (1)...(767): n = a,t,c or g

SEQ ID NO: 70422 - DNA, 1222 bp, Homo sapiens
tcatttcagcgacgtggaattcgatggaatgtccatacccttcaccctcatccaagagcagtgtgggctgggatagggaggggacatgggtcataggctcttctaggtagagccagggccccggcgttgtgctttcccacccttctagagtttctggagtccctggagccggacctgcccgccctgagagccatggggctccacctgtgggctgcaggcccaggaacccaccctgctggaattagcgatttgctggctgaagtgtccgctgaagtggatgggccagtgccaggatacctctcttccccccagagcataacagacacgtgcctgtacatcttcacctctggcaccacgggcctccccaaggctgctcggatcagtcatctgaagatcctgcaatgccagggcttctatcagctgtgtggtgtccaccaggaagatgtgatctacctcgccctcccactctaccacatgtccggttccctgctgggcatcgtgggctgcatgggcattggggccacagtggtgctgaaatccaagttctcggctggtcagttctgggaagattgccagcagcacagggtgacggtgttccagtacattggggagctgtgccgataccttgtcaaccagcccccgagcaaggcagaacgtggccataaggtccggctggcagtgggcagcgggctgcgcccagatacctgggagcgttttgtgcggcgcttcgggcccctgcaggtgctggagacatatggactgacagagggcaacgtggccaccatcaactacacaggacagcggggcgctgtggggcgtgcttcctggctttacaagcatatcttccccttctccttgattcgctatgatgtcaccacaggagagccaattcgggacccccaggggcactgtatggccacatctccaggtgagccagggctgctggtggccccggtaagccagcagtccccattcctgggatatgctggcgggccagagctggcccaggggaagttgctaaaggatgtcttccggcctggggatgttttcttcaacactagggacctgttggtctgcgatgaccaaggttttctccgcttccatgatcgtactggagaccccttcaggtggaagggggagaatgtggccacaaccgaggtggcagaggtcttcgaggccctagattttcttcaggaggtgaacgtctatggagtcactgtgc

SEQ ID NO: 70423 - DNA, 466 bp, Homo sapiens; identical to SEQ ID NO: 67726

SEQ ID NO: 70424 - DNA, 1385 bp, Homo sapiens
tctttcagcaaggtgggggcaagcagaatgcctcccaggatttcacacctgagccctgccccaccctgctgagaaaacactccgccacgtgaagagacagaggaggatggcaggagttacctcgggaaacaaacaggatcttctctgccctgctccagtcgagttggcctgacccgcttggatcagtgaccatttgctggcagacaggggagagcagcttccagcctgggtcagaaggggtgggcgagcccctcggcccctcaccctccaggctgctgtgagagtgtcaagtgtgtaagggcccaaactcaggttcagtgcagaaccaggtcagcaggtatgcccgcccgtacgttaagggggccctctaaaccccttgcctggcctcacctggccagctcaccccttttgggtgtaggggaaaagaatgcctgaccctgggaaggctccctggtagaatacaccacacttttcaggttgttgcaacacaggtcctgagttgacctctggttcagccaaggaccaaagaaggtgtgtaagtgaagtggttctcagtccccagacatgtgcccctttgctgctggctaccactcttccccagagcagcaggccccgagccccttcaggcccagcactgccccagactcgctggcactcagttccctcatctgtaaaggtgaagggtgatgcaggatatgcctgacaggaacagtctgtggatggacatgatcagtgctaaggaaagcagcagagagagacgctccggcgccccagccccactatcagtgtccagcgtgctggttccccagagcacagctcagcatcacactgacactcaccctgccctgcccctggccagagggtactgccgacggcactttgcactctgatgacctcaaagcactttcatggctgccctctggcagggcagggcagggcagtgacactgtaggagcatagcaagccaggagatggggtgaagggacacagtcttgagctgtccacatgcatgtgactcctcaaacctcttccagatttctctaagaatagcacccccttccccattgccccagcttagcctcttctcccaggggagctactcaggactcacgtagcattaaatcagctgtgaatcgtcagggggtgtctgctagcctcaacctcctggggcaggggacgccgagactccgtgggagaagctcattcccacatcttgccaagacagcctttgtccagctgtccacattgagtcagactgctcccggggagagagccccggcccccagcacataaagaactgcagccttggtactgcagagtctgggttgtagagaactctttgtaagcaataaagtttggggtgatgacaaatgttaaaaaaaaaa

SEQ ID NO: 70425 - DNA, 1041 bp, Homo sapiens
aaagatcttacttggttttgctcaccgtttttttccatcaccaagcatatgtgcctggcgcatagcaggggctgtgaaatatgtgaagaatgaatgaatgtagcctgtggcccaagcttaaggaggatagaaaccacgccagggagtggtttggtccattggcgcctgtgggtctgacccaagtctctcacacaggagaaggcacaatccctgtggaatccagtgacattgtgcctacgtgggatggcattcggctcggggagagactccgtaccatgtcctgtagtgacaaaatcctacgctggaacgtgctgggcctgcaaggggcactgttgacccactttctgcagcccatttatctcaaatctgtcacattgggtaaggggcctgccttgggatctggaactggtctgtccttcttgtgcccagatcccaaactgcatgctttattgccaggtgttttgtctcccttatcaaagtgagcatgattcactcctcagtaattgattgagtgtccagtctgctgtggtaggaagatcctggtagccccagtcagaaggtgcttcctaacaaggcagctgtttctctttcttgacaactatatcttgtacctccaaaatccccacatgcttctgcctcttaacagcatttggtgcaaacacaggtatatatgtttctcttttttgtactcaggttaccttttcagccaagggcatctgacccgtgctatttgctgtcgtgtgacaagagatgggagtgcatttgaggatggactacgacatccctttattgtcaaccaccccaaggtgctataacccccttctattttccctgacattttcctccttttcaagcagtcatgtaaacagaggaaaaatgtacactgtgggcaaggggaacattgcccacagtggtagcccacaagggaacattgcccacagtggcccaccaccaacattggttggtctcccaagaacttaaactttcttccttttggatgccaagggcttttcttctcttagtctggaattaatctgaatc

SEQ ID NO: 70426 - DNA, 459 bp, Homo sapiens; identical to SEQ ID NO: 67728

SEQ ID NO: 70427 - DNA, 1104 bp, Homo sapiens; identical to SEQ ID NO: 67729

SEQ ID NO: 70428 - DNA, 403 bp, Homo sapiens; identical to SEQ ID NO: 67730

SEQ ID NO: 70429 - DNA, 492 bp, Homo sapiens; identical to SEQ ID NO: 67731
  misc_feature (1)...(492): n = a,t,c or g

SEQ ID NO: 70430 - DNA, 2191 bp, Homo sapiens; identical to SEQ ID NO: 67732

SEQ ID NO: 70431 - DNA, 494 bp, Homo sapiens; identical to SEQ ID NO: 67733
  misc_feature (1)...(494): n = a,t,c or g

SEQ ID NO: 70432 - DNA, 479 bp, Homo sapiens; identical to SEQ ID NO: 67734

SEQ ID NO: 70433 - DNA, 945 bp, Homo sapiens; identical to SEQ ID NO: 67735
  misc_feature (1)...(945): n = a,t,c or g

SEQ ID NO: 70434 - DNA, 426 bp, Homo sapiens; identical to SEQ ID NO: 67736
  misc_feature (1)...(426): n = a,t,c or g

SEQ ID NO: 70435 - DNA, 697 bp, Homo sapiens; identical to SEQ ID NO: 67737

SEQ ID NO: 70436 - DNA, 466 bp, Homo sapiens; identical to SEQ ID NO: 67738
  misc_feature (1)...(466): n = a,t,c or g

SEQ ID NO: 70437 - DNA, 411 bp, Homo sapiens; identical to SEQ ID NO: 67739

SEQ ID NO: 70438 - DNA, 842 bp, Homo sapiens; identical to SEQ ID NO: 67740

SEQ ID NO: 70439 - DNA, 628 bp, Homo sapiens; identical to SEQ ID NO: 67741

SEQ ID NO: 70440 - DNA, 752 bp, Homo sapiens; identical to SEQ ID NO: 67742

SEQ ID NO: 70441 - DNA, 602 bp, Homo sapiens; identical to SEQ ID NO: 67743

SEQ ID NO: 70442 - DNA, 1267 bp, Homo sapiens; identical to SEQ ID NO: 67744

SEQ ID NO: 70443 - DNA, 719 bp, Homo sapiens
aggggagcaggctcaatggcaaaggaaacagaccgacactggccaagaatcacagaagcaaagcacccggttactcatgataaacctgggaaggaagaaagtggaacagtttattcacttaatgcttgtttgctaaagccaagtagaaaacggcaatactagatgtttagtgtgcttcaaatacaaatgtttgtcaaaataccaagtaaaaacataaatttataaaacaggaaaccagaaacctcccttacctttccaatgtaaaccatgagccactgctgccccaaggctgcctcaggcttcaggagtcctccaggagctttttctttaatgcagtgtctgttttcagggaccctcctggcctttggcagccagcttcctattgcaggagctgagggtctaggagggttcatggcgaggttgtcagagctgggaagcagaaagcagccgggcaggcctcacagtcacagagtccacgtcccgggcagcatatggagaaagggtctgggctggctgacagcagtcagcattggcgcctctgaggaggttgagggctgagttggggaggtcaccacctcacagtgtccgtgcacaccttggctgtttcagcaacgcgtcctgcaccaccaactgtttggctcccctcgccaaagtcatccacgagcgatttgggatcgtggaagggttgatggtgagttgaggatgaggaattccaccgc

SEQ ID NO: 70444 - DNA, 481 bp, Homo sapiens; identical to SEQ ID NO: 67746

SEQ ID NO: 70445 - DNA, 1263 bp, Homo sapiens; identical to SEQ ID NO: 67747

SEQ ID NO: 70446 - DNA, 835 bp, Homo sapiens
gcgtggaattccttggggcccagtggtgccaaggcaggcggtttctggtgtggttgctttagtcttcattggaggcacacgaaggagtctgtgatatcatgtgagacccgggaagggccccttcaaccgcccctttctgaactgcgggtcaggcaggctcccctggggaaacctgggcgcgtaggaggcacctccacctgctggagctggcccaggctggcctcccctgcagacaggccgcgtctagggccagctgctcatcccagacgcacccaggtgattcccatgctgaacagtttgatctcctgccagagtgtcgggccacaaactgggcagcacatcaggatcacctgggggccttcaaaaatcaaaaatccacccccaggccatgccctggacccactgcaccaggacaagaaatccaccccaggcctctccccagacccactgcaccaggacaagaaatccacccccaggccacgccccagacccactgccctaggatgtgggggtgggaaccaggtggtgctttgtaaagacgtgcaggtggtaaccccaggcccccacgctcggaaccctggccacaggatcatccaggtgtctgtgatttgcttcctcggtttcctttgtgagtggaaaataagtgttgcgtttgactagggtttaagagcagcaggcagcccctcagctcagcaggcagccccctcagctcagcaggcagcccaggtctcctgtttgacttctagggaccatgctggcgggaatgagaaactggtcaagctggagtcgggactgaaggtgtaccggggtgacgaccgtatcgggccctgactca

SEQ ID NO: 70447 - DNA, 1073 bp, Homo sapiens; identical to SEQ ID NO: 70412

SEQ ID NO: 70448 - DNA, 640 bp, Homo sapiens; identical to SEQ ID NO: 67750
  misc_feature (1)...(640): n = a,t,c or g

SEQ ID NO: 70449 - DNA, 1045 bp, Homo sapiens; identical to SEQ ID NO: 67751

SEQ ID NO: 70450 - DNA, 348 bp, Homo sapiens; identical to SEQ ID NO: 67752

SEQ ID NO: 70451 - DNA, 530 bp, Homo sapiens; identical to SEQ ID NO: 67753

SEQ ID NO: 70452 - DNA, 447 bp, Homo sapiens; identical to SEQ ID NO: 67754
  misc_feature (1)...(447): n = a,t,c or g

SEQ ID NO: 70453 - DNA, 834 bp, Homo sapiens
ggcgaaaagagcaaaactctgtctcaaaagaaaagataaaataaaatagagtccaaacctattaaaagtaggtactggctgagcagcagtttcttacaaactataaacagcctcttctaacgttagtattctcggtgcctcatatttaagtagttgataacagtcaacttttagtattgttctctatttgctaaatcctatcccccaactaaacctcaagaactgtcacatttttgtgtccaatatagtacctagaataagaagtgctatgaagacagcagattcttcgtaagtccctcctgaactttccagttaatagagtaagctcccatacctgacaaagatccagagaattcactctgctacttcacgttccataccagtgactcaccgcgcataatcctggggagtgaccagaaacttctctttcatctggacctcagctttgttctcccaccagaatttgttggttgctttcttgtgctctgggctggccagatgctccagcagccccccgtacagcaccgtcaggtttccatggctcaggtgttcccgcacctcacagccgcagcacaggcaccagcagcatcgctcgtgttcgggcacatagcgctccacctgagcggcgcggatggccttgcgggccgcctccacctggggcaggagcctctccaaagcctccttcagctgccgctggtgcttgcggctgtaaacgtgcccgcgaccacagaagaaggtctggcggcacagagggcagcgctgcgccggcgccatagcccgggtacccggtatcaccaccaccagcggccgatcctacgccatccggcgacgaaa

SEQ ID NO: 70454 - DNA, 426 bp, Homo sapiens; identical to SEQ ID NO: 67756

SEQ ID NO: 70455 - DNA, 712 bp, Homo sapiens
ccaaacgggccgcctttgctagcacccaatcagaacgctcgatcttcggctcccgtccaatgaacgcgcgtattggggaggggaaaaaagacggcgtgaagcccaatcgcagcgccattacacttgagggcaaagaggttaggaagccggcatggcgctccggtcaataaaatcgatagctggaagctgcctgtgttccaggcaaaggcggtgcggtatcagcgccgccattttccccgaaggcatcttccggtgcctttcacccaagttcgggcaggagtttcctcgagtgcaaccgccgcttccgccagcgcacggccctcgtcatccaccagcgcatccacacgggcgagaagccctacccgtgcccggactgcgagcggcgcttctcctcctcctctcgcctggtcagtcaccggcgtgtgcactctggggagcgtccctatgcctgcgagcactgtgaggcccgcttctcccagcgcagcacgctgctccagcaccagctcttgcacaccggagagaagccctacccctgcccagactgtgggcgtgccttccggcggagcggctccctggccatccatcgcagcacgcacacagaggagaagctgcacgcctgcgacgactgtggtcgccgctttgcctacccctcactgctggccagccaccggcgcgtgcactcgggcgagcggccctatgcctgcgacctttg

SEQ ID NO: 70456 - DNA, 425 bp, Homo sapiens
ggtggcactcctggccgcctcatctctctctgggcccctggggtggtggggccaaagccctgccccaccctgatctcggctcttctcccccaggctccctggcactgcctcacagggggaatccaagacaccctttcccccaaaacgggccctccactgcctcttcaataaggatgtcgcctccccgagagtactcatcctctgggcctcgccccgtgtcactagggtccccgcgggcccccacatgcactcggatgcccctcccatcattacagaagggtggactcaaagcctccaagcctgctcccctgaggacgtaggcagcgccccctcccccagaaagcactcaggggccccctccctgggacgctcccgatcatcccgagtctcctgcctcctcgggacgctccgcgtctccaacgaaa

SEQ ID NO: 70457 - DNA, 440 bp, Homo sapiens; identical to SEQ ID NO: 67759

SEQ ID NO: 70458 - DNA, 378 bp, Homo sapiens; identical to SEQ ID NO: 67760
  misc_feature (1)...(378): n = a,t,c or g

SEQ ID NO: 70459 - DNA, 810 bp, Homo sapiens; identical to SEQ ID NO: 67761

SEQ ID NO: 70460 - DNA, 714 bp, Homo sapiens
gcgctgggctgcttccacgccagtctgcgcttaaacccatacttcctcaggtgtgcagcagtagcatctgagcggaagggaactgagtatcttagcagttttttagatttaacaaagattactctcactgcagacaaaactttttatttaaccctatttagcacctactaagagctttggaaatattaacaacttaaagacccattattacaactgaagctattttatgaatagttcccaggaagaactgaggaatccactaaaagacaatatttcattgctttatggaggaaaaaacttacctatttctcttcaagaatggaactttttggcataagtactcatgtaacaaaaatttgctatttgtcaagaaattacttcttttaagtgttctagaaaagatcatttttcccccaatgtatgttaaaagtatatagttcagtctagaaatggaaagcattctaaaaataaatgtaattggggtccactgtcaaatgaaaattgccacttactgtggttatttttgttttcagatgggttacttatgaatatggcagttacagagggcgacagttcctattgtctcctgcagaagtgcgtgattggtatgaattcaatgtctgtcgccgaataggttctagatgaccttttgttcaggtctgttcttagtctgagaattccgacgttcctcgcactagactatcgatctcattt

SEQ ID NO: 70461 - DNA, 976 bp, Homo sapiens; identical to SEQ ID NO: 67763

SEQ ID NO: 70462 - DNA, 384 bp, Homo sapiens; identical to SEQ ID NO: 67764
  misc_feature (1)...(384): n = a,t,c or g

SEQ ID NO: 70463 - DNA, 416 bp, Homo sapiens
agcctcaataatgtaacactgccccaagcgaaaacagaaaaagatttcatccaactctgcacccctggggtaattaagcaagagaaactgggcacagtttactgtcaggcaagctctcctggagcaaatatgattggtaataaaatgtctgccatttctgttcacggtgtgagtacctctggaggacagatgtaccactatgacatgaatacagcatccctttctcaacagtaggatcagaagcctatttttaatgtcatcccaccaattcccgttggttctgaaaattggaataggtgtcaaggatctggagatgacaacttgacttccttggggactctgaatttccctggtcgaacggtttctttttcttttgagatggagtctcgctctgtcgcccaggctggagtgcagtg

SEQ ID NO: 70464 - DNA, 407 bp, Homo sapiens
gctccctggagcaggagaagaagctgcgcatggacacggagcgggccaagcgcaagctggagggtgacctgaagctgacgcaggagtcggtggctgatgctgctcaagacaagcagcagctggaggagaagctcaagaagtaggtgtggtggggcagcaggtgggggccttctgagcctgcacctggcccttgttcccttctggattcttgtggttcccactctgtggctcccaggaaggactccgagctgagccagctgagcctgcgggtggaagacgagcagctcttgggggcccagatgcagaagaagatcaaggagcttgtctggttccatggcctagaaaaaagctggcactgcggctgcaggaggcagaggagggcgtggaggctgccaacgccaagtgct

SEQ ID NO: 70465 - DNA, 449 bp, Homo sapiens; identical to SEQ ID NO: 67767

SEQ ID NO: 70466 - DNA, 1113 bp, Homo sapiens; identical to SEQ ID NO: 67768
  misc_feature (1)...(1113): n = a,t,c or g

SEQ ID NO: 70467 - DNA, 470 bp, Homo sapiens
ctctggtgttcctttctgaccccctccagggctggggactggtagcagctgcccgtgtagtgttcgatgttggagaagatggaggtgcagatgtaccagatggccgtgcccacaagcagggtgctcagccgccgcaggaccaagccagccttgccggtcagatggtagttggtgagggcaatgaaaggcagaaggagacagaacgtccaggcccaggccactttgacaaaatacacgttgaggacgttgcgcttgttgctgaggtagctctcgggcaacggggacaactccttgaggagggagcccgccagcatggaggccaccagggcccagggcaggtagcgccgcacggccgcccgcaccagcgtcccccgcaacaaccactcgcagcgctccagatgctccatgccggatctcgtcagccaccgtcctcctctccgtgccctctcggccaccgtatcgccacgaaa

SEQ ID NO: 70468 - DNA, 1593 bp, Homo sapiens; identical to SEQ ID NO: 67770

SEQ ID NO: 70469 - DNA, 839 bp, Homo sapiens; identical to SEQ ID NO: 67771

SEQ ID NO: 70470 - DNA, 617 bp, Homo sapiens; identical to SEQ ID NO: 67772

SEQ ID NO: 70471 - DNA, 1028 bp, Homo sapiens
ttttttttttctgagccaatacatttctgtttattataacttaccccgtctcagggatcttgctagagcagcaaaaacagactcagacagaccctcacccccaggagcctgctcccaaccggggcccaaaagaaaacaagccagcgagggcactgcggaatgcagggttttggcgacagagctacaggagtgtgccttggcccccacaagggccacagtcctgcccccacctggtctcccggggctcagacagcagccgccagcccacggaggtagtcccccgccaggggcagcacggcccagtcatcggtccgcagggccacaggcactccatctgccagggccgcctccagccgcagcagcagctttgagtccgggggcaggtggattgctacacagtagctggtaggaggctgggccaccaccacaaaaggctccaggtggcgggacaccaagccctccaggccctgtggcccaagtggacaccacacacgactctcagcaccctctggcaggcaggaatcccagagctcctcaaagaagcccagcccggccccctctggaggctgcgggaaaggcagaaagaggtcggcaaagttcacgaacaggggtggcaagtgggcatggcacgtgagaccagtggatgtggtgtaaagggcatggacatccagccgtgcgggggccgggcatcggggctgcagaggcaggagcagagggcgggcagggcggccaggacacaggcagggcacatggacagcctccaggggtgcatacagctgtccttccacacggaagcgcagctccagagagtagatgggctccagcgcctccggctggagcttcaacactgggagtgggcccttgacccgatgggaccccaggctcagccgtaccagggccggtgcctcctgcaccatcagtgctgccacaaagccctggttctcggccaccagtgaagaggccagtgcaggtgcggcaagcgaggggcccagggccacccccaacttgggtgctgccaggtgtgccag

SEQ ID NO: 70472 - DNA, 499 bp, Homo sapiens; identical to SEQ ID NO: 67774

SEQ ID NO: 70473 - DNA, 372 bp, Homo sapiens
ttagcccccggcgcccccatccccagcgtggcccgggaacccagtgctgcgcacctcagcatgggatactgccctcaatccgatgccatctttgagctgctgacgggccgcgagcacctggagctgcttgcgcgcctgcgcggtgtcccggaggcccaggttgcccaggtgagcccactttgtccccaccgctctcacctcccagggcccacccgacccaggccgtgcctctaaagcctggcccaatcccgcactctctcgccttggctccatccctgtccctgcccccagaccgtgcttccttcccctatacctctgtcccccatcctggtccaatagggatgtggctagcccgcctctttgccccggcgc

SEQ ID NO: 70474 - DNA, 1803 bp, Homo sapiens; identical to SEQ ID NO: 67776

SEQ ID NO: 70475 - DNA, 418 bp, Homo sapiens; identical to SEQ ID NO: 67777

SEQ ID NO: 70476 - DNA, 619 bp, Homo sapiens; identical to SEQ ID NO: 67778

SEQ ID NO: 70477 - DNA, 760 bp, Homo sapiens; identical to SEQ ID NO: 67779

SEQ ID NO: 70478 - DNA, 714 bp, Homo sapiens
ggggcgccaaagccggtccaacaccccttgcttccggtgcccaccccacaccccacggtgcacagcttcatctccaaccatggcatcttctctctgcttagcagcagtgctgccacagccctgctgatccagcgcaccaatgaggaggagaagtggctggcgcggcagcggcggctgcggcaggagaaggaggaccggcagtctcaggtgtccgagttccggcagcaggtgctggagcagcacctggatatgggccggcccccggtgccggcggaggcagagcacaggccggagagcaccaccaggtgagtgagccccaggaaggaaggagggatgagccttcacgttccgatttgttcagcgtgtattgagcacctcctgtttgcccgacatcctgccccagcgtttctgcctgcctctttcatttctgttctttcatcttcacgttataatgcctgtcttgcctatggggaagctgagactgaggaagaaaatggattgctcaaaggtatccccaccagtaagtaaagagaccaatcaagtccatgttgagagccagggcactgcacacgcagcctgacctagttcccaggaggccattcacagcagatgaagagtgcaaggtagaagctttaattactaataatacctgttctctccatcttcctctgcttttgagcctggacttcttttttaacaagaaggggactcccg

SEQ ID NO: 70479 - DNA, 442 bp, Homo sapiens; identical to SEQ ID NO: 67781

SEQ ID NO: 70480 - DNA, 879 bp, Homo sapiens; identical to SEQ ID NO: 67782

SEQ ID NO: 70481 - DNA, 497 bp, Homo sapiens
gtctggcagattccttaattcctctgcaaactcgtcattcgttttctctcgcctgggggcaggagcagggaggaccctattttcagttgactgtgatgcgggaacttcttcttcatctgttaagtcctccatatctccaaagagagtggccagattttccttttcgtctcttgtctctcctgtttctccatcatcagcctcttctgtataagattcaccgtcgccgtcggcatcaaagagctcatcaaatgcgtcgggctcgccattttcccgcgtcaagaagttattttcttctgaattacaatccaaggctgactcattttcttccagcagtgcggtcagcagagacagattgtcttcctcctcatccatgctgtcaagaggacagttgtgacaggaaacttcgaaggaggctcagatgcccagatgagcaacgaaatcgtcgaccccgtaattccggaacggtgcgtcggtcgcatcagctgtcaggcttcaaa

SEQ ID NO: 70482 - DNA, 644 bp, Homo sapiens; identical to SEQ ID NO: 67784

SEQ ID NO: 70483 - DNA, 443 bp, Homo sapiens
cgctcccaaaaagatggtttcccaggatgattttctcaagcaagtgctgacagagcaggagtcaagcgggggtggggttggaggctgaaacccattgaaggggtcaacttcatagaggcaggcagggatgcctgggggtgccagacgtggctgagatgtttctgcagaggggaggttgggaagacctaggagggcagggcaggctgggccgggagagatggtgggaaatcccaccaggtcaggggccagtgggcagagggaagcatcagctgagacccagagacagggctgccctgctgcggtagggcccaggggcaggggcctgcaggggctgcctggggcttcccttccccaccctaactccagtccccactcaggactgctcacatccgtccgtcctggaaggtccacagaaaacaatcacctgggcctcccttactcct

SEQ ID NO: 70484 - DNA, 1457 bp, Homo sapiens; identical to SEQ ID NO: 67786

SEQ ID NO: 70485 - DNA, 340 bp, Homo sapiens; identical to SEQ ID NO: 67787

SEQ ID NO: 70486 - DNA, 352 bp, Homo sapiens; identical to SEQ ID NO: 67788

SEQ ID NO: 70487 - DNA, 488 bp, Homo sapiens
aagtgtacctgccagcaggagaagaggcaggtcaggactcaggtggccagccaccctcagccctgggcactcacacatgtaaggggccagccctaagggccgctattcgctgagaccatgaggaggggagcaggaccctcggaggccacaagtcacacaggccgtcctggtaaagtgagaaacctgagggtggaaaagagcagcaggacaggccctggagaggaggctaggggctgctgcctgggtaccctcccccaagcccttctcccggcccctaaccggtccaacaggaacttggcgagctgcgagtgcagggagaagcccagccgctccttgaggaggcaccactgctccatgtggccgcccaggcggatgcggcacttgctgcggcgcgcgtccagctgccgccgcttctcccgccgcctgcaggacacgtccaccgccggggaggaagccatgtgcaccagaggctgtgcgcccccacgcgg

SEQ ID NO: 70488 - DNA, 399 bp, Homo sapiens; identical to SEQ ID NO: 67790

SEQ ID NO: 70489 - DNA, 658 bp, Homo sapiens; identical to SEQ ID NO: 67791

SEQ ID NO: 70490 - DNA, 403 bp, Homo sapiens; identical to SEQ ID NO: 67792

SEQ ID NO: 70491 - DNA, 1214 bp, Homo sapiens; identical to SEQ ID NO: 67793

SEQ ID NO: 70492 - DNA, 415 bp, Homo sapiens; identical to SEQ ID NO: 67794

SEQ ID NO: 70493 - DNA, 1009 bp, Homo sapiens; identical to SEQ ID NO: 67796

SEQ ID NO: 70494 - DNA, 1803 bp, Homo sapiens; identical to SEQ ID NO: 67776

SEQ ID NO: 70495 - DNA, 463 bp, Homo sapiens; identical to SEQ ID NO: 67799

SEQ ID NO: 70496 - DNA, 196 bp, Homo sapiens; identical to SEQ ID NO: 67800

SEQ ID NO: 70497 - DNA, 371 bp, Homo sapiens; identical to SEQ ID NO: 67801

SEQ ID NO: 70498 - DNA, 350 bp, Homo sapiens; identical to SEQ ID NO: 67802

SEQ ID NO: 70499 - DNA, 430 bp, Homo sapiens
cctgtgcacttcagcttgggagagcttggattggaggaacttgctcttcatgcatgatggaaatcattctgctttgtgtctaagaaagtttgtgttgattggatgatggagtgaagctaaccccgagattcactttcctcccccagaccgagggtggtccgactggtccagctagctacgtatcccgggggatgagttaaaatggaagttcatcagcgacgggcctgtgaacggctggggctggtgcttcaccatctatcccatcatgccagctgctggtaagggaggggcttatggcaatcaaagttagatgactggctgtggattgtttctggagtaacatggacatgtgcacatttccatgtagtgcctgacggcctgccttctgctgtgttgcggtgaatgctccacgaaatcgtcgacccgggaa

SEQ ID NO: 70500 - DNA, 427 bp, Homo sapiens
cagacgaaggtgttccactcattttcaccactccgttttatcgtccgtctaaactctggtttttgcagacctgtctcctgcgtccccttacacgtgttcctttccggagcttccaggggacccggagcataagaattcaaaccgagaccctcagtcccagcccccgcccccgcccgttcctccatacactcaaccgctgggactagaagctcccggcagtccttccagcaagaggcaccgagtctgggcgtgaccgagccagtcccgccgaggtctcaggccacaaatccacacgcgtcctcccaccctccccgggcccgggtgtggtcgcggaccgctaatggcgcggagcccacctcgtaaagcgcctgtaccatctccaccagaacccactgctccgtggcggtcgccatagttagccacgaaa

SEQ ID NO: 70501 - DNA, 435 bp, Homo sapiens
gtcacaggagcggcggtggcgggcggatccgagcacctctcggcctgaccccagagcctagctctcaccccggcgagggacttccaccccgactcaccgcggaatggggagcgccaggctgaaccaaatcctgtgctcacccctccgtgcaaacccctcaaggcaactcaggcctctgaaagccttcctacccccccgctctccgctcaggtccccactcaaccggtgcccaccgccctggcgcgcgtcgctccgcgattaccggcccgccaaacagtccccgcaaagtccaccctccggggctcccggtccctcaggtcccgcgtgcccggccctgggcatccgcagcgtccccgtggtatcggacccccatcgtccctgacacctggcgtctccgccccccgcccccgacgaaatcgtcgacccgggaattcc

SEQ ID NO: 70502 - DNA, 702 bp, Homo sapiens
aaagcaggtgcctggaaaagcctgctgagggtgaaggggaaccatccagtgtcctgggttggggaagcattttcctctttatgagtctgtctctggtcctcatggaacaaaagtgggcagtggtggtatgagaagcagaggctaattgtctaccccctgcctccaagtagaattactccttgtctgtgtacctggtgaggcagttgactgcaggaacccttctacaaaaactcagagcaaagggtatccggaacccagaccactcgcgggcactgagtgagtaacatctttcctctcttccccacctgatctggattcaagtcttcctggccctccagccttcataattaaacccatacctcttttttgacaacttactccccttctcacatgaaccccaaccctccccctctacccctgaccagtcttccagtctttatagttgaagttggaccactcccaggcacccttgaatttccaatcatgtatctgctttgcacctcacagtccctaactccagccctgctagaatatgggctctccggactggaaagaatcttaggggtcctctaatctaaccctcacatgatgcttcaactcctccagatcatctctaacatagccagagtgtcacgctatgtttaagcatcttcagggatgggaaaatcccccacacccatgtattgcggccgctctagagga

SEQ ID NO: 70503 - DNA, 469 bp, Homo sapiens; identical to SEQ ID NO: 67807

SEQ ID NO: 70504 - DNA, 1310 bp, Homo sapiens
aatacagggggctggggtgggtgcaggcaccggtgtatgagcaaaggcggggatgagggtgggggtagaaggtgggccggaagatggggttggagtgggcatgggcacagacggaggggcaggggccgctggaggcgtggatgctggcatgggagccagaaccggagtggggacgggagcgagaaccaaggtcggagctgaagggggcacaggagcctggatgagagccaagggaggagctgaaactgggactgaaagcggggcaggagctggagccgacaagggaaccgggcctgaagggggagcagaagctggcacaggcaccaagactgaggccgaaacagaaagggggttcgagtcagagatgagcgtgggcactgacggtggcgctggagccagagccgggacaggtgctaagggaggggaaggagctggaaccgaagtggcaacttggactggaacaagccctgaatgggggactggggcagggacggagaggggaacctggaatgcatctggaacagagtggggcacagaggccgaaccgggagcagggggacagataggggctggcagaggactgaagttagtggtaaccaggggcagggtcccctccacagggactccagttcccagagttgccaaaatgaaagtattcttctctccaacaccttgccgagagtccaaagcctttactccggcgggtgagcagtcaacctgtttgctcatttgggtgttgagtggagtccaggagcagtcggccctgctgttgctggcctcggcgctgtcagatgcgggaagcttgagcccgtctcctgggctgctcaggggcaccaagaggccctcagcctctgccacgttcccagcgtagtccatttttggctggggatcgtcaggcttgtcttctgacttgtgcccaagtttttctgtagcactgccatctgggtctgccccccgggcattgctgccacttccaactgccgtgagctccaccttggaaaaactgctgctgacacaaaactcctgagatccaaagtgctggcagtcgcctgtcgttgactcctcatcagaaagaggtgctcttctctcctcgttgatgccacacatgcgaatccggtcagaactggtccagttgtgcacgccgctgtagagcggtgctgtagagatcatgacagccactcaccaccagataggacctgctgtggccactccccctccttctcctctctctcggcggcggcggcggtcggactctaggaactgagaggaagaagggagggctcagcaaagcggaggagagacagacgaaa

SEQ ID NO: 70505 - DNA, 398 bp, Homo sapiens; identical to SEQ ID NO: 67809

SEQ ID NO: 70506 - DNA, 646 bp, Homo sapiens; identical to SEQ ID NO: 67810

SEQ ID NO: 70507 - DNA, 368 bp, Homo sapiens
  misc_feature (1)...(368): n = a,t,c or g
atagctgnnnnnnnnnnnnnnnnnnnnnnnnnnnnnnnnnnnnnnnnnnnnnnnnnnnnnnnnnnnnnnnnnnnnnnnnnnnnnnnnnnnnnnnnnnnnnnnnnnnnnnnnnnnnnnnnnnnnnnnnnnnnnnnnnnnnnnnnnnnnnnnnnnnnnnnnnnnnnnnnnacacaatacctaaccaaggagttgaaagacctctacaacaaaaactacaaaacactgctgaaagaaatcatagatgacacaaacaaataaaaacacatcccatactcatggatgggcagaaccaataatgtcaaaatgaccatgctgccaaaagcaatctaaaaatttaatgcaattcccatcaaaatatcattataatt

SEQ ID NO: 70508 - DNA, 992 bp, Homo sapiens
ttttttttttgaaagacacacgttattttattaatatagccatctctccccactgccccagtggtgaaggtgtttgcattgcaacatggaggggcaccaaatgctctgcgggccctagcccgctgccacaggctaggcctgcctgcagccaagaaggctgctcaaactctagatgccatttggaggcatgaggacctgagcccagaggtggcagtgtcctacccagggaagtcaacagatcgtgctccaggtcccagctctgggctgggccaggactaaatcctggctcccctttcttggtactaaggggattagtgcttggttgtctgtagggggtcagagtagggagggttccaggaagggttccagagtgggctcacaggggacctcctcccctggcctcttggagtccaggtcgtcgagggcgcaaagctgcacgccatcctgggcaagctgggcccgcagcgtgggcgcggtgaggacgcgcagctcatgcagccgctcccaagagcaagagaaagcgtcggggccttcaccgcagccgccggtgggaggcacactggggtagccggggtgcgccatcagctcggctgtcagggtgtggcccgctagggtaccttccaggacccgcgccagggccccggacacgcggtgagcggacatgtgccggccgcaagtgctcaggcccacgaaggcgtctgtccaccgcaggccgtggcgggagaaggggcccacggcggcccgggcgtcgcgctccacggcgcaggcgaaggcacgcgcgggggcctccagccaagtgcagccacccacaccgcgctccagcggcagtcgcgtaaagcgcaccccataggcctgcagcgcctcggcgaacacctggcacacgcctgggagcacgtgcacgtgctggtgcccgtccgcgtgcgtgggggccctgcccagcagctcccggaagcagcttagttgggcctcgacccgggaattccaggaccggc

SEQ ID NO: 70509 - DNA, 375 bp, Homo sapiens; identical to SEQ ID NO: 67813

SEQ ID NO: 70510 - DNA, 942 bp, Homo sapiens; identical to SEQ ID NO: 67814
  misc_feature (1)...(942): n = a,t,c or g

SEQ ID NO: 70511 - DNA, 851 bp, Homo sapiens; identical to SEQ ID NO: 67815

SEQ ID NO: 70512 - DNA, 434 bp, Homo sapiens
ggatcttcctccagcccttcctcctcctcctcctcctccacatcccgcatacagtctgccgccaacttctcgatgtgggccatgggcaggggggcctgccccttgggtgctggcttcttgcctgtggtttgtgcttcccctgtgagagccagcagctcagcctccaggtcctcatcatcttcagcctcatccatgcccagcagcatgtcctcagggccaaactccataaagagccccatctgcttggcagcggccaccccttggcctctggcctgagggcccttccgaggtcttggccctggcatcatggcagcctagatacctcgcggtgaatccgagccaaaccccggccttgtctcacccggcaacgccatgggctcccgcgggccctgggccgcagacgaaatcgtcgacccggtaactcgaaaccggta

SEQ ID NO: 70513 - DNA, 808 bp, Homo sapiens; identical to SEQ ID NO: 67817

SEQ ID NO: 70514 - DNA, 616 bp, Homo sapiens; identical to SEQ ID NO: 67818

SEQ ID NO: 70515 - DNA, 782 bp, Homo sapiens
  misc_feature (1)...(782): n = a,t,c or g
ccacggtggtcnccgccagcaggaaggccttcagtgggaccaggtccctgagagagtgctgcatctcgtaactgcaggggatgacctcagcccagggcttgtgggcagtgctgaagaggacagtccctggggacgggcagagccggggatctatacgcagcctcaacttggccagctcttctgcagaggccctcggcatctgcaagatggtcgaaggccccgagatgacagacagctccgactctcctgactcctccacctcagactccagagacccttcgacctcttcagtaacctcttcaacaatgtcttcgatgacgtcttccacgacctcttcaggagattcctcaactaataattctaagctgggagagggcttgacgatctcggccaggacgcccgcggactcattcatttcgccttcttcatctttcacaaaatcataggtcacgtaatagttgtaagtgatgaaagggccttcgggccggggttccgggtctaagacagaggtgtccaggactcctctgatgtttccgatggtcaccacaaactgcgcctcctgtgccaagagatcgccattgaggctgagcccccggaagagatgcttctcattgggagacacggtgatgtcgtccagcacgcagagctgggccaggctgtcgatggtgaggccgcggtagtagggcaccaaggccagtgggtttccccacagcaccaggagtcgcaggtgtcggagggtcaaaggaaatgccagctggcaggtctgtcaggtcgttcggcgc

SEQ ID NO: 70516 - DNA, 414 bp, Homo sapiens; identical to SEQ ID NO: 67820

SEQ ID NO: 70517 - DNA, 2693 bp, Homo sapiens; identical to SEQ ID NO: 67821

SEQ ID NO: 70518 - DNA, 776 bp, Homo sapiens
agcaaagcaggagctggccaagctgatgcggattgaggacccctccctcctgaacagcagagtcttgctgcaccacgccaaagctggcaccatcattgcccgccagggagaccaggacgtgagcctgcacttcgtgctctggggctgcctgcacgtgtaccagcgcatgatcgacaaggcggaggacgtgtgcctgttcgtagcgcagcccggggaactggtggggcagctggcggtgctcactggcgaacctctcatcttcacactgcgagcccaacgcgactgcaccttcctgcggatctccaagtccgacttctatgagatcatgcgcgcacagcccagtgtggtgctgagtgcggcgcacacggtggcagccaggatgtcgcccttcgtgcgccagatggacttcgccatcgactggactgcagtggaggcgggacgcgcgctgtacaggtgcagctcccaccgcgctgctcaggcccggcctaggggtggggacctgggggtggtcagaccttgctgacctccacgcccactcaggcagggcgaccgctccgactgcacttacatcgtgctcaatgggcggctgcgtagcgtgatccagcgaggcagtggcaagaaggagctggtgggcgagtacggccgcggcgacctcatcggcgtggtgagcgcgacccccacccactgacctctggccttttccaggccagtccctcggcaactcacacgcatcatcccgggtaatccagggagtggtgaagtttttcccggggctc

SEQ ID NO: 70519 - DNA, 569 bp, Homo sapiens; identical to SEQ ID NO: 67823

SEQ ID NO: 70520 - DNA, 722 bp, Homo sapiens; identical to SEQ ID NO: 67824

SEQ ID NO: 70521 - DNA, 392 bp, Homo sapiens; identical to SEQ ID NO: 67825

SEQ ID NO: 70522 - DNA, 755 bp, Homo sapiens; identical to SEQ ID NO: 67826

SEQ ID NO: 70523 - DNA, 577 bp, Homo sapiens; identical to SEQ ID NO: 67827

SEQ ID NO: 70524 - DNA, 434 bp, Homo sapiens; identical to SEQ ID NO: 67828

SEQ ID NO: 70525 - DNA, 485 bp, Homo sapiens; identical to SEQ ID NO: 67829
  misc_feature (1)...(485): n = a,t,c or g

SEQ ID NO: 70526 - DNA, 545 bp, Homo sapiens; identical to SEQ ID NO: 67830

SEQ ID NO: 70527 - DNA, 442 bp, Homo sapiens; identical to SEQ ID NO: 67832

SEQ ID NO: 70528 - DNA, 614 bp, Homo sapiens; identical to SEQ ID NO: 67833

SEQ ID NO: 70529 - DNA, 255 bp, Homo sapiens
atgttttctaacccccagtttatgtgagtttttttggcccaattttaacccaaggccctcccccccgaagggcaaaaataatttatttttaaaaaaccggagttgtttttggcaagggccatccacccttcaaaaaacccaaagttttccaggttaactcccctccccaaccttttaataaaattaaagatccccctctgtcccccccactttggtatgtttcccccccccccccccccccccaaaaaaaaaaaa

SEQ ID NO: 70530 - DNA, 422 bp, Homo sapiens; identical to SEQ ID NO: 67835

SEQ ID NO: 70531 - DNA, 728 bp, Homo sapiens; identical to SEQ ID NO: 67836

SEQ ID NO: 70532 - DNA, 473 bp, Homo sapiens; identical to SEQ ID NO: 67837

SEQ ID NO: 70533 - DNA, 1303 bp, Homo sapiens; identical to SEQ ID NO: 67838

SEQ ID NO: 70534 - DNA, 509 bp, Homo sapiens
tggcatgtgaggacagcccctttcctcatttcatgctcttaatggagaagccactgcaagatatttaatgtccttcacctgattttccatggccacgcaaaacctggacacaactcagccacccactgacttctttcctgcttctcatcctcaaatacccttcattgggctgttgttttttttgaaaacatcctcccatgagggattccacagtgattccccagaggaaccacagagttgggatgaggacagtgcaagtgtgagagtgctgggtgtgagggcactgggtgtgagggcaccaggtgtgagggtgctgggtgcgagggcaccaggtgtgagggtgctgggtgtgagggcaccaggtgtgagggtgctgggtgtgagggcaccacgtgtgagagtgctgggtgtgagggcaccaggtgtgagggtgctgggtgcatgcaaggatcttgcccaggagggaagagagcttttgattgagaggagggaaacatcctctcagaagt

SEQ ID NO: 70535 - DNA, 565 bp, Homo sapiens
cgggctcaccgctgctgtctcccgctcccaagtctttcttgtgaaatccaaattggattctcttgatcttccatctttccagggcagtgagcttgtccttgttcctgctgcagaagttgtagaaggaactggcctcagagcccacgctgtcctcatcatcctcccgcaccctgctccctgcttctgagctcctgtctgccgcctcctctctcttgctcttggcgtggtacctccgggaagcctccttctcaatctccagcagcctctcgttccatgcgtcccaggtgctctccgaggacatcgagtctgcgcggcgcctcctgccgtggtccgggcggttcagctccagctgctgcttcaggacccagatgtcgtggctgctcacgctctcccaggcgctgctctcgctcagggtgcgccgccgcctccccaccgaggagccagcgtcgctctcctcctctttctcctcctcccttccccacctccggtacccttctgctaaaaacctctcgtttcggctctgccactcgtgaatgatcctctccacgtcctcgtcctcgacccg

SEQ ID NO: 70536 - DNA, 443 bp, Homo sapiens; identical to SEQ ID NO: 67841

SEQ ID NO: 70537 - DNA, 552 bp, Homo sapiens; identical to SEQ ID NO: 67842

SEQ ID NO: 70538 - DNA, 986 bp, Homo sapiens; identical to SEQ ID NO: 67843

SEQ ID NO: 70539 - DNA, 416 bp, Homo sapiens; identical to SEQ ID NO: 67844

SEQ ID NO: 70540 - DNA, 399 bp, Homo sapiens; identical to SEQ ID NO: 67845

SEQ ID NO: 70541 - DNA, 414 bp, Homo sapiens; identical to SEQ ID NO: 67846

SEQ ID NO: 70542 - DNA, 650 bp, Homo sapiens
ccccggaagaccatgcgcagaggggtgctgatgaccctgctgcagcagtcggccatgaccctgcccctgtggatcgggaagcctggtgacaggcccccacccctctgtggggccatccctgcctcaggagactacgtggccagacctggagacaaggtggctgcccgggtgaaggccgtggatggggacgagcagtggatcctggccgaggtggtcagttacagccatgccaccaacaagtatgaggtagatgacatcgatgaagaaggcaaagagagacacaccctgagccggcgccgtgtcatcccgctgccccagtggaaggccaacccggagacggaccctgaggccttgttccagaaggagcagctcgtgctggccctgtatccccagactacctgcttctaccgcgccctgatccatgcgcccccacagcggccccaggatgactactcggtcctgtttgaagacacctcctatgcagatggctattcccctcccctcaatgtggctcaaagatacgtggtggcttgtaaggaacccaagaaaaagtgatgccgcctggcagactcgccatcccccaacgacacagggcaggacagcagaggacgtgctgggattaaacacattccccctctaaaaaaaaaaaa

SEQ ID NO: 70543 - DNA, 519 bp, Homo sapiens; identical to SEQ ID NO: 67848

SEQ ID NO: 70544 - DNA, 584 bp, Homo sapiens; identical to SEQ ID NO: 67849
  misc_feature (1)...(584): n = a,t,c or g

SEQ ID NO: 70545 - DNA, 1430 bp, Homo sapiens; identical to SEQ ID NO: 67850

SEQ ID NO: 70546 - DNA, 770 bp, Homo sapiens
  misc_feature (1)...(770): n = a,t,c or g
gaagggggaagatgagttttgctggtttcttatttggaatttaatatcaagatgcctacgttctannnnnnnnnncctacattctatttttagagaagggaaagaacctgccatcttccctttaaatttacataattctcaaggcctggcgttttaaaaagggcccacttccctgggagcttgcttctggacttcacagcagcagcccagggcagagccagctggagcccgtctcagtgcctctgccttaggctgtaaagcaaactccaggaaaggtgcccgtgggggtggaagtgacggcagggtttgctctggaagtgggggggcaggagccgacccactgccagttgtgttctgtgcaatcctatgcccacgattaacccttcccacgcccttcatccctcccagtttgtccccctggtgtctccacagtcccaaaggcagtagccgctcctctgcagggagaccccgccttggggggacacccgggcggccagcccctctgcgacggcagtcctccccacctcggcatgggcgcgccctggggggctctgcaaggggaaaatgcaaccccccctctccccgccccaggctgtggtttgccgcttcctgggaagaggtggagagatggagcaggacgcacaccggagcagcctggggagcgcgcacacgcgctggacaaagatagcagaggccaagttgggaggggggagtggggctctgctgggagctggacgaaatcgtcgacccggggattccggactagcaga

SEQ ID NO: 70547 - DNA, 558 bp, Homo sapiens; identical to SEQ ID NO: 67852

SEQ ID NO: 70548 - DNA, 443 bp, Homo sapiens
tttcgtggtggctccagagatggcagtgagcgagaggagggggctcggccgcgggagccccgcggagtgggggcagcggctacttctggtactgctgttgggtggctgctccgggcgcatccaccggctggcgctgacgggggagaagcgagcggacatccagctgaacagcttcggtttctacaccaatggctctctggaggtggagttgagcgtcctgcggctgggcctccgggaggcagaagagaagtccctgctggtggggttcagtctcagccgggttcggtctggcagagttcgctcctattcaacccgggatttccaggactgccctctccagaaaaacagtagcagtttcctggtcctgttcctcatcaacaccaaggatctgcaggtccaggtgcggaagtatggagagcagaagacgttgtttatctttcccg

SEQ ID NO: 70549 - DNA, 801 bp, Homo sapiens; identical to SEQ ID NO: 67856

SEQ ID NO: 70550 - DNA, 792 bp, Homo sapiens; identical to SEQ ID NO: 67857

SEQ ID NO: 70551 - DNA, 419 bp, Homo sapiens; identical to SEQ ID NO: 67858
  misc_feature (1)...(419): n = a,t,c or g

SEQ ID NO: 70552 - DNA, 1200 bp, Homo sapiens
ttttttttttttcacattgcagtaaacttctttttaaggtctctgagagttacaataggaacatcatgtgcaaaactgacagccgtccaagggcccagccgacaggactggctctccctgcccgctcggccgggccctccccgagcggggacacactgcagggcttggctgagccctggtggacaaggcaaagagccttccaccccgcactgaggctcgtgtccctcggcagctccctgctccttcacagtagaggacctgggccgcccggggccatctgcaccgggcgcctctccctggccaccaccaagggctgacacgcaggtctgggcagctccttctgggaaggcctatgacgactgcgcggaaggtgtgggtgcccccccatccactgtccatcatgctgagtcctggtccatgctgcagcccagcgcctcaatgtcgctgctgatgtccgagatcatgcggtcccactcatccccctctgagggtgccgaccggtcatcagagctgcccgtggccctgttcccattggtggtggaactggatgtggtgctcagggcccgccggtgcctgccaaagctgtcagtgatgatgccgcggccatccttcacgccaatggtctccaggaagttctcgaagtgctggctgtccttctcagggatgaagggcctcagaccaagcagcaggaacttgcggctgtccccgtagagctgccgcaggttgatgcagaactcgtggatagaggccccattgcggtactcgtgcagcagtgctgcaaactgctggatctcctgtgatgacagcttggtgcgcagcgtcagcatgtagtcctgcagcagctcagtggcgctggcgctcagctcgctctcactgatggtcttgctgtggggtgatgcaccacccacatccacagattcagggaagcagctttacctccttctcaatatagtcgctcagcagtctgtctggctcgacgcgctcaggcaatgacaacaccacagtgtgcagagggcgcctctctgtcaccttctcatgggctttcttatctctactcttttcaccttttaggaatactcgtttaaatggcgagacaattccaggcttcttgcccttcttgccctcctcttccatatcgccgagtgcggctcccgcggtccgcccggcccgccccgggagcccctcgtgccaggcttacgt

SEQ ID NO: 70553 - DNA, 348 bp, Homo sapiens; identical to SEQ ID NO: 67860

SEQ ID NO: 70554 - DNA, 589 bp, Homo sapiens; identical to SEQ ID NO: 67861

SEQ ID NO: 70555 - DNA, 619 bp, Homo sapiens; identical to SEQ ID NO: 67862

SEQ ID NO: 70556 - DNA, 742 bp, Homo sapiens; identical to SEQ ID NO: 67863

SEQ ID NO: 70557 - DNA, 717 bp, Homo sapiens; identical to SEQ ID NO: 67864

SEQ ID NO: 70558 - DNA, 650 bp, Homo sapiens; identical to SEQ ID NO: 70542

SEQ ID NO: 70559 - DNA, 596 bp, Homo sapiens
cccccttgctggtaccatccccatctcatagcaagatgtccccagcccatcacacagctgagggagtgcagagccaggcctggaagccagactccactggcctgcatccttcagccccgggctggggtacgctgtgccccagaccccaagggctccgagccctggcctgtactccacttaccccttttttctccttctccttttcttcctcctcctcaggggcctcagcctctccctctgagcttcccggttttacctgcggaatctcaggggtggccttcagctcctcggaggtcgcaatcaaaggctccccctgcttccatgagtgctgcagggccaaggccttctggcgctccaactcgtgccgtttaagcatccccacaatgccttgtgggctgccggcctgcaggctgccctccaccatctgctccagctgcagcctggccaggtgggctatctgggtgctaagcacctcctccaccgacatgcccgggaagaggttggtcatcagcagggacagctttggttgcttggggttgaggagcaggacagtggccacatcctggcgggccccaaaaatgttctgcagcagctgc

SEQ ID NO: 70560 - DNA, 791 bp, Homo sapiens; identical to SEQ ID NO: 67867

SEQ ID NO: 70561 - DNA, 583 bp, Homo sapiens; identical to SEQ ID NO: 67868

SEQ ID NO: 70562 - DNA, 1322 bp, Homo sapiens; identical to SEQ ID NO: 67869

SEQ ID NO: 70563 - DNA, 873 bp, Homo sapiens; identical to SEQ ID NO: 67870

SEQ ID NO: 70564 - DNA, 431 bp, Homo sapiens; identical to SEQ ID NO: 67871

SEQ ID NO: 70565 - DNA, 1191 bp, Homo sapiens
gtgcaaggtgctgtcactcacgtgtgccctcgaccctcccgttcacccgcagccttctcagcgcctctccctgggccggaggcctcctcaccagcctacctgttgctctggaaaaaaatcccgtcccccgactccgtccctacccccagtcttcggccggctctggcccctggggagggggctgcacggtggaaggaggctggctatgggcccggctgcccgctgcatgtacctcctcctccacccatcgcctcttgcctgggggtaactttgcctggggctcattctttggttaagctgaagctgccgtgggtggccaaaccgcagattctttgcaaattctgagctggcagagctcgcagccgggagccggccggggaagaggagacttgcgcgccgcaagccgcctgcctccaccctgctctccatctcccgctctagaagggctgggaagctcgcggccggggttccacctggaagctgcttgcatggctgaacccagcttaggtccctgacggggctgctggtggaattctcccccttcgaagctggggaggtttaggagggggaaggcttctgtgaagctctcaaaccactaatagagccccctccccaacagtgacggcgcagatgctcccccttttcttagttgacaccaccaggcagcttcctggccgttggtaggttcctgcagctggctgagggaacagggaccggcaggggactttgttaggggagggttgggatgggcagtgggcccctgaaagttaatatattggaacctagctcgagtgtcgttctttccaattccgaaagtagaaagagtaaaaataggggtgattggggtggggttagtagaatgcctctctcagggcgctcccccctcccccaccgttttagagagctaggcctcagccagtcttgccactcccatctcagtgcttcctgaagaggctgttttgagtgttgatgaaaagcaatgcaattatgccaaacagtattgagcagaataatttatttcttttttttcttttgctttaaatcatgaatcccgccaggtacggtggctcacgcctgtcatcccagcactttgggaggccaaggcgggcggattacttaatacttaaggtcaggagttcgagaccagcctggccgatatggtgaaacctcgtctctaccaaaaaaaaaaaa

SEQ ID NO: 70566 - DNA, 945 bp, Homo sapiens
caagtccacagtcctgctcccgtgccgccgagcaccgcccacctcagctgaccagccctgtccgctactaggcctcgcctagaggagggaaaggccgtggcgtccgctccctccgcggctcatggcgacgacgcttggcacatccgggaccctcaggccgctgcagtcgcgtcgccggctgctcgggccccagccccggccgctgtggtgactccgccgcgcctcgccgtcgcccccgtcccgcccgccgccccagccgccagggacatgtctaacctcggaggccgtaggaacgggcctgtcgaagtgcgcctgacagggacatgccacccccgttttaggagaacttttatttggtttgtaaaggaattggaatcacggcgttatcctaccttcaccatttacccctgataaattgtccacgtttatatttgggaatcatattgacaggtcatgaaaatgagaccaaaagatctctggaagcgattaatgataaaatttcatggagaagaaggccttgactacggaggggttgccagggtgatgacaactccgtgagggtggagattatacatctctcatcatttcagcaacaaggaaataaattagtggcagagtaagggtgacttgagatctcttggaagcgaggatcctttaaaaatcctggaatatacactgcagtaaaagaacaaagcatacctcagccttaaatgactgaagaagaatgtcaagtggggaagtggctttggttttcagtttgtgggttctgaatccacacaaagacaggatctgctctctgaaaacctgaattaattattgtccttacctcaataagacaaaaaattagaatcaaaatcgttagtattacagtcacagagatcaccaagattagtttgttgttatagccatatcctggaacttctttcgtgagctaaaaaaaaaaaa

SEQ ID NO: 70567 - DNA, 1240 bp, Homo sapiens
  misc_feature (1)...(1240): n = a,t,c or g
agaacacgaactagtgtctctaagccactataatagttgcacatacaacatgagtgtggtgtggtaggatgcttttccttttaggtctttactgaactttcaagggattaaaaccaatgtatgtcaactttatagcaaaagattcagattctaatcctgaataccaatgcattttagagggggaaaaaatgagggatgtaaaatatatatagtagggtaagagttttgcctttgaacaatgtgcatattctattttaatttggaatgttttatacttgcatttcatgttatgtagtttttggactggactgtgtttttccacaaaatgaaaaatcaactattttgccaccttattattcaacctacctgcccatagttgtctatgccagttactaatctatttaaatttaataaatcaaaagctgtccttagggattggccaagagtcgtaagtccttcagcctgaaggtttttcaattcattcataaacgttgcatggttttctttccatccagccttgatagcatagggcggctcttcgaaagtgaccagcatatacctgtctcctctgctggcagggtcccgggcacggagcttcatgaaggtctctaccgcgcctttggccgtgtccaggtaggtggtgcccagatggctgcgctggttcatagaggcagacgtgtctatcaggaacagtaagatgggcatagtgctggccggggacaccggggcccgaggtggtggagaaagaggagatggtagaggtggaggcgccggtggcggcgaccgccgctagcggggcgggggagcacggcccccgggaggaaaacactgtctgggtctttcctccggctgcggggaattcctcccccgatagttgagaggaaactccccagacccagtgctccccgtcgtaccnccgcctccgcctcctcctgcctgcctgcccgctggggcgggcgcccagccgtctgtctgtcggttcgtcccccccgcctcgggggtcccgtccccgctcccggcccctgtgtgtgtcccagcgggagacgggcctggctccccaccccacccccggtacaggagtggggacctgggagctggcgaagaggggagtgggctgagggaagattggccctggggctgttgggagaagtttcagggactccctccgcacaccggcggtgtcaccactttctcagcccctctcgcggacgcgtgggtcgcgccggggtttccgcaggca

SEQ ID NO: 70568 - DNA, 810 bp, Homo sapiens
aatagaattccgtcggcacacgcacgcgtacctaggatcgtatagagcggccgcaatacatgccgtcttcttaaatcaactcctctctctcaaaaagcctttctttccgtgtcgcgaatatcatccctccggtcctgtcccgcagcgagttccccggcgttgggcttctctattatgccggccagcggagtccaattggtctgacttcactgtccggagaatcctctcgctcccaaacctccctgagagacgacctttaaccgtgccagccggacctgcctacaaagaccctcctcttcaacctgtcccctgtgttactccacaaaacggacacagaagttcgtcaacctgcccagataccacgcctcaaagcggcaacagagccgaacccctttctcaggcttcggacggcccagacccggcatctcttttctcctcttccccagacccttccacctctggcctccgagagccccagcctcagttcccctccaggccctaggaaccctactctccagcagtacagtctgtagacccccgaatcagttccccactcaacctcagaactcctctggcgccgactggccccactcgggcaaaggatggcggtggataggatgacccgaaccaccagagccagcaaacttaccccagccgccatggtgattccgcaaagaaagggggtggggttctcggcgctgccgcaaagtaagcccgcccgggagagaagggagggggaaagaggagagccgtggagaaacagcagccgaaaaacgaggacgaaacagaagacatacgtacgacagttcg

SEQ ID NO: 70569 - DNA, 1120 bp, Homo sapiens; identical to SEQ ID NO: 67876

SEQ ID NO: 70570 - DNA, 906 bp, Homo sapiens; identical to SEQ ID NO: 67877

SEQ ID NO: 70571 - DNA, 526 bp, Homo sapiens
tgggagcaaattggagaaaaggagagaacaagtgttattacaactttgccctcactcagggacaccgcccagaggctacagttggccctgcattgagttatgagtgtccaggtcaccctctggcttggcaggtcaccatgctgtgctcagggacaaggggtggagggagcgggtgctgtctcccttctccaggcccattccaagtagaaaacagagatctcttgctatttgacaacagaaaactttgtacagtagaaaaaatagaaaagaactttgtgaaggatgatactcaagtgactagatttctacaaaatagatgaggtttaggaaactttatggcacagaatttatttgttcggttttgctgcaatagtatttgtcatggtaggtggttttgctgttgtttttgataagcatgtagatgtacctgtatgtgtgcctgggtatctttgtgtgttcctctgtgtctaggtatttctacatgtctgtgcatgtgtgtatatgtgtgggtgtctgtgtgtttctg

SEQ ID NO: 70572 - DNA, 385 bp, Homo sapiens; identical to SEQ ID NO: 67879
  misc_feature (1)...(385): n = a,t,c or g

SEQ ID NO: 70573 - DNA, 696 bp, Homo sapiens
cacgggtcgtgaactcgggggccaggcagtcctcccgcctcagcctgccaaagtgctgagattataggtgtgagccactgcacccagccaaacaattctatttttgtagaataatcaatttccttttagcctaaatttaattagacaccatttaacgtggcatttgttttatgaaatcaatttatgctgtctcttttctaacaaagcaaataaactctaaacatggggttattatgttcatccaggagcatttcatactactgaagctgaagctagttctcagagtttgactcagatatatgccttacctgaaattcctcaagatcaaaatgctgcagaatcgtgggaaaccttagaagcggtatgttaaaaaatgttttctttttggtagttgtgaggcataaaagtaacttcctctccctttcttttaaaggacttaattgaacttagccaactggtcactgacttctctctcctagtgaatgtaagtatataactgttttggatgcagaattgttggattattagaatgagaagcttttataatcactaggcttttaattagaattttaatagaacttataatttttaagactggtattaagccatagatagaagtttaactgttctcaaattccagattaattcaagaaacttttattaagcacttgttatatacaagcagtgtgttagatg

SEQ ID NO: 70574 - DNA, 2693 bp, Homo sapiens; identical to SEQ ID NO: 67821

SEQ ID NO: 70575 - DNA, 773 bp, Homo sapiens
gtgtttccttgatcgcgtaagtatttatttacaaaactcagtcataaaattataaatacaaggtgaggggaagctgttaaccctatttttgttttgttttgcttttaattgtagactccctttacactaaacctcagaatatgggatatctacatctttgaaggagaacgagttcttactgctatgtcttacaccatcttaaaattacacaaaagtaagaaaatgcttaaactcttaaaatttcattaaaaattgaggcttatttaaccttgatttctcattccccacccacttcaacttcattgtcttttaatagtgggttaaattttttttgaaaatcagtggagaaattatcatcaattggtaatgtacttttgtaagttctttctcatgactagaagcttacttcactgcaaaggtctttggttcttttctgtttatattagtgtcattttcacacttttatagaatgcagttagttggtttcactagtaatatttttcgttaagtatttgtttccactgggatcccttgtccttttcatcagtctgaatctcaagtttgcagtaagagaaggaagaccaaagaaaccaggccccctagttcaaaaggctggagagaacgttttctattactgtttccttcatccagggagaatagcacccagctgaactgtggttgggagcacacagacccacttctctacctcagtgcattatggcctctggggcaagttcagccagtgtctataggcagataaatggagcaagatt

SEQ ID NO: 70576 - DNA, 397 bp, Homo sapiens
  misc_feature (1)...(397): n = a,t,c or g
cttcgggtccatttctcttccctcagtgggaaggaattttgatgttggggtgggtggcagtcnccgagacagtgtctccccttccctactttcctgcagggcgtggacgagtggatgtggccagcctggctgtggggctgacaggtggcatcctgctcattgtcctggccggcctgggagccttttggtatctgcgctggcgacagcaccgaggccagcagccctgtccccaagagtaagggggcttcagcgaggagggggtggtggtggagagcaggggagggaggaagcattgacctaaagggatgtgctaaggattgggggcaggcaggcactgatgaaagaccgaaggacccagtcatttggagagtgagtctgtgagctggcttgtgtatgg

SEQ ID NO: 70577 - DNA, 320 bp, Homo sapiens
caagagcacgatgctgaagcactggagagtggggctctggggtcagtgctggatcagaggcaagaggaggtgatgatgcggccctgtcctgagtgacaccaacccctccccagtactacacctgcagctgtgtcctgggcttcattgcctgctccatcttcttgcagatgagcctgaagccaaaggtcatgctgctgacagtggccctggtggcctgtctcgtgctcttcaacctctcccagtgctggcagcgggactgctgcagccaaggcctgggcaacctcactgagcccagtggcaccaacaggtagggccccgcc

SEQ ID NO: 70578 - DNA, 749 bp, Homo sapiens; identical to SEQ ID NO: 67885

SEQ ID NO: 70579 - DNA, 521 bp, Homo sapiens; identical to SEQ ID NO: 67886

SEQ ID NO: 70580 - DNA, 456 bp, Homo sapiens; identical to SEQ ID NO: 67887

SEQ ID NO: 70581 - DNA, 580 bp, Homo sapiens; identical to SEQ ID NO: 67888

SEQ ID NO: 70582 - DNA, 696 bp, Homo sapiens; identical to SEQ ID NO: 67889

SEQ ID NO: 70583 - DNA, 545 bp, Homo sapiens
gaaagtggtgcaggctgtgggattaactgacctgccaatcttagaagtcaagctgcacagggctgttcactctggtccatctgggccctcgcaccaggagctggggggtttcttgtgaatagcctgtcctgaaaacacgagctcccttttatactcaaatacccccatccccacctccctgacaaatgcctgctgtttgggccacggggggcagcatcccagcctcccagccggctccgagccatcctccttctgctcctgctgtttcctgtgcctggagtgctcctttccctcctccacctcccgtgtctgcaggactcccgccgtctctcctcgggctccttgctccaggcccccacggtggggtctcgaactccggctctcagcactcatgtggttcacacaaatgccgcttgcccaggccgtgccctgcacttgagtcccctgctctctcctcctcagcggcagttttgtttttttccggattctgataacaagcaacttctgggtgtcccctggggccgagggcaagcttttctacgaaa

SEQ ID NO: 70584 - DNA, 552 bp, Homo sapiens
tacgaagcttaacccaaagatcatggatgtgggctggccagagctccacgcaccgcccctggataagatgtgtaccatatgcaaggcgcaggagtcctggctgaacagcaacctccagcatgtggtcgtcattcactgcaggggcgggaaaggacgcataggagtggtcatatcatcctacatgcatttcaccaacgtctcagccaggtaggatgaagatgtcagctcgctgtcttgaggtgctaaaagctgagcctgcatggggctgaaggctgtctgcgcgggagctgttctggataccaagggctcggctgacctgtgtttcccatcccccagtgctgggttggtcagtgcctagaaacccagtttccagttaagcgtttacacttgtgaaagtggcattttccaggttgggtgactgtgtgattgattctaagtacttccatggaggcattaaaaaaataagtgaccccactgtcccttgttctttaatagagaattctctaataaaaaataacagagataaaagtcaccattatgaaaaaaaaaaaa

SEQ ID NO: 70585 - DNA, 628 bp, Homo sapiens
cattgtggccagaatcatgagaggaggagctgcagatagaagtggtcttattcatgttggtgatgaacttagggaagtcaacgggataccagtggaggataaaaggcctgaggaaataatacagattttggctcagtctcagggagcaattacatttaagattatacccggcagcaaagaggagacaccatcaaaagaaggcaagatgtttatcaaagccctctttgactataatcctaatgaggataaggcaattccatgtaaggaagctgggctttctttcaaaaagggagatattcttcagattatgagccaagatgatgcaacttggtggcaagcgaaacacgaagctgatgccaaccccagggcaggcttgatcccctcaaagcatttccaggaaaggtgagctgctggtacataataatggcttttctccagctgaccttttgttctctgcaaaatatcattctggcattgatgtgataaaatatgctataaaaccttgccttagaattttttatcctgtgggtttggatttctgttttgtctaactaagtatgatgaatgaccaaaaataatatgacagttctgggtcatattagatttttgttatgaagcaaatacgata

SEQ ID NO: 70586 - DNA, 171 bp, Homo sapiens; identical to SEQ ID NO: 67894

SEQ ID NO: 70587 - DNA, 841 bp, Homo sapiens; identical to SEQ ID NO: 67895

SEQ ID NO: 70588 - DNA, 689 bp, Homo sapiens; identical to SEQ ID NO: 67896

SEQ ID NO: 70589 - DNA, 454 bp, Homo sapiens; identical to SEQ ID NO: 67897

SEQ ID NO: 70590 - DNA, 884 bp, Homo sapiens; identical to SEQ ID NO: 67898

SEQ ID NO: 70591 - DNA, 547 bp, Homo sapiens; identical to SEQ ID NO: 67899

SEQ ID NO: 70592 - DNA, 820 bp, Homo sapiens; identical to SEQ ID NO: 67900

SEQ ID NO: 70593 - DNA, 371 bp, Homo sapiens; identical to SEQ ID NO: 67901

SEQ ID NO: 70594 - DNA, 396 bp, Homo sapiens
aaccgattacgtgttgatgatgaaaatggacgagcaaaacatgcagggcggaaattcgctgctgctgcatctcgatgactgggaacatctcgacaactatttccgccacccgctggcgcgtcgcccgatgcgctttgccgcgccgccgagtaaaaacgtcagcaaagatgtttttcatccggtgttcgacgtcgatcaacagggtcgcccggtgatgcgctatatcgaccagttcgtccagccgaaagacttcgaagaaggcgtgtggttgagcgagctttccgacgccattgaaaccagcaaaggcattctttctgtgcccgttcccgttggcaaattcctgttgattaacaacctgttctgactgcacggtcgcgaccgctttactccgcaccc

SEQ ID NO: 70595 - DNA, 359 bp, Homo sapiens; identical to SEQ ID NO: 67903

SEQ ID NO: 70596 - DNA, 633 bp, Homo sapiens
tccacccaataggagggtggtagcgggggtcaccgtccggcagtgaaaggcggttacttcccggttccaccggtagactcggctcaggatattcgttctgaaatgtgtctggtgatggaacagatgggtctggtggttgaagcccatcaccacgaagtagcgactgctggtcagaacgaagtggctacccgcttcaataccatgaccaaaaaagctgacgaaattcagatctacaaatatgttgtgcacaacgtagcgcaccgcttcggtaaaaccgcgacctttatgccaaaaccgatgttcggtgataacggctccggtatgcactgccacatgtctctgtctaaaaacggcgttaacctgttcgcaggcgacaaatacgcaggtctgtctgagcaggcgctgtactacattggcggcgtaatcaaacacgctaaagcgattaacgccctggcaaacccgaccaccaactcttataagcgtctggtcccgggctatgaagcaccggtaatgctggcttactctgcgcgtaaccgttctgcgtctatccgtattccgcaggtctattaaggaggagcacgtcatgttaatgtcagtctccccgatctccgggtacggacattgaatccgtaa

SEQ ID NO: 70597 - DNA, 800 bp, Homo sapiens
agcgaaacggcgcagcaaattatcgaccgtctgcgcgtaaaactggcgaaagaaccgggggcgaatctgttcctgatggcggtacaggatattcgcgttggtgggcgtcagtcgaacgccagctaccagtacacgttgttatccgacgacctggcggcactgcgagaatgggagccgaaaatccgcaaaaaactggcgacgttgccggaactggcggacgtgaactccgatcagcaggataacggcgcggagatgaatctggtttacgaccgcgacaccatggcacggctgggaatcgacgtacaagccgccaacagtctgttaaataacgccttcggtcagcggcaaatctcgaccatttaccagccgatgaaccagtataaagtggtgatggaagtggatccgcgctatacccaggacatcagtgcgctggaaaaaatgttcgttatcaataacgaaggcaaagcgatcccgctgtcatatttcgctaaatggcaaccggcgaatgccccactatcggtgaatcatcagggattatcggcggccttgaccatttcgtttaacctgccgaccggaaaatcgctctcggacgccagtgcggcgatcgatcgcgcaatgagccagcttggtgtgccttcgacggtgcgcggcagttttgccggcccggcgcaggtgttccaggagaccatgaactcgcaggtgatcctgattattgccgccatcgccacggtgtatatcgtgctgggaatcccttacgagaggtacgtacatccgccgacgattctcttgtgaaggccgcc

SEQ ID NO: 70598 - DNA, 656 bp, Homo sapiens
  misc_feature (1)...(656): n = a,t,c or g
aattagagaagaaaatgactttcgcatctcggtggctggcgcacaggagaagccagcnctgctcagaataggcaatgactggtgcattccgaaaggaataacgccgacgacgcacatcattaaattaccgattggcgaaatcaggcagcccaatgcgacgctcgatctcagccaaagcgttgataatgagtattactgtctgctgctggcgaaagaacttgggttgaatgttccggacgcagaaatcattaaagcgggaaatgtgcgcgcgttagcggtcgaacgttttgacaggcgttggaatgctgagcgaacggttttacttcgcttgccacaggaggatatgtgtcagacattcggtttaccttcatcggtgaaatatgaatcagatggaggcccaggcatcgcgcggatcatggcttttttgatggggtccagcgaggcgctgaaagatcgctatgattttatgaaattccaggtcttccagtggttgattggcgcaacggacggtcatgcaaaaaacttctccgtatttattcaggctggcggcagttatcgactcacgccattttatgacatccaagcagcataagcggtctatggcggtgcgggtatcagcctcagcgatctacgggtcggacgattgaattcgtagt

SEQ ID NO: 70599 - DNA, 765 bp, Homo sapiens; identical to SEQ ID NO: 67907

SEQ ID NO: 70600 - DNA, 427 bp, Homo sapiens
aaatcatcacacctgatgcgatgggttgccagaaagatattgcagagaagatacaaaaacagggaggtgattatttattcgctgtaaaaggaaaccaggggcggcttaataaagcctttgaggaaaaatttccgctgaaagaattaaataatccagagcatgacagttacgcaatcagtgaaaagagtcacggcagagaagaaatccgtcttcatattgtttgcgatgtccctgatgaacttattgatttcacgtttgaatggaaagggctgaagaaattatgcgtggcagtctcctttcggtccataatagcagaacaaaagaaagagccagaaatgacggtcagatacaatatcagttagttgggtatcgccggggatatatcagtcacagcgatctccgggacggacgattgaatctcgtaatc

SEQ ID NO: 70601 - DNA, 465 bp, Homo sapiens
ccagggtcagtgcgttaggtcccgcagaactccctgagacactagctacactgcagcttaagtaggcgggtccgggatccagcacccagtgtttcttatggaatgacaagtcctgaattcctaacaaaggtcaggcaggtgtttgatctgtcgaatggggaatcccctgagagtctgaacgaggaaagcgctgctctcgccttagaaagcaaaaccagtgcgagctctgggcctcaccgtcagggctctgtcctcctcccgcctgaggctctaagggaaacctgcagaaatgggcagcaggcgcgggggagctggggcagaattgcacacacacaaactacaactctgcctttaaactaaaaacatgcctccctcatttaggtacaaagatggcagtctgatttgccaggcggctgaaccgggaaagtacaggattgagagcaactatggcgtacacacactgga

SEQ ID NO: 70602 - DNA, 376 bp, Homo sapiens
gcactgggttcagccagggcacgacactggcctttgtcatggctgcaggatttattgcagatacggccagcctgccgctcattgtttctaacctggtgaatatcgtctcggcggacttcttcggtctgagctttgcgcagtacgcctccgttatgatctccgtggatgcggcagcgattgcggccacgctgattatgctgtatctcttctttcgcagagttattccggcaacgtattaagtttcgctgctgaagacgcctgccagtgcgatcaaggatctggcaaccttcagggcgggctggattgtcctgttattgctgcttgtcggtttcttctttctggagccgcagggaatcctggtcagtgcgatatcgtc

SEQ ID NO: 70603 - DNA, 428 bp, Homo sapiens; identical to SEQ ID NO: 67911

SEQ ID NO: 70604 - DNA, 336 bp, Homo sapiens
gccgcctgaaagcgaaaggactgaaaatctgcgtctggattaacccctatatcggtcaaaaatcccccgtctttaaagagttacaagagaaaggctatttactcaaacgcccggacggttcgctatggcagtgggataaatggcagccaggtctggcgatttatgactttaccaatccggatgcctgcaaatggtacgccgacaaactgaaaggtctggtcgcgatgggcgttgattgctttaaggccgactaaggcgaatgtgtcgcgtcatatgatcagtgtttcagcggttccgatctacgggtacggacattgaattcgtaatgatggtaac

SEQ ID NO: 70605 - DNA, 262 bp, Homo sapiens
agacacttacccgatggcggcaaaacgccacagcattgagtatctgcgtgaagtcgctcacctgcgtccgcgcacaaacctgattggtgccgtcgcgcgcgttcgccatacgctggcgcaggcgctgcatcgcttctttaacgagcagggattcttctgggtttcaacgccactgattaccgcatatgatacctaaggtgcaggcgaaatgttccgcgtctgtccgctggatctccgggtacggacctcgaattcgataatg

SEQ ID NO: 70606 - DNA, 155 bp, Homo sapiens
tggttatggctgcattacagcaatcgttctggtcgcagtgaattgtcgcaaagtgagcagcagcgattagcgcaactggctgatgaagcaaaacggatgcgcgatcgtattcaggcgcagtaatctgtttttgacgcgggtcatcccagccggag

SEQ ID NO: 70607 - DNA, 378 bp, Homo sapiens
ccattatttgaaaatgctcactcaggcgcggcgggaagtgattatcgccaacgcctacttcttccccggctatcgatttttacacgccttgcgtaaagcggcacggcgcggggtgcggatcaaactgatcattcagggcgaaccggatatgccgattgtcagagtcggtgcgcgcttgctgtataactatctggttaaaggcggcgttcaggtttttgagtaccgccgccgcccgctccacggcaaagtggcattgatggacgatcactgggcgacagtagggtccagtaatctccatccggtcagttagtcggggaatctccaagcaaatgtcatcctccacgttctacgggtaccgacattgaatccgtaatcatg

SEQ ID NO: 70608 - DNA, 508 bp, Homo sapiens; identical to SEQ ID NO: 67916

SEQ ID NO: 70609 - DNA, 469 bp, Homo sapiens; identical to SEQ ID NO: 67917

SEQ ID NO: 70610 - DNA, 484 bp, Homo sapiens; identical to SEQ ID NO: 67918

SEQ ID NO: 70611 - DNA, 595 bp, Homo sapiens; identical to SEQ ID NO: 66260

SEQ ID NO: 70612 - DNA, 593 bp, Homo sapiens; identical to SEQ ID NO: 66261

SEQ ID NO: 70613 - DNA, 677 bp, Homo sapiens; identical to SEQ ID NO: 66262

SEQ ID NO: 70614 - DNA, 993 bp, Homo sapiens; identical to SEQ ID NO: 66263

SEQ ID NO: 70615 - DNA, 557 bp, Homo sapiens; identical to SEQ ID NO: 66264

SEQ ID NO: 70616 - DNA, 433 bp, Homo sapiens
cgcagttagactcccagagccaggaagtaagttcccaaggtcacatcagaagccaactgcatggctgtgtgaggacccatgcctcctgccttccagggtaggggtctattccctaaaaccaccccttcaagcttaggaacccaggaggaccaggagtggttccagtggccatgataccagggatgaggggccacaaacccttctggttaactctcccattgggtagggctcaactctctctggacacattaatttctctacaatccttccttggctcgcggggctcatacagctcaaacaggaggaaaagcatctctgggagcaggcagcctcatgtgtctgattcgctgctcaattccaggcaaaactacaagaattactccatggagtcaaggacacactttcgaatccaggcagccacactccaagccaa

SEQ ID NO: 70617 - DNA, 724 bp, Homo sapiens; identical to SEQ ID NO: 66266

SEQ ID NO: 70618 - DNA, 347 bp, Homo sapiens; identical to SEQ ID NO: 66267

SEQ ID NO: 70619 - DNA, 439 bp, Homo sapiens; identical to SEQ ID NO: 66268
  misc_feature (1)...(439): n = a,t,c or g

SEQ ID NO: 70620 - DNA, 439 bp, Homo sapiens
gagtaccgtgttggtgagggcatcaccctcaaccaggtggctgtgggctgcgagtgccaggactgtctgtgggcacccactggaggctgctgcccgggggcgtcactgcacaagtttgcctacaatgaccagggccaggtgcggcttcgagccgggctgcccatctacgagtgcaactcccgctgccgctgcggctatgactgcccaaatcgtgtggtacagaagggtatccgatatgacctctgcatcttccgcacggatgatgggcgtggctggggcgtccgcaccctggagaagattcgcaagaacagcttcgtcatggagtacgtgggagaggtagggagatgggacccggtgtgtgtgtgcagctcttcccaccctgtgttcacagtgtgcacccggctctcctcactgtgtgtctgaaactccctgctttccc

SEQ ID NO: 70621 - DNA, 435 bp, Homo sapiens; identical to SEQ ID NO: 66270

SEQ ID NO: 70622 - DNA, 512 bp, Homo sapiens; identical to SEQ ID NO: 66271

SEQ ID NO: 70623 - DNA, 345 bp, Homo sapiens; identical to SEQ ID NO: 66272

SEQ ID NO: 70624 - DNA, 423 bp, Homo sapiens
cctgaagtacttgagcaactaagtggattgaaagagttttggatggatgctaatagactgacttttattccagggtttattggtagtttgaaacagctcacatatttggatgtttctaaaaataatattgaaatggttgaagaaggaatttcaacatgtgaaaaccttcaagacctcctattatcaagcaattcacttcagcagcttcctgagactattggttcgttgaagaatataacaacgcttaaaatagatgaaaaccagttaatgtatctgccagactctataggagggttaatatcagtagaagaactggattgtagtttcaatgaagttgaagctttgccttcatctattgggcagcttactaacttaagaacttttgctgctgatcataattacttacagcagttgcccccagtt

SEQ ID NO: 70625 - DNA, 369 bp, Homo sapiens; identical to SEQ ID NO: 66274

SEQ ID NO: 70626 - DNA, 481 bp, Homo sapiens; identical to SEQ ID NO: 66275

SEQ ID NO: 70627 - DNA, 357 bp, Homo sapiens
tgaagtacttttcaagcctctgttcgtaccacatttgctgatgccccactggctggaaaaagaccagtccagagagaccgtgggaagaccactacctcagggcatggatggagggaggagagtaatgtgtggtcatttttgcagtctactccaaactccctttacaatttggactgtttttaggggagtccaatataaattataacacggatctgtacaattgcacattccctgcactcatcgaagactggcgtgaaaccttccaccgtggttcccaggggcagacggagcgtttcttcccatttggacttgtccaggtacgatgtgggtaaaggcttctctgttcatgtcaacacc

SEQ ID NO: 70628 - DNA, 352 bp, Homo sapiens; identical to SEQ ID NO: 66277

SEQ ID NO: 70629 - DNA, 350 bp, Homo sapiens
actcctggagtaatccaaccattgcacattaaatccaagacaagtcaaagtcatctcgaattcgttcctaaaggaagtatctatgcacctccaaataacagattcaaagacaaaccaccccataacttaaccatttattttggaagtgcttactatgtacttacaaggaagtttgtagagttcatactgactgacatccatgcaaaagacatgcttcagtggtccaaagacatccgcagcccagagcaacactactgggtgaccctgaaccgactaaaaggtaagaaagacccaccgatatggatgcccgtgcagtcagcagcaacagcagcagatagattgattgattg

SEQ ID NO: 70630 - DNA, 363 bp, Homo sapiens; identical to SEQ ID NO: 66279

SEQ ID NO: 70631 - DNA, 404 bp, Homo sapiens; identical to SEQ ID NO: 66280

SEQ ID NO: 70632 - DNA, 368 bp, Homo sapiens; identical to SEQ ID NO: 66281

SEQ ID NO: 70633 - DNA, 338 bp, Homo sapiens; identical to SEQ ID NO: 66282

SEQ ID NO: 70634 - DNA, 377 bp, Homo sapiens; identical to SEQ ID NO: 66283

SEQ ID NO: 70635 - DNA, 596 bp, Homo sapiens
cagaccatggagagctggccatggaacatcgacagttttataaaatgagcatgtacgaggctagtgcacatgttccgcttttgatgatgggaccaggaattaaagccggcctacaagtatcaaatgtggtttctcttgtggatatttaccctaccatgcttgatattgctggaattcctctgcctcagaacctgagtggatactctttgttgccgttatcatcagaaacatttaagaatgaacataaagtcaaaaacctgcatccaccctggattctgagtgaattccatggatgtaatgtgaatgcctccacctacatgcttcgaactaaccactggaaatatatagcctattcggatggtgcatcaatattgcctcaactctttgatctttcctcggatccagatgaattaacaaatgttgctgtaaaatttccagaaattacttattctttggatcagaagcttcattccattataaactaccctaaagtttctgattctgtccaccagtataataaagagcagtttctcaagtggaaacaaagtataggacagaattaaaaaaagtatagcaaatcttaggtggcgtgtatt

SEQ ID NO: 70636 - DNA, 484 bp, Homo sapiens; identical to SEQ ID NO: 66285

SEQ ID NO: 70637 - DNA, 362 bp, Homo sapiens; identical to SEQ ID NO: 66286

SEQ ID NO: 70638 - DNA, 362 bp, Homo sapiens; identical to SEQ ID NO: 66287

SEQ ID NO: 70639 - DNA, 401 bp, Homo sapiens; identical to SEQ ID NO: 66288
  misc_feature (1)...(401): n = a,t,c or g

SEQ ID NO: 70640 - DNA, 387 bp, Homo sapiens; identical to SEQ ID NO: 66289

SEQ ID NO: 70641 - DNA, 420 bp, Homo sapiens; identical to SEQ ID NO: 66290
  misc_feature (1)...(420): n = a,t,c or g

SEQ ID NO: 70642 - DNA, 469 bp, Homo sapiens; identical to SEQ ID NO: 66291

SEQ ID NO: 70643 - DNA, 376 bp, Homo sapiens; identical to SEQ ID NO: 66292
  misc_feature (1)...(376): n = a,t,c or g

SEQ ID NO: 70644 - DNA, 391 bp, Homo sapiens; identical to SEQ ID NO: 66293

SEQ ID NO: 70645 - DNA, 630 bp, Homo sapiens; identical to SEQ ID NO: 66294

SEQ ID NO: 70646 - DNA, 750 bp, Homo sapiens; identical to SEQ ID NO: 66295

SEQ ID NO: 70647 - DNA, 592 bp, Homo sapiens
atgacccaggtttctttcacggacgacacgaccgccagagtcaccacaactttaacactctcgttctcgcgcccctgtgagctccctccggggcaaccgagaatgtcgtgggaatggaaagactgtctgcaaatgtggagccccgaactgcagtggcttcttgggtgtaaggccaaagaatcaacccattgccacggaagaaaagtcaaagaaattcaagaagaagcaacagggaaagcgcaggacccagggtgaaatcacaaaggagcgagaagatgagtgttttagttgtggggatgctggccagctcgtctcctgcaagaaaccaggctgcccaaaagtttaccacgcagactgtctcaatctgaccaagcgacccactttgggtctcctgagagctgtactgtcgctcagtaaagctcctcttcaccttgttcatgctccagttgtccgtatacctcattgttcctgaatgcaggacaagaacctgggacctgtcaaatggtggggctgaaagagcggtaacacaaacagggctgaaatatgtctcccttgctcgccgtgttgcaggcaacaagaaggagagaagagg

SEQ ID NO: 70648 - DNA, 351 bp, Homo sapiens; identical to SEQ ID NO: 66297

SEQ ID NO: 70649 - DNA, 374 bp, Homo sapiens; identical to SEQ ID NO: 66298

SEQ ID NO: 70650 - DNA, 392 bp, Homo sapiens
taccaccacgcccagccccaacatatgactttctgtgtgttttccaagagtctagtgtgaggtcagaggtcagacaggtcatcaggaattttgcttcaagtgagttgctgctgccctgactcttttcccccagcaattaagtccccccggggcttgggggttgggtttgtcagcttgcttttgctgtgctgagggcttctccagactgaatcagcaggtcctcagctcatctctgctccttctctctaggaccaactgcccctgtaagtacagttttttggataacctcaagaagttgactcctcgacgcgatgttcccacttaccccaaggtaagatgagattccggcccagaagaagctgcagctgtgtccccagccccacgccgagccc

SEQ ID NO: 70651 - DNA, 535 bp, Homo sapiens; identical to SEQ ID NO: 66300

SEQ ID NO: 70652 - DNA, 602 bp, Homo sapiens; identical to SEQ ID NO: 66301
  misc_feature (1)...(602): n = a,t,c or g

SEQ ID NO: 70653 - DNA, 501 bp, Homo sapiens; identical to SEQ ID NO: 66302

SEQ ID NO: 70654 - DNA, 352 bp, Homo sapiens; identical to SEQ ID NO: 66303

SEQ ID NO: 70655 - DNA, 343 bp, Homo sapiens; identical to SEQ ID NO: 66304

SEQ ID NO: 70656 - DNA, 282 bp, Homo sapiens
gaatgccaaatttgaagaagaatcaaaagaacctgttgctgatgaagaagaggaagacagtgatgatgatgttgaacctattactgaatttagatttgtgcctagtgataaatcagcgttggaggcaatgttcactgcaatgtgcgaatgccaggccttgcatccagatcctgaggatgaggattcagatgactacgatggagaagaatatgatgtggaagcacatgaacaaggacagggggacatccctacattttacacctatgaagaaggattatccca

SEQ ID NO: 70657 - DNA, 383 bp, Homo sapiens; identical to SEQ ID NO: 66305

SEQ ID NO: 70658 - DNA, 359 bp, Homo sapiens; identical to SEQ ID NO: 66306

SEQ ID NO: 70659 - DNA, 89 bp, Homo sapiens
aataaatttgggggccccccgggttttttccccccccccgtttttaaaaaccgcccccggaaaataatttttggggcccaaaaaaaaaa

SEQ ID NO: 70660 - DNA, 331 bp, Homo sapiens; identical to SEQ ID NO: 8415

SEQ ID NO: 70661 - DNA, 392 bp, Homo sapiens
ctggaaatggaagccttacgatagccagatcaagcagaaagttgacattctggtggcaatatttgaaggcgtagaagagcgcagagatgaagttctaagtcctgactatgatcttgtgggtgaagaaataatgtcctgtggtatggatcattgtcttaagctttgattcttgacatagtagtcaataccacatcagttggctcatcagaaaagtgactgtgaaatttggcaaggttggcagtttatgtgagttatgtggaatgtggtattttatgactgagagagtcaggaagagagtagataatttccctacatcatgcaaacttgggtgttctacaggagtgttgtcagttgcatgtggctcagcaatcccttgatacattttgttctcc

SEQ ID NO: 70662 - DNA, 684 bp, Homo sapiens
tttttttttactctaacatacaacctataataattctgtataaccacaattgcagttttctttgtttcataatcaactttggccctgtgcattcgatagaatgactgaattagtgtggcagcccggtgcatattttgaatatcctttcgtactttaaagcctctgtaataagactgtatacaaataactgcttgggtacgcactgcagttagttttctgtatcttctttgaatagaaactactgttgctctaatgtggagataatgcttccttattttaaaggctttacaatgcttctgaataataatggcagcctggtgctgttcctgaatctgtttttttatgttcatgtcctgaaaacctgcctgaacacaagtctctttcttaagttcattgtgttgaaatactttctgtttctttttatttgctctatatttttcttgtatgatttttgtagcccactgaagcttttggtagaaacaatactgcctatacattctgtaggtgctttgtattacgatagaagctttgtgtttttcccttaaaagttgtcttgctttcattcctttatatgcagcctgaataaccacagcagaatgccattgtctgatataattttctctttgcaattttgcagctctatatgttcgataatgttgctgaattagaattgaagcatgtttc

SEQ ID NO: 70663 - DNA, 341 bp, Homo sapiens; identical to SEQ ID NO: 66310

SEQ ID NO: 70664 - DNA, 79 bp, Homo sapiens; identical to SEQ ID NO: 66311

SEQ ID NO: 70665 - DNA, 377 bp, Homo sapiens
  misc_feature (1)...(377): n = a,t,c or g
ntattttcatcccagttgttcaccgtggtaagactacgctggaaaactgtgtgctgcagtgtgagacgaccggagtcacagtgcggacatcagcagagtttctaatgaagaactcggatttatatggcgccaaggtagaagctcttgtcctcttggggaagtagtttgtgtttaagttgtaaatgaatatatgaaatatgggaccaagatgtatgtgtgtactcccactctcttcagacagtcatctctaccaagtcagtcaaactcaactgtgcaagggtcttctcatgtagcattttcaaatgataggaagaaaagtaatacatctcacaatgactttatgtagctttaagagaggtttagacccttaaaattat

SEQ ID NO: 70666 - DNA, 622 bp, Homo sapiens; identical to SEQ ID NO: 66313

SEQ ID NO: 70667 - DNA, 345 bp, Homo sapiens; identical to SEQ ID NO: 35537

SEQ ID NO: 70668 - DNA, 207 bp, Homo sapiens
cggccgcgtcgtcgggcactgtccggggagccacgggcatcttacctctctccttcgtgaagatcctcaaagtcttccctgaggaggacgaccccaccaactggctgcgttgctactactacgaaggacccctgaggtcacgtgcctggtggtgaacgtgagccacgaagaccccgaggtccagtccaagtggtacgtgatcggccc

SEQ ID NO: 70669 - DNA, 397 bp, Homo sapiens
tatcagcttaaagataacaaaatgtctcatcacacttttaatcgtatctttagagggtgaatattgttggggaaaaaagatgcttactcagagacaacaagatagacaatatcctgtcttcaagagagcttatcatagtaaaagaaaattataaatttttataattgcttttcacaaaataaacagggttatatagaagagaataaaatttcagcaagaagaaaaaggaaagaggactttacctagggtagttatgaaagacttgtcttatatggcatttgagctgagactcaaggaaaaggaagttggccaagtgataagccagtccaagtcttccactaaaaagagcaagaaagaagccaaagaacccgagaaagatggtgagacctctggcagc

SEQ ID NO: 70670 - DNA, 389 bp, Homo sapiens; identical to SEQ ID NO: 66317

SEQ ID NO: 70671 - DNA, 286 bp, Homo sapiens; identical to SEQ ID NO: 66318

SEQ ID NO: 70672 - DNA, 465 bp, Homo sapiens
ggaggcaggagatgcggatgaagatgaggctgatgctaatagctctgactgtgaaccagaggggcccgtggaagcggaagagcctcctcaggaggatagtagcagtcagtcagactctgtggaggaccggagtgaggatgaggaagatgaacattcagaggaggaagaaacaagtggaagttcagcatcagaggaatctgagtctgaagagtctgaggatgcccaatcacagagccaagcagatgaagaggaggaagatgatgattttggggtggagtacttgcttgccagggatgaagagcagagtgaggcagatgcaggcagtgggcctcctactccagggcccactactctaggtccaaagaaagaaattactgacattgctgcagcagctgaaagtctccagcccaagggttacacgctggccacgacccaggtaaagacgcccattcccctgcttctgcg

SEQ ID NO: 70673 - DNA, 354 bp, Homo sapiens
ctaaaaaacctaagggagttactgcttgaagacaaccagttaccccaaataccctctggtttgccagagtctttgacagaacttagtctaattcaaaccaatatatacaacataactaaagagggcatttcaagacttataaacttgaaaaatctctatttggcctggaactgctattttaacaaagtttgcgagaaaactaacatagaagatggagtatttgaaacgctgacaaatttggagttgctatcactatctttcaattctctttcacacgtgccacccaaactgccaagctccctacgcaaactttttctgagcaacacccagatcaaatacattagtgaagaagat

SEQ ID NO: 70674 - DNA, 210 bp, Homo sapiens; identical to SEQ ID NO: 66321

SEQ ID NO: 70675 - DNA, 378 bp, Homo sapiens
gaaaaaaattaacctggcgcatgtggcgcatgtgaagaagccttgaggcggttctcaggctttactagtcataaatgtggtcatcgtggagacgtcccatacaaatgtgaagaatgtggcaaagttttcaatcgatgttcaaacctaacaaaacataaaagaattcatactggagagaaaccctacaaatgtgacgaatgtggcaaagtttttaattggtggtcacaactaactaaccataagaaaattcatactggagagaaaccctacaaatgtgatgaatgtgacaaagtttttaattggtggtcacaactaactagccataagaaaattcatagtggagagaaaccatccccatgtgaagaatgtggcaaagcc

SEQ ID NO: 70676 - DNA, 343 bp, Homo sapiens; identical to SEQ ID NO: 36024

SEQ ID NO: 70677 - DNA, 338 bp, Homo sapiens
cgtcccagctgcggttgcaggagtcgggcccaggcctggtgaagccttcggaaaccctgtccctcacctgttctgtctctggtgactccatcaaaaatttttattggagttggatccggcagaccccagggaagaaactgcaatggatgggctatgtccaccatagtggggccaccgattacaacccctccctctggaatcgaatcttcatgtcaatagacacgtccaggagccgattctccctgaggctgagttctgtcaccgctgcggacacggccacatatttttgtgcgagaggttgtactgccggcatgtgctattccagggacgactattac

SEQ ID NO: 70678 - DNA, 361 bp, Homo sapiens; identical to SEQ ID NO: 8773

SEQ ID NO: 70679 - DNA, 720 bp, Homo sapiens; identical to SEQ ID NO: 66326

SEQ ID NO: 70680 - DNA, 324 bp, Homo sapiens; identical to SEQ ID NO: 66327

SEQ ID NO: 70681 - DNA, 342 bp, Homo sapiens; identical to SEQ ID NO: 66328

SEQ ID NO: 70682 - DNA, 310 bp, Homo sapiens; identical to SEQ ID NO: 66329

SEQ ID NO: 70683 - DNA, 502 bp, Homo sapiens; identical to SEQ ID NO: 66330

SEQ ID NO: 70684 - DNA, 353 bp, Homo sapiens
tcaaaggggatgtggatgtgtctttgccaaaattggagggagatttaacaggccccagtgtggatgtggaggtgcctgatgttgagctggagtgtcctgatgcaaagttgaaagggcccaagtttaagatgcctgagatgcacttcaagacccccaagatctccatgcctgatgtgaacttaaacttgaaaggccccaaagtcaaaggggatatggatgtgtctgttcccaaggtagaaggtgaaatgaaagtgccagatgttgacatcagagggcccaaagtggacattgatgccccagatgtggatgttcatggcccagactggcacctgaagatgcctaagatgaaaatg

SEQ ID NO: 70685 - DNA, 338 bp, Homo sapiens
ctgacctgggttttccatattgctattttaaaaggtgtccagtgtgagatggtgttggtggagtctgggggacatgtggaacggccggggggatcaatgagactctcctgtgtagcctctggattcacctatgatgattatggcatgacctgggtccgccaagctccagggaaggggctggagtgggtctctgacattaactggaatggcggcatcacacagtattcagactctgtgaggggccgattcaccatctccagagacaacgccaagaacaccctttatctccaaatgaacagtctgagaagcgaggacccggccttctatctctgtgcgag

SEQ ID NO: 70686 - DNA, 508 bp, Homo sapiens; identical to SEQ ID NO: 66333

SEQ ID NO: 70687 - DNA, 414 bp, Homo sapiens; identical to SEQ ID NO: 20301

SEQ ID NO: 70688 - DNA, 522 bp, Homo sapiens; identical to SEQ ID NO: 66335

SEQ ID NO: 70689 - DNA, 630 bp, Homo sapiens; identical to SEQ ID NO: 66336

SEQ ID NO: 70690 - DNA, 503 bp, Homo sapiens; identical to SEQ ID NO: 66337

SEQ ID NO: 70691 - DNA, 404 bp, Homo sapiens; identical to SEQ ID NO: 66338

SEQ ID NO: 70692 - DNA, 592 bp, Homo sapiens; identical to SEQ ID NO: 66339

SEQ ID NO: 70693 - DNA, 326 bp, Homo sapiens
gagggaggagggagtagacggagagcccgagggaaggagaacgagaacggaacggagaagaagagaggcacgaggaggaagggaaggagcgggaacggggagcgggagagaacaaggagaaaagggagagagagcgacgaacgggacagggaaaagaagaaggaagggaggagaacacgaagagagatgacgagccaacgtgtcctccgcaaaaccttcccaaagttatcctcccttccttaaattgtataactaatcctctcatctttctgactacattatatgttccttgaaagtcatctttatattcccttttgtatttagaa

SEQ ID NO: 70694 - DNA, 376 bp, Homo sapiens; identical to SEQ ID NO: 66341
  misc_feature (1)...(376): n = a,t,c or g

SEQ ID NO: 70695 - DNA, 359 bp, Homo sapiens; identical to SEQ ID NO: 66342

SEQ ID NO: 70696 - DNA, 406 bp, Homo sapiens; identical to SEQ ID NO: 66343
  misc_feature (1)...(406): n = a,t,c or g

SEQ ID NO: 70697 - DNA, 389 bp, Homo sapiens; identical to SEQ ID NO: 66344
  misc_feature (1)...(389): n = a,t,c or g

SEQ ID NO: 70698 - DNA, 354 bp, Homo sapiens
catccaacctgaactgcctatcatgaactgggtgctttatgacccatctagccataaagtgggtcatgctcagcagcattccataatcagatggaagtggtatctacctgatcgggctcgagcaggccctgaaggcacaagtaagttacatgaggaagtggctcaaatgcccatggtctccactcctgccaccctgccttctctttcccagcctgcactgatggcctcagggggagttccctattatcaattgacagaggaagagaaaactagggcctggttcacagatggttctgcacgatatgcaggcaccacccaaaagtggacagctgcagcactacagcccctttccag

SEQ ID NO: 70699 - DNA, 438 bp, Homo sapiens
tttccaatcttcatcatttgatactgaacaacaatcagctgactttaatttcctctacagcgtttgatgatgtcttcgcccttgaggagctggatctgtcctataataatctagaaaccattccttgggatgctgttgagaagatggttagcttgcatacccttagtttggatcacaatatgattgataacattcctaaggggaccttctcccatttgcacaagatgactcggttagatgtgacatcaaataaattgcagaagctaccacctgaccctctctttcagcgagctcaggtactagcaacctcaggaatcataagcccatctacttttgcattaagttttggtggaaaccccttgcattgcaattgtgaattgttgtggttgaggcgtctgtccagagaagatgacttagagacctgtgcttctcctccac

SEQ ID NO: 70700 - DNA, 369 bp, Homo sapiens; identical to SEQ ID NO: 66347
  misc_feature (1)...(369): n = a,t,c or g

SEQ ID NO: 70701 - DNA, 883 bp, Homo sapiens
atttagtaatgttttattagccagctattcagtgacagcattagagattcagctttgtttctcctaataactttgctagggccaataaatgtaagcttgacttttagcaactgttttactatatactgcaaatagagctgcttaaaaagcatattaacaaagccatttgtcaaatggatttgaaaggctttttaaaagtcaccaatgttaatgttttaaaaattgtggggtggagagaaacagtgttggaacagttcagcattttgttttgagattaagtgcaactattgacaaggggattcctgaggtccatgcctcataaacactcagagtgctgtttaccagggtctctggtccctgccagaatataatctctgactaggtttgatctaaaaggaggattctatgcacctgtggcaactggcacttaggcggtgtcttggtgttaacagatttgaattcacatcttctgagcctcaaattgtactcagtgggcgaatacaggcatgcttttgctttggttccatagtatggtaagattaatattaagaaaatagaaggtataacttaattacctttttttctgggactgtgaagaaatccttattggagaagccctcagagctcatgtcacattcatcctctttcctgtccctcaccggattctctctcaatcaggtaggtgaacaatgaagaatcctgctgtgtgcttttagtgtagactgatcattgtctttctcatactgtttcagtatgtctgttttttctttattttccatgtattagtgtattccagatatttgattttatcccccttgtctctgattggggcatactagtgacttgtacatcatgaattaaaaccctttaacttctcattaat

SEQ ID NO: 70702 - DNA, 310 bp, Homo sapiens; identical to SEQ ID NO: 66349

SEQ ID NO: 70703 - DNA, 350 bp, Homo sapiens; identical to SEQ ID NO: 66350

SEQ ID NO: 70704 - DNA, 298 bp, Homo sapiens
aaaagacttaagtactggctgtggtgatggtgaaccaaggatattggaggctagtcaaaggctacaaggacatcctgagaaatatggtaaaggtgaaccaaagactgaaagcaaaagttcgaagtttaaaagtaactcagattctgactataaaggtgaacgcattaactcttcttgggagaaagagacccctggagaaaggtcacacagtcgagtagactctcaaagtgacaaaaaactagaaagacaaagtgaaagatcacaaaatataaataggaaagaagttaaatcacaagac

SEQ ID NO: 70705 - DNA, 282 bp, Homo sapiens
tcatgttattcttaatgtacttacatatttcatcaacatccctgtaggtatcaagtctcacactgttgcctcctcctacataaatacctttctcactttgatactttatgtcaggcacttgggttttgtgcttggcaactccctcctccgcactctaatctgtagcagaagagcaaagcatatatgaaaaggagagaatagcacatgcaaaacaaattataaagccatttattctcagaagagtaaaagaagaggttctcaagcagttaccccccaagaaag

SEQ ID NO: 70706 - DNA, 306 bp, Homo sapiens
agacggctgaaaagggaggggtattgagggcggttcagagggcgaggagaggggcgtagagaacctgtggagaagaagttcactggaggggcattaggcctcgcactatgtatccagatcatcagtaggggaagagaaaagatgggcaatatgtatagtcagacgagaagtgggatcaaacagagggctcatggagaagtaggctacccaccacataaccccatcataggattgcaggagatacagctatagataagaatatccaccagtcggtgagtgagcagatcaagaagaactttgccaaga

SEQ ID NO: 70707 - DNA, 344 bp, Homo sapiens
agtcactggctccctgcacattggccacgcactcacggtggccatacaggatgccctcgtgcgctggcaccggatgcgtggggatcaagtgctgtgggtccctggttcagatcatgcaggaattgctacacaagctgtggtggagaaacaactgtggaaggaacggggagtgaggagacatgagctgagccgggaggccttccttagggaggtgtggcagtggaaggaggcgaaaggtggagagatctgtgagcagctgcgagctctgggtgcctccctggactgggatcgagagtgttttaccatggatgttggctcctcagtggctgtgactgaagcttttg

SEQ ID NO: 70708 - DNA, 256 bp, Homo sapiens
cggccgcgtcgacgaatgccattgtgtaccacggcagccagatcagcaggcagatgatccagcagtatgaaatggtgtacagagacgcccagggaaaccccctttcaggagtcttcaagttccacgtcgtcatcacaacatttgaaatgatcctagcagactgcccagagttgaagaagattcactggagctgtgtgataattgatgaagcccacagactgaagaataggaactgcaaacttctggagggtctaaa

SEQ ID NO: 70709 - DNA, 316 bp, Homo sapiens
ccacactcacatttaatatactgttaggttgtttactttgaggcaatgtcatcctcattagtatagggcattatattcctgaatagcagaatactcctccattcatgaagttcagtattatacattcttattattgcacaacaaatagaagactttggatttccttatataagtaccttgacagatgactaacccatttttcctatgctttacaactatgatcagtaactgtaatttttttaaaggtcctcctggacccccgggtgaaaaaggagatcgaggtcccactggagaaagtggtccacgaggatttcca

SEQ ID NO: 70710 - DNA, 137 bp, Homo sapiens; identical to SEQ ID NO: 66357

SEQ ID NO: 70711 - DNA, 414 bp, Homo sapiens; identical to SEQ ID NO: 66358

SEQ ID NO: 70712 - DNA, 94 bp, Homo sapiens
cggggcatggaccaaggtggctttggtggaggaagccgaggtggccctgaggggccccctggacctgaaatctcaggcatgggagtccgaagat

SEQ ID NO: 70713 - DNA, 325 bp, Homo sapiens; identical to SEQ ID NO: 39179

SEQ ID NO: 70714 - DNA, 339 bp, Homo sapiens; identical to SEQ ID NO: 66361

SEQ ID NO: 70715 - DNA, 599 bp, Homo sapiens; identical to SEQ ID NO: 66362

SEQ ID NO: 70716 - DNA, 381 bp, Homo sapiens; identical to SEQ ID NO: 66363
  misc_feature (1)...(381): n = a,t,c or g

SEQ ID NO: 70717 - DNA, 624 bp, Homo sapiens; identical to SEQ ID NO: 66364

SEQ ID NO: 70718 - DNA, 343 bp, Homo sapiens; identical to SEQ ID NO: 66365

SEQ ID NO: 70719 - DNA, 372 bp, Homo sapiens
agccatctttctttgggctcccagtttacttgggccactataaatagaggatgctgcaggatcaaaatataccacatcaattaaaatcatgtttgtcctccattgactggtaattttaagtaaggggtggaacatttttagaagctcaccagtatgttaaacagattctcaacatcaaatactaccatgataggatgcaaaataattttctggtaatattaattagtggttgatgggcttaattttttttaggtgctgatattgatgcgttgtgtgttgccccaagacatgttgatcgaagtgactttttcacctcattgtatgataagttgaaattacaggaagaagtaaaagatttaagagtgcgtaaat

SEQ ID NO: 70720 - DNA, 265 bp, Homo sapiens; identical to SEQ ID NO: 66367

SEQ ID NO: 70721 - DNA, 551 bp, Homo sapiens; identical to SEQ ID NO: 66368

SEQ ID NO: 70722 - DNA, 724 bp, Homo sapiens
  misc_feature (1)...(724): n = a,t,c or g
agagcgggnnnnnnncctcgaaacctgatagacgttggaattcgaaaaggaagatctgatgaatggtgttaaaaaagaaatctccatttctattattgggaagaagcgtaaaagatgtgttgttttcaatcaaggtgaattggatgctatggaataccatacaaagatcagggagctgattttggatggatctttacagttgatccaggaaggtctcaaaagtggttttctttatccactttttgaaaaacaggacaagggtagtaagcccattactttaccacttgacgcctgcagtttgtcagaattatgtgaaatggcaaagcatttgccttctctgaatgaaatggaacatcagacattacaattggtggaagaggatacatctgttacagaacaggatttatttttgcgagttgttgaaaacaactctagctttacaaaagtgattactttaatgggacagaaatacctgctaccaccgaaaagcagttttcttttatctgacatttcttgtatgcaaccacttctaaactataggaaaacatttgatgtaattgtgatagatccaccatggcagaacaaatcagttaaaagaagtaataggtacagttatttgtcacccctgcaaataaagcaaatacctatccctaaattggctgctccaaactgtcttcttgttacttgggtgaccaatagacagaagcacctacgttttataaag

SEQ ID NO: 70723 - DNA, 344 bp, Homo sapiens; identical to SEQ ID NO: 66370
  misc_feature (1)...(344): n = a,t,c or g

SEQ ID NO: 70724 - DNA, 345 bp, Homo sapiens
aagaatcaggtgaggttaaactcagacctgaagctagaaaacgacttctaagttatataaatgaagagccactagatgctaatgggtatttcaatttgggaatgcttgccatggatgacaaaaaggacaatgaagcagagatttggatgaagaaagccataaagttacaagccgacttccgaagtgctttgtttaatctggctctcctgtattcccagactgcaaaggaattaaaggctttgccaattttggaggagttactcagatactaccctgatcatatcaagggcctcattttaaaaggagacattctgatgaatcaaaagaaaggtcgacgcggccgcg

SEQ ID NO: 70725 - DNA, 320 bp, Homo sapiens; identical to SEQ ID NO: 40292

SEQ ID NO: 70726 - DNA, 338 bp, Homo sapiens; identical to SEQ ID NO: 66373

SEQ ID NO: 70727 - DNA, 334 bp, Homo sapiens; identical to SEQ ID NO: 40420

SEQ ID NO: 70728 - DNA, 302 bp, Homo sapiens
atgaaacatgaagcagaaaaaatccaaaacagaagagcctccttggttttattagcttttatcagcaagacagaaacatctggaaaaatatttttgaccctaagtttacagccaagagggtctttttaaaaatgtctaccccaaatagccaaagcaattttgagcaaaaataacaaagctgcagatagcacactatcttacttcaaaatatactacaaagctatagtaataaaaatagcacaacagtggcataaaaacagacacacagaccagtggaacacaatagatagccaagaaataaa

SEQ ID NO: 70729 - DNA, 310 bp, Homo sapiens; identical to SEQ ID NO: 66376

SEQ ID NO: 70730 - DNA, 330 bp, Homo sapiens; identical to SEQ ID NO: 66377

SEQ ID NO: 70731 - DNA, 305 bp, Homo sapiens
gttcctgagaaagatggagggtcccccatcaccaactacattgtggaaaagagagacgtcaggcgaaaaggctggcaaacagtggatatcactgtcaaggacaccaagtgcacagtcaccccactgactgagggctctttatatgtgttccgagttgctgcagaaaatgctataggacaaagcgactacaccgaaattgaggactctgtgctggccaaagacacctttagtatgctcttgcacttaatctttgtgacaataagtgctctcgcacttactttttgtgacaggagaatcacctttcc

SEQ ID NO: 70732 - DNA, 213 bp, Homo sapiens
cggccgcgtcgacatcgaaagagccatcattttggtgcagactgggcaggaagccctggaaccagcagcacagactcaggcggccccttacccctgccataccagcgacctattcctgaacaacgttggtttcttttttccactgataatgatgctgacgtggatggtgtctgtggccagcatggtcagaaagttggtgtatgagcaggagat

SEQ ID NO: 70733 - DNA, 328 bp, Homo sapiens; identical to SEQ ID NO: 66380

SEQ ID NO: 70734 - DNA, 296 bp, Homo sapiens; identical to SEQ ID NO: 66381

SEQ ID NO: 70735 - DNA, 319 bp, Homo sapiens; identical to SEQ ID NO: 66382

SEQ ID NO: 70736 - DNA, 803 bp, Homo sapiens
ccctgaaaacatttgggagtaaaataaaatgtattagagaagcactaaaagattacggaagaccttttcttttttcttttgttcctcccccaaagtgcccggttcctctctatctagaacatacggttttttgtcttggaaaccttttagtagcacacacttactagtatttatgatactgtttagtaaatggtcaacttagaggctagacctttggatataatctcattgtatgataatttttgtatttatacttttttcctgaaatgttacatttgtcttttaaaattctacttaattatattctaatccttaacttaaaagttaccagcttgcaaacatttgctattccaggctctatatttctcagtatactctcagggtttctttatccctttccactagccttatttcttgtttgtttggtaagtatgaaaaaataaaattgggagactgaaaaaacaatagaatgatgaggatgatgatgatactttaaccctactagtctatgtaagcataaactcattaattgaagaggagttaatgttaaagtccctccacaaggaggtgttataatttgtttttcccccagaacagaccaattatagacttagttgcatttataagctatgttttagcttttctttcctattggattttgtaactgcgacagtccaaggagtgttggtgagcacaatgagttaagtcccagagccagaggtggtgttttcaagcttaggaactggggggtcgggggtagggtcggggggaggtggaaattggctcctgaaattttattctta

SEQ ID NO: 70737 - DNA, 328 bp, Homo sapiens; identical to SEQ ID NO: 66384
  misc_feature (1)...(328): n = a,t,c or g

SEQ ID NO: 70738 - DNA, 2018 bp, Homo sapiens; identical to SEQ ID NO: 66385

SEQ ID NO: 70739 - DNA, 171 bp, Homo sapiens; identical to SEQ ID NO: 66386

SEQ ID NO: 70740 - DNA, 168 bp, Homo sapiens; identical to SEQ ID NO: 66387

SEQ ID NO: 70741 - DNA, 429 bp, Homo sapiens; identical to SEQ ID NO: 66388

SEQ ID NO: 70742 - DNA, 365 bp, Homo sapiens; identical to SEQ ID NO: 66389

SEQ ID NO: 70743 - DNA, 404 bp, Homo sapiens; identical to SEQ ID NO: 66390

SEQ ID NO: 70744 - DNA, 717 bp, Homo sapiens; identical to SEQ ID NO: 66391

SEQ ID NO: 70745 - DNA, 339 bp, Homo sapiens; identical to SEQ ID NO: 66392

SEQ ID NO: 70746 - DNA, 518 bp, Homo sapiens; identical to SEQ ID NO: 66393

SEQ ID NO: 70747 - DNA, 350 bp, Homo sapiens; identical to SEQ ID NO: 66394

SEQ ID NO: 70748 - DNA, 346 bp, Homo sapiens; identical to SEQ ID NO: 66395

SEQ ID NO: 70749 - DNA, 368 bp, Homo sapiens; identical to SEQ ID NO: 66396

SEQ ID NO: 70750 - DNA, 720 bp, Homo sapiens; identical to SEQ ID NO: 66397

SEQ ID NO: 70751 - DNA, 349 bp, Homo sapiens; identical to SEQ ID NO: 66398
  misc_feature (1)...(349): n = a,t,c or g

SEQ ID NO: 70752 - DNA, 343 bp, Homo sapiens; identical to SEQ ID NO: 66399

SEQ ID NO: 70753 - DNA, 359 bp, Homo sapiens
ctctcacctcaaaccctatctttctgggagcccctcctcctcctcgcggtgacctggtcctcccagtgcctcaccggccactcggcagctcccactggttctacctccatggtccacctggacgttggctacagctgcctaacctgtggctgcaccttggtccacgctgcaggcccctctcagcaggtcctcagcaaccccaacctggtccatgctgcaagtacctcttggcaaatcctcagccgcccccacctggtccacgctgcaggtatctctcagcaggtcctcagcagccccagactggtctccattctctatctcctccatccacgccgagccctatgcagtctcctcgtgcc

SEQ ID NO: 70754 - DNA, 353 bp, Homo sapiens; identical to SEQ ID NO: 66401

SEQ ID NO: 70755 - DNA, 391 bp, Homo sapiens; identical to SEQ ID NO: 66402

SEQ ID NO: 70756 - DNA, 529 bp, Homo sapiens; identical to SEQ ID NO: 66403

SEQ ID NO: 70757 - DNA, 367 bp, Homo sapiens; identical to SEQ ID NO: 66404

SEQ ID NO: 70758 - DNA, 376 bp, Homo sapiens
cgtatcgcccgcgttgggaggtaaggggcgcgtcgagagaggcacaggtggggggagttgtaaagagagtatagttagggatgatgggaggtgtgggaggccgggggagcgagggaaatgaggggaagagggggagcctcaccacccgcaccaccctggagcactgtgattgtgccttcatggtagccaatgaggccatctatgacatctgtcgtagaaacctcgatatcgagcgcccaacctacactaaccttagccgccttattagccagattgtgtcctccatcactgcttccgtgagatttgatggagccctgaatgttgacctgacagaattccagaccaacctggtcccctacccccgcatccacttccc

SEQ ID NO: 70759 - DNA, 791 bp, Homo sapiens; identical to SEQ ID NO: 66407
  misc_feature (1)...(791): n = a,t,c or g

SEQ ID NO: 70760 - DNA, 423 bp, Homo sapiens; identical to SEQ ID NO: 66408
  misc_feature (1)...(423): n = a,t,c or g

SEQ ID NO: 70761 - DNA, 939 bp, Homo sapiens
tcggacgccccgggtcgacccacgcgtccggtgagtactctgttttgaaacatatgcttgaactataatgtgctttgttttagttttaaagttaaaaaaaggaaccaatgatttttctttttagtcaaaactctaacctttacagacgttttctgttaatcttcaggtcacaattaagatattattacttcattgactgtgtatgggggggggtgacattttaatctggactccaaatctaaaaatgtacatgttcgcttccattaccaggtacgatttgatagtgttggtggcctgtctaatcatatagcagctctaaaagagatggtggtgtttccattactttatccagaagtctttgaaaaatttaaaattcaacccccaagaggttgtttgttttatgggccacctggaactggaaagactctggttgccagagcacttgccaatgagtgcagtcaaggggataaaagagtagcatttttcatgaggaaaggtgctgattgtctaagtaaatgggtaggagaatctgaaagacagctacgattgctgtttgatcaggcctatcagatgcgcccatcaattattttttttgacgaaattgatggtctggctccagtacggtcatgcaggcaagatcagattcacaggtaaaacttgcttgatggcacttcaacgtttcttcctattccctgagtggtattgatgtgtgagagatagaatgttaaatggtgaaagaaactttataagctagtagttcctttttttggtagtagaaccccagtatatagtacaaaaataaaaaatgtggatggttgcagtggctcatacctgtattcctggcactttgggaggccaaggcaggcagatcacttgaggtcaagagtttgagaccagcctggccaacatggtgaaatcctgtctctactaaaaaaaaaa

SEQ ID NO: 70762 - DNA, 666 bp, Homo sapiens; identical to SEQ ID NO: 66410

SEQ ID NO: 70763 - DNA, 383 bp, Homo sapiens
caacaaccaccccaaacacaccaaccaaaccaaaaacaccacacaccacacccacaacaaaacaccccacccaacacccacaaccaccccaaaccccaccacacacaccaccaaacacaaccacaaacacacacaacaaccaaaacaccccactctccaccacagatccacacaaaccccagggatccagtgggacattcagaccgaatggctcagatgtggctcacagtaaaaatctggcctcctagttttgagctgactcactcaacttggaggaaagatacgtttgagttttatgtcaatccatttagttgggatttggctcctaatcagcaaatatagatttgttcaacaacttgccacagccagaaggctctcgtgcc

SEQ ID NO: 70764 - DNA, 688 bp, Homo sapiens; identical to SEQ ID NO: 66412

SEQ ID NO: 70765 - DNA, 335 bp, Homo sapiens; identical to SEQ ID NO: 66413

SEQ ID NO: 70766 - DNA, 1293 bp, Homo sapiens; identical to SEQ ID NO: 66414

SEQ ID NO: 70767 - DNA, 327 bp, Homo sapiens; identical to SEQ ID NO: 66415

SEQ ID NO: 70768 - DNA, 358 bp, Homo sapiens; identical to SEQ ID NO: 66416

SEQ ID NO: 70769 - DNA, 645 bp, Homo sapiens
ttggcacgaggcctcgtgccaagcttggcacgagggagggcggcgaagaggacccgcaggctgcaaggagcaacagcgatggtgagaaggcaaccaaagtgcaggacatcaaaaacaacctgaaagaggcgattgaaaccattgtggccgccatgagcaacctggtgccccccgtggagctggccaaccccgagaaccagttcagagtggactacattctgagtgtgatgaacgtgcctgactttgacttccctcccgaattctatgagcatgccaaggctctgtgggaggatgaaggagtgcgtgcctgctacgaacgctccaacgagtaccagctgattgactgtgcccagtacttcctggacaagatcgacgtgatcaagcaggctgactatgtgccgagcgatcaggacctgcttcgctgccgtgtcctgacttctggaatctttgagaccaagttccaggtggacaaagtcaacttccacatgtttgacgtgggtggccagcgcgatgaacgccgcaagtggatccagtgcttgaacgatgttactgtcctcttcttactgacgggctgcggtcggtacttcgtgtgcatccagcgggatcagctgactgaccggctgcaatacggttatacactgaatc

SEQ ID NO: 70770 - DNA, 352 bp, Homo sapiens; identical to SEQ ID NO: 66417

SEQ ID NO: 70771 - DNA, 346 bp, Homo sapiens; identical to SEQ ID NO: 66418

SEQ ID NO: 70772 - DNA, 349 bp, Homo sapiens; identical to SEQ ID NO: 66419

SEQ ID NO: 70773 - DNA, 35 bp, Homo sapiens
  misc_feature (1)...(35): n = a,t,c or g
ttttttttttttnctttttttaaaacgggtcttgt

SEQ ID NO: 70774 - DNA, 324 bp, Homo sapiens; identical to SEQ ID NO: 66421

SEQ ID NO: 70775 - DNA, 342 bp, Homo sapiens; identical to SEQ ID NO: 66422

SEQ ID NO: 70776 - DNA, 345 bp, Homo sapiens; identical to SEQ ID NO: 66423

SEQ ID NO: 70777 - DNA, 660 bp, Homo sapiens; identical to SEQ ID NO: 66424

SEQ ID NO: 70778 - DNA, 379 bp, Homo sapiens; identical to SEQ ID NO: 66425

SEQ ID NO: 70779 - DNA, 351 bp, Homo sapiens
  misc_feature (1)...(351): n = a,t,c or g
ctttcatttccctcttcttcacttcgtgtcccctcagtcctttacgctcatgtttcgcttctcattccattttcattcttcccatctctgttttcgtgtctctctcttttctcatcctcttatgctcttagctttctgtgccctctcttactatcagtctcaactctcactgttagactaggtaccaccctgtaggtattctctgagcacttgggctccagctcagcctctgcnccgcccctacccctccagggcaaacgaggagatcgcccaggtccggagcaaggcccaggcggccgcgttggccctccaggccagcctgaggaaggagcagatgcgcatcctcgtgcc

SEQ ID NO: 70780 - DNA, 351 bp, Homo sapiens; identical to SEQ ID NO: 66427

SEQ ID NO: 70781 - DNA, 722 bp, Homo sapiens; identical to SEQ ID NO: 66428

SEQ ID NO: 70782 - DNA, 692 bp, Homo sapiens
ggcacgagcaggcatttcaaattactcttgaatttagggcggaggcagaggatggcttactgctctactgtggggagaacgaacacgggaggggggatttcatgtccctggctatcatccgacgctccctgcagttcaggtttaattgtggaactggggttgccatcatcgtaagtgagaccaaaatcaaactagggggttggcacacggttatgctctacagagatgggctgaacgggctgctgcagctgaacaatggcaccccagtgacaggccagtctcagggccaatacagtaaaattactttccggacacctctctatcttggtggcgctcccagcgcttacttgttggttagagcaacagggacaaaccgaggctttcaaggctgtgtgcagtcgctcgctgtgaatgggaggagaattgacatgaggccctggcccctgggaaaagcactcagtggggctgatgtgggggaatgcagcagtggaatctgtgatgaggcctcgtgcatccatggtggcacctgcacagcaatcaaagccgactcctacatttgcctctgtccccttgggtttaaaggtcgacactgtgaagatggtgagaaagaagcaagttgaaggcggtttctatctgcatgttaatttgtgtaaatgtactttatcatcaatatagtttctttgttaaaaaaa

SEQ ID NO: 70783 - DNA, 365 bp, Homo sapiens; identical to SEQ ID NO: 66430

SEQ ID NO: 70784 - DNA, 313 bp, Homo sapiens; identical to SEQ ID NO: 66431
  misc_feature (1)...(313): n = a,t,c or g

SEQ ID NO: 70785 - DNA, 339 bp, Homo sapiens; identical to SEQ ID NO: 66432

SEQ ID NO: 70786 - DNA, 377 bp, Homo sapiens; identical to SEQ ID NO: 66433

SEQ ID NO: 70787 - DNA, 326 bp, Homo sapiens
cgcctcttgggggctggaagagacagtacagtgtcttctggagtttggtgccaacgtgaacgcacaggtgtgtcgtttctcttttccggggagagaggtgtagccccagcatgagggaagcctcctcctatggcagaggaccttgcacagtccccagttccaggcgctgctgcttcatgaacacacgacctccctagcagcgttcatgatttcaggctgactgtgcttctctgtgcctttgtccttactacaacaggaggaagatttgtttcagctctttctctttgcctcctattcccccttagttacagatttcctctcgtgcc

SEQ ID NO: 70788 - DNA, 477 bp, Homo sapiens; identical to SEQ ID NO: 66435

SEQ ID NO: 70789 - DNA, 388 bp, Homo sapiens; identical to SEQ ID NO: 66436

SEQ ID NO: 70790 - DNA, 892 bp, Homo sapiens; identical to SEQ ID NO: 66437

SEQ ID NO: 70791 - DNA, 401 bp, Homo sapiens; identical to SEQ ID NO: 66438

SEQ ID NO: 70792 - DNA, 1224 bp, Homo sapiens; identical to SEQ ID NO: 66439

SEQ ID NO: 70793 - DNA, 357 bp, Homo sapiens; identical to SEQ ID NO: 66440
  misc_feature (1)...(357): n = a,t,c or g

SEQ ID NO: 70794 - DNA, 1079 bp, Homo sapiens; identical to SEQ ID NO: 66441

SEQ ID NO: 70795 - DNA, 433 bp, Homo sapiens
  misc_feature (1)...(433): n = a,t,c or g
caagtccagtcccaagttaaaggaaggttgaatttcctgaaaaatnaaatgtgggcaaaagggcttcccaaacccagatggggaattaggagatggcttgggaatgacatgatctgaggaagggcctgggtcagggaagagcatgtttgtgtagttggttcataacttctctgggcttctgcttgtctaggtgcaattaacagactttgagaactctgcctatgtggtgtttgtggtactgctcaccagagtgatcctttcctacaaattggattttctcattccactgtcaaaggtaaggatatgtttctttatggtgatgggtatagatctatctgtagatatatttatttatatatgctatttatttcccacctaatttcatttgaaattgtttaccctttgcaataaaatgtttctccatcctcgtgcc

SEQ ID NO: 70796 - DNA, 345 bp, Homo sapiens; identical to SEQ ID NO: 66443
  misc_feature (1)...(345): n = a,t,c or g

SEQ ID NO: 70797 - DNA, 331 bp, Homo sapiens
acatcaatgctccagctttgattcaaagagatcttgatcactttttgcttttgcaaaatatcaccctagtccattacattgatgacagtatgctgattggatccagtgagcaagaagtagcaaacacactggacttattagtgagacatttgcataccagaggatgggaaataaatccaagtaaaattcagggaacttctacctcagtaaaatttctaggggtacagtggtgtggggcctgtcaagatattccttctaaggtgacggacaagttgctgcatttggcccgtcctacaaccaagaaagaggcacaacggctagtgctcgtgcc

SEQ ID NO: 70798 - DNA, 340 bp, Homo sapiens; identical to SEQ ID NO: 66445

SEQ ID NO: 70799 - DNA, 331 bp, Homo sapiens; identical to SEQ ID NO: 66446

SEQ ID NO: 70800 - DNA, 418 bp, Homo sapiens; identical to SEQ ID NO: 66447

SEQ ID NO: 70801 - DNA, 683 bp, Homo sapiens; identical to SEQ ID NO: 66448

SEQ ID NO: 70802 - DNA, 478 bp, Homo sapiens; identical to SEQ ID NO: 66449
  misc_feature (1)...(478): n = a,t,c or g

SEQ ID NO: 70803 - DNA, 1819 bp, Homo sapiens; identical to SEQ ID NO: 66450

SEQ ID NO: 70804 - DNA, 377 bp, Homo sapiens; identical to SEQ ID NO: 66451

SEQ ID NO: 70805 - DNA, 648 bp, Homo sapiens; identical to SEQ ID NO: 66452

SEQ ID NO: 70806 - DNA, 600 bp, Homo sapiens; identical to SEQ ID NO: 66453

SEQ ID NO: 70807 - DNA, 518 bp, Homo sapiens; identical to SEQ ID NO: 66454

SEQ ID NO: 70808 - DNA, 704 bp, Homo sapiens; identical to SEQ ID NO: 66455

SEQ ID NO: 70809 - DNA, 583 bp, Homo sapiens; identical to SEQ ID NO: 66456

SEQ ID NO: 70810 - DNA, 332 bp, Homo sapiens; identical to SEQ ID NO: 66457

SEQ ID NO: 70811 - DNA, 1087 bp, Homo sapiens
  misc_feature (1)...(1087): n = a,t,c or g
ttttntcccnnnnncccggtcgacccacgcgtccgaatagtcctgtaggagtctctaaggttttggtttcaggaggctccacacacaattcagagaaaaagggagatggcactcagaactccgccaatcctagccctagtgggggtgactctgcattatctggcgagttgtctgcttccctacctggcttactgtccgacaagagagacctccctgcttctggtaaaagtcgttcagactgtgttactaggcgcaactgtggacgatcaaagccttcatccaaattgcgagatgctttttcagcccaaatggtaaagaacacagtgaaccgtaaagccttaaagaccgagcgcaaaagaaaactgaatcagcttccaagtgtgactcttgatgctgtactgcagggagaccgagaacgtggaggttcattgagaggtggggcagaagatcctagtaaagaggatccccttcagataatgggccacttaacaagtgaagatggtgaccatttttctgatgtgcatttcgatagcaaggttaagcaatctgatcctggtaaaatttctgaaaaaggactctcttttgaaaacggaaaaggcccagagctggactctgtaatgaacagtgagaatgatgaactcaatggtgtaaatcaagtggtgcctaaaaagcggtggcagcgtttaaaccaaaggcgcactaaacctcgtaagcgcatgaacagatttaaagagaaagaaaactctgagtgtgcctttagggtcttacttcctagtgaccctgtgcaggaggggcgggatgagtttccagagcatagaactccttcagcaagcatacttgaggaaccactgacagagcaaaatcatgctgactgcttagattcagctgggccacggttaaatgtttgtgataaatccagtgccagcattggtgacatggaaaaggagccaggaattcccagtttgacaccacaggctgagctccctgaaccagctgtgcggtcagagaagaaacgccttaggaagccaagcaagtggcttttggaatatacagaagaatatgatcagatatttgctccctaaggaaa

SEQ ID NO: 70812 - DNA, 328 bp, Homo sapiens; identical to SEQ ID NO: 66459

SEQ ID NO: 70813 - DNA, 344 bp, Homo sapiens; identical to SEQ ID NO: 66460

SEQ ID NO: 70814 - DNA, 325 bp, Homo sapiens; identical to SEQ ID NO: 66461

SEQ ID NO: 70815 - DNA, 429 bp, Homo sapiens
cctaacttgtttccgacagggcatggtgctgatgtgaaatgtgtagactggcatccaaccaaagggttagttgtttcaggaagtaaagatagtcaacagccaatcaagttctgggatcccaagactgggcagagtcttgcaacacttcatgcccataaaaacacagtaatggaagtgaaattaaacctcaatggcaattggctactcacagcatcacgtgatcatctctgtaaactttttgatatcagaaacctaaaagaagagcttcaagtcttccgaggtcataagaaagaagccacagctgtggcctggcatcctgttcatgaaggactttttgccagtggagggtctgatggctctttgttattctggcatgttggggtagagaaggaagtgggtgggatggagatggctcacgaagggatgatc

SEQ ID NO: 70816 - DNA, 328 bp, Homo sapiens; identical to SEQ ID NO: 66463

SEQ ID NO: 70817 - DNA, 236 bp, Homo sapiens; identical to SEQ ID NO: 66465

SEQ ID NO: 70818 - DNA, 884 bp, Homo sapiens; identical to SEQ ID NO: 66466

SEQ ID NO: 70819 - DNA, 1958 bp, Homo sapiens
tatatcttggccttagaaaatcagcttacaatggccgaatattttttagaaaatggtgcaaacgtagaagcaagtgatgctgaaggaaggacagcacttcatgtgtcttgttggcaaggccatatggaaatggtgcaggtcctgatagcataccatgctgacgtcaatgctgcagacaatgaaaagcgctctgctttgcagtctgcagcctggcagggccatgtaaaagtggttcagcttctgattgagcatggtgctgtagttgaccatacatgtaaccaaggtgcaactgcactctgtattgcagcccaggaagggcacattgatgttgttcaggtcttattagagcatggtgctgatccaaaccatgctgatcaatttggacgcactgctatgcgtgttgcagccaaaaatggacattctcagataattaaattattagaaaaatatggggcatctagtttgaatggctgttccccatctcctgttcacacaatggagcaaaaacctctacagtcattgtcttcaaaagtgcagtcattaacaattaaatcaaatagctctggtagtactggtggaggggatatgcagccttcgttacgtggtttacctaatgggcctactcatgcttttagttctccttcagaatctccagattctacagttgaccggcagaagtcatcactgtcaaataattccctgaaaagctcaaaaaattcatctttgagaactacttcatctacagcaacggctcaaacagtgccaattgatagctttcataacttgtcatttacagaacaaattcagcagcattcattgccacgcagtagtaagtcgacagtcaattgtttccccatcttccacaacacagtccttaggacagagtcataattcaccaagtagtgaatttgagtggagtcaagtaaagcccagtttgaagtcaactaaagcaagtaaaggggggaaatcagaaaattctgccaagtctggatcagctgggaaaaaagcgaaacaaagtaattcttcacagccaaaggttttagaatatgaaatgactcagtttgatagaagaggacctatagccaaatccgggactgctgcaccacctaaacaaatgccagcagaatctcaatgcaaaattatgataccttcagctcagcaggaaattggtcgatctcaacagcagtttcttattcaccaacaaagtggggaacagaagaagagaaatggaataatgacaaatccaaattatcatcttcagagcaaccaggtttttcttggtagggtttcagtcccacgaacaatgcaagatagagggcatcaggaagtgttggagggatacccttcctcagagacagaattaagccttaaacaagctctgaagcttcagattgaaggttctgaccctagcttcaactataaaaaggaaacaccattataaaagtttcctattcttgtgaaacaagaagacattgtgatgggagtggttcttcagctactggatgggaaacatatgcctgttgatttgctgaaaaaaccaaaaaaaatgaagaatgtgatcttctggcagtacagttaccttaattactgtaatgtgccctaaatagtaaggctgcccttctcaatgtaaccctctgtgcttaaaaaatttcattttgtgtgctttgtattcactacacaggaataagcactttttaaaaatgcagatacatactgcagttccctgataaaagctgaaaagaaaatttgagtattttaagttaaaattgtgataaaaaaatgtgcatgtgccataatcaaatatatatgaaaaggcagtgttccttgtatttatttttttttctttttgtggcaaaagaaacttaaacatactgtttcagtcacattgcattgtagtgtatggcctgtttcttgtatctttaaagacgttgctcaataaaacaaatcttgcaactgta

SEQ ID NO: 70820 - DNA, 1466 bp, Homo sapiens; identical to SEQ ID NO: 66468

SEQ ID NO: 70821 - DNA, 599 bp, Homo sapiens; identical to SEQ ID NO: 66469

SEQ ID NO: 70822 - DNA, 1711 bp, Homo sapiens
tttttttttttagaaattagaatactttattataaatattttcagaatataaactgattttgtatcaagacctctttgaaactttagaaactttatgtaacctaagatcataatatatttcattttccactttccagcctagaaaatacactgcaagttagatctaataaaggagaaaaaaattgcttcacagagaaaaaccaatgaacataaaatacccaactcaaaactataacaaacccaatcaagaaacagattgtgcaaaggtcattaatcctccaatttaaaataaataacctcccaacagaaaatatttccaccatcaaagcaatttgatgaataaaagcagagtcactttcattaaaggaaattacactatatgttcaaaaaatgtaataatgcttttagaaaatgaggaaaagcaagcaatttctgtgttggagagcaagcatgctaaacactttgtttactaggcctttgttagaagttaaagaacctattcacataagaaaagtggtatgaacacggatatcataaaaccaagctctcacctattttttcaatttaactttgggagaaccaactttgaaagcttcaaaatccaagaatagactggtcccaaagcatttcctcctctgtcctttcttggccttgttcctttttcttttttgtacgcttacgttcctctttcttagagactacatctcggctttttttctcctttcgattcttaagcttttctgtactgacatgtacggtttctatttccacctctgttttctttctttggatgctcttgtgtttgtctaagtcaatttcctcgcagcttttttttctcttatgcttagaccgctcctcctctgatttttctctgccttcctctgggtgccttttcctcttctgatgtatctgtttgtgactggcttgatgagtactggtactgttatctgaggagaagtgcttgtaaactctatgttctacaccatgtgagccacaaatatattcttgttgattaaagttcaggggtactggtttttctgagaaacagtccctcgtgaactgacagtagctcagagagtctagtctcaatctgctgtcatgggctggtaaccactgaggcaaccgattttccactgtttgtggaatattgcatgatcttgggtaggtctggatggtttcagatgggagtctctggtcaaacattctatacgtgggtctggaattaacctctcctttgtacccacaggtttccaaatagtcccctttcatctttctgaaacaagtctttggctctaagcctctggctttctgtactttaatataatcttcaagttcatcttgaaaagagtcatatgtcttctttgaatgcttcattaggttgacaaaacgggattttccttatcaggctgagaatttggtggagaaatctgatcatattcactcagtttttcagcatgaattttcaaatagtgagactacacaataactggtgagctcataatgcaaaatcctttgttatttgaactgtaacactactccacagacatcttttataaaaggtatctgtaaacaaagttcagtctttgttcattcaatgtggtatcttctctgaggcaggggcgggcgtctacaactactgtcccccaccccgccaacgccgccagccaggggataagccgcggtggagaccattctgatgttggacgtgtcc

SEQ ID NO: 70823 - DNA, 762 bp, Homo sapiens; identical to SEQ ID NO: 66471

SEQ ID NO: 70824 - DNA, 844 bp, Homo sapiens; identical to SEQ ID NO: 66472

SEQ ID NO: 70825 - DNA, 1404 bp, Homo sapiens; identical to SEQ ID NO: 66473

SEQ ID NO: 70826 - DNA, 562 bp, Homo sapiens; identical to SEQ ID NO: 66474

SEQ ID NO: 70827 - DNA, 489 bp, Homo sapiens; identical to SEQ ID NO: 66475

SEQ ID NO: 70828 - DNA, 738 bp, Homo sapiens; identical to SEQ ID NO: 66476

SEQ ID NO: 70829 - DNA, 689 bp, Homo sapiens; identical to SEQ ID NO: 66477

SEQ ID NO: 70830 - DNA, 383 bp, Homo sapiens; identical to SEQ ID NO: 66478

SEQ ID NO: 70831 - DNA, 517 bp, Homo sapiens; identical to SEQ ID NO: 66479

SEQ ID NO: 70832 - DNA, 421 bp, Homo sapiens; identical to SEQ ID NO: 66480

SEQ ID NO: 70833 - DNA, 541 bp, Homo sapiens; identical to SEQ ID NO: 66481

SEQ ID NO: 70834 - DNA, 333 bp, Homo sapiens; identical to SEQ ID NO: 66482

SEQ ID NO: 70835 - DNA, 358 bp, Homo sapiens; identical to SEQ ID NO: 66483

SEQ ID NO: 70836 - DNA, 1552 bp, Homo sapiens; identical to SEQ ID NO: 66484

SEQ ID NO: 70837 - DNA, 594 bp, Homo sapiens; identical to SEQ ID NO: 66485
  misc_feature (1)...(594): n = a,t,c or g

SEQ ID NO: 70838 - DNA, 1269 bp, Homo sapiens; identical to SEQ ID NO: 66486

SEQ ID NO: 70839 - DNA, 1276 bp, Homo sapiens; identical to SEQ ID NO: 66487

SEQ ID NO: 70840 - DNA, 951 bp, Homo sapiens; identical to SEQ ID NO: 66488

SEQ ID NO: 70841 - DNA, 414 bp, Homo sapiens; identical to SEQ ID NO: 66489

SEQ ID NO: 70842 - DNA, 134 bp, Homo sapiens
ttttttttttgagatggagtctcgctctgctgcccaggctggagtgcagtggtgcaatcttggctcactgcaagctctgcctcccaggttcacgccattctcctgcctcagcctcccgagtagctgggactaca

SEQ ID NO: 70843 - DNA, 12 bp, Homo sapiens
gtaaaaaaaaaa

SEQ ID NO: 70844 - DNA, 504 bp, Homo sapiens; identical to SEQ ID NO: 66491

SEQ ID NO: 70845 - DNA, 839 bp, Homo sapiens
cctgagcccggcgagcaggagaggaggtcttccgggccgcggcctccgagcgcgcgggatttgcagaacttaatatgaatgtgaagaacttgcaaagaaacttgaaaacagccaaagggatggcatatcaagaaataaattggccttggcagaattgtatgaagatgaagtgaagtgcaaatcttccaagtctaatagacctaaagccacagtcttcaagagcccacggacaccacctcaacggttttactcaagtgaacatgaatacagtggattaaatatagttcgaccttcaactgggaaaattgtgaatgaacttttcaaagaggcaagggaacatggggctgtccctctgaatgaagccacaagagcttcaggtgatgataaatctaagtcatttacaggtggaggatacagattgggtagttctttttgtaagcggtctgaatatatctatggagaaaatcagctgcaagatgttcagattttgcttaaactgtggagcaatggtttcagtttagatgatggagaattgagaccttacaatgaaccaacaaatgctcaatttctggagtctgttaagagaggggtgactctcattgcatgtatgcctgaaattcagcaacttatgttagaaatcttttaatgtggcattactgctggcagaagatttcaaaaggttagtttgaagttataatttgtgaaagtaaactcagatattcagtgctctcacccatccaaagaacattgtaacttaccagctcttcttgctaaaggatgaggaatcaagtgattttgctatgataataaaagcttttctgtgttatgattaaaaaaaa

SEQ ID NO: 70846 - DNA, 489 bp, Homo sapiens; identical to SEQ ID NO: 66492

SEQ ID NO: 70847 - DNA, 562 bp, Homo sapiens; identical to SEQ ID NO: 66493

SEQ ID NO: 70848 - DNA, 841 bp, Homo sapiens; identical to SEQ ID NO: 66494

SEQ ID NO: 70849 - DNA, 1256 bp, Homo sapiens; identical to SEQ ID NO: 66495

SEQ ID NO: 70850 - DNA, 659 bp, Homo sapiens; identical to SEQ ID NO: 66496

SEQ ID NO: 70851 - DNA, 1129 bp, Homo sapiens
cggacgcgtgggcggacgcgtgggatcggtttgtggctgatttcaaagcccaggggccacctaagcccaacactgatgaagggggtgccgtgctccccagctgcgccgacctctttgtctactacaagaagtgcatggtgcaatgctctcagctcagtactggggagcccatgatcgccctgaccaccattttccagaagtacctccgagaatacgcctggaaaatcctctctggcaacctgcccaaaaccacaaccagcagtggaggactgactatcagcagcctcctcaaggaaaaggagggctcagaagtagccaagttcactctggaggagctctgcctcatctgtaacatcctgagcacggcagagtactgtctggccaccacccagcagctagaagaaaaactcaaagaaaaagtggatgtaagtctgattgaacgaatcaatctgactggagagatggacacgttcagcaccgtcatctccagcagtattcagctgctggttcaggatctggatgctgcctgtgatcctgccctgactgccatgagcaagatgcagtggcagaacgtggagcacgttggtgaccagagcccctacgtcacctctgtcattctgcacatcaagcagaacgtccccatcatccgtgacaacctggcttccacacgcaagtacttcactcagttctgcgttaaatttgcaaactccttcattcccaaattcatcacccacctcttcaagtgcaagccaattagcatggtgggagcagaacaggtgagatggacgtagtatcaggcatttgcctggcagcttttgttgtagatcaagcacatattcttctagtccagatctacttggcaggaataaaattgatgatgtcccctgtttggggacagtataatgactcacccggaaggtttcttaattcgttcttccatttatttttaaaaattttgtttgaacgcctactaagttctgggtgcagggtataacacagcaagcaccatggaaaggtccctggctcctagtgctcacactccaataagaagaagtggctgggcggggcacagcgggcttcacgctgtaaaccccagcatttcgggaggcctgggcaggcagatcacctc

SEQ ID NO: 70852 - DNA, 837 bp, Homo sapiens; identical to SEQ ID NO: 66498

SEQ ID NO: 70853 - DNA, 453 bp, Homo sapiens; identical to SEQ ID NO: 66499

SEQ ID NO: 70854 - DNA, 410 bp, Homo sapiens; identical to SEQ ID NO: 66500

SEQ ID NO: 70855 - DNA, 840 bp, Homo sapiens; identical to SEQ ID NO: 66501

SEQ ID NO: 70856 - DNA, 892 bp, Homo sapiens
atgtggacagcgtgggtggcggcagcgagtctcggtccctggactcacccacttccagcccaggcgctggcacgaggcagctggtgaaggcttcgtccacaggcactgagtcctcagatgactttgaggagcgagaccctgacctgggagacgggctggagaatgggctgggcagccccttcgggaagtggacactgtccagcgcggctcagacccaccagctgcggcgactgcggggcccagccaagtgccgcgagtgcgaagccttcatggtcagcgggacggagtgtgaggagtgctttctgacctgccacaagcgctgcctggagactctcctgatcctctgtggacacaggcggctcccagcccggacacccctttttggggttgacttcctgcagctacccagggacttcccggaggaggtaccctttgtggtcacgaagtgcacggctgagatagaacaccgtgccctggatgtgcagggcatttaccgggtcagcgggtcccgggtccgtgtggagcggctgtgccaggctttcgagaatggccgagcgttggtggagctgtcggggaactcgcctcatgacgtctcgagtgtcctcaagcgatttcttcaggagctcaccgagcccgtgatccccttccacctctacgacgccttcatctctctggctaagaccttgcatgcagaccctggggacgaccctgggacccccagccccagccctgaggttatccgctcgctgaagaccctcttggtacagctgcctgactctaactacaacaccctgcggcacctggtggcccatctgttcagggtggctgcacgatttatggaaaacaagatgtctgccaacaacctgggcattgtgtttgggccgacactgct

SEQ ID NO: 70857 - DNA, 419 bp, Homo sapiens; identical to SEQ ID NO: 66503

SEQ ID NO: 70858 - DNA, 412 bp, Homo sapiens; identical to SEQ ID NO: 66504

SEQ ID NO: 70859 - DNA, 578 bp, Homo sapiens; identical to SEQ ID NO: 66505

SEQ ID NO: 70860 - DNA, 511 bp, Homo sapiens; identical to SEQ ID NO: 66506

SEQ ID NO: 70861 - DNA, 781 bp, Homo sapiens; identical to SEQ ID NO: 66507

SEQ ID NO: 70862 - DNA, 628 bp, Homo sapiens; identical to SEQ ID NO: 66508
  misc_feature (1)...(628): n = a,t,c or g

SEQ ID NO: 70863 - DNA, 828 bp, Homo sapiens; identical to SEQ ID NO: 66509

SEQ ID NO: 70864 - DNA, 495 bp, Homo sapiens; identical to SEQ ID NO: 66510

SEQ ID NO: 70865 - DNA, 416 bp, Homo sapiens; identical to SEQ ID NO: 66511

SEQ ID NO: 70866 - DNA, 819 bp, Homo sapiens
ctagtttcgcgagcggccgcttaacgccgtcgtcgccggctttcgacggcgagctggatctgcagcgatactccaacgggccagccgtgagcgcatggtcgctcgggatgggagcggtgagctggtctgagagtcgtgcaggcgaacggcgcttcccctgccctgtatgcgggaagcgcttccgcttcaactctatccttgctttgcacctgcgcacacaccagcccgagcgcccacgtagtcctgctgcacgcctgttgctggagttggaagagcgcgcgctactacgcgaggcccgactggggagagcccgaagctcagggggcatgcaggccacccctgccactgagggtctggcgcggccccaggctccttcatcgtccgccttccgttgcccctactgcaaaggcaagtttcgcacctcggcggagcgcgaacgccacctgcacatcctgcataggccctggaagtgcggcctgtgcagtttcggctccagccaggaggaggagctgctgcaccacagcctgacggcccacggggctcccgagcgtcccctggcggccacctccgctgcgcctccgcctcagcctcagcctcagcctccaccccagcccgaacccagatcagtcccccagccggagccggagccccagcccgaacgtgaggcaaccccgaccccagctcctgccgctcccgaggagcccccagcgcctccggagttccgctgccaagtgtgcggccagagctttacacagtcttggtttctcaagggccacatgcgtaagcacaaggcctccttcgatcatgcgtgtccggtgt

SEQ ID NO: 70867 - DNA, 455 bp, Homo sapiens; identical to SEQ ID NO: 66513

SEQ ID NO: 70868 - DNA, 638 bp, Homo sapiens; identical to SEQ ID NO: 66514

SEQ ID NO: 70869 - DNA, 406 bp, Homo sapiens; identical to SEQ ID NO: 66515

SEQ ID NO: 70870 - DNA, 394 bp, Homo sapiens
ggactccatgtcatctctctgcacagcgctgatggtcgtcactgggaggatcccctttctgagcttgacagtgaacgtgtgtctgcatttcttgtcactgagaccctggtgttctatttgttctgtctccttgcagatgaaaccgtcgtgccaccagatgttccaagctacctctcttctcaggggaccctttctgaccgacaagaaaccgtggtcaggaccgagggtggccctcaggccaatgggcacattgagagcaatggtaaggcctcagtaaccgtgaagcagagctctgctgtgactgtgtctctgggtgctggaggtggcctccaggtctttacagggcaggtacctggcattagatggggcaaacttggtgaagcccacgcgtccg

SEQ ID NO: 70871 - DNA, 550 bp, Homo sapiens; identical to SEQ ID NO: 66517

SEQ ID NO: 70872 - DNA, 432 bp, Homo sapiens
  misc_feature (1)...(432): n = a,t,c or g
nagtctcggtgcaataaaggcgtggatgggtcggtctttgaatttccaggcccgataaggaaaggtattaggtccgagattccttttttgtttttccaaaccaaagagaaatcctcccaaattctccaaatatggtattttctaggggggaaaaaaagcccagtttagacagcgaagaaggttgtcttctgtgatagatcgtctttttctcttttagtcctcctcctcctccaccaagggatgttcgtcctcctcgtacacctcctcctcctcccccctcccctcctcctcctgttcggtcctcctttccccctctttctgttctcttcccctcagttgnnnnnnnnnnnnnnnnnnnnnnnnnnnnnnnnnnnnnnnnnnnnattgtcaagcccccgaactgaaggttacgagcggcccgtcagcagccca

SEQ ID NO: 70873 - DNA, 611 bp, Homo sapiens; identical to SEQ ID NO: 66519

SEQ ID NO: 70874 - DNA, 932 bp, Homo sapiens; identical to SEQ ID NO: 66520

SEQ ID NO: 70875 - DNA, 422 bp, Homo sapiens; identical to SEQ ID NO: 66521

SEQ ID NO: 70876 - DNA, 610 bp, Homo sapiens; identical to SEQ ID NO: 66522

SEQ ID NO: 70877 - DNA, 776 bp, Homo sapiens; identical to SEQ ID NO: 66523

SEQ ID NO: 70878 - DNA, 456 bp, Homo sapiens; identical to SEQ ID NO: 66524
  misc_feature (1)...(456): n = a,t,c or g

SEQ ID NO: 70879 - DNA, 465 bp, Homo sapiens; identical to SEQ ID NO: 66525

SEQ ID NO: 70880 - DNA, 567 bp, Homo sapiens; identical to SEQ ID NO: 66526

SEQ ID NO: 70881 - DNA, 1561 bp, Homo sapiens; identical to SEQ ID NO: 66527

SEQ ID NO: 70882 - DNA, 2634 bp, Homo sapiens
actcaccgtttgaaagatggctcaactatgttgatagaagcagcaaaaggtggccatacaagtgttgtttgctatctcttggattatcctaataacttgctttcagcccctccaccagatgtcactcagttaactcccccatcccacgatttaaatagggctcctcgtgtaccagttcaagcactgcccatggttgttccacctcaggagcctgacaaaccacctgccaatgttgccaccactcttcccatcaggaataaagctgcttctaaacaaaagtccagcagccatttgccagcaaacagccaggatgtacagggttacatcaccaatcagtctccagagagcattgtagaagaggctcagggaaagttaacagaactggaacagaggataaaagaagccatagaaaagaatgcacagctgcagtccttggaactggctcatgctgaccaacttaccaaggagaagatcgaggagctcaacaaaacaagggaggaacaaattcagaagaaacaaaagattttggaggaactacagaaagtagaacgagagttacaactgaaaactcagcagcagctaaaaaagcagtatctagaggttaaagctcaaagaattcaacttcagcaacagcagcaacagtcttgccaacacctgggattactaactcctgttggagttggagagcagctttctgagggagactatgcacggttacagcaagtggatcctgttttacttaaagatgaaccccagcagactgctgctcagatgggttttgcgccaatccagcctctggcgatgcctcaagctttgcctctggcggcaggtcccttgcctccagggtccatcgcaaatcttacagaactgcaaggagtgatagttggacagccagtactgggccaagcacagttggcagggctggggcaaggaattctgacagaaacacaacaagggttaatggtagccagccctgctcagaccctcaatgacacgctggatgacatcatggcagtcagtggaagagcatctgcaatgtcaaacactcctacccacagtattgctgcatccatttcccaacctcagactccaactccaagtcctatcatctctccttcagccatgcttcctatctaccctgccattgatattgatgcacagactgagagtaatcatgacacggcgctaacacttgcctgtgctggtggccacgaggaactggtacaaacactgctagagagaggagctagtatagagcaccgagacaagaaaggttttactccactcatcttggctgccacagctggtcatgttggtgttgtggaaatattgctggacaatggtgcagacattgaagcccagtctgaaagaaccaaggacacaccactctccttggcttgttctgggggaagacaggaggtggtggagctattgttagctcgaggggcaaataaagagcacaggaatgtttctgattacacacctctaagtctggctgcttctggtggctatgtgaacatcatcaaaatattactaaatgcaggagctgagattaactctagaactggtagcaaattgggcatctctcctctgatgttagcagctatgaatgggcatacagctgctgttaagctcctgttagacatgggctctgacataaatgctcagatagaaaccaatcggaacactgcccttactttagcctgcttccaaggaagaactgaagtggttagtcttctgcttgatagaaaagcaaatgttgaacacagagctaagactggtctcacaccactaatggaagctgcctctggtggatatgcggaggtgggccgagttcttttggataaaggtgctgatgttaatgcccctccagttccctcctcaagagatacagctttaaccatagcagcagataaagggcattacaaattctgtgagcttcttattggcaggggagctcatattgatgtacgtaacaagaaggggaacactccattgtggctagcagcaaatggtggacacctcgatgtggttcagttactggtgcaagcaggtgcagatgtggatgcagcagataaccgcaagataactcctcttatggcagcatttagaaagggtcatgtgaaggtggtgcgctacttagtcaaagaagtcaatcagtttccatcagattctgaatgtatgagatacatagcaaccatcactgataaggagatgctgaagaagtgtcatctttgtatggagtcaatagtacaagccaaagatagacaggctgctgaagcaaacaaaaacgccagcattttgttagaggagttagacttggaaaagttaagggaagaaagtcggaggctggctttggctgcgaaaagagaaaaaagaaaagagaagagaaggaagaaaaaggaagaccaaagaaggaaactagaagaaattgaagccaaaaataaagagaactttgaactccaagctgctcaagaaaaagaaaagcttaaagttgaagatgagcctgaagtcttgacagaacctccaagtgccacaaccactactaccataggtatatctgcaacctggacaactttggcaggttctcatggtaaaagaaataataccataactacaaccagttcaaagagg

SEQ ID NO: 70883 - DNA, 852 bp, Homo sapiens; identical to SEQ ID NO: 66529
  misc_feature (1)...(852): n = a,t,c or g

SEQ ID NO: 70884 - DNA, 1335 bp, Homo sapiens
cccgggtcgacccacgcgtccggtgagccttctggtctttcgccaggaagacgccttccacccaatggaactgaatgcagagccaagccagatgcagattccaaaagaaacgaaagcagaagatgaggatattgttcttacacctgatggcaccagggaatttctgacatttgaagtcccacttaatgattcaggatctgcaggccttggtgtcagtgtcaaaggtaaccggtcaaaagagaaccacgcagatttgggaatctttgtcaagtccattattaatggaggagcagcatctaaagatggaaggcttcgggtgaatgatcaactgatagcagtaaatggagaatccctgttgggcaagacaaaccaagatgccatggaaaccctaagaaggtctatgtctactgaaggcaataaacgaggaatgatccagcttattgttgcaaggagaataagcaagtgcaatgagctgaagtcacctgggagcccccctggacctgagctgcccattgaaacagcgttggatgatagagaacgaagaatttcccattccctctacagtgggattgaggggcttgatgaatcgcccagcagaaatgctgccctcagtaggataatgggtaaataccagctgtcccctacagtgaatatgccccaagatgacactgtcattatagaagatgacaggttgccagtgcttcctccacatctctctgaccagtcctcttccagctcccatgatgatgtggggtttgtgacggcagatgctggtacttgggccaaggctgcaatcagtgattcagccgactgctctttgagtccagatgttgatccagttcttgcttttcaacgagaaggatttggacgtcagagtatgtcagaaaaacgcacaaagcaattttcagatgccagtcaattggatttcgttaaaacacgaaaatcaaaaagcatggatttaggttctcccagcagagatgtgggtccttccctgggtctgaagaagtcaagctcgttggagagtctgcagaccgcagttgccgaggtgactttgaatggggatattcctttccatcgtccacggccgcggataatcagaggcaggggatgcaatgagagcttcagagctgccatcgacaaatcttatgataaacccgcggtagatgatgatgatgaaggcatggagaccttggaagaagacacagaagaaagttcaagatcagggagagagtctgtatccacagccagtgatcagccttcccactctctggagagacaaatgaatggaaaccaagagaaaggtgataagactgatagaaaaaaggataaaactgg

SEQ ID NO: 70885 - DNA, 383 bp, Homo sapiens; identical to SEQ ID NO: 66531

SEQ ID NO: 70886 - DNA, 372 bp, Homo sapiens
ctataccatcagaagccaagatgagactgaaagccaccctaactcaccaagtctcctcaatcaatggtggttgtggaatggtggtgggtactgccagcaccatggtgacagcccgcccagagcagagccagattctcatccagcaccctgatgccccatcccctgcccagccacaggtcagtggctcttactctttatgtcatatctttatgacgtatctttatgtcatatctattgttcaaggagcagaaaattagagaagaatggacttcagctttctgggtttcttcctgcttactttggttcttgatggcagtttgactatagcaaaacgtaccattctttttattatttattcatttttattttagc

SEQ ID NO: 70887 - DNA, 703 bp, Homo sapiens; identical to SEQ ID NO: 66533

SEQ ID NO: 70888 - DNA, 214 bp, Homo sapiens; identical to SEQ ID NO: 66534

SEQ ID NO: 70889 - DNA, 353 bp, Homo sapiens; identical to SEQ ID NO: 66535

SEQ ID NO: 70890 - DNA, 1042 bp, Homo sapiens; identical to SEQ ID NO: 66536

SEQ ID NO: 70891 - DNA, 703 bp, Homo sapiens; identical to SEQ ID NO: 66537

SEQ ID NO: 70892 - DNA, 856 bp, Homo sapiens; identical to SEQ ID NO: 66538
  misc_feature (1)...(856): n = a,t,c or g

SEQ ID NO: 70893 - DNA, 626 bp, Homo sapiens; identical to SEQ ID NO: 66539

SEQ ID NO: 70894 - DNA, 679 bp, Homo sapiens; identical to SEQ ID NO: 66540

SEQ ID NO: 70895 - DNA, 1225 bp, Homo sapiens; identical to SEQ ID NO: 66541

SEQ ID NO: 70896 - DNA, 1236 bp, Homo sapiens; identical to SEQ ID NO: 66542

SEQ ID NO: 70897 - DNA, 144 bp, Homo sapiens
ttttttttttttccttaaaccccccgtttttccttggaaaacaaaaggggggcccaatttacctttttacttggtttgggggcccaaaccctggaagggtttttaagaaaaacccttctttttttggccccagggggaagggga

SEQ ID NO: 70898 - DNA, 1438 bp, Homo sapiens; identical to SEQ ID NO: 66543

SEQ ID NO: 70899 - DNA, 673 bp, Homo sapiens; identical to SEQ ID NO: 66544
  misc_feature (1)...(673): n = a,t,c or g

SEQ ID NO: 70900 - DNA, 600 bp, Homo sapiens
ctccgcgctgcaggaattcggcacgagtggcagacacattctacaccaatgctggctgcaccctggtagccttgaaccccttcaagcctgttcctcagctctactcgcccgagctaatgagagagtaccatgctgcgcctcagccccagaaactgaagccccacgtgttcactgtgggtgaacagacctacaggaatgtcaagagcctgattgaaccagtcaaccagtctattgttgtcagtggagagagtggtgctggaaagacatggacgtctcgctgcctaatgaagttctatgctgtggtggccacctcacctgcatcttgggagagccacaagattgcagagaggatagaacagaggatcctgaactccaaccctgtcatggaagcttttgggaatgcgtgtacactgaggaataacaacagcagtcgctttgggaagttcatccagctccagctgaacagggctcagcaaatgactggagccgcagtccagacctacctcctagagaaaactcgagtggcctgccaggcttccagtgagaggaacaaggaccctatcccacctgagctgaccaggctcctgcagcaatcccagg

SEQ ID NO: 70901 - DNA, 364 bp, Homo sapiens; identical to SEQ ID NO: 66546

SEQ ID NO: 70902 - DNA, 579 bp, Homo sapiens; identical to SEQ ID NO: 66547

SEQ ID NO: 70903 - DNA, 1327 bp, Homo sapiens; identical to SEQ ID NO: 66548

SEQ ID NO: 70904 - DNA, 1632 bp, Homo sapiens
acagaaaaccctgaaaaacctatgacatgatcaccagtttcactggactgactattaggaatttgggcctggaagacaacaattcagttcgagattctggtacacaagcgtgtgagcgtcccccaaggctagtgtgggcatggcccctgaggtgagcacggactcattccctgtggtgagcgtggacgtgtcgcctgtggtgagcacatatgattctgagatgagcatggacgcatcccccgagttgagcatagaagcactcccgaaggtggacctggaaacagttcccaaggtgagcatagtagcatccccggaggcgagcctggaagcacccccggaagtgagtctggaagcactgccagaggtgagcgtggaagcagccccagaggggagcctggaagcacctcccaaggggagcgcagaagtagcccccaaggagagtgtgaaagggtcacccaaggagagcatggaggcatctcctgaggcgatggtgaaagcatcccccaagacatcccttgaagcaagcatggaagcatctcccaaggcaaaagcgagagacgctccaaagaaatcagaaatggacaaacaggccttaatccctattgccaagaagcgtctatcatcatacactgagtgttataaatggtcatcatctcctgcaaatgcttgtggtctgccgtctcccatcagcactaacaggcaaatccaaaagaactgccctccatcaccattaccacttatttcaaaacagtcaccacagacttcttttccttataaaataatgcctattcaacacaccctgtctgtgcaaagtgcatcaagtactgtcaaaaagaaaaaagaaacagtttctaaaaccactaacagatgtgaggctttgagccaaaggcatatgatctatgaagagtctggtaataagagtactgcaggtattatgaatgccgaggcggcaacaaaaattttgacagaattgcgccgccttgctcgtgaacaaagagataaagaggaagaagaaagacaacgggaagaaatgcagcaaagggtcattaagaaatcaaaagacatggcaaaggaagcagttggaggccaagcagaagaccacttgaaactcaaagatgggcagcaacaaaatgagactaaaaagaagaaaggatggctggatcaggaagaccaggaagcaccactgcagaaaggggacgccaaaataaaagctcaagaggaagctgacaaacgcaagaaagaacacgagagaattatgttacaaaatttacaagaacggttagaaaggaaaaagagaatagaagaaattatgaagcggacaagaaagacagatgtgaatgcctcaaaggtcacagaaacatccagccatgacatatatgaagaggctgaggctgacaacgaagaaagcgacaaggactcattgaatgaaatgtttccatcagccattctaaatggcacaggctcacctaccaaatttaaaatgccgttcaacaatgccaagaaaatgacacacaagctggtatttctagaagatggtaccagccaggtccgtaaagagccaaaaacatattttaatggcgatttgaaaaacttcagacaaaaaagcatgaaagacacttcaatacaggaagt

SEQ ID NO: 70905 - DNA, 470 bp, Homo sapiens
ccgtcacatcccccgccagcttgtagatgcctggattgagatgggcagccggctggatgctcgtcagctcattcctgccctggtgaactacagccagggtggtgaggtccagcaggtgagccaggccatccgctacatggagttctgcgtgaacgtgctgggggagactgagcaggccatccacaactacctgctgtcactgtatgcccgtggccggccggactcactactggcctatctggagcaggctggggccagcccccaccgggtgcattacgacctcaagtatgcgctgcggctctgcgccgagcatggccaccaccgcgcttgtgtccatgtctacaaggtcctagagctgtatgaggaggccgtggacctggccctgcaggtggatgtggacctggccaagcagtgtgcagacctgcctgaggaggatgaggaattgcgcaagaagctgtggctgaagatcg

SEQ ID NO: 70906 - DNA, 420 bp, Homo sapiens; identical to SEQ ID NO: 66550

SEQ ID NO: 70907 - DNA, 414 bp, Homo sapiens; identical to SEQ ID NO: 66551

SEQ ID NO: 70908 - DNA, 591 bp, Homo sapiens; identical to SEQ ID NO: 66552

SEQ ID NO: 70909 - DNA, 401 bp, Homo sapiens; identical to SEQ ID NO: 66553

SEQ ID NO: 70910 - DNA, 1386 bp, Homo sapiens; identical to SEQ ID NO: 66554

SEQ ID NO: 70911 - DNA, 653 bp, Homo sapiens; identical to SEQ ID NO: 66555

SEQ ID NO: 70912 - DNA, 801 bp, Homo sapiens; identical to SEQ ID NO: 66556

SEQ ID NO: 70913 - DNA, 840 bp, Homo sapiens; identical to SEQ ID NO: 66557

SEQ ID NO: 70914 - DNA, 537 bp, Homo sapiens; identical to SEQ ID NO: 66558

SEQ ID NO: 70915 - DNA, 436 bp, Homo sapiens
  misc_feature (1)...(436): n = a,t,c or g
aaagcttagcatgtagtttggcgttaaatttaagatgttttaaaaactgtttttttctcatacnggaggttctatatttttaatgatgtggaaaaactaagttaagttgtctttccagagtcaaaaggaattaaggtcattataatccagtaagagttagttttcagcaggcacaaggatgaaggtgtaagtactacgagggagggacttggatgcacaaggagggagaaggagggagggaagaggagggagaaggggggaggaaagaggagggagaaggagggagggaagaggagggagaaggagggagggaagaggagggagaaggagggagggaagaggagggagaaggagggaagaggagggagaaggagggaggcaagaggagggagaaggagggagaaggagggagggaagaggagggagaaggagggag

SEQ ID NO: 70916 - DNA, 659 bp, Homo sapiens; identical to SEQ ID NO: 66560
  misc_feature (1)...(659): n = a,t,c or g

SEQ ID NO: 70917 - DNA, 2024 bp, Homo sapiens; identical to SEQ ID NO: 66561
  misc_feature (1)...(2024): n = a,t,c or g

SEQ ID NO: 70918 - DNA, 395 bp, Homo sapiens; identical to SEQ ID NO: 66562

SEQ ID NO: 70919 - DNA, 826 bp, Homo sapiens; identical to SEQ ID NO: 66563
  misc_feature (1)...(826): n = a,t,c or g

SEQ ID NO: 70920 - DNA, 1114 bp, Homo sapiens; identical to SEQ ID NO: 66564

SEQ ID NO: 70921 - DNA, 372 bp, Homo sapiens
cttagagtacatcagacaattcatgctggagagagaccctatgaatgcaaagaatgtgggaaggcctttagacttcattatcaactaactgaacatcaaagaattcatactggtgagaggccttatgaatgtaaggtttgtggcaagacctttagggtacaacgacatattagtcaacatcagaaaattcatactggtgtcaaaccctataaatgtaatgaatgtgggaaggcctttagtcatggctcataccttgttcaacatcagaaaattcatactggtgaaaaaccctacgaatgtaaagaatgtggtaagtcctttagttttcatgcagaacttgctcgacatcgtagaattcatactggtgagaaa

SEQ ID NO: 70922 - DNA, 974 bp, Homo sapiens; identical to SEQ ID NO: 66566

SEQ ID NO: 70923 - DNA, 1033 bp, Homo sapiens; identical to SEQ ID NO: 66567
  misc_feature (1)...(1033): n = a,t,c or g

SEQ ID NO: 70924 - DNA, 372 bp, Homo sapiens; identical to SEQ ID NO: 66568

SEQ ID NO: 70925 - DNA, 425 bp, Homo sapiens
aatggcaatgctcggcgcaatcgaatctctgctctgcgccgtggtgctggatggtatgaccgggacgaaacacaaggcgaacagcgaactggttggacagggactggggaatattatcgctccgttctttggtggtattaccgctacagctgccatcgcgcgttctgccgctaacgtccgtgccggggcaacgtcccctatctcggcggtgatccactctattctggttattcttgccctgctggtactggcaccgctgctctcctggctgccgctttccgccatggcagccctgctgttgatggtggcgtggaacatgagtgaagcgcacaaagtggtcgacttgctgcgtcatgcgccgaaagatgacatcatcgtcatgctgctgtgcatgtcgctgaccgtgttgtttgatatggttattg

SEQ ID NO: 70926 - DNA, 335 bp, Homo sapiens; identical to SEQ ID NO: 66570

SEQ ID NO: 70927 - DNA, 592 bp, Homo sapiens; identical to SEQ ID NO: 66571

SEQ ID NO: 70928 - DNA, 556 bp, Homo sapiens; identical to SEQ ID NO: 66572
  misc_feature (1)...(556): n = a,t,c or g

SEQ ID NO: 70929 - DNA, 805 bp, Homo sapiens; identical to SEQ ID NO: 66574

SEQ ID NO: 70930 - DNA, 418 bp, Homo sapiens; identical to SEQ ID NO: 66575

SEQ ID NO: 70931 - DNA, 631 bp, Homo sapiens
gaatttctgggtcgtcccacgcgtcccgcaaaggatgagggaaacgatgagggaaaggatgagggaaaggatgagggaaaggatgagggaaaggatgagggaaaggatgagggaaaggatgagagaaaggatgagggaaaggatgagggaaaggatgagagaaaggatgagggaaaggatgagggaaaggatgagggaaaggatgagggaaaggatgagggaaaggatgagggaaaggatgagggaaaggatgagggaaacgatgagggaaaggatgagggaaaggatgagggaaaggatgagggaaaggatgagggaaaggatgagggaaaggatgagggaaacgatgagggaaacgatgagggaaacgatgagggaaaggatgagggaaaggatgagagaaacgatgagggaaaggatgagggaaaggatgagggaaaggatgagggaaaggatgagagaaacgatgagggaaaggatgagagaaaggatgagggaaaggatgagggaaaggatgagggaaaggatgagggaaaggatgagggaaaggatgagggaaacgatgagggaaaggatgagagaaaggatgagggaaaggatgagggaaaggatgagggaaaggataagtaag

SEQ ID NO: 70932 - DNA, 667 bp, Homo sapiens; identical to SEQ ID NO: 66577

SEQ ID NO: 70933 - DNA, 360 bp, Homo sapiens; identical to SEQ ID NO: 66578

SEQ ID NO: 70934 - DNA, 932 bp, Homo sapiens
ttttttgatatcagaagtcatcttgtatacgccagttccttctcttcacagttttgtttctcatttgaacatccaaagacagttttgcgagctgtgtgcagtcaccacaggccagtgaggtcactgtcattgtgacaataggtagttttcaggggcacagaccttgtgctgggtgatggaatctaagacccatttctcagacagatacttgactgttgctttcttctttccgctgtagggcccgatgacgatgctggcctggcgggggacttggctgacccggcctccgcacaggtggactagttcacagagcttggccactggggggctgctggcaggcgagacaaacatcactggctggtcggcaaagagggttccgcggtacggccctgcagacaagtggcactcacttcggcacaggggagctgcagggaagtggtgagacagttcgaacggctcctcagaaatccagtgacccaattctaaagaccatagcacccaatcataagagagaacccagcagccacgcgcaattcccagcagcacattcagggtgcgaagtggcttcccggaaagcacgtgagtcgtggtctcacagacgtctggtgcaattgaaaagcctttcaatttatccacaacctggatgacgacattctgcttttcagatggcatgcttgtcatgactaatgttcttgttggctttttgcctctcccacttttcttcaattcctcatgaggtttgatgaggtccttaaagccgtcacatgagtcatctaaaacatcatgccttgttggtctatttttaacacttccactgtatcctccgggtaagttttccttctcttctgtagacgtctccatgttacagtcaactataaaacatggctcatgttcactctgggcttcaccttcagaggagtttgatattttgg

SEQ ID NO: 70935 - DNA, 351 bp, Homo sapiens
agaaagcttcaacactatcagtaacatcgaggagattgcgtataacgccatttccttcacatgggacatcaacgatgaagcaaaggttttcatctctgtgaactgcttaagcacagatttctcttcccagaagggagtgaaggggttgcctcttaacattcaaattgatacctatagttacaacaaccgcagcaacaagcctgtgcaccgggcctactgccagatcaaggtcttctgtgacaagggagctgagcggaaaatcagggatgaagaacgaaagcaaagcaaaagaaaaggcaagtgtcctgaccccagctcccaggtgaatgcctgtaagtagaaatgttcccg

SEQ ID NO: 70936 - DNA, 439 bp, Homo sapiens
cttacccatctcacggctcagaacgtgccgaatctgtttgcccgtaacgaacgcgtgatttgccttttcgataccgaatttggcccaatggcgcagattctggtcggagcgacgattgttggcagcattgagacggtctgggcgggcaccattacgccgccgcgcgaaggtatcatcaagcgctggacctggcctgccggggaaaacgacggttctgtggcactgctgaaaggccaggaaatgggtcgctttaaactcggttccaccgttatcaacctgtttgcaccgggtaaagtgaatctggttgagcaactggaaagcctgtctgtcacgaaaattggccagccgctggcagtatctaccgaaacctttgttacgccagacgctgaacctgccccgcttcctgctgaagagatcgaagcagaacacgacgccagcc

SEQ ID NO: 70937 - DNA, 543 bp, Homo sapiens; identical to SEQ ID NO: 66582

SEQ ID NO: 70938 - DNA, 1092 bp, Homo sapiens; identical to SEQ ID NO: 66583

SEQ ID NO: 70939 - DNA, 417 bp, Homo sapiens; identical to SEQ ID NO: 66584

SEQ ID NO: 70940 - DNA, 447 bp, Homo sapiens; identical to SEQ ID NO: 66585

SEQ ID NO: 70941 - DNA, 508 bp, Homo sapiens; identical to SEQ ID NO: 66586

SEQ ID NO: 70942 - DNA, 505 bp, Homo sapiens; identical to SEQ ID NO: 66587

SEQ ID NO: 70943 - DNA, 338 bp, Homo sapiens; identical to SEQ ID NO: 66588

SEQ ID NO: 70944 - DNA, 424 bp, Homo sapiens; identical to SEQ ID NO: 66589

SEQ ID NO: 70945 - DNA, 367 bp, Homo sapiens
ccgcttccaggcttcctgctacctgaagcagggcaagtaccaggatgcggagaccttgtacaaggagatcctcacccgcgctcatgagaaagagtttggctcttgagggcctgccccagtgtctcccactctgggaaaccacctctggccccggatggtcagtcatctgctcctgagtccctcggagcctggcccatcattcaggcctagcacatgtcttgggctgtggcctgaggtgcaagggtctgttctgctcatctttcttgtgaccattctttcctccaggataagcgccgggacagcgccccctatggggaatacggcagctggcacaaggcaggtcacctgtcccaagaaggctctgtct

SEQ ID NO: 70946 - DNA, 685 bp, Homo sapiens; identical to SEQ ID NO: 66591

SEQ ID NO: 70947 - DNA, 513 bp, Homo sapiens; identical to SEQ ID NO: 66592

SEQ ID NO: 70948 - DNA, 399 bp, Homo sapiens; identical to SEQ ID NO: 66593

SEQ ID NO: 70949 - DNA, 749 bp, Homo sapiens; identical to SEQ ID NO: 66594

SEQ ID NO: 70950 - DNA, 445 bp, Homo sapiens; identical to SEQ ID NO: 66595

SEQ ID NO: 70951 - DNA, 421 bp, Homo sapiens; identical to SEQ ID NO: 66596

SEQ ID NO: 70952 - DNA, 1238 bp, Homo sapiens; identical to SEQ ID NO: 66597

SEQ ID NO: 70953 - DNA, 469 bp, Homo sapiens; identical to SEQ ID NO: 66598
  misc_feature (1)...(469): n = a,t,c or g

SEQ ID NO: 70954 - DNA, 511 bp, Homo sapiens
atagtgtcgtcaacacagcaggatctgcaggaatgggtggagcacctacagaagcaaacgaaggtcacgtctgtgggaaaccccaccataaagcctcattcagtgccatctcataccgtaaggacttggtgcttctcctccttccagactccaggcgtggcatcccgtggctgagctgtcagcaagtgatcagttgctttaaaacctaatcaatatttggataaaaagtgcaaaacacttgcttcacatttctctgcagatctttggccctcttcgtgcagtagtgaattgttttccaatgagtgttctcgagaaacaaccctgaattgtgcctcctcacgcacagttcagaggtgcttgggtgggaagctgcttctgctccgtgtggccctagaagactgatttaggggagttttacactcaactatagatgatttttctgagaattttaactgtttattatgcttcatttaagaaaacaaaaaataaatgattatgatgatgaaaagga

SEQ ID NO: 70955 - DNA, 1149 bp, Homo sapiens; identical to SEQ ID NO: 66600
  misc_feature (1)...(1149): n = a,t,c or g

SEQ ID NO: 70956 - DNA, 1327 bp, Homo sapiens; identical to SEQ ID NO: 66601

SEQ ID NO: 70957 - DNA, 658 bp, Homo sapiens; identical to SEQ ID NO: 66602

SEQ ID NO: 70958 - DNA, 865 bp, Homo sapiens
cttgaaaccgttatacctttgacaccattttgcacgatgactccagcctgtatcgaggcaggggagtctctccccctccctcgcccttcttgtcagccatccttgccgcctttcagcccgcagcctgtgacgatgccgaggaggcctggcgcaaccacatcaaccagcttatgtgtgactcaaatggctcctgtgctgtgtatacatttcatgtgttctcctccttgtttaagaatattcagaaaaggttctgcttcctaacctgtgatgcagccagttaccttggagataacctccggggaatcggatccaaatttgtcagctcttcccagatgctcacctcctgctctgaatgtcctacactttttgtggatgccgagactctcctttcatgtggacttctggacaagctcaagttcagtgtgttagaactgcaagaatatttggatacctacaacaacaggaaagaggccacactctcttggcttgcaaattgtaaggcaacatttgcagggggatcaagagatggagtaattacctgtcaaccaggggactccgaagaaaaggtaataaaagcctgttagaatgggtctcttgtgtgctctaacattgtgtattagttttggtctacccaagaagcctggaacttgagaaaagaagaggcggaatgagtcaccccaaacatttacatgaaaccaacagagtaagacagaatgccttccagcatgactgtgtgttgatgggatttgtggggaggtttcttcgttttggaaaagtagaggtataaaataaccttttttgctggatactgtctaactatactaataatttcctaataaatttattcttaattcagaaaaaaaaa

SEQ ID NO: 70959 - DNA, 801 bp, Homo sapiens; identical to SEQ ID NO: 66604
  misc_feature (1)...(801): n = a,t,c or g

SEQ ID NO: 70960 - DNA, 617 bp, Homo sapiens
ctcttctacgtctgaatgatataagtgcaggggatcgcatacctgcttggacatttgatatgaacacaggtgcttgggtaaatcatggtcggggaatggtcaaggaacataacaatcatttaatctggacatatgatgcaccacatttggggtactggatagcagctccacttccaggaactagaggttcaggtataaatgaagattccaaggacataactgcctaccacacagtgtttcttacagccatattaggaggaacaatagtcattgtcattggattttttgctgtactactttgttattgcagggacaagtgtggtactccacagaaaagagaaagaaatatcactaaacttgaggtcctcaagagagaccagacaacttcaacaacacacataaatcatatcagtacagttaaagttgcattaaaagctgaggacaagtcgcagttattcaatgccaaaaactcctcatatagtcctcagaaaaaggaaccatcaaaggcagaaacagaagaaagagtttccatggtaaaaactcgggacgattttaaaatctacaatgaagatgtttcatttctatcagtcaatcaaaataattactcaagaaacccc

SEQ ID NO: 70961 - DNA, 380 bp, Homo sapiens; identical to SEQ ID NO: 66606

SEQ ID NO: 70962 - DNA, 933 bp, Homo sapiens
ttttttttttttgtgtgtttagctttaatgtctattaaataggttggaaaaacaggccaagtgtagggacctgactcctgcaaagggcctaccgcagccctctgcactcaagcagcagccccatccagaccaggagtgtgttctgttctcctggcaggcagggctgataggtgtaggatggcgtctgtttcctttgcagtgtgggctggtcagaggagaaacagcaacttcctgctccttctcactgtgtcgttggctcaccatagaccacgtcctgcattccctctgattctctcatggggagagccctggaccttctggtggtgtcccagctgggtgggttcaaggctgctaccccgcttggggcagctggcctgcagggaagggccagacggcacctctcagtggagactgaatcttccttccttcaggaggctgcctccagggaagacctggggtccttcctgcgctcagcgctggctggctgtcctgttcatgcagtggaagacattacagaagaattcatacgagaagaacatgaagcctgtggagagggcagccttcagcaagctgggggacaggcccttgaagaagcccagggcgccttccttttgtagcacctgcttggcacagtccatgaggcccttgtatctccgtacctggccaaaggcagctctggcatgctcaaaccctccaacctgtagccgcttcttgaagaggtccagcggatatgtcagggtcttgctgatgacaccagctccactgccacaaagcaggttttggaggttctcatttttctttccttcggctggtatggcccacttgtacaggtgcttcaaggagctgtagcaagagaactgcagcccggcgtaggggaagatggcgatcaaggtgggagccaagcctttgtagaaaacctgggggccttcgctc

SEQ ID NO: 70963 - DNA, 1028 bp, Homo sapiens
cggagactgacatcctcagttagttgtgcactggatgaagctgctgctgcactgacacggatgaaagcagaaaacagccacaatgcaggacaagtggacactcgcagtctagcagaagcttgttcagatggggatgttaatgctgttcgtaaattgctagatgaaggcagaagtgtaaatgaacatacagaagaaggagaaagcctgctgtgtttggcttgttcagcagggtattatgaattagcacaagtattgcttgctatgcatgctaatgttgaagatcgagggaataaaggagacataactcccctgatggcagcttccagtggaggttacttagatattgtgaaattattacttcttcatgatgctgatgtcaactcccagtctgcaacaggaaacactgcgctaacttatgcatgtgctggaggatttgttgacattgttaaagtgctccttaatgaaggtgcaaatatagaagatcataatgaaaatggacatactcccttaatggaagcagccagtgcaggtcatgtggaagttgcaagagttcttttagatcatggtgcaggcatcaacactcattctaatgaattcaaagaaagtgctctaacacttgcttgctacaaaggccatttggatatggttcgctttctacttgaagctggtgcagatcaagagcacaaaacagatgagatgcacactgccttaatggaggcctgcatggatggacatgtagaggtggcacgtttgcttttggatagtggtgctcaagtgaacatgcctgcagattcatttgaatctccattgacgctagctgcctgtggaggacatgttgaattggcagctcctactttattgaaagggggagcaaatcttgaagaagacaatgatgaaggatacactcccttgatggaagctgcccgggaaggacatgaagaaatggtggcactactcttagcacaaggagcaaatataaattcccagacagaagaaactcaagaaactgctcttactttggcttgctg

SEQ ID NO: 70964 - DNA, 492 bp, Homo sapiens; identical to SEQ ID NO: 66609

SEQ ID NO: 70965 - DNA, 1102 bp, Homo sapiens
aagtcagtctgttcttactgaatttcttctcttgaactttctgtttattccttattttggacacagtagacaattttgctcaatttcacttctgcctttcttgggttcaggtttggtaccaataattggtaaagctgatgtaattctaagtttttctcatccagcgcataggaaagcttgcctataggtatctgatttaattattttgaatagtcaatgggctaaccaaggagaagatgaggggatcaaatatctgatgtttaaattaaactagtattcatctctttactttaaatttggtctcttaaaggtctcgcattttgtttcatttgtagtgccacagtttcaggattaatggtattctttcctttcaggctttaaatgaagaaattgttaatagaaagaagaatgtagatcaagctattaaaaatggtcaggctcttctaaaacaaaccacaggtgaggaggtgttacttatccaggaaaaactagatggtataaagactcgttacgcagacatcacagttactagctccaaggccctcagaactttagagcaagcccggcagctggccaccaagttccagtctacttatgaggaactgaccgggtggctgagggaggtggaggaggagctggcaaccagtggaggacagtctcccacaggggaacagataccccagtttcagcagagacagaaggaattaaagaaggaggtcatggagcacaggctggtgttggacacagtgaatgaggtgagccgtgctctcttagagctggtgccctggagagccagagaagggctggataaacttgtgtccgatgctaacgagcagtacaaactagtcagtgacactattggacaaagggtggatgaaattgatgctgctattcagagatcacaacagtatgagcaagctgccgatgcagaactagcttgggttgctgaaacaaaacggaaactgatggctctgggtccaattcgcctggaacaggaccagaccacagctcagcttcaggtacagaaggctttctccattgacattattcgacacaaagattcaatggatgaactcttcagtcaccgtagtgaaatctttgg

SEQ ID NO: 70966 - DNA, 416 bp, Homo sapiens
cccacgatatgaaagcattcattggagatgtggcccagtacttttgtggtttattttatttttatatctaaatctttgatctacctggaatgtggcagtccagattgtttttctcagacaggcggccagttgtgccaacgccatcttttgccacttaggtgaaatatgtcttttatcataaactaaacttccaggccagctttgacctggcattggatggcagccccaggctcccagcacttgtcctctcttctctccaggtgaccgagagcgagcccagcgtgatgtggctctcggggctgcacatccctgagtcctacctcacggcgctggtgcaggccacctgccggaagaacggctggccactggaccgctccacattgttcacacaagtgaccaagttccaggatgcagat

SEQ ID NO: 70967 - DNA, 749 bp, Homo sapiens
tttccagagctaagaacacaaagtcatgaaggtgaaggaggagaaggctggggtaggaaagctggaccacactaaccacaggaggagatttccggatcagaaagaatgccctcctatccacattgggcttccagtacccacttaccctcaaagaaaaactgaccagaagggacatctttcaggcctgcaaaaagtccactggggcctgcggccagaccagccacagcaggaactgactggcccagggagtggggcaagcagccaggacagcagcatggatcttatcagcaggactcggtccccagctgctgagcagctcctgggcctgtcttgagcaggttcttcggtggcctgtgtctggatatcaagaggaagttgccctggttcccaagtgacttctatgatggcttccacattcagtccatctctgccatcctattcatctacctcggctgtatcaccaacgcgatcacctttggtgggcttctgggggatgccaccgacaattatcagggagtgatggagagcttcctgggcactgccatggctggctccttgttctgcctcttctcgggacagcctctcatcattctcagcagcacggggcccatcctcatctttgagaagctcctcttcgacttcagcaaaggcaatggcctggactacatggagttccgcctctggattggcctacactcagctgtccagtgccttatcctagtggccacagatgccagctttatcatcaa

SEQ ID NO: 70968 - DNA, 693 bp, Homo sapiens
ccctctctctgcctgcagtctgtttctgctgtacctcctcaattctggactgtgctcttctagggagactagatgtatgcaccacccagaaactgccagtagagagcaccctacaggcatgacttggcagctaggccatgtttatttcccttggtggggcacccgacaggcagagtttattccctcagcttgggggtggcagtggtggtggtagtgctaggggttactgcaggcaggtttctgtttctttgcatcccgggactggcttgttctcacctttttgttctgtccctctctgtgtatttactttctctctttttgcattgttctcagccttccatctgcatctcttcatctctgcctctcttgcctgcatttcctcaatcttgattgtccctgcctcttcctctgccattccctctcttccccctcagtctgtggctctgcctccctgtctcactctccctataactggcctctccctgctcagaccttcctggacgagctgcatgagacagggcagctgcactctatgtccacctggatggagctatatccagcagtcagcactgatgtccgctttgccaacatgctgggccagccgggtaaggcagccaggctcccccttctctggcctggcttcctgccctgccagcctctctgcgaattccaccacactgactaagggtcttc

SEQ ID NO: 70969 - DNA, 434 bp, Homo sapiens; identical to SEQ ID NO: 66613

SEQ ID NO: 70970 - DNA, 456 bp, Homo sapiens
acacttttgctgccgcagctgccgctgtgtgtcgtactcagtccgccgtaagtcagcaaatgcagcgtctggaacaactcgttgggaaagaactgttcgctcgtcacggtcgcaacaaactgttaactgaacatggcattcaacttcttggttacgccaggaaaatcctgcgttttaatgatgaggcctgctcatcattaatgttcagtaatcttcagggcgtattaactatcggtgcttcagatgaatctgccgatacgatcttacctttcctgttaaatcgcgtgagttcggtttatccgaaattagcgctggatgtccgcgttaaacgtaatgcctatatggcagaaatgctggaatcccaggaagtggatttgatggtaaccacccatcgtccttcagcgtttaaggcattgaacctgcgtacctcgccaacacactggctagggtactcaa

SEQ ID NO: 70971 - DNA, 470 bp, Homo sapiens; identical to SEQ ID NO: 66615

SEQ ID NO: 70972 - DNA, 461 bp, Homo sapiens; identical to SEQ ID NO: 66616

SEQ ID NO: 70973 - DNA, 704 bp, Homo sapiens; identical to SEQ ID NO: 66617

SEQ ID NO: 70974 - DNA, 453 bp, Homo sapiens; identical to SEQ ID NO: 66618

SEQ ID NO: 70975 - DNA, 377 bp, Homo sapiens; identical to SEQ ID NO: 66619

SEQ ID NO: 70976 - DNA, 438 bp, Homo sapiens; identical to SEQ ID NO: 66620

SEQ ID NO: 70977 - DNA, 1019 bp, Homo sapiens; identical to SEQ ID NO: 66621

SEQ ID NO: 70978 - DNA, 476 bp, Homo sapiens; identical to SEQ ID NO: 66622

SEQ ID NO: 70979 - DNA, 375 bp, Homo sapiens; identical to SEQ ID NO: 66623

SEQ ID NO: 70980 - DNA, 443 bp, Homo sapiens; identical to SEQ ID NO: 66624

SEQ ID NO: 70981 - DNA, 388 bp, Homo sapiens; identical to SEQ ID NO: 66625

SEQ ID NO: 70982 - DNA, 503 bp, Homo sapiens; identical to SEQ ID NO: 66626
  misc_feature (1)...(503): n = a,t,c or g

SEQ ID NO: 70983 - DNA, 760 bp, Homo sapiens; identical to SEQ ID NO: 66627

SEQ ID NO: 70984 - DNA, 621 bp, Homo sapiens; identical to SEQ ID NO: 66629

SEQ ID NO: 70985 - DNA, 395 bp, Homo sapiens; identical to SEQ ID NO: 66630

SEQ ID NO: 70986 - DNA, 377 bp, Homo sapiens; identical to SEQ ID NO: 66631

SEQ ID NO: 70987 - DNA, 338 bp, Homo sapiens; identical to SEQ ID NO: 66632

SEQ ID NO: 70988 - DNA, 713 bp, Homo sapiens; identical to SEQ ID NO: 66633

SEQ ID NO: 70989 - DNA, 561 bp, Homo sapiens
atcagataatagtgaatacagtaaatcagaaaaaggcaaaaataaagaaaaagacagggagctagataaaaaggaaaaatctagagataaagaaagtataaatataactaactccaaacacatacaggaagaaaaaaaatcaagtatagtagacggtaataaagcacaacatgaaaaacccttatcccttaaagaaaaaacaaaagatgaacctttgaaaactccagatggaaaagaaaaagataaaaaagataaagatatagatagatacaaagaacgagacaaacataaagataaaattcaaataaatagcttactcaaactaaaatctgaagcagataagcctaaacctaagtcatcaccagcatcaaaagatacccgacctaaagaaaagaggttagtgaatgatgatttaatgcagacaagttttgaacgaatgctaagccttaaagacctagaaatagaacagtggcacaaaaaacataaggaaaaaattaagcaaaaagaaaaggaacggttgagaaaccgaaactgtttagaacttaaaataaaaaaaaaaaa

SEQ ID NO: 70990 - DNA, 418 bp, Homo sapiens; identical to SEQ ID NO: 66635

SEQ ID NO: 70991 - DNA, 851 bp, Homo sapiens; identical to SEQ ID NO: 66636

SEQ ID NO: 70992 - DNA, 603 bp, Homo sapiens
  misc_feature (1)...(603): n = a,t,c or g
cgcatcagcatccttgctgctgccgatgctggaatggctagtgatgctgttgaggcttgagatgctatctgaggagttttgtctcttgatccgaagttctttgggtgtggtttctgaggcattaagggctccctgaatgactgcctgggcctcagagttctttttcttcagaaagtctatggtttctcgcaaatccagcagctcagtgtccttctcctcggccgtctctgccaggtgtcgcaggcgggatgtcatattcaccaggctctgctcaaaagcagccaccagattagcattggcagaaagctgagacgtcaaggtggccactttttcctgggatgattccagttccctacgaagcttccggatttgctcagattgcatcctctcctcagctgaggagtaggtggaggaggcactggaggccagggacagcactgagccgtgaacatcgtccgtggggtctcggaaggatcctgaccgaatcattcccttgggtctctcggccagggacagggtgctcccccggacgcgtgggtcgaccgggaatccggngcggtcctcaggcgatcaacnagggtttcaattnnttnntctnggtca

SEQ ID NO: 70993 - DNA, 415 bp, Homo sapiens; identical to SEQ ID NO: 66638

SEQ ID NO: 70994 - DNA, 737 bp, Homo sapiens; identical to SEQ ID NO: 66639

SEQ ID NO: 70995 - DNA, 918 bp, Homo sapiens; identical to SEQ ID NO: 66640

SEQ ID NO: 70996 - DNA, 610 bp, Homo sapiens; identical to SEQ ID NO: 66641

SEQ ID NO: 70997 - DNA, 836 bp, Homo sapiens; identical to SEQ ID NO: 66642

SEQ ID NO: 70998 - DNA, 397 bp, Homo sapiens
aattcgtaatgctgcccatgaagatggtggaatttattctttaacagtggagaatctagctggttcaaaaactgtctcagtaaaagtacttgtattagataaacctgggccacctagagatctggaagtcagtgaaattaggaaagattcatgttcccttacttggaaagaaccactggatgatggtggttctgttattaccaattatgtggttgagaggagagatgttgccagcgcccagtggtcacctctctcagctacatcaaagaaaaagagtcacttcgctaagcatctgaatgaaggcaaccagtacctcttccgagtagctgcggagaaccagtatggacgtggtccttttgttgaaacaccaaaaccaatcaaggctttggatcctctc

SEQ ID NO: 70999 - DNA, 419 bp, Homo sapiens; identical to SEQ ID NO: 66644

SEQ ID NO: 71000 - DNA, 770 bp, Homo sapiens; identical to SEQ ID NO: 66645

SEQ ID NO: 71001 - DNA, 813 bp, Homo sapiens; identical to SEQ ID NO: 66646

SEQ ID NO: 71002 - DNA, 1279 bp, Homo sapiens; identical to SEQ ID NO: 66647

SEQ ID NO: 71003 - DNA, 739 bp, Homo sapiens; identical to SEQ ID NO: 66648

SEQ ID NO: 71004 - DNA, 650 bp, Homo sapiens; identical to SEQ ID NO: 66649

SEQ ID NO: 71005 - DNA, 815 bp, Homo sapiens; identical to SEQ ID NO: 66650
  misc_feature (1)...(815): n = a,t,c or g

SEQ ID NO: 71006 - DNA, 338 bp, Homo sapiens
  misc_feature (1)...(338): n = a,t,c or g
ggtaaatgcagcaggcacagccttagctctcatgggcttaaaaattgggtggagtacaaaaataaccagacaagtatctgagaaagccaagctgtgctaaaggttactaacagacacatgaatctgtgacagcttatgagaggaaagttgatttcagatgggaggggagggagcgcttcccacaagaggggttgatcatgctgagatatgaaggacaggtaggagctggccactgcagaaaggaaggctccatcaaatccaaggccaaggcctccaggttcctgaagtgctgctgcagcacggngttctcaaagctgtcacttctgtatggtgaagcg

SEQ ID NO: 71007 - DNA, 663 bp, Homo sapiens
gcttccattttactttgtttttaaactgtaaagtggggataatgactgttcccatcttagagagtcaatgggcaaattcagtgagaaaatgtatgtaaaatatttagctgagttcctgacgtaattcatatgattaatggtaagaagaggtttgcatacttgcttttcaaatgactatttcttggagttagatgcgtaattagatcatgttgatatgactaattttgagttcaagttaaccttaaccacacttctatcttatttcagatttttgggtttctgatatgcttgggaattattcttgcaataggaaattcaatctgggagagtcaaactggggaccaattcagaactttcctcttttggaatgaaggagagaagagctctgtgttctccggattcttaacattctggtcatatattattattctcaatacagttgtacccatttccttatatgtgagtgtggaagtaattcgtctaggacacagatattttataaactgggaccggaagatgtattattctcgaaaagcaatacctgcagtggctcgaacgaccacgctcaatgaggaactggggcagattgagtacattttctccgacaaaacgggtaccctcactcaaaacatcatgacctttaaaagatgctccattaatggg

SEQ ID NO: 71008 - DNA, 445 bp, Homo sapiens; identical to SEQ ID NO: 66652

SEQ ID NO: 71009 - DNA, 553 bp, Homo sapiens; identical to SEQ ID NO: 66653
  misc_feature (1)...(553): n = a,t,c or g

SEQ ID NO: 71010 - DNA, 1684 bp, Homo sapiens; identical to SEQ ID NO: 66654

SEQ ID NO: 71011 - DNA, 546 bp, Homo sapiens
cttatatgatagaaaaggccgcttctccatttttcataaatttgagtattgaaaggggttaaattcaggttggataacattgcacagtagaaagaaaagtacacttattctacatataacctgattaatttagtataggagagttacattccaccaaaagaaagtgttcctgttcatagtcttgggctttaattacaaatgttgacttcgtgacattttgagatttgagaagtctaagagcagaaagaattatagtttatattgatcatacataagcatgttcaaagactgccagatccatcctgtggaagaaaagaatgagtgtaagttatagccctaccagccttatgtttggtggattcagtctgatcagacatatatttgataaaaatgatgtagcaaaaaaacaggtttgtcttagagaaacatactactttctaagcttgtcttctttcttgagattaagttttccctcctttaacaggacaccttacaggaaaacatgagagacatttctccatctcaggatgcccactgtatcataac

SEQ ID NO: 71012 - DNA, 329 bp, Homo sapiens
tagccaagtttaaaataggatttttgcgtttgggtcagattcagaaggttcatccagctatccagcaatttacagagcaagaaatttgcagatcaaagtccattaaatccttagctcttctagaagaactctacaatagtcaagtaagcacaattattgtataataatactaacagttaatgtccacagccagaatgaggggagaaactgtactctgggaaatttagtcacattgactggatttgcacatgattaatttatatgtactatacgaccagtttattaacttatagtttgctatttccttctgatctgaaataaggttttgg

SEQ ID NO: 71013 - DNA, 368 bp, Homo sapiens
tggataataaatctgaagttcagttgtggctgttaaagagaattcaggtacccattgaagatatacttccttcaaaagaagaaaaaagcaagaccccacccatgttcctgtgcatcaaagtgggaaaaccaatgagaaaatcctttgccactcacactgcagccatggtccagcagtacggcaaacggagaaagcagccagagtactggtttgctgttcctcgggagagggtggatcatttgtacacattctttgttcagtggtctcccgatgtctatggaaaagatgccaaagagcaaggctttgtggtggtggagaaggaagaactgaacatgattgacaacttcttcagtgagccaacaaccaag

SEQ ID NO: 71014 - DNA, 383 bp, Homo sapiens
agcacaataaaagaaaccctatactaggcaaattattatgaaatttgttttaggacaccagaaataaagataatatctaaaaactttttagaatcgcctaggagggattaggaatatgaatagcatctaacttgttggcagtagaattgaaggtagaaggtggtaaaacatcaccttgaaagttttgcattcagcctagaattctgtatccagttaaaccatcaatcaagtgtgaaagtagggggaaaaactcaaggactaaaaaaatgtgctcatgaagaacattttttttggacattacccagaagtagaagaagctgatggcaacaagcagtggtggtttggtggtggatgtgacctcactccaacatacttgaatcaag

SEQ ID NO: 71015 - DNA, 582 bp, Homo sapiens
aatgatccagtacggtcaaagttttgtaaaatacgtgttttgtgccacacgcttgctaggaacatggtgtatattttaacaatcactacccccttgaagagctctgactcaagaaagcggaaggctgtgattctgactgcaagggtccatccaggggaaaccaacagctcttggatcatgaaaggcttcctagattatattttaggaaactcaagtgatgcacagttgcttcgggacacttttgtcttcaaggtggtacccatgctgaatccagatggtgtgattgtgggaaattatcgctgttccttagctggacgggatttaaaccgtaattatacatctctcctgaaggaatcttttccttctgtatggtatacccggaacatggttcataggtaaaataagcctcaaattacctctgtgcttatttagtaaacttggtagtaacaattttgctcccacaatctcattcattttactgtaacttctcaagatagtctaactactgtataactactttattttttccccgttattcacaactgtgattctatacctttctgtcattatgccactggattc

SEQ ID NO: 71016 - DNA, 916 bp, Homo sapiens; identical to SEQ ID NO: 66660

SEQ ID NO: 71017 - DNA, 359 bp, Homo sapiens
tgtccatgggatgtgttaaatctctatcatatgtctgtaaaaattcttatttgtaaaatttgtagttctattgaagatgaaaattgcttttaagggaactcattaatcttcaaaatttccatatcattgtcaaaagttgtgttataggaaaagattggaaaaggttttgtaagcatcctctgaattactatttttgccactagatcttctaaatgattaatgaagtttgaaatatttagtgtttagggaatacaagtaatctttcgcttttctcttttcaggggtagacttaaagtctgaaacagaaggtttcagtgcatcaagcagtccaaatgacttactcgaaaacctcactcaag

SEQ ID NO: 71018 - DNA, 561 bp, Homo sapiens; identical to SEQ ID NO: 66662
  misc_feature (1)...(561): n = a,t,c or g

SEQ ID NO: 71019 - DNA, 484 bp, Homo sapiens; identical to SEQ ID NO: 66663

SEQ ID NO: 71020 - DNA, 866 bp, Homo sapiens; identical to SEQ ID NO: 66664

SEQ ID NO: 71021 - DNA, 452 bp, Homo sapiens; identical to SEQ ID NO: 66665

SEQ ID NO: 71022 - DNA, 814 bp, Homo sapiens; identical to SEQ ID NO: 66666

SEQ ID NO: 71023 - DNA, 411 bp, Homo sapiens; identical to SEQ ID NO: 66667

SEQ ID NO: 71024 - DNA, 709 bp, Homo sapiens
aggggacctgcagtcggaggaggctgtggggactgggtccaaccgccccttgcccacacagtccctgcagtcactgtcggtggcagactcccggctgaagcttcgcaccagcatcctcatcaatgccctgggcagcaacacctgcctggccaaggtggatctgagcggcaatggcatggaggacatcggggccaagatgctgtctaaggccctgcagataaactcctccctcagaactatcctatgggatcggaacaatacatctgccctgggcttcctggacatcgcaagggccctggagagcaaccacacgctgcgcttcatgtccttccccgtgagcgacatctcccaagcctatcgcagcgcgcctgagcgcaccgaggacgtctggcagaagatccaatggtgcttagtgaggaacaaccactcccagacgtgcccccaggagcaggccttcaggttgcagcagggcctggtgaccagcagcgccgagcaaatgccgcagcggctgtgtggacgagtgcaggaggaggtgcgggccctgagactgtgccccctggagcctgtgcaggatgagctactctacgctcgggaccttaataaagatgccaagaactcccgggcggggagccctccacaggctacccttcccctgaagtctggagaacccaagaaggccgaccatgctaagccatgacagccctgccct

SEQ ID NO: 71025 - DNA, 522 bp, Homo sapiens; identical to SEQ ID NO: 66669

SEQ ID NO: 71026 - DNA, 696 bp, Homo sapiens
ggccaggcctgggaccctgttgggaacttttaatgccatggatccagacagccagataagatatgaactggttcatgacccagcaaattgggtcagcgtcgacaaaaactccggagtggtcatcaccgtggagccaattgaccgagaatcccctcatgtaaataacagtttttatgtaatcatcattcacgctgttgatgatggcttcccaccgcagactgctacagggaccctaatgctcttcctgtctgacatcaatgacaacgtcccgactctccggccacgttcccgctacatggaggtctgtgagtctgctgtgcatgagcccctccacatcgaggcagaggatccggacctggagccgttctctgacccatttacatttgaattggacaatacctggggaaatgcggaggacacatggaagttggggagaaattggggtgagtttttgtattggttacgggcaaagagtggaaaatgccagatatccaattcaaacagatttaggcaaaaaaggactttattagcttaaaaaaccggagaggtctgcgttctggcagagctggctctaggtgctcaaaggatatccctggatatccttcccacacatggtctgcctttctctaggttccttcttttttaggaaactctcctcctcacggggtaggaggctgctgggagtccctgagacat

SEQ ID NO: 71027 - DNA, 205 bp, Homo sapiens; identical to SEQ ID NO: 66671

SEQ ID NO: 71028 - DNA, 726 bp, Homo sapiens; identical to SEQ ID NO: 66672
  misc_feature (1)...(726): n = a,t,c or g

SEQ ID NO: 71029 - DNA, 484 bp, Homo sapiens
cccattctgggcaagccactagcttgtactgaatggctcttcccaccaacactgacacattgccgtacaagattgactttcttgacccattggcagcctctgcagctatttggccccaaataactttgtcattatgcactgccccattggaagcatcactcttttacctatagcacttcatctgcctaattctctgaatcttcatccgcagaacttcaaggtagaatttgctttaaattgtgagtttgttcctgttgaatttcatgaaatccggcaagtgaaagccagttttaagaagctgatgagggcttgtatcccaagcaccatccctactgactcagaagtgaccttcctgaaagcgctgggagattctgagtggttcccacaggtaatgtctgaagcagcttctttctttataactcaaagaaacggacgcgtgggtcggccggtcgacgtgctcatcgaggcgctcgaaaaacccgcc

SEQ ID NO: 71030 - DNA, 1203 bp, Homo sapiens; identical to SEQ ID NO: 66674

SEQ ID NO: 71031 - DNA, 1325 bp, Homo sapiens; identical to SEQ ID NO: 66675
  misc_feature (1)...(1325): n = a,t,c or g

SEQ ID NO: 71032 - DNA, 749 bp, Homo sapiens; identical to SEQ ID NO: 66676

SEQ ID NO: 71033 - DNA, 563 bp, Homo sapiens; identical to SEQ ID NO: 66677

SEQ ID NO: 71034 - DNA, 507 bp, Homo sapiens; identical to SEQ ID NO: 66678

SEQ ID NO: 71035 - DNA, 1007 bp, Homo sapiens; identical to SEQ ID NO: 66679

SEQ ID NO: 71036 - DNA, 555 bp, Homo sapiens; identical to SEQ ID NO: 66680

SEQ ID NO: 71037 - DNA, 402 bp, Homo sapiens; identical to SEQ ID NO: 66681
  misc_feature (1)...(402): n = a,t,c or g

SEQ ID NO: 71038 - DNA, 876 bp, Homo sapiens; identical to SEQ ID NO: 66682
  misc_feature (1)...(876): n = a,t,c or g

SEQ ID NO: 71039 - DNA, 1080 bp, Homo sapiens; identical to SEQ ID NO: 66683

SEQ ID NO: 71040 - DNA, 397 bp, Homo sapiens; identical to SEQ ID NO: 66684

SEQ ID NO: 71041 - DNA, 619 bp, Homo sapiens; identical to SEQ ID NO: 66685

SEQ ID NO: 71042 - DNA, 724 bp, Homo sapiens
atgacacatttgaagcctcgaaccgcggcggaccccgcgtgcgctcgaagataaccaagcagtcttttaaagaaaagatttgttgccttgccaactaatacgacctcatcgagacctctgactgagtgttgtagtgatgcaggtgactctcctttgaaacctgtcagctgtccaaaatctaaagcatcagacaagcggagtttacttccacatcacatcaggcagatatatgacgaattatttcagatacatgtgaaattgcagtgtgaaactgcagcacaacagaaatttgctgaagaacttcaaaagcgagaacgttttttacttgaaagagaacaactgcttttcagacatgaaaatgccttgagtaaaattaaaggtgttgaagaagaggttcttacaagatttcaaattataaaagagcagcatgatgcagaagttgaacacttaaccgaagttcttaaggaaaagaataaagaaaccaagagactgaggtcctcttttgatgcattgaaagaattgaatgataccttaaaaaaacagttaaatgaagcaagtgaagaaaacaggaagatagacattcaggctaaaagagttcaagctcgtttagataatttacagaggaagtacgagtttatgacaatacagagattgaaaggaagttcccatgctgttcatgaaatgaaaagtttaaaacaagaaaaagcaccagtttcaaaaactt

SEQ ID NO: 71043 - DNA, 522 bp, Homo sapiens; identical to SEQ ID NO: 66687
  misc_feature (1)...(522): n = a,t,c or g

SEQ ID NO: 71044 - DNA, 466 bp, Homo sapiens; identical to SEQ ID NO: 66688

SEQ ID NO: 71045 - DNA, 601 bp, Homo sapiens; identical to SEQ ID NO: 66689

SEQ ID NO: 71046 - DNA, 722 bp, Homo sapiens; identical to SEQ ID NO: 66690

SEQ ID NO: 71047 - DNA, 535 bp, Homo sapiens
attgtgttatttcttcactctgctggtggtctacatgttgatcaactggctaccgctacttttggtggagcaaggattccagccatcgcaggcggcaggggtgatgtttgccctgcaaatgggggcggcaagcgggacgttaatgttgggcgcattgatggataagctgcgtccagtaaccatgtcgctactgatttatagcggcatgttagcttcgctgctggcgcttggaacggtgtcgtcatttaacggtatgttgctggcgggatttgtcgcggggttgtttgcgacaggtgggcaaagcgttttgtatgccctggcaccgttgttttacagttcgcagatccgcgcaacaggtgtgggaacagccgtggcggtagggcgtctgggggctatgagcggtccgttactggccgggaaaatgctggcattaggcactggcacggtcggcgtaatggccgcttctgcaccgggtattcttgttgctgggttggcggtgttgattttggttgcagcagtcaatgcagtttccagg

SEQ ID NO: 71048 - DNA, 179 bp, Homo sapiens; identical to SEQ ID NO: 66692

SEQ ID NO: 71049 - DNA, 3155 bp, Homo sapiens
tttcgtaccaccaccaccacgcccagcagtcagctgcagcctctcccaacctgactgcttcacagaagactgtaactacaacttctatgattaccacaaagacactacctctcgtcttgaaagcagcaactgcgaccatgcctgcctctgtggtgggccagagacctaccattgctatggtgaccgccatcaacagtcagaaggctgtgctcagcactgatgtgcaaaacacaccagtcaacctccagacgtctagtaaggtcactgggcctggggcagaggctgtccaaattgtggcaaaaaacacagtcactctgcaggttcaggcaacacctcctcagcccatcaaagtaccacagtttatcccccctcctagactcactccacgtccaaactttcttccacaggttcgacccaagcctgtggcccaaaataacattcctattgccccagcaccacctcccatgctcgcagctcctcagcttatccagaggcccgtcatgctgaccaagttcacccccacaacccttcccacatcccagaattccatccaccccgtccgtgtcgtcaatgggcagactgcaaccatagccaaaacgttccccatggcccagctcaccagcattgtgatagctactccagggaccagactcgctggacctcaaactgtacagcttagcaagccaagtcttgaaaaacagacagttaaatctcacacagaaacagatgagaaacaaacagagagccgcaccatcaccccacctgctgcacccaaaccaaaacgggaggagaaccctcagaaacttgccttcatggtgtctctagggttggtaacacatgaccatctagaagaaatccaaagcaagaggcaagagcgaaaaagaagaacaacagcaaatccggtctacagtggagcagtctttgagccagagcgtaagaagagtgcagtgacatacctaaacagcacaatgcaccctgggacccggaagagaggtcgtcctccaaaatacaatgcagtgctggggtttggagcccttaccccaacatccccccaatccagtcatcctgactcccctgaaaatgaaaagacagagaccacattcactttccctgcacctgttcagcctgtgtccctgcccagccccacctccacagacggtgatattcatgaggatttttgcagcgtttgcagaaaaagtggccagttactgatgtgcgacacatgttcccgtgtatatcatttggactgcttagacccccctctgaaaacaattcccaagggcatgtggatctgtcccagatgtcaggaccagatgctgaagaaggaagaagcaattccatggcctggaactttagcaattgttcattcctatattgcctacaaagcagcaaaagaagaagagaaacagaagttacttaaatggagttcagatttaaaacaagaacgagaacaactagagcaaaaggtgaaacagctcagcaattccataagtaaatgcatggaaatgaagaacaccatcctggcccggcagaaggagatgcacagctccctggagaaggtaaaacagctgattcgcctcatccacggcatcgacctctccaaacctgtagactctgaggccactgtgggggccatctccaatggcccggactgcaccccccctgccaatgccgccacctccacgccggccccttccccctcctcccagagctgcacagcgaactgtaaccagggggaagagactaaataacagagcccctctaggagaagccacgggatcccggcggcaaggagaacagaacactgaagactctagaaaagcaaagccggatttctggaaagtgcagaattcttttggttctttggttccagagagagagaagatgcttgtgccaggtggcaccagagtttgccaattgatccttcttattctgtgtgtacatgcaaagattggaccatgttacatgaaatagtgccagctggaggttctttgccagcaccatgccaagtgaaataatatatttactctctctattatacaccagtgtgtgcctgcagcagcctccacagccacgatgggtttgtttctgttttcttgggtggggagcagggacgggcggagggaggagagcaggtttcagatccttacttgccgagccgtttgtttaggtagagaagacaagtccaaagagtgtgtgggctttcctgtttctaaactttcgctactataaaaccaaaaaaaggaattgagatttcaccaaccccagtgcccagaatagggaaggggagtggctggagggagcagggggtgggacagtgtatcaaataagcagtatttaatcacctctggcgggggcctcgtgcaaggggagactgacaccaagaacagccagtaggttcttctcccctgcactctgctccctgcgcggtaaccccaccactcctgaagcctgcccagtctccttccttccctgcttggtgagtcgcgcatctccgtggttatcccgctgtctcctctccaagaacaagcagagcccgggccactggcccttgcccaaggcagggaagaaggatgtgtgtgtccaggaaggaaaaaaaggtggatcagtgattttacttgaaaacaagctccatcccttttctatatttataagaagagaagatcttgagtgaagcagcacgcgacccaggtgtgtgtgaattgaatggagacgtttcttttctctttctttaatttttgtttttgttctttttttctttaaggaaagttttattttactgttcattttactttcttggtaacaaaaactaaaataaggaatagaaaagctgtttttcaggctgacagtccaattaagggtagccaagaccttgcatggtagagtaggaatcatagtgtcagtgaggtcccgtgagtctttgtgagtccttgtgtcatcgttcgggcactgtttttttatgcaagggcaaaaatctttgtatctggggaaaaaaaacttttttttaaattaaaaaggaaaataaaagatattgaggtcttcctagtgttacttaaattaagatcaaggtaagaaacattgtaaaaaaaaattacaaaagtgctatttgtttcctaaaaacagtgatttctattaaaaaggtgtcagaactggaa

SEQ ID NO: 71050 - DNA, 691 bp, Homo sapiens; identical to SEQ ID NO: 66694

SEQ ID NO: 71051 - DNA, 550 bp, Homo sapiens; identical to SEQ ID NO: 66695

SEQ ID NO: 71052 - DNA, 796 bp, Homo sapiens; identical to SEQ ID NO: 66696

SEQ ID NO: 71053 - DNA, 619 bp, Homo sapiens; identical to SEQ ID NO: 66697

SEQ ID NO: 71054 - DNA, 416 bp, Homo sapiens; identical to SEQ ID NO: 66698

SEQ ID NO: 71055 - DNA, 533 bp, Homo sapiens; identical to SEQ ID NO: 66699

SEQ ID NO: 71056 - DNA, 477 bp, Homo sapiens
ccgggtcgacgatttcgtaatgccgtcggtttcgaaagcggcggcagcggcgctgagcgggtcccccccgcagacggagaagccgacccactacagcacaagtgcgcgcagcaccggccgttcacctgcttccactggcacttcctcaaccagcggcgccgcaggcccctccgcaggcgcgacggcaccttcaactacagccccgacgtgtactgctccaagtacaacgaagccaccggcgtgtgccccgacggcgacgagtgtccctacctgcaccggacgacgggggacacagaacgcaagtaccacctgcgttactacaaaacaggaacctgcatccacgagacagacgcacgtggccactgcgtgaagaatgggctgcactgtgccttcgcgcacggccccctggacctgcggccgcccgtgtgtgacgtcagggagctgcaggcccaggaagccttgcagaacggccagctg

SEQ ID NO: 71057 - DNA, 517 bp, Homo sapiens; identical to SEQ ID NO: 66701

SEQ ID NO: 71058 - DNA, 879 bp, Homo sapiens; identical to SEQ ID NO: 66702

SEQ ID NO: 71059 - DNA, 749 bp, Homo sapiens; identical to SEQ ID NO: 66703

SEQ ID NO: 71060 - DNA, 570 bp, Homo sapiens; identical to SEQ ID NO: 66704

SEQ ID NO: 71061 - DNA, 889 bp, Homo sapiens
atgggcctgtctgtggcgttggtctgtccgtggcgtgggccggtccgtggcgtgggccggtccacagtgtgggtggaggtggacgtgctgcactgcatggtgctgagctgccctgcctctctggggcagccaccgtggagcgggagatggagctgcggcacaagaatgagatgctgcgagtggagaccgaggcccgggcgcgcgccaaggccgagcgggagaatgcagacatcatccgcgagcagatccgcctgaaggcgtccgagcaccgtcagaccgtcttggagtccatcaggacggctggcaccttgtttggggaaggattccgtgcctttgtgacagaccgggacaaagtgacagccacggtaaacatattcataaaacagggctggcaggtggctgagaggcagcatgtgggggcctcctggagccccaggtcctgtccctgccggctctgcacagccctgtagctctcccagcacagagcaaacccacgttgtacctgctgggctcggctgctcctccctccttgagctgggagaaaaaaatgcagttgccagcctgggccacacggtgagaccccatctctacgaagaataaaacattagctgggtgtgatggtggcgcctgtggtcctgctactcgagaggctgaggtaggaggatcacttaagcccaggaggtttgggctgcagtgagccaacattgcaccactgcactccattcttggcgagagaataagaccttgtctcaagaaaaaaatggccaggcggtagtggctcaggcctgtaatcccagcattttcggaggcggaggtgggcggatcgcgaggtccggagatcgagatcatccttggtaagaagtgaaaccctgtctctactaaaaaaaag

SEQ ID NO: 71062 - DNA, 898 bp, Homo sapiens; identical to SEQ ID NO: 66706

SEQ ID NO: 71063 - DNA, 562 bp, Homo sapiens; identical to SEQ ID NO: 66707

SEQ ID NO: 71064 - DNA, 2171 bp, Homo sapiens; identical to SEQ ID NO: 66708

SEQ ID NO: 71065 - DNA, 570 bp, Homo sapiens; identical to SEQ ID NO: 66709

SEQ ID NO: 71066 - DNA, 639 bp, Homo sapiens; identical to SEQ ID NO: 66710

SEQ ID NO: 71067 - DNA, 2095 bp, Homo sapiens; identical to SEQ ID NO: 66711

SEQ ID NO: 71068 - DNA, 469 bp, Homo sapiens
attgacccgccctgaattgtcccccgctgcaggaattcggcacgagaaagaaagaaagaccaagctccaatatgaaaaacagatggaggaaagacagagaaagctgaaggagcgaaaagagaaagaagaacaacggagaatagctgcagaagaaaaaagacaccagaaggatgaagcacaaaaggaaaaatttacagccattctttatcgtactttggaacggaggagacttgctgatgattatcagcaaaaaagatggtcatggggaggctctgcaatggcgaattctgagagcaaaactgccaataaacgatctgcatctactgaaaaacttgaacagggtacttctgctttaatcagacaaatgcctttgtcatctgcaggccttcaaaattccgttgccaaaaggaaaacagacaaggagagaagctcatctttaaatagaagagatagtaacctacattcgtct

SEQ ID NO: 71069 - DNA, 467 bp, Homo sapiens; identical to SEQ ID NO: 66712

SEQ ID NO: 71070 - DNA, 503 bp, Homo sapiens
ccggggagaagccttacgagtgcagcgactgcgggaaagccttcaacgacccttcagcccttaggagccacgcaagaactcacctcaaagagaagccctttgactgcagtcagtgtggaaatgcattccggaccctctcggccctgaaaatccacatgcgagttcacactggcgagaggccttacaagtgtgatcagtgcgggaaggcttacggccggagctgccacctcatcgcacacaagagaacgcacaccggagagaggccctacgagtgtcacgactgtgggaaagctttccagcacccctcccacctcaaagagcacgtgaggaatcacacgggggagaagccctacgcgtgcacgcagtgcggcaaagccttccgctggaagtccaactttaatttgcacaagaagaaccacatggtggagaagacctacgaatgtaaagaatgcgggaaatcctttggcgatctcgtgtcccggaggaaacacatgaggattcac

SEQ ID NO: 71071 - DNA, 870 bp, Homo sapiens; identical to SEQ ID NO: 66714

SEQ ID NO: 71072 - DNA, 473 bp, Homo sapiens; identical to SEQ ID NO: 66715

SEQ ID NO: 71073 - DNA, 860 bp, Homo sapiens; identical to SEQ ID NO: 66716

SEQ ID NO: 71074 - DNA, 637 bp, Homo sapiens; identical to SEQ ID NO: 66717

SEQ ID NO: 71075 - DNA, 872 bp, Homo sapiens; identical to SEQ ID NO: 66718

SEQ ID NO: 71076 - DNA, 620 bp, Homo sapiens; identical to SEQ ID NO: 66719
  misc_feature (1)...(620): n = a,t,c or g

SEQ ID NO: 71077 - DNA, 1571 bp, Homo sapiens; identical to SEQ ID NO: 66720

SEQ ID NO: 71078 - DNA, 1174 bp, Homo sapiens; identical to SEQ ID NO: 66721

SEQ ID NO: 71079 - DNA, 1051 bp, Homo sapiens; identical to SEQ ID NO: 66722

SEQ ID NO: 71080 - DNA, 423 bp, Homo sapiens; identical to SEQ ID NO: 66723

SEQ ID NO: 71081 - DNA, 452 bp, Homo sapiens; identical to SEQ ID NO: 66724

SEQ ID NO: 71082 - DNA, 548 bp, Homo sapiens; identical to SEQ ID NO: 66725
  misc_feature (1)...(548): n = a,t,c or g

SEQ ID NO: 71083 - DNA, 407 bp, Homo sapiens; identical to SEQ ID NO: 66726

SEQ ID NO: 71084 - DNA, 838 bp, Homo sapiens; identical to SEQ ID NO: 66727

SEQ ID NO: 71085 - DNA, 1135 bp, Homo sapiens
  misc_feature (1)...(1135): n = a,t,c or g
ggattcgatccccttnnnnnntntaactgatgtncctagtccgtgtggtggaattcctcttggacctggtggacaggagctggggcggctgcaggtccctgcacagcaacgaggcattccttgctcaggcaagacacatcttgtcatctgttgaagaattcacagcagctcaggacagctctgcgatggtgggtgaagatgtcggctccctggctctggagagtaagtccctgcaaagccgccttgctgagcagcagcagcagcacgcccgggagatgagcgaggtgacggcggagctgcaccacgcacacaaggagctggatgatttgagacaacatttagataaatctttggaagagaacagtaggttaaaatcgcttttgttgagtatgaaaaaggaagtgaagagtgcagacactgcagccacgttaaatttgcagatcgctggacttcaaacaagtgtgaagaggctgtgtggcgagattgtggaactgaagcagcacctggagcactacgacaagatccaggagctcacgcagatgctgcaggagagccacagctccctggtcagcaccaatgaacacctgctgcaggagctgagccaggtgcgggcgcagcacagagccgaggtggagcagatgcactggagctaccaggagctcaagaagaccatggccctgtttccacacagcagcgccagccatggaggctgccaggcctgctgactcctgccgagaagctgggccaccccttaagcttcctggtaaagttacattgtctgcacctttgtacttctttattgagtgtactggctggcaagagttctctcttctgttggtaattatttaggatttttggaatgtattcaggacctgtagcttggttttctaaagcacctcgtaaaatgatatgattactccaagcccctctgcatgttttcagacagaacacattgacatattttgagacaaactgactattaatcttgtatccagtatcctgagatgaagtaaatgcagtgttttactgcctgatgtgaaagagagctatgtatgataattaaagaaaataattttctgtgtaacaagcaatctttatttaataaacaaataacattgttttgaaaaaaaaaaaa

SEQ ID NO: 71086 - DNA, 568 bp, Homo sapiens; identical to SEQ ID NO: 66729

SEQ ID NO: 71087 - DNA, 719 bp, Homo sapiens; identical to SEQ ID NO: 66730

SEQ ID NO: 71088 - DNA, 855 bp, Homo sapiens; identical to SEQ ID NO: 66731

SEQ ID NO: 71089 - DNA, 492 bp, Homo sapiens; identical to SEQ ID NO: 66732
  misc_feature (1)...(492): n = a,t,c or g

SEQ ID NO: 71090 - DNA, 1658 bp, Homo sapiens; identical to SEQ ID NO: 66733

SEQ ID NO: 71091 - DNA, 947 bp, Homo sapiens; identical to SEQ ID NO: 66734

SEQ ID NO: 71092 - DNA, 582 bp, Homo sapiens; identical to SEQ ID NO: 66735

SEQ ID NO: 71093 - DNA, 980 bp, Homo sapiens; identical to SEQ ID NO: 66736

SEQ ID NO: 71094 - DNA, 450 bp, Homo sapiens; identical to SEQ ID NO: 66737

SEQ ID NO: 71095 - DNA, 601 bp, Homo sapiens; identical to SEQ ID NO: 66738

SEQ ID NO: 71096 - DNA, 472 bp, Homo sapiens; identical to SEQ ID NO: 66739

SEQ ID NO: 71097 - DNA, 450 bp, Homo sapiens; identical to SEQ ID NO: 66740

SEQ ID NO: 71098 - DNA, 751 bp, Homo sapiens; identical to SEQ ID NO: 66741

SEQ ID NO: 71099 - DNA, 495 bp, Homo sapiens; identical to SEQ ID NO: 66742
  misc_feature (1)...(495): n = a,t,c or g

SEQ ID NO: 71100 - DNA, 447 bp, Homo sapiens; identical to SEQ ID NO: 66743

SEQ ID NO: 71101 - DNA, 393 bp, Homo sapiens; identical to SEQ ID NO: 66744

SEQ ID NO: 71102 - DNA, 584 bp, Homo sapiens; identical to SEQ ID NO: 66745

SEQ ID NO: 71103 - DNA, 659 bp, Homo sapiens; identical to SEQ ID NO: 66746

SEQ ID NO: 71104 - DNA, 418 bp, Homo sapiens; identical to SEQ ID NO: 66747

SEQ ID NO: 71105 - DNA, 650 bp, Homo sapiens; identical to SEQ ID NO: 66748

SEQ ID NO: 71106 - DNA, 976 bp, Homo sapiens; identical to SEQ ID NO: 66749

SEQ ID NO: 71107 - DNA, 2046 bp, Homo sapiens; identical to SEQ ID NO: 66750

SEQ ID NO: 71108 - DNA, 743 bp, Homo sapiens; identical to SEQ ID NO: 66751

SEQ ID NO: 71109 - DNA, 735 bp, Homo sapiens
aggaacccttcgagcctaaggaggagatatcaggaagcggaactcagcctggaggagcaaaggaggaaaccaaagtgttttctggaggggacactgaagggaatggggagctagggttcttgttgccttcagggccagggccaacatctgggggagggggtccatcctggaaaccagtggatcttcatgggaatgaaatcctgtcagggggtggaggacctgggggagcaggccaggccgtgcatgggcctgtgaagctaggggggacaccccctgcagatggaaaacgctttggttgcctgtgtgggaagcggtttgcagtgaagccaaagcgtgaccggcacatcatgctgaccttcagccttcggccttttggctgtggcatctgcaacaagcgcttcaagctgaagcaccatctgacagagcacatgaagacccatgctggagccctgcatgcctgtccccactgtggccgtcggttccgagtccatgcctgttttctccgccaccgggacctatgcaagggccagggctgggccactgcccactggacttacaagtgactgctgaggctatacactagcttctagaacaagataaccactgctgctgatggatacttttccctcactgccatggcacaccagtcatggatcttgtaatcatgccaagagaatagatacattatggacctcttgttcttagatatgggcctctcagcctggcagatgtgga

SEQ ID NO: 71110 - DNA, 472 bp, Homo sapiens; identical to SEQ ID NO: 66754

SEQ ID NO: 71111 - DNA, 877 bp, Homo sapiens; identical to SEQ ID NO: 66755

SEQ ID NO: 71112 - DNA, 494 bp, Homo sapiens; identical to SEQ ID NO: 66756

SEQ ID NO: 71113 - DNA, 600 bp, Homo sapiens; identical to SEQ ID NO: 66757

SEQ ID NO: 71114 - DNA, 622 bp, Homo sapiens; identical to SEQ ID NO: 66758

SEQ ID NO: 71115 - DNA, 509 bp, Homo sapiens
atcgaccgccatttgacgccgcgctgcaggaattcggcacgagggaaagccttcaactcttctaattcctgtcgagtgcatgaaagaactcatattggagaaaaaccatatgaatgtaaacgatgtggcaaatcattcagttggtccatttctcttcgattgcatgaaagaactcatactggagagaaaccttatgagtgtaaacagtgtcataaaaccttcagtttttcaagttcccttcgagaacacgaaacaactcacactggagagaaaccctatgaatgtaaacaatgtggtaaaaccttcagtttttcaagttcccttcaaagacatgaaaggactcacaatgcagagaaaccctatgaatgtaaacagtgtgggaaagccttcaggtgttcaagttattttcgaattcatgaaaggtcacacactggagagaaaccctatgaatgtaaacagtgtggaaaagttttcattcgttccagttcctttcgactgcatgaaagaac

SEQ ID NO: 71116 - DNA, 444 bp, Homo sapiens; identical to SEQ ID NO: 66760

SEQ ID NO: 71117 - DNA, 636 bp, Homo sapiens
gggccgagtgtctggaggcctctattgcccgatatgcccaccgtgtcgccaatagccgttatacctttgacggtgaaaccgtgacgctttcgccaagtcagggcgttaaccagctgcacggcgggccggaagggttcgacaaacgtcgctggcagattgtgaaccagaacgatcgtcaggtgctgtttgccctgagttcagatgatggtgatcagggcttcccgggtaatctcggcgcgacggtgcaatatcgtctgaccgacgataaccgtatctccattacttatcgcgccacagttgataaaccttgcccggtgaatatgactaatcacgtctatttcaatcttgacggcgagcagtctgacgtgcgcaatcacaagttgcagattctggcggacgaatatctgccggttgatgaaggcggcattccgcacgacggcctgaaatctgtcgccggaacgtcttttgatttccgcagcgccaaaatcatcgccagtgagtttcttgccgacgacgatcagcgcaaagtgaaaggttacgatcacgcattcttgttacaggccaaaggcgatggcaagaaagtggcggcgcatgtctggtcagcagatgaaaaattgcagctgaaggtctacacca

SEQ ID NO: 71118 - DNA, 1043 bp, Homo sapiens; identical to SEQ ID NO: 66762
  misc_feature (1)...(1043): n = a,t,c or g

SEQ ID NO: 71119 - DNA, 690 bp, Homo sapiens; identical to SEQ ID NO: 66763

SEQ ID NO: 71120 - DNA, 516 bp, Homo sapiens; identical to SEQ ID NO: 66764

SEQ ID NO: 71121 - DNA, 886 bp, Homo sapiens
cgctcggggaccagttctacaaggaagccattgagcactgccggagttacaactcacggctgtgtgcagagcgcagcgtgcgtcttcccttcctggactcacagactggggtggcccagaacaactgctacatctggatggagaagaggcaccgaggcccaggccttgccccgggccagctgtatacataccctgcccgctgctggcgcaagaagagacgattgcacccacctgaagatccaaaactgcggctgctggagataaaacctgaagtggagcttcccctgaagaaggatgggttcacctcagagagcaccacgctggaagccttgctccgtggcgagggggttgagaagaaggtggatgccagggaggaggaaagcatccaggaaatacagagggttttggaaaatgatgaaaatgtagaagaagggaatgaagaagaggatttggaagaggatattcccaagcgaaagaacaggactagaggacgggctcgcggctctgcagggggcaggaggaggcacgacgccgcctctcaggaagaccacgacaaaccttacgtctgtgacatctgtggcaagcgctacaagaaccgaccggggctcagctaccactatgctcacactcacctggccagcgaggagggggatgaagctcaagaccaggagactcggtccccacccaaccacagaaatgagaaccacaggccccagaaaggaccggatggaacagtcattcccaataactactgtgacttctgcttggggggctccaacatgaacaagaagagtgggcggcctgaagagctggtgtcctgcgcagactgtggacgctctgctcatttgggaggagaaggcaggaaggagaaggaggcagcggccgc

SEQ ID NO: 71122 - DNA, 654 bp, Homo sapiens; identical to SEQ ID NO: 66766

SEQ ID NO: 71123 - DNA, 2015 bp, Homo sapiens; identical to SEQ ID NO: 66767

SEQ ID NO: 71124 - DNA, 629 bp, Homo sapiens; identical to SEQ ID NO: 66768

SEQ ID NO: 71125 - DNA, 722 bp, Homo sapiens
atcgagaccagggtcagtgtggtggaattcccgggctgagccagcatcgccgcacgcacagcggcgagaagccgtaccgctgccccgactgcgggaagtccttcagccacggtgccaccctggctcagcaccgtggcatccacactggggcgcggccgtaccagtgcgcggcctgcggcaaggccttcggctggcgctccacgctgctgaaacatcgcagcagccacagcggggagaagccgcaccactgcccggtgtgtggcaaggccttcgggcacggctcgctcctggcacagcacctgcgcacgcacggcggcccgcggccccacaagtgcccggtgtgcgccaagggcttcggccagggctctgcgctgctcaaacacctgcgcacgcacacgggcgagcggccctacccgtgtccgcagtgcggcaaggccttcgggcagagctcggcgctgctgcagcaccagcgcacacacacggccgagcgcccctaccgctgcccccactgcggcaaagccttcgggcagagctccaacttgcaacaccacctgcgcatccacacgggcgagcggccctacgcctgcccgcactgctccaaggccttcggccagagctcagcgctgctccagcacctgcacgtgcattcgggcgagcgtccctatcgctgtcagctctgcgggagggccttcggccaggcctccagcctcaccaagcacaaa

SEQ ID NO: 71126 - DNA, 527 bp, Homo sapiens; identical to SEQ ID NO: 66770

SEQ ID NO: 71127 - DNA, 495 bp, Homo sapiens; identical to SEQ ID NO: 66771

SEQ ID NO: 71128 - DNA, 593 bp, Homo sapiens; identical to SEQ ID NO: 66772

SEQ ID NO: 71129 - DNA, 448 bp, Homo sapiens
ggcttttttctataaatgttactccgtagctaataaatgtggctagtggatgtcttttgagtgctggggccccagctagagctgcccctcctgtctggggcagacgccgtgaggagccccacgctcggcccaggtggcgcgagctagtgtttggccccaaaaactgactgctgagagccagagatacgaatgaaatgataaatcctgaggtttatttcacatggagtgtttaaagagcagaaggaagtgcgtgataagtgccctttcgcggtgagcacgcgagtctcatgttctctgcccttcccgctctgtgcccttggcagctcccctcccacccggtcactccgtccagcaagcacgcagacagcaagcccgcgccgctgacgcccgcctaccacacgcagccccaccaccgaattccaccgcactggtcgagtggtcattcaag

SEQ ID NO: 71130 - DNA, 1103 bp, Homo sapiens; identical to SEQ ID NO: 66774

SEQ ID NO: 71131 - DNA, 731 bp, Homo sapiens; identical to SEQ ID NO: 66775

SEQ ID NO: 71132 - DNA, 433 bp, Homo sapiens; identical to SEQ ID NO: 66776

SEQ ID NO: 71133 - DNA, 738 bp, Homo sapiens; identical to SEQ ID NO: 66777

SEQ ID NO: 71134 - DNA, 616 bp, Homo sapiens; identical to SEQ ID NO: 66778

SEQ ID NO: 71135 - DNA, 782 bp, Homo sapiens; identical to SEQ ID NO: 66779
  misc_feature (1)...(782): n = a,t,c or g

SEQ ID NO: 71136 - DNA, 1134 bp, Homo sapiens; identical to SEQ ID NO: 66780

SEQ ID NO: 71137 - DNA, 714 bp, Homo sapiens; identical to SEQ ID NO: 66781

SEQ ID NO: 71138 - DNA, 775 bp, Homo sapiens; identical to SEQ ID NO: 66782
  misc_feature (1)...(775): n = a,t,c or g

SEQ ID NO: 71139 - DNA, 418 bp, Homo sapiens; identical to SEQ ID NO: 66783

SEQ ID NO: 71140 - DNA, 430 bp, Homo sapiens; identical to SEQ ID NO: 66784

SEQ ID NO: 71141 - DNA, 1122 bp, Homo sapiens; identical to SEQ ID NO: 66785
  misc_feature (1)...(1122): n = a,t,c or g

SEQ ID NO: 71142 - DNA, 693 bp, Homo sapiens; identical to SEQ ID NO: 66786

SEQ ID NO: 71143 - DNA, 677 bp, Homo sapiens; identical to SEQ ID NO: 66787

SEQ ID NO: 71144 - DNA, 515 bp, Homo sapiens; identical to SEQ ID NO: 66788

SEQ ID NO: 71145 - DNA, 1208 bp, Homo sapiens; identical to SEQ ID NO: 66789

SEQ ID NO: 71146 - DNA, 515 bp, Homo sapiens; identical to SEQ ID NO: 66790

SEQ ID NO: 71147 - DNA, 421 bp, Homo sapiens; identical to SEQ ID NO: 66791

SEQ ID NO: 71148 - DNA, 809 bp, Homo sapiens; identical to SEQ ID NO: 66792

SEQ ID NO: 71149 - DNA, 625 bp, Homo sapiens; identical to SEQ ID NO: 66793

SEQ ID NO: 71150 - DNA, 744 bp, Homo sapiens; identical to SEQ ID NO: 66794

SEQ ID NO: 71151 - DNA, 1688 bp, Homo sapiens; identical to SEQ ID NO: 66795
  misc_feature (1)...(1688): n = a,t,c or g

SEQ ID NO: 71152 - DNA, 434 bp, Homo sapiens; identical to SEQ ID NO: 66796

SEQ ID NO: 71153 - DNA, 483 bp, Homo sapiens; identical to SEQ ID NO: 66797

SEQ ID NO: 71154 - DNA, 1299 bp, Homo sapiens
gaagaggtccagttctttgcaaacaccagtgggtccttcctgtgtgtttatagtttgaattccttcaactacacccacagtccaaaagcagactcactgtgtcccaggctaccagttcctccaagcaagtcatttcccttatttaaccgatgtgtccctcaaacacctgagtgctactccctatttgcatctgttttgataaatgatgttgacaccctccaccgaattctaagtggaatcatgtcgggaagagatacaatccttggcctgtgtatcctcgcattagccttgtctttggccatgatgtttaccttcagattcatcaccacccttctggttcacattttcatttcattggttattttgggattgttgtttgtctgcggtgttttatggtggctgtattatgactataccaacgacctcagcatagaattggacacagaaagggaaaatatgaagtgcgtgctggggtttgctatcgtatccacaggcatcacggcagtgctgctcgtcttgatttttgttctcagaaagagaataaaattgacagttgagcttttccaaatcacaaataaagccatcagcagtgctcccttcctgctgttccagccactgtggacatttgccatcctcattttcttctgggtcctctgggtggctgtgctgctgagcctgggaactgcaggagctgcccaggttatggaaggcggccaagtggaatataagcccctttcgggcattcggtacatgtggtcgtaccatttaattggcctcatctggactagtgaattcatccttgcgtgccagcaaatgactatagctggggcagtggttacttgttatttcaacagaagtaaaaatgatcctcctgatcatcccatcctttcgtctctctccattctcttcttctaccatcaaggaaccattgtgaaagggtcatttttaatctctgtggtgaggattccgagaatcattgtcatgtacatgcaaaacgcactgaaagaacagcatggtgcattgtccaggtacctgttccgatgctgctactgctgtttctggggtcttgacaaatacctgctccatctcaaccagaatgcatatactacaactgctattaatgggacagatttctgtacatcagcaaaagatgcattcaaaatcttgtccaagaactcaagtcactttacatctattaactgctttggagacttcataatttttctaagaaaggggttaagggtgtgtttcactggttttggaagaactcaatgcttttaactacaatcggcatttcag

SEQ ID NO: 71155 - DNA, 393 bp, Homo sapiens; identical to SEQ ID NO: 66799

SEQ ID NO: 71156 - DNA, 1207 bp, Homo sapiens; identical to SEQ ID NO: 66800

SEQ ID NO: 71157 - DNA, 556 bp, Homo sapiens; identical to SEQ ID NO: 66801

SEQ ID NO: 71158 - DNA, 517 bp, Homo sapiens; identical to SEQ ID NO: 66802

SEQ ID NO: 71159 - DNA, 633 bp, Homo sapiens; identical to SEQ ID NO: 66803

SEQ ID NO: 71160 - DNA, 586 bp, Homo sapiens; identical to SEQ ID NO: 66804

SEQ ID NO: 71161 - DNA, 553 bp, Homo sapiens; identical to SEQ ID NO: 66805

SEQ ID NO: 71162 - DNA, 477 bp, Homo sapiens; identical to SEQ ID NO: 66806

SEQ ID NO: 71163 - DNA, 877 bp, Homo sapiens; identical to SEQ ID NO: 66807

SEQ ID NO: 71164 - DNA, 524 bp, Homo sapiens; identical to SEQ ID NO: 66808

SEQ ID NO: 71165 - DNA, 430 bp, Homo sapiens; identical to SEQ ID NO: 66809

SEQ ID NO: 71166 - DNA, 706 bp, Homo sapiens; identical to SEQ ID NO: 66810

SEQ ID NO: 71167 - DNA, 416 bp, Homo sapiens
ggaggctggactgagccagtgtgcttgggaaagagactggcttttccctttcagagttgcccagggaaagcagctatgacatctacagagtgcccagcagtcagagcatggaggatcgtgggtacagccccgacacgcgtgtggtccgcttcctcaagggcaagagcatcgggctgcggctggcagggggcaatgacgtgggcatcttcgtgtccggggtgcaggcgggcagcccggccgacgggcagggcatccaggagggagatcagattctgcaggtgaatgacgtgccattccagaacctgacacgggaggaggcagtgcagttcctgctggggctgccaccaggcgaggagatggagctggtgacgcagaggaagcaggacattttctggaaaatggtgcagtcccgcgtg

SEQ ID NO: 71168 - DNA, 585 bp, Homo sapiens; identical to SEQ ID NO: 66811

SEQ ID NO: 71169 - DNA, 803 bp, Homo sapiens; identical to SEQ ID NO: 66812

SEQ ID NO: 71170 - DNA, 852 bp, Homo sapiens; identical to SEQ ID NO: 66813

SEQ ID NO: 71171 - DNA, 416 bp, Homo sapiens; identical to SEQ ID NO: 66814

SEQ ID NO: 71172 - DNA, 361 bp, Homo sapiens; identical to SEQ ID NO: 66815

SEQ ID NO: 71173 - DNA, 416 bp, Homo sapiens; identical to SEQ ID NO: 66816
  misc_feature (1)...(416): n = a,t,c or g

SEQ ID NO: 71174 - DNA, 579 bp, Homo sapiens; identical to SEQ ID NO: 66817

SEQ ID NO: 71175 - DNA, 794 bp, Homo sapiens; identical to SEQ ID NO: 66818
  misc_feature (1)...(794): n = a,t,c or g

SEQ ID NO: 71176 - DNA, 591 bp, Homo sapiens; identical to SEQ ID NO: 66819
  misc_feature (1)...(591): n = a,t,c or g

SEQ ID NO: 71177 - DNA, 605 bp, Homo sapiens; identical to SEQ ID NO: 66820

SEQ ID NO: 71178 - DNA, 2483 bp, Homo sapiens; identical to SEQ ID NO: 66821

SEQ ID NO: 71179 - DNA, 999 bp, Homo sapiens; identical to SEQ ID NO: 66822

SEQ ID NO: 71180 - DNA, 742 bp, Homo sapiens; identical to SEQ ID NO: 66823

SEQ ID NO: 71181 - DNA, 398 bp, Homo sapiens
aagaattttcctgaagtggtacagcatgaagagttcattcttctgaggcaaggagaggtggaaaagctaatcaagtgcgatgaaattcaggtggatcctgaagaaccagtctttgaggctgtcatcagttgggtgaagcatgccaagaaagagcagaaagactccttgcccagcctgctacagtatatgcagatgcccctgctaaccctcaggtatatcacagatgtaatagatgctgagcctttcatccactatggtttacaatgcagggatctggttgatgaagcaaagaagtttcatctgaggcctgaacttcagagtcagatgcagggacccaggacaagggctcgcctaggagccaatgaagtgcttttggtggctgggggcttcggaagcca

SEQ ID NO: 71182 - DNA, 366 bp, Homo sapiens; identical to SEQ ID NO: 66825

SEQ ID NO: 71183 - DNA, 574 bp, Homo sapiens; identical to SEQ ID NO: 66826

SEQ ID NO: 71184 - DNA, 575 bp, Homo sapiens; identical to SEQ ID NO: 66827

SEQ ID NO: 71185 - DNA, 439 bp, Homo sapiens; identical to SEQ ID NO: 66828

SEQ ID NO: 71186 - DNA, 788 bp, Homo sapiens; identical to SEQ ID NO: 66829

SEQ ID NO: 71187 - DNA, 929 bp, Homo sapiens; identical to SEQ ID NO: 66830

SEQ ID NO: 71188 - DNA, 1050 bp, Homo sapiens; identical to SEQ ID NO: 66831

SEQ ID NO: 71189 - DNA, 461 bp, Homo sapiens; identical to SEQ ID NO: 66832

SEQ ID NO: 71190 - DNA, 1199 bp, Homo sapiens; identical to SEQ ID NO: 66833

SEQ ID NO: 71191 - DNA, 383 bp, Homo sapiens; identical to SEQ ID NO: 66834
  misc_feature (1)...(383): n = a,t,c or g

SEQ ID NO: 71192 - DNA, 385 bp, Homo sapiens; identical to SEQ ID NO: 66835

SEQ ID NO: 71193 - DNA, 508 bp, Homo sapiens
ctgtgaggccatcggccacccaaggcctaccatcagctgggccaggaatggagaagaagttcagttcagtgacaggattcttctacagccagatgattccttacagatcttggcaccagtggaagcagatgtgggtttctacacttgcaatgccaccaatgccttgggatacgactctgtctccattgccgtcacattagcaggaaagccactagtgaaaacgtcacgaatgacagtgatcaacacggagaagcctgcagtcacagtcgatataggaagcaccatcaaaacagtgcagggagtgaatgtgacaatcaactgccaggttgcaggagtgcctgaagctgaagtcacttggttcaggaataaaagcaaactgggctccccgcaccatctgcacgaaggctccttgctgctcacaaacgtgtcctcctcggatcagggcctgtactcctgcagggcggccaatcttcatggagagctgactgagagcacccagctgctgatc

SEQ ID NO: 71194 - DNA, 527 bp, Homo sapiens; identical to SEQ ID NO: 66837

SEQ ID NO: 71195 - DNA, 2147 bp, Homo sapiens; identical to SEQ ID NO: 66838

SEQ ID NO: 71196 - DNA, 537 bp, Homo sapiens
ctgggagaggaggaagatgaagccgaggtggaagacgaggaggaggcggcgagccagcagttcctagagcagtcgctccagccggggctgcaggtggcccggtggggcggggttgcgcttccccgagagcacatcgagggcggcggcggcccgagcgacccctcagagtttggcaccaagttcagggcaccgccaaggtctgcggcggcctctgaagatgcccggcagccggcaaagcccccctactcgtacatcgcgctcatcaccatggccatcctgcaaaacccgcacaagcgcctcacgctcagcggcatctgcgccttcattagtggccgcttcccctactaccgccgcaagttccccgcctggcagaacagcatccgccacaacctctcgctgaacgactgcttcgttaagatcccccgcgagccgggccacccaggcaagggcaactactggagcctggaccccgcctcccaagacatgttcgacaatggcagctttctccggcgtaggaagcgtttcaagcgccaccaa

SEQ ID NO: 71197 - DNA, 471 bp, Homo sapiens; identical to SEQ ID NO: 66840

SEQ ID NO: 71198 - DNA, 483 bp, Homo sapiens; identical to SEQ ID NO: 66841

SEQ ID NO: 71199 - DNA, 1229 bp, Homo sapiens; identical to SEQ ID NO: 66842

SEQ ID NO: 71200 - DNA, 474 bp, Homo sapiens
tttcgtcgtggggccggggcggagagaggcgagcaccgggaaggggagcgtggggccgctggaatgggtgaatttaaggtccatcgagtacgtttctttaattatgttccatcaggaatccgctgtgtggcttacaataaccagtcaaacagattggctgtttcacgaacagatggcactgtggaaatttataacttgtcagcaaactactttcaggagaaatttttcccaggtcatgagtctcgggctacagaagctttgtgctgggcagaaggacagcgactctttagtgctgggctcaatggcgagattatggagtatgatttacaggcgttaaacatcaagtatgctatggatgcctttggaggacctatttggagcatggctgccagccccagtggctctcaacttttggttggttgtgaagatggatctgtgaaactatttcaaattaccccagacaaaataccagtt

SEQ ID NO: 71201 - DNA, 857 bp, Homo sapiens; identical to SEQ ID NO: 66844

SEQ ID NO: 71202 - DNA, 592 bp, Homo sapiens; identical to SEQ ID NO: 66845

SEQ ID NO: 71203 - DNA, 730 bp, Homo sapiens; identical to SEQ ID NO: 66846

SEQ ID NO: 71204 - DNA, 773 bp, Homo sapiens; identical to SEQ ID NO: 66847
  misc_feature (1)...(773): n = a,t,c or g

SEQ ID NO: 71205 - DNA, 2166 bp, Homo sapiens; identical to SEQ ID NO: 66848

SEQ ID NO: 71206 - DNA, 431 bp, Homo sapiens; identical to SEQ ID NO: 66849

SEQ ID NO: 71207 - DNA, 1992 bp, Homo sapiens
aaatatacttacttagaacttcccttcatcgagaaagagaacaagcgcaacaacttcatcaacttcttgcattgaaagaacaggaacacaggaaggaacttgaaacaagggagttttttactgatgctgacttccaggatgccttagctaaagaaatagccaaagaagagaaaaagcatgagcaaatgataaaagaataccaagagaaaattgacgtgttaagccagcagtatatggatttagaaaatgaattccgtattgctttaactgttgaagccagaagatttcaagatgttaaagatggttttgaaaatgttgcaactgagttagcaaagagcaaacatgctcttatttgggctcaacgaaaagaaaatgagtcttcctctttaattaaagatctgacctgtatggtaaaggaacaaaaaacaaaactggcagaagtttctaaattgaaacaagaaacagcagcaaatttacagaatcaaatcaacacccttgaaattttaattgaagatgacaagcagaagagtattcaaatagaacttctcaagcacgaaaaagtccagcttatttctgagctagcagccaaggaatcactaatatttggtttaaggacagaaagaaaagtatggggacatgagctggcacaacaaggatcttctctagcccaaaatcgtggaaaattggaggctcaaattgagagtttatctagagagaatgaatgtctgcgaaagacaaatgaaagtgatagtgatgcattaagaataaagtgcaaaatcatagacgaccaaactgaaactattagaaaattaaaagattgtttacaagaaaaagatgaacacatcaaaagattacaagaaaagatcacagaaatagaaaaatgcactcaagaacaacttgatgaaaaatcttcacaactggatgaggtacttgagaagttggaaaggcacaatgaaagaaaagaaaaactaaaacaacagttgaaaggaaaggaagtagaacttgaagaaatcagaaaagcttacagtacactgaatcggaagtggcatgataaaggagaacttctatgtcatcttgaaacacaagtaaaagaagtgaaagaaaaatttgaaaacaaggaaaagaaacttaaagcggaaagagacaaaagtattgaactacaaaagaatgcaatggaaaaacttcatagtatggatgatgcctttaaaagacaagttgatgcaattgttgaagctcatcaagctgaaatagcacagctggccaatgaaaagcagaagtgtattgattctgcaaatttaaaggtccatcaaattgaaaaagaaatgcgtgaacttttggaagaaacatgcaagaacataaaaacaatggaagcaaaaattaagcaacttgcttttgctttaaatgaaattcagcaagatatgtgatggttctgagaatgaatttaattgaaatagaccagcagacctattgtaaaaatgattaaatattgtaatagtagtaactgctatgactttgaaatgtctctttctatacatttcattatgaatatatttttaaagacttttgatcaagtattaattgtataggttttttataataaattgttgacaattttgtctattagaaaaaactatcataactagacttacaatatttttcttgtttctgtactatacgttgtttggtaattacacatttgcctacaaatttgtgaatgaaaagattagtattttcaccatatgaggtaaaacattttaatcattgttatcttattgtgatgatgaagaactaattatatttgttatttaattgatgtagctcaattcttttaaagtacttatgtagccaaaaagcatttgaaatctgtatgataaaagatgtggcattcttaagaaagtatatgtagccatctccacatcactcattatgaccccttcttttataatgcttatatcttttcattaaagattacatttaaggttttataaaaaa

SEQ ID NO: 71208 - DNA, 1013 bp, Homo sapiens; identical to SEQ ID NO: 66851
  misc_feature (1)...(1013): n = a,t,c or g

SEQ ID NO: 71209 - DNA, 389 bp, Homo sapiens; identical to SEQ ID NO: 66852
  misc_feature (1)...(389): n = a,t,c or g

SEQ ID NO: 71210 - DNA, 1979 bp, Homo sapiens; identical to SEQ ID NO: 66853

SEQ ID NO: 71211 - DNA, 650 bp, Homo sapiens
aaggggacaagtcaagaccgtgggcgagcccatcttaatggaacttgaatatcacgccatggatgccctcgacctcccgggatgtttccgaacaaggagtcacagctaccttcgagccattcaagccggctactcccaagatgacgaatgtattcccatgatgacaccctctgacatcacctccaccatcaggtcaacagcaggtaaggggacgcccgttttcagcctttccagcggggactctagaggcatacctgtcttcttcctagaaggagcgagcagcacacagcagcacagtacaatgtactctcctgacatttagtaacgtttcctaattgcttgtgttacactgtcacattcgcaagggtgttttgtctcgggtagatacacctttctttttcttagaatgaaatctactcattagcaaggttccttaaaataatcaagtgtaacttgtgtaaagttttagagaggagaaaaaatggaagtgctagcatttggaaggtgattaagttttaaataccaaagtttaatggattgcagtgagatttctgctgatgcgcagtgtctctcgcaaggcccttaagttgggtcccgccagtgttttgccagttaagccgttgtacgggtacggacattgaattcgtaat

SEQ ID NO: 71212 - DNA, 392 bp, Homo sapiens; identical to SEQ ID NO: 66855
  misc_feature (1)...(392): n = a,t,c or g

SEQ ID NO: 71213 - DNA, 972 bp, Homo sapiens; identical to SEQ ID NO: 66856

SEQ ID NO: 71214 - DNA, 683 bp, Homo sapiens; identical to SEQ ID NO: 66857

SEQ ID NO: 71215 - DNA, 561 bp, Homo sapiens; identical to SEQ ID NO: 66858
  misc_feature (1)...(561): n = a,t,c or g

SEQ ID NO: 71216 - DNA, 471 bp, Homo sapiens; identical to SEQ ID NO: 66859

SEQ ID NO: 71217 - DNA, 615 bp, Homo sapiens; identical to SEQ ID NO: 66860

SEQ ID NO: 71218 - DNA, 444 bp, Homo sapiens; identical to SEQ ID NO: 66861

SEQ ID NO: 71219 - DNA, 521 bp, Homo sapiens
gcgaggaattccaagcccagagctgctctgcgcaagcgcgaccgaccgagcagctccgaggagtccgcccggaaacaaacattccccagggcaatgtcacgacttggtcttcccgaggagccagtcagaaacagtttgctagatgatgctaaggcccgcttaagaaagtatgatattggaggcaaatattctcacttgccatataacaaatactccgtccttttgccattggtggctaaagaaggaaaactccatttgttgttcaccgtccggtcagagaagacagatacattgataactccatttgtgggtttaatagaccacaacttccaggcccagccgaatcctgctgaagttaaggatgtattcctggtgcctctggcctatttcctgcatccacaggtccatgaccagcattacgtcacacgtcttggtcaccgttttattaatcatatctttgagtacacaaaccctgaagacggtgtcacttaccagatcaagggaatgacggcaaaccctgc

SEQ ID NO: 71220 - DNA, 996 bp, Homo sapiens
  misc_feature (1)...(996): n = a,t,c or g
ggggccnaatcgagatcgtaggcagtgcggnggaactccaaaccgcccacccagccaggggcgaagggacagcagctcatcctcctgcctccctgccctgcagggtcctgagaatggaagagtttttcccagagacctaccgcctggacctcaaacacgagagagaggcctttttcaccttgtttgatgaaacccagatatggatctgcaagcccacagcctccaaccagggcaaaggcatcttcctgctccggaaccaggaggaagttgccgccctgcaggccaagacccggagcatggaggacgaccccatccaccacaagacgccgttccgggggcctcaggcgcgggtggtgcagaggtacatccagaacccgctgctggtggacgggagaaagtttgacgtgcgctcctacctgctcattgcctgcaccacaccctacatgatcttctttggccacggctatgctcgcctcacccttagcctttacgacccccattccagcgacctcggcggccacttgaccaaccagttcatgcagaagaagagccctctgtacatgctgctgaaggagcacacggtgtggagcatggaacacctcaaccgctacatcagtgacacgttctggaaggcccggggcctcgccaaggactgggtcttcaccaccctcaagaagcggatgcagcagatcatggcccactgctttctggccgccaagcccaagctggactgcaagctgggttactttgacctcattggctgtgacttcctgattgatgacaacttcaaggtatggctgctggagatgaattctaacccagccctgcacaccaactgcgaggtcctgaaggaggtcatcccaggtgtggtcatcgagaccctggacctggtgctcgagaccttccggaagagcctgcgcggccagaagatgttgcctctgctgtcccagcgccgcttcgtgctcctgcacaacggtgaggccgacccgcggccgc

SEQ ID NO: 71221 - DNA, 660 bp, Homo sapiens; identical to SEQ ID NO: 66863
  misc_feature (1)...(660): n = a,t,c or g

SEQ ID NO: 71222 - DNA, 1839 bp, Homo sapiens; identical to SEQ ID NO: 66864
  misc_feature (1)...(1839): n = a,t,c or g

SEQ ID NO: 71223 - DNA, 466 bp, Homo sapiens; identical to SEQ ID NO: 66865

SEQ ID NO: 71224 - DNA, 465 bp, Homo sapiens
  misc_feature (1)...(465): n = a,t,c or g
nttgatggcccgccggcggatgcctcgctccaactcccaggagaacgtggaagcgtcccncccatcccaggatgggaaaaggcagtacaagatgatctgccacgtcttcgagtctgaggatgtaagggttgcttcctttgatctccttttgggttaggttctcttgacttctcagaacctgattcagtctaattcatcacacatgatgcatgtatttattgtgcacgtactgtgtgtcaggcactgttccagcactagagatataaggctgagtaaaacagacagggtactcatcgcaagggctgaaaggaggcagaaaatcaataggtaaatatacttaatgtaaaattgggtagtggggagtgctccacagacaaataaaacagggtcaggggatggagggacaggggctatggaattccaccacacggactagggatcatcgatctcaattnnnntccccca

SEQ ID NO: 71225 - DNA, 452 bp, Homo sapiens
acttctgcagggccatcgggcctcaggtgtgcagaagatgtggcctctctggcctcttctgcgccagggaccctggcttccccttggtggctgcccaagttttctgactctccaagcaccactctgtagtttaggtttgtctaaagctcagttttggtggcaactgcactgtgccgcctccgcatgttttctgtcgagtctgtctgtgcagtgcttctggctcacaaggagcctgagaagtatctcctgaattctcctccctggaatcacccgcttgctattttcttctgcaggatgtctatgcctacacacaagttggagttccagactgtagaatattcaccgtgaaccccaagggtgaattaatacaagaaagaaccaaaggaaacaagtcatcgtaagtacattctcagctctcagcccggcgcccgaattccaccgcactgggctaa

SEQ ID NO: 71226 - DNA, 1641 bp, Homo sapiens
gcggccgctgctcactgacctctaccaggccaccatggcgttgggctattggcgcgcgggccgggcgcgggacgccgccgagttcgagctcttcttccgccgctgcccgttcggcggcgccttcgccttggccgccggcttgcgcgactgtgtgcgcttcctgcgcgccttccgcctgcgggacgccgacgtgcagttcctggcctcggtgctgcccccagacacggatcctgcgttcttcgagcaccttcgggccctcgactgctccgaggtgacggtgcgagccctgcccgagggctccctcgccttccccggagtgccgctcctgcaggtgtccgggccgctcctggtggtgcagctgctggagacaccgctgctctgcctggtcagctacgccagcctggtggccaccaacgcagcgcggcttcgcttgatcgcagggccagagaagcggctgctagagatgggcctgaggcgggctcagggccccgatgggggcctgacagcctccacctacagctacctgggcggcttcgacagcagcagcaacgtgctagcgggccagctgcgaggtgtgccggcggccgggaccctggcccactccttcgtcacttccttttcaggcagcgaggtgccccctgacccgatgttggcgccagcagctggtgagggccctggggtggacctggcggccaaagcccaggtgtggctggagcaggtgtgtgcccacctggggctgggggtgcaggagccgcatccaggcgagcgggcagcctttgtggcctatgccttggcttttccccgggccttccagggcctcctggacacctacagcgtgtggaggagtggtctccccaacttcctagcagtcgccctggccctgggagagctgggctaccgggcagtgggcgtgaggctggacagtggtgacctgctacagcaggctcaggagatccgcaaggtcttccgagctgctgcagcccagttccaggtgccctggctggagtcagtcctcatcgtagtcagcaacaacattgacgaggaggcgctggcccgactggcccaggagggcagtgaggtgaatgtcattggcattggcaccagtgtggtcacctgcccccaacagccttccctgggtggcgtctataagctggtggccgtggggggccagccacgaatgaagctgaccgaggaccccgagaagcagacgttgcctgggagcaaggctgctttccggctcctgggctctgacgggtctccactcatggacatgctgcagttagcagaagagccagtgccacaggctgggcaggagctgagggtgtggcctccaggggcccaggagccctgcaccgtgaggccagcccaggtggagccactactgcggctctgcctccagcagggacagctgtgtgagccgctcccatccctggcagagtctagagccttggcccagctgtccctgagccgactcagccctgagcacaggcggctgcggagccctgcacagtaccaggtggtgctgtccgagaggctgcaggccctggtgaacagtctgtgtgcggggcagtccccctgagactcggagcggggctgactggaaacaacacgaatcactcacttttccccacaaaaaaaaaa

SEQ ID NO: 71227 - DNA, 1279 bp, Homo sapiens; identical to SEQ ID NO: 66869

SEQ ID NO: 71228 - DNA, 425 bp, Homo sapiens; identical to SEQ ID NO: 66870

SEQ ID NO: 71229 - DNA, 681 bp, Homo sapiens; identical to SEQ ID NO: 66871

SEQ ID NO: 71230 - DNA, 404 bp, Homo sapiens; identical to SEQ ID NO: 66872

SEQ ID NO: 71231 - DNA, 1352 bp, Homo sapiens
aaatgttgtcatttacaggaaaatttgaattctcatgttctgattctttctctgcaactttctaaagctgagagtaagttcagagtcctcgaaactgagctccattacacaggagaggctctgaaagaaaaggctttggtttttgaacacgtgcaaagtgagctaaagcaaaaacagagtcaaatgaaggacattgaaaaaatgtacaaaagtggatacaatacaatggaaaaatgcatagaaaagcaggaaagattttgtcaactaaaaaaacaaaatatgttgcttcaacagcaactggatgatgctcgcaacaaagctgacaatcaagaaaaagcaatacttaatattcaagccagatgtgatgctagagtacaaaaccttcaagctgagtgcagaaagcaccgtcttttactagaagaagacaataaaatgttggtcaatgaactgaatcattcgaaagaaaaagaatgccaatatgaaaaagagaaagcagaaagagaagtagctgtgagacagcttcaacaaaaacgagatgatgtcttaaacaaaggatcagcaacaaaagctctgctggatgcttcatcgcgtcactgcacctatttagaaaatgggatgcaggattcaaggaagaaattagaccagatgagaagtcaatttcaagaaatacaggatcaacttacagctactataagatgtactaaggagatggaaggcgacacacaaaagcttgaagtagaacatgtgatgatgagaaaaattattaaaaaacaggatgaccaaattgagcggcttgagaaaatcctgcagcattcaagtttgatgctgcaggtgtttgagagctagatgaaggtatgttgccaaaatttatgaattaaattcaaatcattgatttctgaaataaactctaagtagtgaacggtattccctctcaattgcttggttaataaatgctacattaaatattttttcttacacacatctagtgaaagatgtgaaaacataaacattcatagtgaagggtatacttatgctttgttaattcatcatgtttcatagctttaaaaaaatcgcaagaaatctgtgtatccctttttttctggccctacacttttcttctgccacccctatagaactgtcagcctgcacactgaaactgttctcagaaaacaaaggcatcatcaacttctcaaggttaaggtagtgatttaaggctaacagaccccacactcatgtgataataattagttaagcaattacaggtcacaagcagtcacttgtccagtgacattttaaatctctagtcatgactttgtcattggtttacttttgcccctgggaaaagttgaaaa

SEQ ID NO: 71232 - DNA, 325 bp, Homo sapiens; identical to SEQ ID NO: 66874

SEQ ID NO: 71233 - DNA, 678 bp, Homo sapiens
aaggaaagtggaacaagctaaaggtcttggtttccaaagatctacatttgcttgaggaaattgctctcacactcagagcttttgaggccgattcaacagtcattgagaagtggatggatggcgtgaaagacttcttaatgaaacagcaggctgcccaaggagacgacgcaggtctacagaggcagttagaccagtgctctgcatttgttaatgaaatagaaacaattgaatcatctctgaaaaacatgaaggaaatagagactaatcttcgaagtggtccagttgctggaataaaaacttgggtgcagacaagactaggtgactaccaaactcaactggagaaacttagcaaggagatcgctactcaaaaaagtaggttgtctgaaagtcaagaaaaagctgcgaacctgaagaaagacttggcagagatgcaggaatggatgacccaggccgaggaagaatatttggagcgggattttgagtacaagtcaccagaagagcttgagagtgctgtggaagagatgaaggtgaggcggggacgaccagtgccaacaggcttcatgcctccctcctccctttaaaaccagcacatcaatcatctgtctatctgtcaaacactatgtgcatgtagcatctttcacagtaggtttttgaattaaaaaaacataacagggtatt

SEQ ID NO: 71234 - DNA, 708 bp, Homo sapiens; identical to SEQ ID NO: 66876

SEQ ID NO: 71235 - DNA, 2414 bp, Homo sapiens; identical to SEQ ID NO: 66877

SEQ ID NO: 71236 - DNA, 1050 bp, Homo sapiens
gttgcctgtgcccctggagtctgtaaaagagatgcttaagtcagtcatgcaggaactcgaagactatagtgaaggaggtcctctctataaaaatggttctttgcgaaatgcagattcagaaataaaacattctacaccatctcctaccaaatattcactatcaccaagtaaaagttacaaggtaaacaggaaagaatgggaatcatttcattgtgaaattgtttctaagtgttttaaatgctcttttgttatttttatttttttttttaggtattctcccaaaacaccacctcgatgggggcagaaggatcaggaattctttacggaaaatgatttgccaagaagtaaaggccattacgaaactaaatagcagtaagtcagcatcccgtcatcgttggcccacagagaattatggaccagactcggtgcctgatggatatcaggggtcacagacatttcatggggctccactaacagttgcaactactggcccttcagtatattatagtcagtcaccagcatataattcccagtatcttctcagaccagcagctaatgttactcccacaaagggttcttctaatacagaatttaagtcaaccaaagaaggattttccatcgctgtgtctgctgatggatttaaatttggcatttcggaaccaggaaatcaagaaaagaaaagtgaaaagcctcttgaaaatgatactggcttccaggctcaggatattagtggccagaagaatggccgtggtgtgatttttggccaaacaagtagcacttttacatttgcagatgttgcaaaatcaacttcaggagaaggatttcagtttggcaaaaaagaccccaatttcaagggattttcaggtgctggagaaaaattattctcatcacaatgcggtaaaatggccaataaagcaaacacttccggtgactttgagaaagatgatgatgcctataagactgaggacagcgatgacatccattttgaaccagtagttcaaatgcccgaaaaagtagaacttgtaacaggagaagaagatgaaaaagttc

SEQ ID NO: 71237 - DNA, 1302 bp, Homo sapiens; identical to SEQ ID NO: 66879

SEQ ID NO: 71238 - DNA, 632 bp, Homo sapiens; identical to SEQ ID NO: 66880

SEQ ID NO: 71239 - DNA, 821 bp, Homo sapiens; identical to SEQ ID NO: 66881

SEQ ID NO: 71240 - DNA, 608 bp, Homo sapiens; identical to SEQ ID NO: 66882

SEQ ID NO: 71241 - DNA, 749 bp, Homo sapiens; identical to SEQ ID NO: 66883

SEQ ID NO: 71242 - DNA, 729 bp, Homo sapiens; identical to SEQ ID NO: 66884

SEQ ID NO: 71243 - DNA, 858 bp, Homo sapiens; identical to SEQ ID NO: 66885

SEQ ID NO: 71244 - DNA, 569 bp, Homo sapiens; identical to SEQ ID NO: 66886

SEQ ID NO: 71245 - DNA, 371 bp, Homo sapiens; identical to SEQ ID NO: 66887

SEQ ID NO: 71246 - DNA, 800 bp, Homo sapiens
attttgtgttggatccctattctggagtcataaagtcaaatgtctcatttgatagagagcagcagagttcctacacttttgatgtcaaagccactgatggaggacaaccacctcgttcctctactgcaaaagtaactatcaacgtcatggatgtcaatgacaacagcccagttgtcatttctccaccgtctaatacttcctttaagttggtgcccctctcagccattcctggctccgtggtagcagaagtttttgcagtggatgttgacactggaatgaacgctgaactaaagtatactatagtgagtggaaacaataaaggcttattccggattgatccagtaacaggtaacattactctggaagaaaaaccagcacctactgatgtgggattgcatcgtttggtggtcaacataagtgacctggggtaccctaagtctttgcacacgcttgtgcttgtattcctttatgttaacgacactgctggaaatgcctcctatatctatgacttgatccgcaggactatggagaccccgttggacaggaacataggggatagtagccaaccctatcaaaatgaggactatctaaccatcatgattgccatcatcgccggtgccatggtggtcattgttgtgatcttcgtcaccgttctggtgcgctgtcgccatgcatcaaggttcaaagcagctcagaggagcaagcaaggtgccgaatggatgtccccaaaccaggagaacaagcaaaacaagaaaaagaaaagaaagaaaaggaagtctcccaaaagctctcttttgaac

SEQ ID NO: 71247 - DNA, 399 bp, Homo sapiens; identical to SEQ ID NO: 66889

SEQ ID NO: 71248 - DNA, 667 bp, Homo sapiens; identical to SEQ ID NO: 66890
  misc_feature (1)...(667): n = a,t,c or g

SEQ ID NO: 71249 - DNA, 662 bp, Homo sapiens; identical to SEQ ID NO: 66891

SEQ ID NO: 71250 - DNA, 371 bp, Homo sapiens; identical to SEQ ID NO: 66892
  misc_feature (1)...(371): n = a,t,c or g

SEQ ID NO: 71251 - DNA, 694 bp, Homo sapiens; identical to SEQ ID NO: 66893

SEQ ID NO: 71252 - DNA, 404 bp, Homo sapiens; identical to SEQ ID NO: 66895

SEQ ID NO: 71253 - DNA, 768 bp, Homo sapiens; identical to SEQ ID NO: 66896

SEQ ID NO: 71254 - DNA, 396 bp, Homo sapiens; identical to SEQ ID NO: 66897

SEQ ID NO: 71255 - DNA, 752 bp, Homo sapiens; identical to SEQ ID NO: 66898

SEQ ID NO: 71256 - DNA, 1064 bp, Homo sapiens
gcggtggaattcagcagcgcaggcaagatgtattttgtgactgcagtattctagttgaagggaaggtcttcaaagcacatcgaaatgtattattcgctaggagcggctactttaaaatgcttctttctcagaattcaaaggagacgagtcagccaaccacagctacatttcaggctttctcccctgacacttttacagttatcttggacttcgtatattctggcaaactgtctcttactggtcagaatgtcatagaagtgatgtcggctgctagcttccttcagatgactgatgtcataagtgtatgtaagacttttattaaatcttccttagacattagtgagaaagaaaaagatcgctatttcagtctctcagataaagatgccaattctaatggtgtagaacgttcctctttttatagggggggctggcaagaaggaagcagttctccacgttctcacctaagcccagagcaaggaacaggtataataagtggaaaatcttggaataagtataattatcatccagcctcccagaagaatactcaacaacccttggccaagcatgaaccaaggaaagagtccattaaaaagaccaaacatttgagattgtcacagccttctgaagttactcattataagtcaagcaaacgagaagtacgaacatctgattcttccagccatgtttcccagtctgaagaacaagcacagattgatgctgaaatggactctactcctgttggctatcagtacggccaaggatctgatgtcacatccaaaagctttccagatgatctgcctcggatgcgattcaagtgcccgtactgcacacatgtggtgaagcggaaggcagacctaaagcgccaccttcgttgtcatacaggagaaaggccctatccatgtcaagcttgtggaaaaagatttagcaggctagaccatctaagtagccattttcgaacaattcaccaggcatgtaaactcatctgcagaaaatgtaaacgtcatgtgacagatctaacagggcaagcggtacaggagggaaccaggcgctacagactgtgtaat

SEQ ID NO: 71257 - DNA, 582 bp, Homo sapiens; identical to SEQ ID NO: 66900

SEQ ID NO: 71258 - DNA, 388 bp, Homo sapiens
ttttttttttttaccggttaaaaccattcttttccacctggttttactgaaacatttggaaaaaggaaaaaatgtcgtcccttttaaaaaaaaaaaaaaggggggcccttttaaaagaacccttggggggcccaaatttaacgggggctggcaaggaaaaatttttttccttatggggggccgaataaaaaccaacttgggaattttgggaaagaaccttttttttgggggggggacttattggcccaacctccctacaaaaattaaaggctttagggaaaaaaaaaatttttaaggggaaaagggggtaaaacaacctcaatagcctggcggttggaaagttttgtttccggggtttaatttaaaaaaattttacccccgggggctg

SEQ ID NO: 71259 - DNA, 527 bp, Homo sapiens; identical to SEQ ID NO: 66770

SEQ ID NO: 71260 - DNA, 1239 bp, Homo sapiens; identical to SEQ ID NO: 66902

SEQ ID NO: 71261 - DNA, 552 bp, Homo sapiens
aagggtacgggcagattgagattacagaaggatcccactggttgccttgtgtgaggacccagggagaagggggaggctgtccctgtttgagtaggagatgagagctactggtggctatgagtggaaagaagtgagcagaggtgagcagaaatcccaaggactggtgatgataggatgatggtgggaaccaggatgggctttgggcagaccctgacccctctctctgcctgtcggcccaccagataataatccctgtgttcctgggcgagtcagtgccacccgagatgttggcggccactttggctgagctggacggatgcctgcagctgctcgaggacaagttcctgcgggaccaggccttccttactgggccccgtatctctgtggctggcttggtggcaatcacggagctgaggcatgagagtgccatggggtgcggtggcccgctgggcagtggtgtatccgggaagggagctgacatcccagctcatgttgtcttttctggctgtgggaccctgtgtgagtcacttctccttctgagcctcgaattcc

SEQ ID NO: 71262 - DNA, 732 bp, Homo sapiens; identical to SEQ ID NO: 66904

SEQ ID NO: 71263 - DNA, 472 bp, Homo sapiens; identical to SEQ ID NO: 66905

SEQ ID NO: 71264 - DNA, 525 bp, Homo sapiens; identical to SEQ ID NO: 66906
  misc_feature (1)...(525): n = a,t,c or g

SEQ ID NO: 71265 - DNA, 439 bp, Homo sapiens; identical to SEQ ID NO: 66907

SEQ ID NO: 71266 - DNA, 450 bp, Homo sapiens; identical to SEQ ID NO: 66908

SEQ ID NO: 71267 - DNA, 440 bp, Homo sapiens; identical to SEQ ID NO: 66909

SEQ ID NO: 71268 - DNA, 1032 bp, Homo sapiens; identical to SEQ ID NO: 66910

SEQ ID NO: 71269 - DNA, 1221 bp, Homo sapiens; identical to SEQ ID NO: 66911

SEQ ID NO: 71270 - DNA, 1273 bp, Homo sapiens; identical to SEQ ID NO: 66912

SEQ ID NO: 71271 - DNA, 170 bp, Homo sapiens; identical to SEQ ID NO: 66913

SEQ ID NO: 71272 - DNA, 489 bp, Homo sapiens; identical to SEQ ID NO: 66914

SEQ ID NO: 71273 - DNA, 457 bp, Homo sapiens; identical to SEQ ID NO: 66915

SEQ ID NO: 71274 - DNA, 493 bp, Homo sapiens; identical to SEQ ID NO: 66916

SEQ ID NO: 71275 - DNA, 455 bp, Homo sapiens
ggaaatagatattatctataaaatcctgctggattctgatttaggcagtagtttgcctctaagccaggctgattttggcctgtggtttaaccataaaggtcgacattattttagtggtattgccgaagtaggccatatctcccgtctgattcaggatttcgacggtattttcaatcaaaccatgcgtaacaccagaaatttgaataacagaagtctgcgggtgaaatttttattacagataagaaataccgtatcgcaaattattaccttgctgcgtgaattgtttgaagaagtatcgcgccacgaagtcggtatggatgtactgacgaaattacttaaccgccgtttcctaccgactatcttcaaacgcgaaattgcccatgccaaccggaccggtacaccgctgtcagtgctgattattgacgttgataaattcaaagagatcaacgatacgg

SEQ ID NO: 71276 - DNA, 991 bp, Homo sapiens; identical to SEQ ID NO: 66918
  misc_feature (1)...(991): n = a,t,c or g

SEQ ID NO: 71277 - DNA, 530 bp, Homo sapiens; identical to SEQ ID NO: 66919

SEQ ID NO: 71278 - DNA, 883 bp, Homo sapiens; identical to SEQ ID NO: 66920

SEQ ID NO: 71279 - DNA, 528 bp, Homo sapiens; identical to SEQ ID NO: 66921

SEQ ID NO: 71280 - DNA, 389 bp, Homo sapiens; identical to SEQ ID NO: 66922

SEQ ID NO: 71281 - DNA, 568 bp, Homo sapiens; identical to SEQ ID NO: 66923

SEQ ID NO: 71282 - DNA, 541 bp, Homo sapiens; identical to SEQ ID NO: 66924
  misc_feature (1)...(541): n = a,t,c or g

SEQ ID NO: 71283 - DNA, 510 bp, Homo sapiens; identical to SEQ ID NO: 66926
  misc_feature (1)...(510): n = a,t,c or g

SEQ ID NO: 71284 - DNA, 412 bp, Homo sapiens; identical to SEQ ID NO: 66927

SEQ ID NO: 71285 - DNA, 454 bp, Homo sapiens; identical to SEQ ID NO: 66928

SEQ ID NO: 71286 - DNA, 866 bp, Homo sapiens; identical to SEQ ID NO: 66929

SEQ ID NO: 71287 - DNA, 429 bp, Homo sapiens
ctcttggtgctggagcagttattgggcacactgctcccagagatccaggcctacacgcaggagcagtggctaggcagccctgaggaggccactgccctggcagagcggctacagcaggagtcagctgggccaggactccagatgagtgggggctggtctgggggctgggtgtgcttcccctgctcacgaccccagttgagccagcactggggccagtcgtgggttggtggctgagagggcctgggggctgtgggaaagtgatggtgacaggtgggagtttggtggtcttggcttggacggcagagtcagagatctccagtcacacctgtgtgctccgcattgtgtcctgagaactgaaggtgcagagaagggtgggtcatgccaccgcatgccccttgttttctcctcagatctgctaggctgaacacc

SEQ ID NO: 71288 - DNA, 1878 bp, Homo sapiens; identical to SEQ ID NO: 66931

SEQ ID NO: 71289 - DNA, 856 bp, Homo sapiens; identical to SEQ ID NO: 66932

SEQ ID NO: 71290 - DNA, 432 bp, Homo sapiens
ttatttaccgaaagagcatatgactttttctttaatcacggatgcctggatttgcccggtaaccaataaaatcctggatacggcttttaaaggcttaaccccttatctgcctacccatatttcgttcgagcatcttaccctggcgcaatatgacacttttgtcgcgcagaaagtcacaatgccggaaatctggaagctggatcgttcacaggaagactacgcagagggtctggcaaaagcacgcgactgggtcagccatgatccgctgatcgcacaattgcggtcggaaaacgtctggacagacattaacgatcgtgtcgtggaaggcggcttctactatcgtactgccgagcactctgcccagcagtcgtcagaacgtctgcaaagctatgaaaagatgttcaagaatgggcaactaaatgttctcaactg

SEQ ID NO: 71291 - DNA, 2018 bp, Homo sapiens; identical to SEQ ID NO: 66934

SEQ ID NO: 71292 - DNA, 695 bp, Homo sapiens; identical to SEQ ID NO: 66935

SEQ ID NO: 71293 - DNA, 317 bp, Homo sapiens
gagctccaatgacctcatggacaagatcgagagcccagagccggaagacacacaagatggtctgtaccgccagggtgcccctgagttcagggtggcctccagtgtggagcagctgaacatcatagagatcaaaaataagatcttcaccttgtgcccagcctgtctgctgtccctgaagataaaaagacgaaaagggaggaagcgacagtcgtctaggcagaagtgatgtggccgtggccgacaagatggccccgcgggaggcaggcggagctcagtgtgtccaataaaactgtcttggtagagcgccaaaaaaaaaa

SEQ ID NO: 71294 - DNA, 443 bp, Homo sapiens; identical to SEQ ID NO: 66937

SEQ ID NO: 71295 - DNA, 1126 bp, Homo sapiens
cggacgcgtgggtgccaaggagcaggtggtgtttgccaaggatcagccggtgcacagggaggtgcaggctgaggcaaggaccaacaccatgctgagctgggagggggcccaagcccagacggaggttatgtggtacaaggacgggaagaaactgagctccagctcgaaaatgcgtgtggaggccgtgggctgcacacggaggctggtggtgcaagaagcaagccaagcggacgccggggagtacagctgcgaggctgggggccagcggctctccttccatctgcatgtggctgagcccaaggtggtgtttgccaaggagcagccggcatgcagggaggtgcaggcggaggcgggggccagtgccacgctgagctgtgaggtggcccagggccagatggaggtgacatggtacaaggacgggaagaagctgagctccagctcaaaagtgcgcatggaggccagcggctacacacggaggctggtagtgcagcaggcgggccaggcggatgctggggagtacagctgtgaggcggggggccaacggctgtccttccgcctgcacgtggcagagctggagccccaaatttcagagagaccctgccgcagggagcctctggtggtcaaggagcatgaagacatcatcctgaccgccacactggccacaccctctgcggccacggtgacctggctcaaggatggtgtggagattcgccgcagcaagcggcatgagacagccagccagggggacacccacaccctgaccgtgcatggcgcccaggttctggacagcgccatctacagctgccgtgtgggcgcagaggggcaggacttcccagtgcaggtggaagaggtggccgccaagttctgccggctgctggagcctgtgtgcggcgagctgggtggcacggtgacactggcctgcgagctaagcccagcgtgtgcagaggtggtgtggcgctgcggcaacacgcagcttcgggtgggcaagcgcttccagatggtggccgaggggcccgtgcgctcactcactgtgttggggctgcgcgcagaggacgcaggggagtacgtgtgtgagagccgtgatgaccacaccagtgcgcagctcaccgtcagtgtgccccggcgc

SEQ ID NO: 71296 - DNA, 681 bp, Homo sapiens; identical to SEQ ID NO: 66939

SEQ ID NO: 71297 - DNA, 776 bp, Homo sapiens
  misc_feature (1)...(776): n = a,t,c or g
tttcgtgttccctggaagctgagggtctctggggctcagtcccggcnnnnnnnnnnnnnnnnnnnnnnnnnnnnnnncccgacccttccccccagcgtgttcccgagggagctgaaggaggtgtttgcttcatggcggctgcgctgcgcagagcgaggccgggaggacatcgcagacaggcttatcagcgcctcactcttcctgcgcttcctctgcccagcgattatgtcgcccagtctctttgggcttatgcaggagtacccagatgagcagacctcacgaaccctcaccctcattgccaaggtcatccagaacctggccaacttttccaagtttacctcaaaggaggactttctgggcttcatgaatgagtttctggagctggaatggggttccatgcagcagtttttgtatgagatctccaatctggacacgctaaccaacagcagtagcttcgagggttacatcgacttgggccgagagctctccacactgcatgccctactctgggaggtgctgccccagctcagcaaggtcagcagatcccctctttgccctatccccagatggctccagaggttcctggagcctgagaaactaccctttgaagattttttttctccccttgtttctcgaggtgtcaccactactatcccaactcaggccccctccacttgcaccctcagaggccctcttagagctgggcactgagcccccaggtaacagcctcaccataccaggaagacatcctgaagctgggtccactgccccggcgc

SEQ ID NO: 71298 - DNA, 551 bp, Homo sapiens; identical to SEQ ID NO: 66941

SEQ ID NO: 71299 - DNA, 640 bp, Homo sapiens; identical to SEQ ID NO: 66942

SEQ ID NO: 71300 - DNA, 431 bp, Homo sapiens; identical to SEQ ID NO: 66943

SEQ ID NO: 71301 - DNA, 362 bp, Homo sapiens; identical to SEQ ID NO: 66944

SEQ ID NO: 71302 - DNA, 466 bp, Homo sapiens; identical to SEQ ID NO: 66945

SEQ ID NO: 71303 - DNA, 425 bp, Homo sapiens; identical to SEQ ID NO: 66946
  misc_feature (1)...(425): n = a,t,c or g

SEQ ID NO: 71304 - DNA, 390 bp, Homo sapiens; identical to SEQ ID NO: 66947

SEQ ID NO: 71305 - DNA, 682 bp, Homo sapiens; identical to SEQ ID NO: 66948

SEQ ID NO: 71306 - DNA, 729 bp, Homo sapiens; identical to SEQ ID NO: 66949
  misc_feature (1)...(729): n = a,t,c or g

SEQ ID NO: 71307 - DNA, 746 bp, Homo sapiens; identical to SEQ ID NO: 66950

SEQ ID NO: 71308 - DNA, 777 bp, Homo sapiens
cttatttataatgaagatatgatttgttggattgaatcaagagaatcttcaaatcaactcaaatgtatccagataacaaaagcaggaggattaacagatgaatggacaatcaatattcttcaatccttccacaatgtgcaacaaatggcgattgactggctcactcgaaatctctattttgtggaccatgtcggtgaccggatctttgtttgtaattccaacggttctgtatgtgtcaccctgattgatctggagcttcacaatcctaaagcaatagcagtagatccaatagcaggaaaacttttctttactgactacgggaatgtcgccaaagtggagagatgtgacatggatgggatgaaccgaacaaggataattgattcaaagacagagcagccagctgcactggcactagacctagtcaacaaattggtttactgggtagatctttacttggactatgtgggagtagtggactatcaaggaaaaaatagacacgctgtcattcaaggcagacaagtcagacatctttatggtataactgtgtttgaagattatttgtatgcaaccaattctgatagctacaatatcgtaaggataagccgatttaatgggactgatattcactcattaattaaaattgagaatgcttggggaatccgaatttatcaaaaaagaactcaaccaacagtcagaagccatgcatgtgaagtcgatccatatggaatgccagggggctgttcacacatctgtctactcagcagcagttacacgaaa

SEQ ID NO: 71309 - DNA, 738 bp, Homo sapiens; identical to SEQ ID NO: 66952

SEQ ID NO: 71310 - DNA, 390 bp, Homo sapiens; identical to SEQ ID NO: 66953

SEQ ID NO: 71311 - DNA, 601 bp, Homo sapiens
ttttttttttttgagggttttctgttatttctttattggggtgggggtggggtgcatcattcagatctttgtgctggtgcctacgtgcatacaagtacacacacacacacacacacacaggcatgtgttcacgtatgtatacatatacacacaaggccagagctctagtgtgctggaggaggggcaagctctttttccaagagggtattagaaagaggttgattccagaggatgagtggtctctgaggctatagccccccactgggtgggcagccagctctgtgagaatgccagggtgcagctgacagcgctggaggcctggggactggactctgagaggagcttgggcagacacagcagcctccggccccaacactgccctgggttggcaggcccagccctggtcctgacaggcaggtccttgagctcctcgggagggcgtgacgacccttagtgtttcatgggaccactcggtgggccctcctccgtgccaggcctgtcagaggacaaccctccggtccaggtggtccccacgcccgctccgctggtgccgcctcgtgccgaattcctgcagcgcgggtcaatgcaaagggtggccccg

SEQ ID NO: 71312 - DNA, 361 bp, Homo sapiens
acaacctggatcaggacaacgcccgtgttggggataggttcatgcggctcattgaacccgtggctgccagcctgccgtacatgacatgccctgggaatcatgaagaacgctacaacttctctaactacaaggctcgcttcagcatgccgggggataatgagggcctgtggtacagctgggatctgggtcccgcccacatcatctccttctccaccgaggtctatttctttctccattatggccgccacttggtgcagaggcagtttcgctggctggagagcgacctccagaaagccaataagaaccgggcagcccggccgtggatcatcactatggggcaccggcccatgtactgacgaaa

SEQ ID NO: 71313 - DNA, 510 bp, Homo sapiens; identical to SEQ ID NO: 66955

SEQ ID NO: 71314 - DNA, 385 bp, Homo sapiens; identical to SEQ ID NO: 66956

SEQ ID NO: 71315 - DNA, 1320 bp, Homo sapiens; identical to SEQ ID NO: 66957

SEQ ID NO: 71316 - DNA, 535 bp, Homo sapiens; identical to SEQ ID NO: 66958

SEQ ID NO: 71317 - DNA, 486 bp, Homo sapiens; identical to SEQ ID NO: 66959

SEQ ID NO: 71318 - DNA, 671 bp, Homo sapiens; identical to SEQ ID NO: 66960

SEQ ID NO: 71319 - DNA, 588 bp, Homo sapiens; identical to SEQ ID NO: 66961

SEQ ID NO: 71320 - DNA, 1328 bp, Homo sapiens; identical to SEQ ID NO: 66962

SEQ ID NO: 71321 - DNA, 1309 bp, Homo sapiens
agtacataccgaattccctggtcgactccacgcgtccggatctaggcaccggtccgagtgcctgccctctgtccccgcggctgggtctcgtctgctccggttcctgggctcctaattcttggtccagcttcttccaggtctgcgcgtctgttgttcccagcgctctgcgaagcctgaaaaggaggagcaacctgtccagaatccccgcaggacaggaaaaggaggggaaatctcgacatggaaaaactctacagtgaaaatgaaggaatggcttcaaaccaaggaaagatggaaaatgaagaacagccacaagacgagagaaagccagaagtaacttgtactctggaagacaagaagttagaaaacgagggaaagacagaaaacaagggcaaaacaggagatgaggaaatgttaaaggataaaggaaagccagagagtgagggagaggcaaaagaaggaaagtcagagagggagggagagtcagagatggagggaggatcagagagagagggaaaaccagagatagagggaaagccagagagtgaaggagagccagggagtgaaacaagggctgcaggaaagcgcccagctgaggatgatgtacccaggaaagccaaaagaaaaactaataaggggctggctcattacctcaaggagtataaagaggccatacatgatatgaatttcagcaatgaggacatgataagagaatttgacaatatggctaaggtgcaggatgagaagagaaaaagcaaacagaaattgggggcgtttttgtggatgcaaagaaatttacaggaccccttctaccctagaggtccaagggaattcaggggtggctgcagggccccacgaagggacattgaagacattccttatgtgtagtgtccctggcaggcatttaccaggccatgtgctttaacgttacggtaatactttactttaggcatccctcctgttgctagcagccttttgacctatctgcaatgcagtgttctcagtaggaaatgttcatctgttacatggaaaaaatgttgatggtgcattgtaaaattaaaaaacacaacttgcagaaccaaatatatggcatcagtacatttttgtaaaactacaaagatacttacctagtaatatagtatagaaaacaattctgaaagctgtgtccactaaaagattaacagtggttatctctgggtgattttttctgttcttttttgttcatctgtccatttttctcctaaaaacagatttctttagtcataaaaataataaaatataaagtattggaaaacagtgaaaaaaaaaaaaa

SEQ ID NO: 71322 - DNA, 1118 bp, Homo sapiens; identical to SEQ ID NO: 66964

SEQ ID NO: 71323 - DNA, 948 bp, Homo sapiens; identical to SEQ ID NO: 66965

SEQ ID NO: 71324 - DNA, 427 bp, Homo sapiens; identical to SEQ ID NO: 66966

SEQ ID NO: 71325 - DNA, 825 bp, Homo sapiens; identical to SEQ ID NO: 66967

SEQ ID NO: 71326 - DNA, 1317 bp, Homo sapiens; identical to SEQ ID NO: 66968

SEQ ID NO: 71327 - DNA, 713 bp, Homo sapiens; identical to SEQ ID NO: 66969

SEQ ID NO: 71328 - DNA, 344 bp, Homo sapiens; identical to SEQ ID NO: 66970

SEQ ID NO: 71329 - DNA, 642 bp, Homo sapiens; identical to SEQ ID NO: 66971

SEQ ID NO: 71330 - DNA, 343 bp, Homo sapiens; identical to SEQ ID NO: 66972

SEQ ID NO: 71331 - DNA, 1067 bp, Homo sapiens; identical to SEQ ID NO: 66973

SEQ ID NO: 71332 - DNA, 533 bp, Homo sapiens; identical to SEQ ID NO: 66974

SEQ ID NO: 71333 - DNA, 992 bp, Homo sapiens; identical to SEQ ID NO: 66975

SEQ ID NO: 71334 - DNA, 417 bp, Homo sapiens; identical to SEQ ID NO: 66976

SEQ ID NO: 71335 - DNA, 196 bp, Homo sapiens; identical to SEQ ID NO: 66977

SEQ ID NO: 71336 - DNA, 1366 bp, Homo sapiens; identical to SEQ ID NO: 66978
  misc_feature (1)...(1366): n = a,t,c or g

SEQ ID NO: 71337 - DNA, 633 bp, Homo sapiens; identical to SEQ ID NO: 66979

SEQ ID NO: 71338 - DNA, 799 bp, Homo sapiens; identical to SEQ ID NO: 66980

SEQ ID NO: 71339 - DNA, 422 bp, Homo sapiens; identical to SEQ ID NO: 66981
  misc_feature (1)...(422): n = a,t,c or g

SEQ ID NO: 71340 - DNA, 658 bp, Homo sapiens
gccatggagtacacagggagcaaatatatcggggaatatgtagatgggaggatggagggcaaagcaaggtacatcctccctaccgaaacaatatatgttggggaaatgaaggatggcatgtttcacggcgagggaaccctgtacttccccagcggaagccaatacgacgccatttgggaaaacggattggccataaagggcacatatacgttctcagatgggctgcactatgatgagaaaaactggcattactgcgacggctatgatcggaggttttacacagagatcctcaatggcttgaagcctgcaggtatggctcaactcaccaatatggacccacctagaaaaatccccaagggctattacgattgtggagacggcttctataacccagtcacgagggtagtcaaggactataggaaccgctttctaagaaacgcagatgatgacgagcatgagtggatcacccgtacctgtcgaaagggctaggatgagatcgtgggtcacaggcccgagccgtgaactctgtggctgcctccaccagaggtttccatctgccctactagcattggctgccctgggggacgggctgtagttctagaacctgattttaactcaggaataaagactttctgcggtcagtggcaaaaaaaaaaaa

SEQ ID NO: 71341 - DNA, 772 bp, Homo sapiens; identical to SEQ ID NO: 66984

SEQ ID NO: 71342 - DNA, 620 bp, Homo sapiens; identical to SEQ ID NO: 66985

SEQ ID NO: 71343 - DNA, 756 bp, Homo sapiens; identical to SEQ ID NO: 66986

SEQ ID NO: 71344 - DNA, 427 bp, Homo sapiens; identical to SEQ ID NO: 66987

SEQ ID NO: 71345 - DNA, 704 bp, Homo sapiens; identical to SEQ ID NO: 66988

SEQ ID NO: 71346 - DNA, 2166 bp, Homo sapiens; identical to SEQ ID NO: 66989

SEQ ID NO: 71347 - DNA, 803 bp, Homo sapiens; identical to SEQ ID NO: 66990

SEQ ID NO: 71348 - DNA, 704 bp, Homo sapiens; identical to SEQ ID NO: 66991

SEQ ID NO: 71349 - DNA, 566 bp, Homo sapiens
atcaccgtgtggcccgtgtggctcgtgtctgcaaggtggattgggctgacgttggggcacgggtatagaggatggacttctgaccctggccccttatcccgtgcctctgcctccccagggagacctgggagggaagaagatcctgcagaagaagtggacttccttcctgaaagcccgtctcatctgccacattccactgtatgagacactgcgtggggtctgcagcctggatgctgaaacctcaagccgtacacacttctatgcagccttcacgctgagcacacagtggaagaccctggaggcctcagccatctgccgctatgacctggcagagatccaggctgtctttgcaggaccctatatggaataccaggatggttcccggcgctggggtcgctatgagggtggggtgcctgagccccggcctggctcgtgtatcacagattcattgcgcagccaaggctacaattcatcccaagacttgccatccctggtcctggactttgtaaagttgcacccactgatggctcggcccgttgtgcccacacgtggacgactcatgtatt

SEQ ID NO: 71350 - DNA, 420 bp, Homo sapiens; identical to SEQ ID NO: 66993

SEQ ID NO: 71351 - DNA, 392 bp, Homo sapiens
  misc_feature (1)...(392): n = a,t,c or g
cgaccctgggatcttctctgtgtgggcagtaccaccctgggcactgatcgccattgctgtggttgctgggctcctgcttctcacctgctgcttctgcatctgcaagaaatgctgctgcnnnnnnnnnnnnnnnnnnnnnnnnnnnggcaaaggcatgaagaatgccatgaacatgaaggacatgaaagggggtcaggtagggcacattggttgtgagggggactggaaggggctcagcccaggctttcctgatgctgaaaggggaagcaaaggctcctgggcttccacagccaaacctgctcccctccttaaaacttggctctctcagttacatctctagtataacaccgtctacctggaggcccctgggaggggggggccttattcctgtg

SEQ ID NO: 71352 - DNA, 399 bp, Homo sapiens; identical to SEQ ID NO: 66995

SEQ ID NO: 71353 - DNA, 1057 bp, Homo sapiens; identical to SEQ ID NO: 66996

SEQ ID NO: 71354 - DNA, 1815 bp, Homo sapiens; identical to SEQ ID NO: 66997

SEQ ID NO: 71355 - DNA, 833 bp, Homo sapiens; identical to SEQ ID NO: 66998

SEQ ID NO: 71356 - DNA, 467 bp, Homo sapiens; identical to SEQ ID NO: 66999

SEQ ID NO: 71357 - DNA, 539 bp, Homo sapiens; identical to SEQ ID NO: 67000

SEQ ID NO: 71358 - DNA, 627 bp, Homo sapiens; identical to SEQ ID NO: 67001

SEQ ID NO: 71359 - DNA, 416 bp, Homo sapiens; identical to SEQ ID NO: 67002
  misc_feature (1)...(416): n = a,t,c or g

SEQ ID NO: 71360 - DNA, 926 bp, Homo sapiens; identical to SEQ ID NO: 67003

SEQ ID NO: 71361 - DNA, 763 bp, Homo sapiens; identical to SEQ ID NO: 67004

SEQ ID NO: 71362 - DNA, 973 bp, Homo sapiens
tgtcataggaaagaaaacaaatagaggaagaagatctaatcatataccagaggaagagtcttcatcatcctccagtgatgaagatgaggatgataggaaacagattgatgagctactaggcaaagttgtatgtgtagattacattagtttggataaaaagaaagcactgtggtttcctgcattggtggtttgtcctgattgtagtgatgagattgctgtaaaaaaggacaatattcttgttcgatctttcaaagatggaaaatttacttcagttccaagaaaagatgtccatgaaattactagtgacactgcaccaaagcctgatgctgttttaaagcaagcctttgaacaggcacttgaatttcacaaaagtagaactattcctgctaactggaagactgaattgaaagaagatagctctagcagtgaagcagaggaagaagaggaggaggaagatgatgaaaaagaaaaggaggataatagcagtgaagaagaagtaagtgaaaacagttgataccttttaaaattataaataacagttgggtttcccttgtgggttaggatttggcattaagtcattactcatataagtatttttagtatgagaaatatttcataatcttgtatttgagatcctcataatcagatagtttacttggttactttagatatatgatcttgtgaaatagaaaatattaagcctgattttcctaataacctcaaaaacatgtcttagtcttcctatgctttttttaatgagatgattaagaaagtatccaccaggctgggcgcagtggctcaggcctgtaatcccagcactttgggaggccaaggcaggcggatcacgaggtcaggagatcgagaccatcctggctaacacagcgaaaccccgtctttactaaaaatacaaaaaattagccgggggtggtggtgggcacctgtagtcccagctactcggtaggctgagacgaaa

SEQ ID NO: 71363 - DNA, 817 bp, Homo sapiens; identical to SEQ ID NO: 67006

SEQ ID NO: 71364 - DNA, 938 bp, Homo sapiens; identical to SEQ ID NO: 67007

SEQ ID NO: 71365 - DNA, 739 bp, Homo sapiens; identical to SEQ ID NO: 67008

SEQ ID NO: 71366 - DNA, 440 bp, Homo sapiens; identical to SEQ ID NO: 67009

SEQ ID NO: 71367 - DNA, 611 bp, Homo sapiens; identical to SEQ ID NO: 67010

SEQ ID NO: 71368 - DNA, 675 bp, Homo sapiens; identical to SEQ ID NO: 67011

SEQ ID NO: 71369 - DNA, 872 bp, Homo sapiens; identical to SEQ ID NO: 67012

SEQ ID NO: 71370 - DNA, 522 bp, Homo sapiens; identical to SEQ ID NO: 67013

SEQ ID NO: 71371 - DNA, 683 bp, Homo sapiens; identical to SEQ ID NO: 67014
  misc_feature (1)...(683): n = a,t,c or g

SEQ ID NO: 71372 - DNA, 570 bp, Homo sapiens; identical to SEQ ID NO: 67015

SEQ ID NO: 71373 - DNA, 425 bp, Homo sapiens; identical to SEQ ID NO: 67016
  misc_feature (1)...(425): n = a,t,c or g

SEQ ID NO: 71374 - DNA, 1090 bp, Homo sapiens; identical to SEQ ID NO: 67017

SEQ ID NO: 71375 - DNA, 404 bp, Homo sapiens; identical to SEQ ID NO: 67023

SEQ ID NO: 71376 - DNA, 394 bp, Homo sapiens; identical to SEQ ID NO: 67024

SEQ ID NO: 71377 - DNA, 463 bp, Homo sapiens; identical to SEQ ID NO: 67025

SEQ ID NO: 71378 - DNA, 415 bp, Homo sapiens; identical to SEQ ID NO: 67026

SEQ ID NO: 71379 - DNA, 578 bp, Homo sapiens; identical to SEQ ID NO: 67027

SEQ ID NO: 71380 - DNA, 680 bp, Homo sapiens; identical to SEQ ID NO: 67028

SEQ ID NO: 71381 - DNA, 368 bp, Homo sapiens
atgcacacaggcgagcggccgtacacctgcaccgtgtgcagcaaggctctgaccaccaagcactcactgctggagcacatgagcctgcactcaggtagtggggcttgcccagagggccagcttcaccagattcccattccccagggtgggcattaccaacacctaaatggtgttttctcagcctagtatcatttccaacgtggtgtcattgaaagacaggattttgcatctgtctgagtgcagtttagagttctgcacggatcattaaactagagcttataaactggctgctgggagtttagtgtgcaagcatgttttattaaaccaccaaagtttagaattgttttactttgaacgccctcgtgccg

SEQ ID NO: 71382 - DNA, 594 bp, Homo sapiens; identical to SEQ ID NO: 67030

SEQ ID NO: 71383 - DNA, 590 bp, Homo sapiens; identical to SEQ ID NO: 67031

SEQ ID NO: 71384 - DNA, 1234 bp, Homo sapiens; identical to SEQ ID NO: 67032

SEQ ID NO: 71385 - DNA, 491 bp, Homo sapiens; identical to SEQ ID NO: 67033

SEQ ID NO: 71386 - DNA, 983 bp, Homo sapiens; identical to SEQ ID NO: 67034

SEQ ID NO: 71387 - DNA, 404 bp, Homo sapiens; identical to SEQ ID NO: 67035
  misc_feature (1)...(404): n = a,t,c or g

SEQ ID NO: 71388 - DNA, 526 bp, Homo sapiens
  misc_feature (1)...(526): n = a,t,c or g
cggctcgtccnnatttgaaccccttctttgatcggcctgcagtaccgggccggaattacccggtcgagccacgcgttcgctcacgcgtccggccaaccagaagggttgcgacggggaccgcctgtactacgacggctgtgccatgatcgccatgaacggaagcgtctttgctcaaggatcccagttttctctggatgacgtggaagtcctgacggccacgctggatctggaggacgtccggagctacagggcggagatttcatctcgaaacctggcggtgagtgctccagtagacacctgtgtgggatgctcatcaaagacgtggaaagtggccccattcgtgcgggcctggtggaggccgtgagggtgcagtgcctgaaaagtctgacagggaagttccggacttcccgagcgtggaaaggggctggtgccgcagacagaacctgcttccatctgttccccgtcatcctctgcttgggccaggccctgagctggggtgagctggggacaggcaggcaggtgtatt

SEQ ID NO: 71389 - DNA, 426 bp, Homo sapiens; identical to SEQ ID NO: 67037

SEQ ID NO: 71390 - DNA, 418 bp, Homo sapiens
ggggcgggccccccaggtaggcatggctgctgcccccagcccatttcttttgaatctgttcactcctattcactcctacttgccactccttctattcattactcactgcccctgcccctagtccccatggtacccctgagccatgggcatttcctgagccccactcagcaggctctgcttcccccaggtcctggtgaacgagggcggtggctttgaccgggcctctggctccttcgtagcccctgtccggggtgtctacagcttccggttccatgtggtgaaggtgtacaaccgccaaactgtccaggtgacctcagcactggcccccatccccggctcaggagggtggggagggggaagaaggggagcccagctgacctccgggtggactctccattgacctgtgtcctggacgaaa

SEQ ID NO: 71391 - DNA, 459 bp, Homo sapiens; identical to SEQ ID NO: 67039

SEQ ID NO: 71392 - DNA, 406 bp, Homo sapiens; identical to SEQ ID NO: 67040

SEQ ID NO: 71393 - DNA, 417 bp, Homo sapiens
gagtacccgtccggaattcccgggacgagcaccaaccggcttcctcaaactcttggctgataagaacagcgaactgtttaggaaatacgccctgttttctccctcagaccaccgagtgcctagaatttatgtgcctctcaaggactgtccccaggactttgtggcacggcctaaagattatgccaacacactgttcatctgccgcattgtggactggaaggaggactgcaattttgccctggggcagctggctaagagtcttgggcaggctggtgaaattgagcctgaaacagaaggaatactaacagagtatggcgtggatttctctgatttctcttcagaagttctagaatgtcttcctcaaggcctgccatggacaattccaccagaggagttcagcaagagaagggttgtatt

SEQ ID NO: 71394 - DNA, 441 bp, Homo sapiens; identical to SEQ ID NO: 67042

SEQ ID NO: 71395 - DNA, 1768 bp, Homo sapiens
tttcgtcgcaggccacgagaagctgccggtgcacgtagaagacgccctcacctatctggaccaggtgaagatccgctttggcagcgaccctgccacctacaacggcttcctggagatcatgaaggagttcaaaagccagagcatcgatactcctggagtcatcagacgtgtctcgcagctcttccacgagcaccctgacctcattgttggattcaacgcttttcttcccctcggatatagaatagacattcccaagaatggcaagttaaacatacagtcgcctctgacaagccaggagaattcgcacaaccacggggacggtgcagaggacttcaagcagcaggtgccgtataaagaggacaaaccccaggtgcccctggagtccgattccgtggaattcaacaacgccatcagctatgtgaataagattaaaacccgcttcctagaccacccagaaatctacaggtcattcctggagatcctgcacacgtaccagaaggagcagctgaacacgaggggccggccattccgaggcatgtctgaagaggaggtgttcaccgaggtggccaacctcttccggggccaggaggacctgctcttagagtttggacagttcctgcccgaagccaagcggtctctgtttacaggaaacgggccgtgcgagatgcacagcgtgcagaagaacgagcacgacaagaccccggagcacagcaggaagcgctcccggccctcgctcctccgccccgtgtctgcacccgccaagaaaaaaatgaaacttcgtggtaccaaagacctgtccatcgctgcagtggggaagtacgggactctgcaggaattttctttctttgacaaggtccgccgggtgctgaagagccaggaggtgtatgaaaacttcctccgctgcatcgcactcttcaaccaggagctggtgtctggctctgagctcctgcagctcgtcagcccatttctggggtgagcagctgacttcccagggctccctaggggggttctgttcctgtcaactccatctacttggtttttagttactgtttttgagcaatgattgtgcttttctaaaatcctgtttattaattgacgtgattgatataattattgattcccatgcatttgtaaggagcaatacaccacctgggtaccctccagctggttcctttaccagtaacatctgtagtcagtatcctcaccagaatacagtgggtcctcgagtaatgccttttcatttaacactgttttaacaccgatgagaaaagaagacattcatttctggtctgagtggagtttgcacgttctccccatgtctgcgtggattttctcccacatcccaaagatgtgcatgttaggttaagtctaggttaagcggtgagtctccgtggtcccagcctgagtgagtgtggcggggtgagcgccctgcagtggggtggcgtcctgtccagggtgggtgccccactggtgctctgagctgctgggatagggtccggccacccaagatcctgaactggaataattgggtaaattgttattttacttgtttttactcatctttcttatctgtatgtgtggcttgcatttatttcagtgtttaatattagaagtgttttggtctctctttagaaatttggtgattgttttgtgaccaaaaatacgccgtaggaacgtcattcttgtttatgtgtcaattagcttgtggcaaaattggttttgttacacatcttttcaacttaaagacacagctttctaacaccaaaat

SEQ ID NO: 71396 - DNA, 459 bp, Homo sapiens; identical to SEQ ID NO: 67044

SEQ ID NO: 71397 - DNA, 706 bp, Homo sapiens
acctcatattattggagcagaagatgatgattttggtactgaacatgaacagatcaatggacagtgcagctgtttccagagcattgaattgctaaaatctcgcccggctcatttggctgttttcttacgccatgtagtttcacaatttgaccctgcgactttgctttgttatctctattcagacctgtataaacataccaattccaaagaaactcgtcgcatcttccttgagtttcatcagttctttctagatcgatcagcacacctgaaagtttctgttcctgatgaaatgtctgcagatctagaaaagagaagacctgagctcattcctgaggatctgcatcgccactatatccaaactatgcaagaaagagtccatccagaagttcaaaggcacttagaagattttcggcagaaacgtagtatgggactgaccttggctgaaagcgagctgactaaacttgatgcagagcgagacaaggaccgattgactttggagaaggagcggacatgtgcagaacagattgttgccaaaattgaagaagtattgatgactgctcaggctgtagaggaagataagagctccaccatgcagtatgttattctcatgtatatgaagcatttgggagtaaaagtgaaagagcctcgaaatttggagcacaaacggggtcggattggatttcttcccaaaatcaagcaaagtatg

SEQ ID NO: 71398 - DNA, 466 bp, Homo sapiens
tccatggggagtgattgaaaacagaaatgatcttgttgggagagatgtggttgctccttatcaaaccttattgaaccccctgagcaaattgaatgttttgaataatctgcattcccatttcatattggtggatgatggcactgttggaaagtatggggcggaagtcagactgagaagagaacttgaaaaaactattaatcagcaaagaattcatgctaggattggccagggtgtccctgtggtggcacttatatttgagggtgggccaaatgttatcctcacagttcttgaataccttcaggaaagcccccctgttccagtagttgtgtgtgaaggaacaggcagagctgcagatctgctagcgtatattcataaacaaacagaagaaggagggaatcttcctgatgcagcagagcccgatattatttccactatcaaaaaaacatttaactttggccagtgtatt

SEQ ID NO: 71399 - DNA, 708 bp, Homo sapiens; identical to SEQ ID NO: 67047

SEQ ID NO: 71400 - DNA, 439 bp, Homo sapiens
caagggaggggggttgatcccctggcacaggtcgaggccctggacccacatcctttgtctgcctccccaccccacagtgcccgttcatcgacgatttcatcctggccctccataggaagatcaagaatgagcccgtggtgtttcctgaggggccagaaatcagcgaggagctcaaggacctgatcctgaagatgttagacaagaatcccgagacgagaattggggtgccagacatcaagttgcacccttgggtgaccaagaacggggaggagccccttccttcggaggaggagcactgcagcgtggtggaggtgacagaggaggaggttaagaactcagtcaggctcatccccagctggaccacggtgatcctggtgaagtccatgctgaggaagcgttcctttgggaacccgtttgagccccaagcacgaatggcgaa

SEQ ID NO: 71401 - DNA, 403 bp, Homo sapiens
ttgcaaggatgctcccctcctgagtgcatccgcatctacctgaccgtggccaggaaatggcctttctttggtgctaaactttttgctgctcagcctgcccagctgtcttccaaggagaacgctctggtgtggattgctgtgaatgaggatggcgtcagcatcctggaccacaacactatgcaagtgcacatcacttacccctactcttcagtgacaacgtttggtggctgcagggatgacttcatgcttgtgattagatctatcccagacaagagctctggaaaaagccacattgagaagttgatcttccggatggctgctcccaagattgcagaagccaccttcatcatggccagctatatgaaccattgcactacaactgtgaacccccccaccatgtatt

SEQ ID NO: 71402 - DNA, 551 bp, Homo sapiens
accatggcttgggctcagcatgggtccccagccatcggcgggtgaacccacccacactgcgcattaagaagctgaactggcagaagctgccatccaacgtggcacgtgagcacaactctatgtgggcgtccctgagcagccccgacgccgaggctgtggagcccgacttctccagcatcgagcgactattctccttccctgcagccaagcccaaggagcccaccatggtggccccccgggccaggaaggagcccaaggagatcactttcctcgatgccaagaagagcctgaacctcaacatcttcctgaagcaatttaagtgctccaacgaggaggtcgctgctatgatccgggctggagataccaccaagtttgatgtggaggttctcaaacaactccttaagctccttcccgagaagcacgagattgaaaacctgcgggcattcacagaggagcgagccaagctggccagcgccgaccacttctacctcctcctgctggccattccctgctaccagctgcgaatcgagtgcatgctgctgtgtgagggc

SEQ ID NO: 71403 - DNA, 730 bp, Homo sapiens; identical to SEQ ID NO: 67051

SEQ ID NO: 71404 - DNA, 411 bp, Homo sapiens; identical to SEQ ID NO: 67052

SEQ ID NO: 71405 - DNA, 395 bp, Homo sapiens; identical to SEQ ID NO: 67053

SEQ ID NO: 71406 - DNA, 496 bp, Homo sapiens; identical to SEQ ID NO: 67054

SEQ ID NO: 71407 - DNA, 466 bp, Homo sapiens; identical to SEQ ID NO: 67055

SEQ ID NO: 71408 - DNA, 505 bp, Homo sapiens; identical to SEQ ID NO: 67056

SEQ ID NO: 71409 - DNA, 755 bp, Homo sapiens
gtgcctcatgccatgggcacgcctaccgtctgcaaagcgccatcaagcaggagctgcacagccgggccttcctggccatcacgcggtctgaggagctctggccatggatggcccacgtgctgctgccctacgtccacgggaaccagtccagcccagagctggggcccccacggctgcggcaggtgcggctgcaggaagcactctacccagaccctcccggccccagggtccacacgtgctcggccgcaggaggcttcagcaccagcgattacgacgttggctgggagagtcctcacaatggctcggggacgtgggcctattcagcgccggatctgctgggggcatggtcctggggctcctgtgccgtgtatgacagcgggggctacgtgcaggagctgggcctgagcctggaggagagccgcgaccggctgcgcttcctgcagctgcacaactggctggacaacaggtgggagctccctcccctgccctctccggggtggccgcagtcaccagccaggagcccaccctcactcctccggcccccgctggcctaggcggcttccacagcccctcagccacgcctgcactgcgcggtccccgcagctcccgccctgccacccgctcctactgacccgcaccctaagcgcacgagccgcgctgtgttcctggagctcacgcgaaacagcaaagccgtggggctgcacgccgccgtcacggtgcgcctcggcccgttaactccaaaccggtacgtgcat

SEQ ID NO: 71410 - DNA, 737 bp, Homo sapiens; identical to SEQ ID NO: 67058

SEQ ID NO: 71411 - DNA, 521 bp, Homo sapiens; identical to SEQ ID NO: 67059

SEQ ID NO: 71412 - DNA, 963 bp, Homo sapiens; identical to SEQ ID NO: 67060

SEQ ID NO: 71413 - DNA, 1499 bp, Homo sapiens
cgaccaaactaaagaaggagcaggagaatctgttgaagcagcggtgggagctagagaggctggaggaagagcgaaagcagatggaagccttccggcagaaggcagagctggggcgtttcttgagacatcagtataacgctcaactcagcagacgcacacagcagatccaagaggagctggaggcagacaggcggatcctgcaggccctcctcgagaaggaggacgagagccagcgcctccacctggccaggcgggagcaggtcatggccgatgtggcctggatgaagcaggccattgaggagcagctgcagctggagcgggcgcgggaggcagagctgcagatgctgctgagggaggaggccaaggagatgtgggaaaagagagaggcagagtgggcccgagagcgcagcgcacgggacagactgatgagcgaggttctgacagggagacaacagcaaatacaagagaagattgagcagaaccgacgggcacaagaggaatccctgaaacacagggagcaacttattcgaaatcttgaggaggtgagagagttggctcgtcgcgagaaagaggagagtgaaaagctgaaatcggccaggaagcaggagctggaagcccaggttgcagagcgccggctgcaggcatgggaagcagaccagcaggaggaggaggaagaggaggaggcccggcgggtcgagcagctctcagatgccctgctgcagcaggaggcggagactatggctgagcagggctaccggcctaagccttacggacatccaaaaattgcttggaactgacttcatgggtaccataagtacagagaacaagggatgctgaggcttctgatcccagccgccaggcagttttacagggctctgttaacagtaagtgcccggggcactgtcagatggctcagcagtgcctgctcaggttcatcattgaaacatcccagtgtttggccagacattaaggtgtcgtgagagtccctttcatgcctttcttacccaagcaagggtctttgatgggcacgtgtttacagcgctgctgcattagtcttgtaatatattaacagtcacatcaactgaaggtcaatactaagagccacaggttgtacctgtgatggggcgtgtggtttcctgttgtctcacctttaattgtcaacctccagtgttgactctagaaatatgaggaaagcttttcagtttttaaaattgccatttaaatttagtctattaaaaacaaacctagaggtcttggtgcagttgatttcagagtttattaatttagtggtcccaaaagtattacatcttttatattctggaagaaaagaactgtgaacaaattagaaccccggaacactctgacgtccatggacgcattccagaaaagtggcaagagatgagtctttcctcctccaggaagcattttggtagaatttccatagagcattgtctgtgagtgactgatcccaacatgtatgttactaagccccaaaacga

SEQ ID NO: 71414 - DNA, 442 bp, Homo sapiens; identical to SEQ ID NO: 67062

SEQ ID NO: 71415 - DNA, 486 bp, Homo sapiens
catctgggaggggacgccgtcaccgtcccctccacatctgtctcgtcctcggcgtagctcaggatcaggctctgctgccggctcgttagcctcctgtggaccgagcagagtcagcagccaaggcttccgccgggaagctttggaaagaactcacaggcagccagcaccctcgcagcacatgggaagagagggacccaaccttggcaggggcggacaccctgagccagtgcagcggtgagaacctaaggaccatgccctcaaagcttctgtacagaaaagctcctaaaacaccctacactaagtcatttaaacaagtgtcactgtggctatgctaaatacagtttacaggaggggaaacagattttaccagtatgtatgtgaagcaagtaagaaattatctaattaggccaggcgcagtggctcatgcctgtaatcccagcattttgggaggccaaggtgggcggatcacaaggtcaggagatagag

SEQ ID NO: 71416 - DNA, 543 bp, Homo sapiens; identical to SEQ ID NO: 67065

SEQ ID NO: 71417 - DNA, 823 bp, Homo sapiens
gacagaaaattttgagattgaataattcccaccaaccacccactagtagcagcaactccaaggattgtggaggtccggcctccagtggggctggtgctaccgcagccttagctgatggcctaaaatttgcttctgttcaggcctctgctccccaggggaattcacacaaagagaccagcaaatcaaaagtgaaaaggagtaaaacttctaaggatgctaataaatctctgccttctgctgccttgtatgggattcccgagatcagcagcactggcaagaggcaggaagtccaagggcgccctggagaggcaactggcatgaattcagcgctgggtcaaagtgtgagcagcggcggcagcggcaacccaaacagcaatagtaccagcaccagcacctctgccgccaccgcgggggcaggctcctgtgggaaaagcaaagaggagaagccaggtaaaagccagagcagccgaggcgccaagcgggataaggatgcggggaaatccaggaaggacaagcacgacctgcttcagggccaccagaatggcagtggcagccaggccccttccggggggcacctctatggctttggggccaagagcaatggaggtggcgcgagccccttccactgcgggggcactgggagtggcagcgtcgccgctgcaggggaagttagcaaaagtgccccggattcagggctcatgggaaactctatgttggtaaagaaggaagaggaggaggaggagagccacaggcgaatcaagaaactgaaaactgagaaggttgaccccctgtttacagtgccagcgccaccaccgcatgtatt

SEQ ID NO: 71418 - DNA, 434 bp, Homo sapiens; identical to SEQ ID NO: 67067

SEQ ID NO: 71419 - DNA, 639 bp, Homo sapiens; identical to SEQ ID NO: 67068

SEQ ID NO: 71420 - DNA, 1202 bp, Homo sapiens; identical to SEQ ID NO: 67069

SEQ ID NO: 71421 - DNA, 408 bp, Homo sapiens; identical to SEQ ID NO: 67070

SEQ ID NO: 71422 - DNA, 830 bp, Homo sapiens; identical to SEQ ID NO: 67071

SEQ ID NO: 71423 - DNA, 894 bp, Homo sapiens; identical to SEQ ID NO: 67072

SEQ ID NO: 71424 - DNA, 861 bp, Homo sapiens; identical to SEQ ID NO: 67073

SEQ ID NO: 71425 - DNA, 418 bp, Homo sapiens; identical to SEQ ID NO: 67074

SEQ ID NO: 71426 - DNA, 737 bp, Homo sapiens; identical to SEQ ID NO: 67075

SEQ ID NO: 71427 - DNA, 491 bp, Homo sapiens
gcgggtggtcgtagctcggtagtccagttgtgggtaatcggggctgtttgttcctgtccgagagagctcggcggagacggctgtcgagtacccttcacctcggtgttgggagcctgggagcgaactgcggcgcgggttaccgctcccggggacgcagcaaggggcatcgagtccctggcgggagctgcgccatggcattgctctcgaccgtccggggcgcgacctggggtcgcctcgtcacccgtcatttctcccatgcagcgcggcatggggagcggcctggtggggaggagctaagccgcttgctgctggatgacctggtgccgacctctcggctggagcttctgtttggcatgaccccgtgtctcctggctctgcaggccgcccgccgctctgtggcccggctcctgctccaggcgggtaaagctgggctgcaggggaagcgggccgagctgctccggatggccgaggcgcgggacattccagttctg

SEQ ID NO: 71428 - DNA, 428 bp, Homo sapiens; identical to SEQ ID NO: 67077

SEQ ID NO: 71429 - DNA, 433 bp, Homo sapiens; identical to SEQ ID NO: 67078

SEQ ID NO: 71430 - DNA, 517 bp, Homo sapiens; identical to SEQ ID NO: 67079
  misc_feature (1)...(517): n = a,t,c or g

SEQ ID NO: 71431 - DNA, 996 bp, Homo sapiens; identical to SEQ ID NO: 67080

SEQ ID NO: 71432 - DNA, 597 bp, Homo sapiens
aaaatcttaccaactcatagagttggggtgagaattcgaaggtaattctatataaggtaaggcctccagcaagagctatggtggttgtgacactgactgaggctgggggaggccctcactcaccctccttccttcttggttttctcctacccagatgtggcagtggatgggcagaactggacgtttgcttttgacttctccttcctgagccaacaagaggatctggcatgggctgagctccggctgcagctgtccagccctgtggacctccccactgagggctcacttgccattgagattttccaccagccaaagcccgacacagagcaggcttcagacagctgcttagagcggtttcagatggacctattcactgtcactttgtcccaggtcaccttttccttgggcagcatggttttggaggtgaccaggcctctctccaagtggatgaagcgccctggggccctggagaagcagatgtccagggtagctggagagtgctggccgcggccccccacaccgcctgccaccaatgtgctccttatgctctactccaacctctcgcaggagcagaggcagatgggtgggtccaccttg

SEQ ID NO: 71433 - DNA, 430 bp, Homo sapiens; identical to SEQ ID NO: 67082

SEQ ID NO: 71434 - DNA, 1696 bp, Homo sapiens; identical to SEQ ID NO: 67083

SEQ ID NO: 71435 - DNA, 720 bp, Homo sapiens; identical to SEQ ID NO: 67084
  misc_feature (1)...(720): n = a,t,c or g

SEQ ID NO: 71436 - DNA, 556 bp, Homo sapiens; identical to SEQ ID NO: 67085

SEQ ID NO: 71437 - DNA, 816 bp, Homo sapiens; identical to SEQ ID NO: 67086

SEQ ID NO: 71438 - DNA, 914 bp, Homo sapiens; identical to SEQ ID NO: 67087

SEQ ID NO: 71439 - DNA, 430 bp, Homo sapiens; identical to SEQ ID NO: 67088

SEQ ID NO: 71440 - DNA, 655 bp, Homo sapiens; identical to SEQ ID NO: 67089

SEQ ID NO: 71441 - DNA, 1289 bp, Homo sapiens; identical to SEQ ID NO: 67090
  misc_feature (1)...(1289): n = a,t,c or g

SEQ ID NO: 71442 - DNA, 785 bp, Homo sapiens; identical to SEQ ID NO: 67091

SEQ ID NO: 71443 - DNA, 632 bp, Homo sapiens; identical to SEQ ID NO: 67092

SEQ ID NO: 71444 - DNA, 435 bp, Homo sapiens; identical to SEQ ID NO: 67093

SEQ ID NO: 71445 - DNA, 426 bp, Homo sapiens; identical to SEQ ID NO: 67094

SEQ ID NO: 71446 - DNA, 449 bp, Homo sapiens; identical to SEQ ID NO: 67095

SEQ ID NO: 71447 - DNA, 883 bp, Homo sapiens
tcagatgtgaccttcctggtggaaggaaagctgttttatgcacataaagtcctgctggtgacagcttctaacaggtaggcagcctcagataacaaactcccagcccaggggcacagaagcaccttgtttcagattccaggtgacagagagtgactcgctggggctgtaccctgcagcctctgcccctcagactgcagtcacattgcagcagagccccactcgccccacagcgggatgagacggggtggacccagggcagcaggaaaggggggctctgaggtggtgttctttctggcctagttattgcttttattattagaaaacataaatatcctggaatgaagagtcagcattctggccacaggcgtcaggtcgcttgtagggtgggtggtggggacagaattgggctcagctcagatgtcttcctaagatggtgtaaaatggcacttgctgaaaattattttaggagcacagcagtaatttttaaaatgttccgtcttgtggtagccggtcaggtgacagatggtgccatcgccacacagtggtgaagtaaaaggttcaaaacccaccttgctttgtctcctttgctccaggttcaagacactaatgaccaataaatcagaacaggatggggacagcagcaagaccatcgagatcagcgacatgaagtaccacatttttcaggtgtgtgggtcttggtgccgccctcttctcagagggatgaccctcccccaggagcccaccttgtgggcagctgtgcattggttgtcattgttcactctattcccagtgccttctgtattctgttgaatgaatagagcatccaggtctttccctgtgcagaggtagccatccgttgtggggctgcagcttcagagcctgt

SEQ ID NO: 71448 - DNA, 726 bp, Homo sapiens
cccacgcgtccgcttgagcaaggtccggcacaagctccgcaagttcctccagaggcggcccacactgcagtcgctgcgggagaagggctacatcaaagaccaggtgttcggctgcgcgctggccgcgctgtgtgagcgcgagaggagccgggtgccacgcttcgtgcagcagtgcatccgcgccgtcgaggcccgcgggctggacatcgacgggctgtaccgcatcagtggaaacctggccaccatccagaagctacgctataaggtggaccacgatgagcgccttgacctggatgacgggcgctgggaggacgtccacgttatcaccggagccctgaagctcttctttcgggagctgcccgagcccctcttccccttctcgcacttccgccagttcattgcggccatcaagttgcaggaccaggcccggcgcagccgctgtgtgcgtgacttggtgcgctcgctgcccgctcccaaccacgacactctgcggatgctcttccagcacctctgccgggtgatcgagcacggcgagcagaaccgcatgtcggtgcagagcgtggccattgtgttcgggcccacgctgctgcggcccgaggtggaagagaccagcatgcccatgaccatggtgttccagaaccaggtggtggagctcattcctgcatcagtgcgcggacatcttcccgccgcactgactgctggcctgtgactggggacggcggtcgc

SEQ ID NO: 71449 - DNA, 652 bp, Homo sapiens; identical to SEQ ID NO: 67098

SEQ ID NO: 71450 - DNA, 641 bp, Homo sapiens; identical to SEQ ID NO: 67099

SEQ ID NO: 71451 - DNA, 479 bp, Homo sapiens; identical to SEQ ID NO: 67100

SEQ ID NO: 71452 - DNA, 417 bp, Homo sapiens; identical to SEQ ID NO: 67101

SEQ ID NO: 71453 - DNA, 698 bp, Homo sapiens; identical to SEQ ID NO: 67105

SEQ ID NO: 71454 - DNA, 692 bp, Homo sapiens; identical to SEQ ID NO: 67106

SEQ ID NO: 71455 - DNA, 736 bp, Homo sapiens; identical to SEQ ID NO: 67107

SEQ ID NO: 71456 - DNA, 862 bp, Homo sapiens; identical to SEQ ID NO: 67108

SEQ ID NO: 71457 - DNA, 521 bp, Homo sapiens; identical to SEQ ID NO: 67109

SEQ ID NO: 71458 - DNA, 612 bp, Homo sapiens; identical to SEQ ID NO: 67110

SEQ ID NO: 71459 - DNA, 707 bp, Homo sapiens; identical to SEQ ID NO: 67111

SEQ ID NO: 71460 - DNA, 752 bp, Homo sapiens; identical to SEQ ID NO: 67112
  misc_feature (1)...(752): n = a,t,c or g

SEQ ID NO: 71461 - DNA, 547 bp, Homo sapiens; identical to SEQ ID NO: 67113

SEQ ID NO: 71462 - DNA, 575 bp, Homo sapiens; identical to SEQ ID NO: 67114

SEQ ID NO: 71463 - DNA, 606 bp, Homo sapiens; identical to SEQ ID NO: 67115

SEQ ID NO: 71464 - DNA, 675 bp, Homo sapiens; identical to SEQ ID NO: 67116

SEQ ID NO: 71465 - DNA, 1977 bp, Homo sapiens; identical to SEQ ID NO: 67117

SEQ ID NO: 71466 - DNA, 1094 bp, Homo sapiens; identical to SEQ ID NO: 67118

SEQ ID NO: 71467 - DNA, 384 bp, Homo sapiens; identical to SEQ ID NO: 67119
  misc_feature (1)...(384): n = a,t,c or g

SEQ ID NO: 71468 - DNA, 77 bp, Homo sapiens; identical to SEQ ID NO: 67120

SEQ ID NO: 71469 - DNA, 697 bp, Homo sapiens; identical to SEQ ID NO: 67121

SEQ ID NO: 71470 - DNA, 828 bp, Homo sapiens; identical to SEQ ID NO: 67122

SEQ ID NO: 71471 - DNA, 393 bp, Homo sapiens; identical to SEQ ID NO: 67123

SEQ ID NO: 71472 - DNA, 769 bp, Homo sapiens; identical to SEQ ID NO: 67124

SEQ ID NO: 71473 - DNA, 782 bp, Homo sapiens; identical to SEQ ID NO: 67125

SEQ ID NO: 71474 - DNA, 875 bp, Homo sapiens; identical to SEQ ID NO: 67126

SEQ ID NO: 71475 - DNA, 497 bp, Homo sapiens; identical to SEQ ID NO: 67127

SEQ ID NO: 71476 - DNA, 1496 bp, Homo sapiens
attcgtcattgcaaaatccactccttagcacttctaaaagtaccaggaactatgcaaaagctagtagaaatgtagaagaatctgaaaaagggtctttgaaaattgagtttcaagtgcacgcactagaagatgaaagtgatggagagacatctgacacggaaaagcatggaacaaaaattggaaccctaggttctgcaactacagaattgttatctggcagcactcgaactgctgatgagaaagaggaggatgaccgcatcctgaagacttctagagagctatccacttccccatgtaatcccatagttcgccagaaagaatctgaattacaaatgacatctgcagccagtccacaccctggcttattgctagacttgaaaacctctctagaagatgcacaggttgatgactctattaaatctcatgtatcttatgaaacagaaggctttgagagtgctagcttggatgcagagcttcaaaaaagtgacatcagtcagccctcgggccctctcctgcctgaactaagtaagcttggctttcctgcctcacttcagagggatctaacccggcacattagtttgaagagcaaaactggagtacaccttcctgagccaaacctcaatagtgcccgccgcattcgcaatattagcggtcaccgaaagagtgagacagagaaggagtctgggctcaagccaaccctacggcagattctaaatgcatctcggagaaatgtcaactgggaacaggtcattcagcaagtaaccaagaaaaagcaagagctgggcaaaggcttacccaggtttggcatagaaatggtaccccttgttcaaaatgaacaagaagccttagatttggatggggaacctgatctgtccagtctagaaggattccagtgggaaggtgtttccatttcctcgtcccctggcttggcaagaaagcgaagcctttctgagagcagcgtgatcatggacagagctccttctgtgtatagcttcttcagtgaggaaggtacaggcaaagaaaatgagccccagcagatggtttcacctagtaactcattgagggctggacagagccagaaagcaaccatgcacctcaaacaagaagtgacacctcgggctgcctccctccgaacaggtgaaagggctgaaaatgttgctacccaaaggcgacatagtgcacaattatcctctgaccatataatacctttgatgcatttggcaaaagacttgaacagccaggagaggtctataccaccgtcagagaatcagaattcccaggagagtaatggagagggaaactgtctgtcatcaagcgcatcctcagcccttgcgatctccagtttagcggatgcagccacagatagtagctgtacctctggtgctgaacaaaatgatggccaaagtattagaaagaaacgaagagccactggagatggatcttctcctgaactcccaagtcttgagagaaaaaataaaagaaggaaaattaaaaaa

SEQ ID NO: 71477 - DNA, 1808 bp, Homo sapiens; identical to SEQ ID NO: 67128

SEQ ID NO: 71478 - DNA, 1092 bp, Homo sapiens; identical to SEQ ID NO: 67129

SEQ ID NO: 71479 - DNA, 1773 bp, Homo sapiens; identical to SEQ ID NO: 67130

SEQ ID NO: 71480 - DNA, 1169 bp, Homo sapiens; identical to SEQ ID NO: 67131
  misc_feature (1)...(1169): n = a,t,c or g

SEQ ID NO: 71481 - DNA, 499 bp, Homo sapiens; identical to SEQ ID NO: 67132

SEQ ID NO: 71482 - DNA, 824 bp, Homo sapiens; identical to SEQ ID NO: 67133

SEQ ID NO: 71483 - DNA, 692 bp, Homo sapiens; identical to SEQ ID NO: 67134
  misc_feature (1)...(692): n = a,t,c or g

SEQ ID NO: 71484 - DNA, 1108 bp, Homo sapiens; identical to SEQ ID NO: 67135
  misc_feature (1)...(1108): n = a,t,c or g

SEQ ID NO: 71485 - DNA, 935 bp, Homo sapiens; identical to SEQ ID NO: 67136

SEQ ID NO: 71486 - DNA, 860 bp, Homo sapiens; identical to SEQ ID NO: 67137

SEQ ID NO: 71487 - DNA, 456 bp, Homo sapiens
cacggcgtcgggggaaaaagctacggtggaggggcataaagccgcggtggcgaggtcaaatagccgcaaaaagccgcggcggcgggggggaaaagccgcaaaaagcagcggcggcgggggcaaaaagccgcagcggcaaaaagcctcagcggcgggggcaaaaagccacgcccgggggaaaaagccgcagcggcaggggcaaaaagccacggcggcagggagcaaaaacccgcgggggtaggcgcaaaaagccgcggcggggggttaaaaagccgcgtcagcaaaacccgcggcggcgggcgcaaaaagccgcggcgggggcaaaaagccgcaaaaaacccaaggcggcaaaaagcctcggcggcggggggtggggggggtgcaaaaaaccgcggagagtggggcaaaaaaccgcggtgtcgggggaaaaagccatggccgcggcggcaaaaaccc

SEQ ID NO: 71488 - DNA, 682 bp, Homo sapiens; identical to SEQ ID NO: 67139

SEQ ID NO: 71489 - DNA, 518 bp, Homo sapiens
cctacaaccagcagagtaccctggaggagcacaaggagcggtgccataactacctacagagtctcagcactgaagcccaagctttggctggccaaccaggtgacgaaatacgtgacctggagatggtgccagactccatgctgcactcatcctctgagcggccaactttcatcgatcgtctggccaatagcctcaccaaacgcaagcgttccacaccccagaagtttgtaggcgaaaagcagatgcgcttcagcctctcagacctcccctatgatgtgaactcgggtggctatgaaaaggatgtggagttggtggcacaccacagcctagagcctggctttggaagttccctggcctttgtgggtgcagagcatctgcgtcccctccgccttccacccaccaattgcatctcagaactcacgcctgtcatcagctctgtctacacccagatgcagcccctccctggtcgactggagcttccaggatcccgagaagcaggtgagggacctgaggacctg

SEQ ID NO: 71490 - DNA, 491 bp, Homo sapiens
atgggtcgagtgagtcacattgggaacgtgactccagggtggaagatgaacccagcctctggcctctggccccagctctgacatggcctgtgtcctccaaccccggccagggcctgtgagggtgactgccatccagggggacgtgacccaggcccatgaggtggcagcagctgtggccggagcccatgtggtcatccacacggctgggctggtagacgtgtttggcagggccagtcccaagaccatccatgaggtcaacgtgcagggtgaggagctctggacactcctggccatcttgcctgtttgttccccactctgtctttggccttgacctccggtgactcccctgggacaagttgtcctattgacagccctgcccccgcctcccctgacctgtcatggttttccctggacctgggatggggaggaggaagatgcagagagggaagaagctgcagcttggatacgccacgaaatcgtcgacccgggaa

SEQ ID NO: 71491 - DNA, 436 bp, Homo sapiens; identical to SEQ ID NO: 67142

SEQ ID NO: 71492 - DNA, 471 bp, Homo sapiens; identical to SEQ ID NO: 67143

SEQ ID NO: 71493 - DNA, 474 bp, Homo sapiens; identical to SEQ ID NO: 67144

SEQ ID NO: 71494 - DNA, 754 bp, Homo sapiens; identical to SEQ ID NO: 67145

SEQ ID NO: 71495 - DNA, 621 bp, Homo sapiens; identical to SEQ ID NO: 67146

SEQ ID NO: 71496 - DNA, 863 bp, Homo sapiens; identical to SEQ ID NO: 67147

SEQ ID NO: 71497 - DNA, 702 bp, Homo sapiens; identical to SEQ ID NO: 67148

SEQ ID NO: 71498 - DNA, 397 bp, Homo sapiens; identical to SEQ ID NO: 67149

SEQ ID NO: 71499 - DNA, 1283 bp, Homo sapiens; identical to SEQ ID NO: 67150

SEQ ID NO: 71500 - DNA, 914 bp, Homo sapiens
cctttctagggaccagggaaggaaaccttggagagcgctctcatcgccctcgactcggaaaaacccaagaagcttcgcttccacccaaagcagctgtacttctccgccaggcaaggggagcttcagaaggtgctcctcatgctggtggacggaattgaccccaacttcaaaatggagcaccagaataagcgctctccactgcacgccgcggcagaggctggacacgtggacatctgccacatgctggttcaggcgggcgctaatattgacacctgctcagaagaccagaggaccccgttgatggaagcagccgaaaacaaccatctggaagcagtgaagtacctcatcaaggctggggccctggtggatcccaaggacgcagagggctctacgtgtttgcacctggctgccaagaaaggccactacgaagtggtccagtacctgctttcaaatggacagatggacgtcaactgtcaggatgacggaggctggacacccatgatctgggccacagagtacaagcacgtggacctcgtgaagctgctgctgtccaagggctctgacatcaacatccgagacaacgaggagaacatttgcctgcactgggcggcgttctccggctgcgtggacatagccgagatcctgctggctgccaagtgcgacctccacgccgtgaacatccacggagactcgccactgcacattgccgcccgggagaaccgctacgactgtgtcgtcctctttctttctcgggattcagatgtccccttaaagaacaaggaaggagagacgcccctgcagtgtgcgagcctcaactctcaggtgtggagcgctctgcagatgagcaaggctctgcaggactcggcccccgacaggcccagccccgtggagaggatagtgagcagggacatcgc

SEQ ID NO: 71501 - DNA, 484 bp, Homo sapiens; identical to SEQ ID NO: 67152

SEQ ID NO: 71502 - DNA, 467 bp, Homo sapiens; identical to SEQ ID NO: 67153

SEQ ID NO: 71503 - DNA, 414 bp, Homo sapiens; identical to SEQ ID NO: 67154

SEQ ID NO: 71504 - DNA, 419 bp, Homo sapiens; identical to SEQ ID NO: 67155

SEQ ID NO: 71505 - DNA, 741 bp, Homo sapiens; identical to SEQ ID NO: 67156

SEQ ID NO: 71506 - DNA, 471 bp, Homo sapiens; identical to SEQ ID NO: 67157

SEQ ID NO: 71507 - DNA, 395 bp, Homo sapiens
ctcatatttaaatttagatgtgccatagaagttttgaagttttgttaatgctccttttattgagactgaatctggtcaaacagtataccaaaatgataacaacccctcaccaaggttttccagttgtatgaaaccaagaactcccgccactccaccatgatcgtgggctgcacgggcagcggcaagactgcctcatggcgcattctacaggcctccctgtcctctctgtgccgcgccggagaccctaacttcaacattgttagagagttccctttgaaccccaaggcattgtccctaggggaactgtatggggaatatgacctcagcaccaatgaatggacagatggcatcttgtccagtgtcatgcggacggcatgtgcagatgagaaacccga

SEQ ID NO: 71508 - DNA, 766 bp, Homo sapiens; identical to SEQ ID NO: 67159

SEQ ID NO: 71509 - DNA, 1518 bp, Homo sapiens; identical to SEQ ID NO: 67160
  misc_feature (1)...(1518): n = a,t,c or g

SEQ ID NO: 71510 - DNA, 376 bp, Homo sapiens; identical to SEQ ID NO: 67161

SEQ ID NO: 71511 - DNA, 394 bp, Homo sapiens; identical to SEQ ID NO: 67162

SEQ ID NO: 71512 - DNA, 473 bp, Homo sapiens; identical to SEQ ID NO: 67163

SEQ ID NO: 71513 - DNA, 784 bp, Homo sapiens; identical to SEQ ID NO: 67164

SEQ ID NO: 71514 - DNA, 1164 bp, Homo sapiens
agcaagtctgaagttttacaggaatctattagaaaacaaagtgtcaattatttcaagaattaccatagaacacggctcgatgaactgagaatgttcttagagaatgagacttgggaactttgtcctgttaagtcaaatttcagcatcttgcaacttcatgaatttaaattcatggaacagtctcgctccccatcagtttcacctagtaaacagccagtctcaacttcttcaaaaacagtgaccttgtttgagcagtactgtagtggtgggaatccatttgaaattcaggccaaccacaaagatgaagaaacagaagatgtcttagcttctaatgggtatgaatctgatgaacaagaaaagagtgcctatcaagagtatgacagtgacagtgatgttcctgaggaactcaaacgagactatgtggatgagcagacaggagatggtcctgtgaaaagtgtttctcgggaaactctaaaaagcaggaagaaatcagattacagtctaaataaagtgaatgcacctatcttaacaaatacaacattgaacgtcataagacttgttggaaaatatatgcagatgatgaacattcttaagccaattgcctttgatgttattcatttcatgtctcaactatttgattattacttgtatgcaatatataccttttttggtcggaatgattcattggaatcaactggactcggccttagtagtagtagactaagaacaactctaaacagaatacaagaaagccttattgatctagaagtttcagctgatcctactgccacactcacagcagcagaagaaagaaaggagaaggtgccaagtccacacctcagtcacctagtggttttgacatctggggatacgttgtatgggttggcagaaagagtggtagccacggaatccttggtattcttggctgaacagtttgagttccttcagccacatctggatgctgtgatgcctgcagtcaaaaagccctttcttcagcagttctattctcagacagtctcaaccgccagtggaactacggaaaccaatttactgggattgtaggctgggtaaagccctttgattatggaacagatggcttgcttctgcatgggctaatggtggaaatggggatggtaaaaggaattattgttcacagcacaacat

SEQ ID NO: 71515 - DNA, 681 bp, Homo sapiens; identical to SEQ ID NO: 67166

SEQ ID NO: 71516 - DNA, 756 bp, Homo sapiens; identical to SEQ ID NO: 67167

SEQ ID NO: 71517 - DNA, 423 bp, Homo sapiens; identical to SEQ ID NO: 67168

SEQ ID NO: 71518 - DNA, 516 bp, Homo sapiens; identical to SEQ ID NO: 67169

SEQ ID NO: 71519 - DNA, 1272 bp, Homo sapiens
ctgaaaggccttctctgcctttgcttatcttgcagtcttcatagtgaagatgggtattgaaaattgtagtagcctgataggggaactaagatttaagggatctacttttggtttaatctacggactactgtattgcataatagatctgattcttgagtatcttttcagactctagcagacatgtatctgaaacctattcttgttttccagaaatatcttcagagccaggagatgatgatgaacccacagaaggaagctttgagggacaccaagctttcgtaaatgcaattcagatatttgggaacttgctatatacctgttcagcagataaaactgttcgggtttataatctggtgagtcggaaatgtattggtgtctttgagggtcatacctccaaagttaactgcctcctggttactcagacctccgggaagaatgctgccctttacaccgggtccagtgaccataccatccgctgctataatgttaaggtaggtgggtccagagaaatccaaagtggttcatattgagtcgcctttgtatttactgtgtggagtggagacactgtggcagacgcttcattctacccaccatctcctttttgcttctaaacaatgtttagcacattgttgtagccctaggtagatatgagacttacacataaaccatattttctgtctctctccaccagtattttttcacttcctactattaataatataccttccttggtctttgccataaatgttatgcatatcatatgtcaaaactaatcctagatagaataaagagaaaaatgtaggccgggctcagtggctcacgcctgtaatcccagcactttgggaggccgaggtgggtggatcacctgaggtcgggagtttgagaccagcctgaccaacatggagaaaccctgtctctactaaaaatacaaaattagccgggcatggtggcgggcgcctgtaatcccagctactagggaggctgaggcaggagaatcgcttgaacccgggaggcggaggttgaggtgagctgagatcgcgccattgcactctagcctgggcaccaagagcgaaactccgtctcaaaaaaataaataaataaataaaaataaaaataaaaataacgaagcgttactccagaccattcccaggatgcctcatgcacattaggggtgccaccatccagttctggtggttggtaggaacgggaatgtgtgtgtaaagaggtctggccccacttgggcagggaatgagtagggaaggagctgtcctt

SEQ ID NO: 71520 - DNA, 652 bp, Homo sapiens; identical to SEQ ID NO: 67171

SEQ ID NO: 71521 - DNA, 1747 bp, Homo sapiens; identical to SEQ ID NO: 67172

SEQ ID NO: 71522 - DNA, 484 bp, Homo sapiens
gattccagaagatatgatgtcaagaccaggaagtggagctttctcttggaagagcacagtaaactaattgcaaaggtgcgctgcctcccacaagttcagctggaccctctgcccacgactctcaccctggcgtttgcttctcagctcaagaagacatctctcagtctcacgccagatgtcccagaggcagacctttctgaagtggaccccaagctcgtgtctaatctgatgccctttcagagagctggagtcaattttgccatagccaaaggaggccgcctgctgctcgctgacgacatgggcctggggaagaccatccaagccatctgcatcgcagccttttaccggaaggagtggccgctcctggtggtggtgccatcctccgtgcgcttcacctgggagcaggccttccttcggtggctgccatctctgagcccagattgcatcaacgtcgtggtgactgggaaggaccgcctgacagctg

SEQ ID NO: 71523 - DNA, 414 bp, Homo sapiens; identical to SEQ ID NO: 67174

SEQ ID NO: 71524 - DNA, 739 bp, Homo sapiens; identical to SEQ ID NO: 67175

SEQ ID NO: 71525 - DNA, 620 bp, Homo sapiens; identical to SEQ ID NO: 67176

SEQ ID NO: 71526 - DNA, 418 bp, Homo sapiens; identical to SEQ ID NO: 67177

SEQ ID NO: 71527 - DNA, 645 bp, Homo sapiens; identical to SEQ ID NO: 67178

SEQ ID NO: 71528 - DNA, 504 bp, Homo sapiens; identical to SEQ ID NO: 67179

SEQ ID NO: 71529 - DNA, 742 bp, Homo sapiens; identical to SEQ ID NO: 67180

SEQ ID NO: 71530 - DNA, 438 bp, Homo sapiens; identical to SEQ ID NO: 67181

SEQ ID NO: 71531 - DNA, 422 bp, Homo sapiens; identical to SEQ ID NO: 67182

SEQ ID NO: 71532 - DNA, 749 bp, Homo sapiens; identical to SEQ ID NO: 67183

SEQ ID NO: 71533 - DNA, 659 bp, Homo sapiens; identical to SEQ ID NO: 67184
  misc_feature (1)...(659): n = a,t,c or g

SEQ ID NO: 71534 - DNA, 483 bp, Homo sapiens
catttagatttgatacgagaaacagtagcgccccattcgagaggataagtatgcctcaaacacaggagttcttgggaagagaattatcacaagagacaacttctgttgggtgttggccagtgtccctcgtccccccaccctgggtccccactgctttacctcttgctttgcagccttctctcctcacagccttcctgtggctgtgtttttggccctgatagccccatggcacaactgcactttgcctcacctaggcctgtggcttcttgcctggcaggtgccacttctccacttttaagcagtgccaagagtggctctcacggctaagccgagccacagcaagacctgccaagcctgaagacctctttgcctttgcctaccatgcctggtgcctggggctgaccgaggaggaccagcacactcacctatgtcagccaggtgagcacatacgttgtcgagccgggaatccggccggtccgcatg

SEQ ID NO: 71535 - DNA, 968 bp, Homo sapiens; identical to SEQ ID NO: 67186

SEQ ID NO: 71536 - DNA, 444 bp, Homo sapiens
ctctggtcaggtgatccaaaaggaaactgttggtgggacgacttacttctatacagacacaactccagcacctttgactggaatggtgtttccaaactatcatatttatcctccaactgcacctcacgttgcttatatgcaaccgaaagcaaacgcaccttccttcttcatggctgatgaactccgacaggagctgatcaacagacatttaataacaatggctcaaattgatcaagcagatatgccagcagttcctacagaggttgacagctaccatagcctattccctctagaaccactgccacctcccaaccggatacagaaatcaagtaattttggatatattacatcttgctacaaagctgtaaacagcaaagatgatctgccatattgccttcggaggatacatggttttcgtcttgttaacacaaagtgcatggtgtt

SEQ ID NO: 71537 - DNA, 464 bp, Homo sapiens; identical to SEQ ID NO: 67188
  misc_feature (1)...(464): n = a,t,c or g

SEQ ID NO: 71538 - DNA, 1015 bp, Homo sapiens; identical to SEQ ID NO: 67189

SEQ ID NO: 71539 - DNA, 470 bp, Homo sapiens; identical to SEQ ID NO: 67190

SEQ ID NO: 71540 - DNA, 416 bp, Homo sapiens; identical to SEQ ID NO: 67191

SEQ ID NO: 71541 - DNA, 935 bp, Homo sapiens; identical to SEQ ID NO: 67192

SEQ ID NO: 71542 - DNA, 412 bp, Homo sapiens; identical to SEQ ID NO: 67193

SEQ ID NO: 71543 - DNA, 511 bp, Homo sapiens; identical to SEQ ID NO: 67194

SEQ ID NO: 71544 - DNA, 504 bp, Homo sapiens; identical to SEQ ID NO: 67195
  misc_feature (1)...(504): n = a,t,c or g

SEQ ID NO: 71545 - DNA, 913 bp, Homo sapiens; identical to SEQ ID NO: 67196

SEQ ID NO: 71546 - DNA, 446 bp, Homo sapiens; identical to SEQ ID NO: 67197
  misc_feature (1)...(446): n = a,t,c or g

SEQ ID NO: 71547 - DNA, 505 bp, Homo sapiens; identical to SEQ ID NO: 67198

SEQ ID NO: 71548 - DNA, 392 bp, Homo sapiens
cctccccactgtcccagtcacatcccaaccctctcacgcttaccagagtcccgggcagcctgcagggcatgcaggtagttgtctctggcagccttgtggtcccccagctggctcaatgcaaaggccaggctgccaaagctccggccctgctcccaccgctgccccacagagccgtgtaggtcagcagccttctggtgaaactcccgagcttcctgatagttgccgagggcattgtgggccatcccgaggtttcttagcactgtggcctgctctcctggcacccagcacaggggcagggcctgcaggaaggcctccacggccagcgggaacagctggagctgggagtagcccaggcccagcagtcgcctctcagtgctcctctcggcacgaaa

SEQ ID NO: 71549 - DNA, 500 bp, Homo sapiens; identical to SEQ ID NO: 67200

SEQ ID NO: 71550 - DNA, 717 bp, Homo sapiens; identical to SEQ ID NO: 67201

SEQ ID NO: 71551 - DNA, 401 bp, Homo sapiens; identical to SEQ ID NO: 67202

SEQ ID NO: 71552 - DNA, 679 bp, Homo sapiens; identical to SEQ ID NO: 67203
  misc_feature (1)...(679): n = a,t,c or g

SEQ ID NO: 71553 - DNA, 425 bp, Homo sapiens; identical to SEQ ID NO: 67204

SEQ ID NO: 71554 - DNA, 614 bp, Homo sapiens; identical to SEQ ID NO: 67205

SEQ ID NO: 71555 - DNA, 591 bp, Homo sapiens; identical to SEQ ID NO: 67206

SEQ ID NO: 71556 - DNA, 585 bp, Homo sapiens; identical to SEQ ID NO: 67207

SEQ ID NO: 71557 - DNA, 408 bp, Homo sapiens; identical to SEQ ID NO: 67208

SEQ ID NO: 71558 - DNA, 406 bp, Homo sapiens; identical to SEQ ID NO: 67209

SEQ ID NO: 71559 - DNA, 1131 bp, Homo sapiens; identical to SEQ ID NO: 67210

SEQ ID NO: 71560 - DNA, 1249 bp, Homo sapiens; identical to SEQ ID NO: 67211

SEQ ID NO: 71561 - DNA, 441 bp, Homo sapiens; identical to SEQ ID NO: 67212

SEQ ID NO: 71562 - DNA, 929 bp, Homo sapiens; identical to SEQ ID NO: 67213

SEQ ID NO: 71563 - DNA, 993 bp, Homo sapiens; identical to SEQ ID NO: 67215

SEQ ID NO: 71564 - DNA, 554 bp, Homo sapiens; identical to SEQ ID NO: 67216

SEQ ID NO: 71565 - DNA, 832 bp, Homo sapiens; identical to SEQ ID NO: 67217

SEQ ID NO: 71566 - DNA, 782 bp, Homo sapiens; identical to SEQ ID NO: 67218

SEQ ID NO: 71567 - DNA, 1498 bp, Homo sapiens; identical to SEQ ID NO: 67219

SEQ ID NO: 71568 - DNA, 506 bp, Homo sapiens; identical to SEQ ID NO: 67220

SEQ ID NO: 71569 - DNA, 690 bp, Homo sapiens; identical to SEQ ID NO: 67221

SEQ ID NO: 71570 - DNA, 1316 bp, Homo sapiens
gcaaggcggcacgtcctgctccccctggtgaagaagctgccctgggcttgtcgtcctagggtctccagacatgtctgaggtgaagagccggaagaagtcggggcccaagggagcccctgctgcggagcccgggaagcggagcgagggcgggaagacccccgtggcccggagcagcggaggcgggggctgggcagacccccgaacgtgcctgagcctgctgtcgctggggacgtgcctgggcctggcctggtttgtatttcagcagtcagaaaaatttgcaaaggtggaaaaccaataccagttactgaaactagaaaccaatgaattccaacaacttcaaagtaaaatcagtttaatttcagaaaagtggcagaaatctgaagctatcatggaacaattgaagtcttttcaaataattgctcatctaaagcgtctacaggaagaaattaatgaggtaaaaacttggtccaataggataactgaaaaacaggatatactgaacaacagtctgacgacgctttctcaagacattacaaaagtagaccaaagtacaacttccatggcaaaagatgttggtctcaagattacaagtgtaaaaacagatatacgacggatttcaggtttagtaactgatgtaatatcattgacagattctgtgcaagaactagaaaataaaatagagaaagtagaaaaaaatacagtaaaaaatataggtgatcttctttcaagcagtattgatcgaacagcaacgctccgaaagacagcatctgaaaattcacaaagaattaactctgttaagaagacgctaaccgaactaaagagtgacttcgacaaacatacagatagatttctaagcttagaaggtgacagagccaaagttctgaagacagtgacttttgcaaatgatctaaaaccaaaggtgtataatctaaagaaggacttttcccgtttagaaccattagtaaatgatttaacactacgcattgggagattggttaccgacttactacaaagagagaaagaaattgctttcttaagtgaaaaaatatctaatttaacaatagtccaagctgagattaaggatattaaagatgaaatagcacacatttcatgatatgaattagtttgacgttattgagattagactaaggtaatttttttaatgggacctctcatgagaagactggtaaatcaaaaataatgatattttggagcaaaagtcattttatatttaatcctattttgtacagtaaaaataaaactttaaaacaggttgattttccaaaataaatatgctaaaacctaaaaaaaaaaaa

SEQ ID NO: 71571 - DNA, 573 bp, Homo sapiens; identical to SEQ ID NO: 67223

SEQ ID NO: 71572 - DNA, 714 bp, Homo sapiens; identical to SEQ ID NO: 67224

SEQ ID NO: 71573 - DNA, 425 bp, Homo sapiens; identical to SEQ ID NO: 67225

SEQ ID NO: 71574 - DNA, 703 bp, Homo sapiens
cctgcccccttggctgagggggccttcttggctgaggctagcctcttgaagctgtcccctgcaacacctacttctgagggtccaaaggtggtgagcgtacagttgggtgatggtacaaggctgaaaggcactgtgctgcctgtggccaccatccagaacgccagtactgccatgctgatggcagccagtgtggctcgcaaggctgtggtgctgcctggggggactgccaccagccctaagatgattgctaagaacgtgctaggcctggtgccccaagccctgcctaaggctgacgggcgggcagggctggggactgggggacagaaggtgaatggtgcctcggtggtgatggtgcaaccttcaaagacagctactgggccaagtacagggggcggcacagtgatatcacggacccagtccagcctggtggaggccttcaacaagatcctcaacagcaagaacctgctccctgcctataggccaaacctgagcccaccagctgaggctgggctggccctgcctcccaccggctaccgctgcctggagtgtggggatgccttctcattggagaagagcctggcacggcactatgaccgtcggagcatgcgcatcgaggtcacctgcaaccactgcgcccgccgcctggtcttcttcaacaagtgcagcctgctcctgcatgcacgtgaacacaaggacaaggggc

SEQ ID NO: 71575 - DNA, 557 bp, Homo sapiens; identical to SEQ ID NO: 67227

SEQ ID NO: 71576 - DNA, 501 bp, Homo sapiens; identical to SEQ ID NO: 67228

SEQ ID NO: 71577 - DNA, 431 bp, Homo sapiens; identical to SEQ ID NO: 67229

SEQ ID NO: 71578 - DNA, 1872 bp, Homo sapiens; identical to SEQ ID NO: 67230

SEQ ID NO: 71579 - DNA, 740 bp, Homo sapiens
gggccgacgatttcgtggtccagcacctgtgtgctcccttgaggccgagcggggccctgatgggcgtagctttgttattgccaccactcggcagcgcctcttccagttcataggccgagcagcagagggggctgaggcccagggtttctcagggctctttgcagcttacacggaccacccacccccattccgtgagtttcccagcaacctgggctacagtgagttggccttctacacccccaagctgcgctccgcaccccgggccttcgcctggatgatgggggatggtgtgttgtatggggcattggactgtgggcgccctgactctctgctgagcgaggagcgagtctgggagtacccagagggggtagggcatggggccagcccacccctagccatcgtcttgacccagttccacttcatgctgctactggcagaccgggtggaggcagtgtgcacactgaccgggcaggtggtgctgcgggatcacttcctggagaaatttgggccgctgaagcacatggtgaaggactcctccacaggccagctgtgggcctacagtgagcgggctgtcttccggtaccacgtgcaacgggaggctcgagatgtctggcgcacctatctggacatgagccgcttcgatctggccaaagagtattgtcgagagcggaccaactgcctggacacggtcctggcccgggaggccgatttctgacgaaatcgtcgacccaggaaatcgg

SEQ ID NO: 71580 - DNA, 1692 bp, Homo sapiens; identical to SEQ ID NO: 67232
  misc_feature (1)...(1692): n = a,t,c or g

SEQ ID NO: 71581 - DNA, 959 bp, Homo sapiens
tttcgtctggatgctgcgatcccgcagcaccctccagccttgcagaagcagccaccatgccagtctctaagtgcccaaaaaagtcggagtccctgtggaaggggtgggaccggaaggcccagaggaacggcctgcggagccaggtatacgctgtgaatggcgactactatgtgggcgagtggaaggacaacgtgaaacacgggaaaggaacacaggtctggaagaagaaaggagccatctatgagggggactggaagtttgggaagcgagacggctacggcaccctcagccttcctgaccaacagacaggaaagtgcaggagagtctactcaggctggtggaaaggtgataagaaatcgggttatgggatccagtttttcggacccaaggagtattatgagggtgactggtgtggcagccagcgcagcgggtggggccgcatgtattacagcaacggcgacatctacgagggacagtgggagaacgacaagcccaacggggagggcatgctgcgcctgagtcaaaatcctagaccctgatggtgtgctggcggaggccttggccatgttcaggaagacagaggaaggagattgatgccagagaacacaaacgcttcaggagaaattcaagcctgtgtcacccgatcgctcagaccagtgcggctctggctggaggagtcagcagcagctccaggcatgaccccggcaccctcatagggcccctcactacccccagcactgggtcatttcttgccaataggaaggctggtgcttctctcccaggctgtcctcgggaccctcttcattctctgatctcatcctggaatgcatgagaataaagaataaccaagtggtataagcctgggcctatgggataaggatggggcactcgagggggctcagcagggctttcaggtttagaagagggaagacctgccttggctgggctgcctgggttta

SEQ ID NO: 71582 - DNA, 1226 bp, Homo sapiens
atccctcgggtcgacgatttcgacagactgggccaatcattacctagccaaatccggccacaagcgtctcatcagggatctccagcaagatgtgacagatggcgtgctcctggcccagattatccaggttgtggcaaatgaaaagattgaagacatcaatggctgtccgaagaacagatcccaaatgattgaaaacatagatgcctgcttgaatttcctggcagctaagggaataaacatccaggggctgtctgcagaagagatcaagaatggaaacctcaaggccattctaggcctcttcttcagcctctcccgatacaagcagcagcagcagcagccccagaagcagcacctctcctcacctctgccgcccgccgtatcccaggtggccggggccccctcccagtgccaggctggcacccctcagcaagccccaggggtgccagtcactccccaagccccgtgccagcctcaccagccagcaccacatcagcagtcaaaagcacaagctgaaatgcagtccagacttccaggtcctaccgcgagggtatccgctgcaggcagcgaggccaaaacacgcggagggtcaactactgctaacaaccgacgcagccagagctttaacaactatgataaatccaaaccagtcacctccccacccccaccgccaagcagccacgagaaagagcctttggcaagttcagcctcctcccaccccggaatgagtgacaatgcacctgcttccttggagagcggcagcagctccacccctactaattgcagtacctactcgggcataccgcattccggtgcagccaccaagccttggcgcagcaaatccctcagcgtgaagcacagtgccacggtatccatgctctcggtcaagcctcctgggcctgaggcccccaggcccacacctgaagccatgaagccggcccccaacaatcagaagtccatgctggaaaagctgaaacttttcaacagtaaagggggctcaaaggcaggtgaggggccggggtcccgggacacaagctgtgagcggctggagactctgcccagcttcgaagagagcgaggagctggaggccgccagtcgcatgctcaccaccgtgggccctgcttccagcagccccaagattgcactcaagggcattgcccagaggacttttagccgggcactgaccaacaagaagagttctctgaaaggcaatgagaaagggaaagaga

SEQ ID NO: 71583 - DNA, 450 bp, Homo sapiens; identical to SEQ ID NO: 67235

SEQ ID NO: 71584 - DNA, 453 bp, Homo sapiens; identical to SEQ ID NO: 67236

SEQ ID NO: 71585 - DNA, 782 bp, Homo sapiens; identical to SEQ ID NO: 67237

SEQ ID NO: 71586 - DNA, 771 bp, Homo sapiens; identical to SEQ ID NO: 67238

SEQ ID NO: 71587 - DNA, 434 bp, Homo sapiens; identical to SEQ ID NO: 67239
  misc_feature (1)...(434): n = a,t,c or g

SEQ ID NO: 71588 - DNA, 578 bp, Homo sapiens; identical to SEQ ID NO: 67240

SEQ ID NO: 71589 - DNA, 846 bp, Homo sapiens; identical to SEQ ID NO: 67241

SEQ ID NO: 71590 - DNA, 646 bp, Homo sapiens; identical to SEQ ID NO: 67242

SEQ ID NO: 71591 - DNA, 564 bp, Homo sapiens; identical to SEQ ID NO: 67243

SEQ ID NO: 71592 - DNA, 816 bp, Homo sapiens; identical to SEQ ID NO: 67244

SEQ ID NO: 71593 - DNA, 728 bp, Homo sapiens; identical to SEQ ID NO: 67246

SEQ ID NO: 71594 - DNA, 1717 bp, Homo sapiens; identical to SEQ ID NO: 67247

SEQ ID NO: 71595 - DNA, 635 bp, Homo sapiens; identical to SEQ ID NO: 67248

SEQ ID NO: 71596 - DNA, 564 bp, Homo sapiens; identical to SEQ ID NO: 67249

SEQ ID NO: 71597 - DNA, 498 bp, Homo sapiens; identical to SEQ ID NO: 67250

SEQ ID NO: 71598 - DNA, 880 bp, Homo sapiens
  misc_feature (1)...(880): n = a,t,c or g
cccagtcccacattgagccctgatcccatccaagtccatagacttggcctctgaccaaacctgaccctgcacttgtcacttaaggtggtcccatattcagctcagaccctgaaccgagctctgaccctggcttctgactgaatctgtgacagactaaggcctgaccctggccctataccacgtctccacccgtgtcctcaactgagtgctgaccccaaacctagacagccctacctgatccttcccccaggcctgtccccgccgcttcatctcaaaagttgaaggtgaggagccggtaaacaggtctggagcctggtctcagactcagcctgagcaagctcagtctggggtcattgggcctgtaaccccgggcaggcccttgttagggatgcagggtctcaccctaggggtataagggatttctgtgcccatcagaacttnnnnnnnnnnnnnnnnnnnnnnnnnnnnnnnnnnnnnnnnnnnnnnnnnnnnnnnnnnnnattttgctgttagcatatgtgatgaccttgacttcacctccctggcgccaatatcctcttctgtaaaatggcttatgcattacaaagtgaggtcctgccagtgactacacctagaggcattaagtgcctttgtggactcctgccctgcacctcacctctcccagctttttaaccccctgaggaaccttcttaccttgagtccctcacccgctacaggccatccatgagcagatgaactgcaaggagtatcaggaggacctggccctgcgggctcagaacgatgcggctgcccggcggccgtcagagatgtttaaggtgaggctggctcagggtcgtggcctagcatctttaagttctgggatccagtctggggtagggag

SEQ ID NO: 71599 - DNA, 431 bp, Homo sapiens; identical to SEQ ID NO: 67252

SEQ ID NO: 71600 - DNA, 1066 bp, Homo sapiens
  misc_feature (1)...(1066): n = a,t,c or g
tgaccctcgtaagngcgttggaattccctcacctgtgtggtcctcaccttcctgggccaccgcctgctgaaacggtttctggtgccaaagctgaggaggtttctcaagcctcagggccatccccgcctgctgctctggtttaagaggtgagtgagctcacagccccgaggcagggcaggggagggcccctgagctgaggggttggctccagggttatggccagggctggaggaggaggaaggctctgtgtcatggagaactctctggcgccccagggcaggagccagtgggtggcttcaaacaaagcagcatctttgtggtgtttcaccagttcttagtcccagttacagcaggtgactgtggtggacgaaaactggactcaacagtttcctccattcagggatcccaggccatggagcaaggagggcccgaatcagtacctccctcagatcacctggacagtgtgagacaaaaagccgcagggaccatccctggagggggattcagcaggctcgatcggggtccaggtgctggtatttttcattagcctccaggggattctgatgtagccagcagcgtccttggacaacagtttgagatctgctgcttttcaaactggattccttggagcgctggaaatctcagcgatgtcacagggcaggagagggaggttgtggagggaaaattcagacttcccgcccagcccaccatttcaccaggcagctctaaatttatgtgttttataagccaaggttcacacaaaaaagaaaattcgctggggggaaaaaaacagtttctatggcttaaaaaaaagtctgaagaccaccagtctatttcaatactctattttgttgatgaagaagctggtgaccaaagatacccaaagactaagtcagggggatgcaggggtacaggggtgcctctcactttcccaaagtgagatccacataccacagcaaaatgatttgagccagcctgtggatgaacacatttaaaattttatttataaatacatttactgttacatttgacttctctttattaaatacatttgtgatttataaaa

SEQ ID NO: 71601 - DNA, 659 bp, Homo sapiens; identical to SEQ ID NO: 67254

SEQ ID NO: 71602 - DNA, 248 bp, Homo sapiens; identical to SEQ ID NO: 67255

SEQ ID NO: 71603 - DNA, 463 bp, Homo sapiens; identical to SEQ ID NO: 67256

SEQ ID NO: 71604 - DNA, 412 bp, Homo sapiens; identical to SEQ ID NO: 67257

SEQ ID NO: 71605 - DNA, 378 bp, Homo sapiens; identical to SEQ ID NO: 67258
  misc_feature (1)...(378): n = a,t,c or g

SEQ ID NO: 71606 - DNA, 948 bp, Homo sapiens; identical to SEQ ID NO: 67259

SEQ ID NO: 71607 - DNA, 534 bp, Homo sapiens; identical to SEQ ID NO: 67260

SEQ ID NO: 71608 - DNA, 582 bp, Homo sapiens; identical to SEQ ID NO: 67261

SEQ ID NO: 71609 - DNA, 942 bp, Homo sapiens; identical to SEQ ID NO: 67262

SEQ ID NO: 71610 - DNA, 614 bp, Homo sapiens; identical to SEQ ID NO: 67263

SEQ ID NO: 71611 - DNA, 622 bp, Homo sapiens
cctgacccctgcctgaatggaggctcttgtgttgacctagtggggaattacacctgcttgtgtgccgagcccttcaagggacttcgctgtgagacaggagaccatccagtgccagacgcctgcctctcggccccttgccacaatgggggcacctgtgtggatgcggaccagggctacgtgtgcgagtaccccgaaggcttcatgggcctggactgcagggagagagtccccgatgactgtgagtgccgcaacggaggcagatgcctgggcgccaacaccaccctctgccagtgccccctgggattctttgggcttctctgtgaatttgaaatcacagccatgccctgcaacatgaacacacagtgcccagatgggggctactgcatggagcacggcgggagctacctctgccagtgccccctgggattctttgggcttctctgtgaatttgaaatcacagccatgccctgcaacatgaacacacagtgcccagatgggggctactgcatggagcacggcgggagctacctctgcgtctgccacaccgaccacaatgccagccactccctgccatcaccctgcgactcggacccctcctcgtgccaagcttggcgtaatgaga

SEQ ID NO: 71612 - DNA, 426 bp, Homo sapiens; identical to SEQ ID NO: 67265

SEQ ID NO: 71613 - DNA, 527 bp, Homo sapiens; identical to SEQ ID NO: 67266

SEQ ID NO: 71614 - DNA, 456 bp, Homo sapiens
atgtgtcaacacttttgggagctacatctgcaagtgtcataaaggcttcgatctcatgtatattggaggcaaatatcaatgtcatgacatagacgaatgctcacttggtcagtatcagtgcagcagctttgctcgatgttataacgtacgtgggtcctacaagtgcaaatgtaaagaaggataccagggtgatggactgacttgtgtgtatatcccaaaagttatgattgaaccttcaggtccaattcatgtaccaaagggaaatggtaccattttaaagggtgacacaggaaataataattggattcctgatgttggaagtacttggtggcctccgaagacaccatatattcctcctatcattaccaacaggcctacttctaagccaacaacaagacctacaccaaagccaacaccaattcctactccaccaccaccaccacgaattccaccgca

SEQ ID NO: 71615 - DNA, 961 bp, Homo sapiens; identical to SEQ ID NO: 67268

SEQ ID NO: 71616 - DNA, 879 bp, Homo sapiens
acgtctagtccagcgtggtggaattcgcctccggttctcgccggctctcggacccgcctccgaagacgtggagcgctgcggcggctgatttgtcaaagatgaaagtgaccttatcagctttggatacttctgagagttctttcacacctttggtggtcatagaacttgctcaggatgtcaaagaagaaaccaaagaatggctgaaaaacagaattatagctaaaaaaaaagatggagataacaatgatgatttcctgacaatggcagaatgtcaattcattatcaaacatgaacttgaaaatcttagagctaaagatgaaaaaatgatccctggttaccctcaggcaaagttgtatccaggaaaatcattgttgagaagattgctcacgtctggcatcgtgattcaggtgtttccactgcatgacagtgaagccctgaagaagcttgaggacacctggtacactcggtttgctttgaagtatcagcccatagacagtattcgtggctactttggggaaacaattgctctgtactttggatttttggagtatttcacttttgcattaatccccatggctgtcattgggttaccttactacttgtttgtgtgggaagactatgacaagtacgtgatctttgcctcgttcaacctcatctggtccacggtgattctggaactgtggaagcgtggctgtgccaacatgacctacaggtgggggacactgctcatgaagagaaagtttgaggagccccggccaggatttcatggtgtcttggacctctttcctggttctcttttgcaatacattaacagaccctttatcaacataaacaatagtaactgagctattaaaggcaacctctctgaaaaaaaaaaaa

SEQ ID NO: 71617 - DNA, 522 bp, Homo sapiens
gaattaagagttactccgggccaaatggccggagttgtcagatctggcagcgtcttcgctggggctccagggagctgctgctggggtggaagctctcacactctttctccacgtgccctttccagttccctgacatcgtggagttctgcgaggccatggccaacgccgggaagaccgtaattgtggctgcactggatgggaccttccagaggaaggtaaggcgtctgatccaggtctggagctgggattgaggagggcaagaggcttctggatgggcacagagacaccagctctgggtgaccagggctcagccaccacagggttacggccgagctgctcaggccttggctgagccaagggactccatggtctgtgcagactgcgtgccatctgttgcggcaggtgctttgaattggcaaagggacagagccgggcatggtgctctgggggttgggggaaggactaaggtcagagcaaactctcctggcttcagtacttgtgaatcagagggtttaaaagaaa

SEQ ID NO: 71618 - DNA, 722 bp, Homo sapiens; identical to SEQ ID NO: 67271

SEQ ID NO: 71619 - DNA, 709 bp, Homo sapiens; identical to SEQ ID NO: 67272

SEQ ID NO: 71620 - DNA, 427 bp, Homo sapiens; identical to SEQ ID NO: 67273

SEQ ID NO: 71621 - DNA, 446 bp, Homo sapiens; identical to SEQ ID NO: 67274

SEQ ID NO: 71622 - DNA, 864 bp, Homo sapiens; identical to SEQ ID NO: 67275
  misc_feature (1)...(864): n = a,t,c or g

SEQ ID NO: 71623 - DNA, 640 bp, Homo sapiens; identical to SEQ ID NO: 67276

SEQ ID NO: 71624 - DNA, 449 bp, Homo sapiens; identical to SEQ ID NO: 67277

SEQ ID NO: 71625 - DNA, 452 bp, Homo sapiens; identical to SEQ ID NO: 67278

SEQ ID NO: 71626 - DNA, 446 bp, Homo sapiens
tggcctcaagagcaggtagactcaaggtgggggcactctccctgtcctctctcccctttgccacgcatgctgccagggtttcccccagaccagaggaatggagacaaggagtttgtgatccgcagagcagccaccaatcgtgtcttgaacgtgctccgccactgggtgtccaagcactctcaggtgggtgggagccctccctgggcaggctgctggggaccaccaggcaatggccccaggaaccagctgccttccaaaagcagctgcgggcagagtgagctgatggctggcagtggggcagcagaagggagggagctcaaatgtgccaccctgatgttcccggaggactgctcagattccctaggagggaacaaaggacatggaagggacaatgggtctctgtctatccaccctgcctgtagcaggggtacaggaattcctccgca

SEQ ID NO: 71627 - DNA, 497 bp, Homo sapiens; identical to SEQ ID NO: 67280

SEQ ID NO: 71628 - DNA, 568 bp, Homo sapiens; identical to SEQ ID NO: 67281

SEQ ID NO: 71629 - DNA, 840 bp, Homo sapiens; identical to SEQ ID NO: 67282

SEQ ID NO: 71630 - DNA, 428 bp, Homo sapiens; identical to SEQ ID NO: 67283

SEQ ID NO: 71631 - DNA, 448 bp, Homo sapiens; identical to SEQ ID NO: 67284

SEQ ID NO: 71632 - DNA, 495 bp, Homo sapiens; identical to SEQ ID NO: 67285

SEQ ID NO: 71633 - DNA, 635 bp, Homo sapiens; identical to SEQ ID NO: 67286

SEQ ID NO: 71634 - DNA, 1267 bp, Homo sapiens; identical to SEQ ID NO: 67287

SEQ ID NO: 71635 - DNA, 647 bp, Homo sapiens; identical to SEQ ID NO: 67288

SEQ ID NO: 71636 - DNA, 746 bp, Homo sapiens; identical to SEQ ID NO: 67289

SEQ ID NO: 71637 - DNA, 1221 bp, Homo sapiens; identical to SEQ ID NO: 67290

SEQ ID NO: 71638 - DNA, 427 bp, Homo sapiens; identical to SEQ ID NO: 67291

SEQ ID NO: 71639 - DNA, 1439 bp, Homo sapiens; identical to SEQ ID NO: 67292

SEQ ID NO: 71640 - DNA, 354 bp, Homo sapiens
cagaaatggcaaggaggaacagagccaagatgggcgatgcctctacacagctctcatcctacgtgaagcaggtccagacaggccacaagcccagcacaaaggagatagttcgcttctccaaactatttgaggaccagctggccctggaacacttagatcgccctcagctggttgccctttgcaaactgctggaattgcagacatttggaaccaacaacctgctccgctttcagctcctgatgaaactgaagtctataaaagcagatgatgaagtaagagcttaaccatagctctagggaattagcaaggttttgggacataccttagggtgcctgtgggatgaagtgtgcagta

SEQ ID NO: 71641 - DNA, 1061 bp, Homo sapiens; identical to SEQ ID NO: 67294
  misc_feature (1)...(1061): n = a,t,c or g

SEQ ID NO: 71642 - DNA, 750 bp, Homo sapiens; identical to SEQ ID NO: 67295
  misc_feature (1)...(750): n = a,t,c or g

SEQ ID NO: 71643 - DNA, 420 bp, Homo sapiens; identical to SEQ ID NO: 67296

SEQ ID NO: 71644 - DNA, 411 bp, Homo sapiens; identical to SEQ ID NO: 67297

SEQ ID NO: 71645 - DNA, 411 bp, Homo sapiens; identical to SEQ ID NO: 67298

SEQ ID NO: 71646 - DNA, 577 bp, Homo sapiens; identical to SEQ ID NO: 67299

SEQ ID NO: 71647 - DNA, 2115 bp, Homo sapiens; identical to SEQ ID NO: 67300

SEQ ID NO: 71648 - DNA, 418 bp, Homo sapiens
tcctctagagcggccgctcgcgatctctgactcctccagctggacacatctctccctggggcgggggtggtctgtgtccagctggaggagtcagagttcacctgtgcggcagccgtgaaagcacggaaagcaatggaggtggagatcgaagacctgcacctgcagattgatgacatcgccaaagccaagacagcggtgaggggccaaggtgcccggggcagagctcggggggctgaggcagaatagagctgcctctgtggctcccttcaccctagacaggtccctccacgtcaggacttgtgacaggtcctttcacgccaggacttgctgcaggaagagcgggcctcccctcctctgcgtctctccacactgagcagaggcctcggggaggagcgggcagaagagggagccagcaagg

SEQ ID NO: 71649 - DNA, 448 bp, Homo sapiens
ccagcaggtgaagcactgtcgtcagtcccggggcccaggcgggccccggccagctttgagctctggccaggtgcaatgtgcccagagcttccaggccgggcaccactactgggaggtgcgcgcgtcagaccactcggtgacactgggcgtctcctacccgcaactgccacggtgcaggctggggccccacacagacaacattggccggggaccctgctcctgggggctctgcgtccaggaggacagcctccaggcctggcacaacggggaagcccagcgcctcccaggggtgtcagggcggctcctgggcatggatttggacctggcctcaggctggctcaccttttacagcctggagccccagacccagcccctgtacaccttccatgccctcttcaaccagcccctcacccccgtcttctggctcctcgacccggaagttgcggaa

SEQ ID NO: 71650 - DNA, 853 bp, Homo sapiens; identical to SEQ ID NO: 67303

SEQ ID NO: 71651 - DNA, 392 bp, Homo sapiens; identical to SEQ ID NO: 67304

SEQ ID NO: 71652 - DNA, 881 bp, Homo sapiens
ttttacaattcaatttttttattcataaggttgtacagccaacatcactgtttaattccagaacattttcaacatctcaaaaagaaactctgcacccattagcagtcattccctgtagcttccctcataggcaatggcaactgctgatctgctgaataggaatcatataatatgtgaggaaatgtttagtttttaaagttacacaggataattccaatgtgcagccagaatacagaaccattattcatcagatggcattattaaggactccgcctgcaatgagattttgtggattattgagtaagagccaagggacccttccccctagggtttttggggcctggatggctgtgtatttgagggggagaccgaagccagtagaagtaatcagatgatccactgcttagtgcagcagcagcttctcccattggtgtgggtgggtaggccacatgcctggagaaacacaccccctcagagctctcatggctgtcatgggggatgcagagggacaggcatagctcttgccctcaaggtgtgtatggtctgtcaggaagatgagaaagtccatctgcattccttttccccaccatgactcgggacacgctcttgtggtgcttttgtttgtcctctgtgattgagaaaccttgtccttgaggaggggggtttttggactctggatctggggttcattgggcctttttcctgcaggtggcgggaaatgttttttaaagtgaagaaaacagttggggaagctccagatggaccagccagtgcctacttggccgacaccacccatacctccttgtacatggtgaggccccaaggatgggtgtagaccagcgcagggggtagaaacgatttttcggacgcgtgggtcgacc

SEQ ID NO: 71653 - DNA, 235 bp, Homo sapiens; identical to SEQ ID NO: 67306

SEQ ID NO: 71654 - DNA, 510 bp, Homo sapiens; identical to SEQ ID NO: 67307

SEQ ID NO: 71655 - DNA, 925 bp, Homo sapiens; identical to SEQ ID NO: 67308

SEQ ID NO: 71656 - DNA, 592 bp, Homo sapiens; identical to SEQ ID NO: 67309

SEQ ID NO: 71657 - DNA, 408 bp, Homo sapiens; identical to SEQ ID NO: 67310

SEQ ID NO: 71658 - DNA, 1210 bp, Homo sapiens; identical to SEQ ID NO: 67311

SEQ ID NO: 71659 - DNA, 438 bp, Homo sapiens
agcgcagcttgcaggacgcgcagcgcctcttcttgatgagcgaggccgtgcagccggtgacacccgagccctgtgtcacccaggacagcgtgcgcttctcacacctcgtggtggacctggtgcaggctaaagacacgctctaccatgtactctacattggcaccgagtcgggcaccatcctgaaggcgctgtccacggcgagccgcagcctccacggctgctacctggaggagctgcacgtgctgccccccgggcgccgcgagcccctgcgcagcctgcgcatcctgcacagcgcccgcgcgctcttcgtggggctgagagacggcgtcctgcgggtcccactggagaggtgcgccgcctaccgcagccagggggcatgcctgggggcccgggacccgtactgtggctgggacgggaagcagcaacgttgcagcacac

SEQ ID NO: 71660 - DNA, 566 bp, Homo sapiens; identical to SEQ ID NO: 67313

SEQ ID NO: 71661 - DNA, 406 bp, Homo sapiens; identical to SEQ ID NO: 67314

SEQ ID NO: 71662 - DNA, 561 bp, Homo sapiens; identical to SEQ ID NO: 67315

SEQ ID NO: 71663 - DNA, 453 bp, Homo sapiens
  misc_feature (1)...(453): n = a,t,c or g
ntatccgtgctgttggcaactttaaggagcagacagtgattgccgtcaaggcccctccgcagacgagactggaagtgcccgacaggaatgaggtgagaggggaaatatttggtggagagcagggttgagaccctgccagggagcgttccaggcggctctgcagactctgtccctggcactgcctagccccatgctttgcaggcccattgtggtgtccatggcaatattggtggnnnnnnnnnnnnnnnnnnnnnnncagaagctggaaagggcaacggagactgagtagtggcctgagaaaatctctgttcctggtttctttctgcatcccaccagccctgggttcctgcgcacatgcacactcatgcccacgtatgacggtgacaatactcatgaaaatcctttcatgctgaccgtgctcggacgcgtgggtctacccggagttccggcgag

SEQ ID NO: 71664 - DNA, 462 bp, Homo sapiens; identical to SEQ ID NO: 67317
  misc_feature (1)...(462): n = a,t,c or g

SEQ ID NO: 71665 - DNA, 1528 bp, Homo sapiens; identical to SEQ ID NO: 67318

SEQ ID NO: 71666 - DNA, 1342 bp, Homo sapiens; identical to SEQ ID NO: 67319

SEQ ID NO: 71667 - DNA, 597 bp, Homo sapiens; identical to SEQ ID NO: 67320

SEQ ID NO: 71668 - DNA, 441 bp, Homo sapiens; identical to SEQ ID NO: 67321

SEQ ID NO: 71669 - DNA, 428 bp, Homo sapiens; identical to SEQ ID NO: 67322

SEQ ID NO: 71670 - DNA, 428 bp, Homo sapiens; identical to SEQ ID NO: 67323

SEQ ID NO: 71671 - DNA, 440 bp, Homo sapiens; identical to SEQ ID NO: 67324

SEQ ID NO: 71672 - DNA, 422 bp, Homo sapiens; identical to SEQ ID NO: 67326

SEQ ID NO: 71673 - DNA, 377 bp, Homo sapiens
caaggaaagggagcttattgaaagactagaggatctcaaagagcagctggctcccctggaaaaggtacgaattgagattagcagaaaagctgagaagaggaccactttggtgctatggggtggccttgcctacatggccacacagtttggcattttggcccggcttacctggtgggaatattcctgggacatcatggagccagtaacatacttcatcacttatggaagtgccatggcaatgtatgcatattttgtaatgacacgccaggaatatgtttatccagaagccagagacagacaatacttactatttttccataaaggagccaaaaagtcacgttttgacctagagaaatacaatcaactcaaggatgcag

SEQ ID NO: 71674 - DNA, 792 bp, Homo sapiens; identical to SEQ ID NO: 67328

SEQ ID NO: 71675 - DNA, 415 bp, Homo sapiens; identical to SEQ ID NO: 67329

SEQ ID NO: 71676 - DNA, 348 bp, Homo sapiens; identical to SEQ ID NO: 67330

SEQ ID NO: 71677 - DNA, 849 bp, Homo sapiens; identical to SEQ ID NO: 67331
  misc_feature (1)...(849): n = a,t,c or g

SEQ ID NO: 71678 - DNA, 622 bp, Homo sapiens; identical to SEQ ID NO: 67332

SEQ ID NO: 71679 - DNA, 296 bp, Homo sapiens
ttgagcaaattttattgctggcgtttggtcgcaaagccgctgaagagatggacgagcggattcgcgagcggttacattcagaagacattgccgcacgcacgtttcatgcgctggcgctgcatattattcagcagggcagcaaaaaagttccgatagtcagcaaactggaaaatgatcccgctgcccgtcatgaactctttattgctgagtggcgcaagcaatgcagcgaaaagaaagcgcaggcgaagggcgccagcccttcaaactgtccttcgttgtgtttataggggaagagt

SEQ ID NO: 71680 - DNA, 352 bp, Homo sapiens; identical to SEQ ID NO: 67334

SEQ ID NO: 71681 - DNA, 543 bp, Homo sapiens; identical to SEQ ID NO: 67335

SEQ ID NO: 71682 - DNA, 546 bp, Homo sapiens; identical to SEQ ID NO: 67336

SEQ ID NO: 71683 - DNA, 512 bp, Homo sapiens; identical to SEQ ID NO: 67337

SEQ ID NO: 71684 - DNA, 401 bp, Homo sapiens; identical to SEQ ID NO: 67338

SEQ ID NO: 71685 - DNA, 501 bp, Homo sapiens
tccacagtgactactgcagccagaacacatgcctcaatggtgggaagtgctcatggacccacggggcaggtgagggctggggtgccaggctgaacccagggtttatcccagaaggctcttcaggtgggaaaggcatgtcagggtggagatctcagagcctcctggttccaaatttctctctcttcccctaacttgtgagtaacaggttggaatctgcaatatctagactaggggaagccaggagtcttccttccctctcaacaaaaactatctttctacttctggggggatgagggaggatatgaatggggacctcaggggcagagggttgaattaatcacataccttagtgtcatcactggtctatgcacagtctccttctcattcccctttaacttatattccactcccttccccttccctaacactagaggcaaacatttccagtttttgaatgagctctcgcaaaatacatgttgtttttcatatgcttgaatttcc

SEQ ID NO: 71686 - DNA, 632 bp, Homo sapiens; identical to SEQ ID NO: 67340

SEQ ID NO: 71687 - DNA, 1047 bp, Homo sapiens
ggtcttggtttcaagggatcatatgaaaagtgcccagcagttcttccagttggtgggaggatcagctagtgaatgtgatacaataccagggaggcagtgcatggcttcctgtttcttcctgcttaagcaatttgatgatgttttgatttacctcaactcatttaagagccacttctataatgatgacatctttaactttaattatgcccaagccaaagctgcaacaggcaataccagtgagggcgaagaggcgttcctcttgatccaaagtgagaagatgaaaaatgattacatttacctcagctggttagctcggggctatattatgaataagaaaccaagactagcctgggaactttatcttaagatggaaacctccggcgagtccttcagtctcttacagctcattgctaatgactgctacaagatgggccagttttactattctgccaaagcttttgatgtccttgagaggctggatcctaaccctgaatattgggaaggcaaacggggtgcctgtgtgggcattttccagatgatcatagctgggagagaacccaaagagacccttcgagaagtgctccatttactgagaagcacaggtaacacccaagtagaatacatgatccggatcatgaagaaatgggccaaagaaaacagagtgtccatcctaaaatagcgccagtgcactaggaaccagcttctactttgacataaaactggaaatcattttcactccagctttaatctgtgatacagggctctgttttattgacattttccttccttgctctttaagcctcaaggtcagagactgacttgctgagacttagtctcctggctgaacagagtgccatagtctgtgaccctgtatgatcctagtagcaataagattttggacttatctggtgcctttcttccaaaaatgctcagagtacttttatgcaatttactgactttaaggaaaacagtataacttttttttgttagcattttatggcattgtctcctggctgcaataacaaacatctttgatgttcaagaatc

SEQ ID NO: 71688 - DNA, 420 bp, Homo sapiens; identical to SEQ ID NO: 67342

SEQ ID NO: 71689 - DNA, 369 bp, Homo sapiens; identical to SEQ ID NO: 67343

SEQ ID NO: 71690 - DNA, 432 bp, Homo sapiens; identical to SEQ ID NO: 67344

SEQ ID NO: 71691 - DNA, 404 bp, Homo sapiens; identical to SEQ ID NO: 67345

SEQ ID NO: 71692 - DNA, 2821 bp, Homo sapiens; identical to SEQ ID NO: 67346

SEQ ID NO: 71693 - DNA, 425 bp, Homo sapiens
aaaaggaactccagcaacttttattttcagtcccaccaggatatttgcgatatactccagagtcactctggagggacctgatctcagagcacagaggactagaggagttaataaataagcaaatgcgacctttctttcggggaattttgatcttctctagaagttgggctgtggacctgaacttgcaggagaagccaggagtcatctgtgatgctctgctgatagcacagaacagcacccccattctctacaccattctcagggagcaggatgcagagggccaggactactgcacttgcactgcctttactttgaagcagaagctagtgaacatggggggctacaccgggaaggtgtgtgtcagggccaaggtcctctgcatgagtcctgagagcagcgcagaggccttggaggctgcagtgtct

SEQ ID NO: 71694 - DNA, 357 bp, Homo sapiens; identical to SEQ ID NO: 67348

SEQ ID NO: 71695 - DNA, 540 bp, Homo sapiens
accattgagagttttaataatacgtaactacagaaaatggagaaccaaaattattgtctgtaaacaggtgaccttaaaatatagagaaggaagcaaagttactaaacctaaatagttgcgggcctgcgctcaaagccaggcctttgttaatacttttaacaaagtattctttgttaaaagagagattagcagatacaagtgttaacatcaaacccagacttctgagtctgaaaaagagctggccggggaatgccctcctcataccccaagcccgactgcaacgcagtgactctgggaagcaacccagccttcactctagttgttttgtccccgcatcctgtgctggggtatggattctctggcctcctctaagggcagaagcttgaggctttgcctgcacgcttgggtaactgtaaacatcatcttcaggcataaaccatgggcctgtgattgctggagtgattggggcccgaaaacctcagtatgacatctggggaaacactgtcaatgtggccagccgaatggaaagcactggagaac

SEQ ID NO: 71696 - DNA, 397 bp, Homo sapiens
cccattccttggagtggtcagccagctacctggtggcaggttgattatattggacctcttccatcatgggaagggcagaggtttgtcctcactggaatagacacttactttagatatgggtttgcctatcctgcatgcaatgcttctgtgaagactaccatccatggactcacagaatgccttgtccaccatcatggtgttccacacagcattgcctctgaccaaggcactcactttatggctaaagaagtgtggcagggggctcatgctcatggaattcactggtcttaccatgttccccatcatcctgaagcagctgggttgacagaatggtggaatggccttttgaagtcacaattacaacaccaactaggtggcaatactttgcagggctggg

SEQ ID NO: 71697 - DNA, 579 bp, Homo sapiens; identical to SEQ ID NO: 67351

SEQ ID NO: 71698 - DNA, 1036 bp, Homo sapiens; identical to SEQ ID NO: 67352

SEQ ID NO: 71699 - DNA, 399 bp, Homo sapiens; identical to SEQ ID NO: 67353

SEQ ID NO: 71700 - DNA, 670 bp, Homo sapiens; identical to SEQ ID NO: 67354

SEQ ID NO: 71701 - DNA, 563 bp, Homo sapiens; identical to SEQ ID NO: 67355
  misc_feature (1)...(563): n = a,t,c or g

SEQ ID NO: 71702 - DNA, 1404 bp, Homo sapiens; identical to SEQ ID NO: 67356

SEQ ID NO: 71703 - DNA, 799 bp, Homo sapiens; identical to SEQ ID NO: 67357

SEQ ID NO: 71704 - DNA, 767 bp, Homo sapiens
cgtcagggagggctccctggtggaggaggccctgaagctcagtgtgaagagttcatgtgtggatctggttggggatggcataaccagctcagggagcaggccccagcagtgggtgtgggaaccccatgatgggcagtggtcagctgtggtcactgcatgtgggctggggtgggaggtgggggacaggttggcaggggctacaaacagcctcgaaggccctgctggggatccctggacttcaccgtggagaagtttaagccaagctgcctcattgtcagagtagagcttttgagcagttgtcaggcatttagcagtgagtgggtcagaacgggttggcggagacagaagctgggggcggtgagcctgagcccggtgattgtgaaagtcagacctttttctgggaaaggctggggttcctggaggcctgcatctccgacttcagcctccagcagctgcgggtgctagacctgagctgcaacagcatcgaggcctttcagacggcctcccagccccaggctgagttccagctcacctggcttgaccttcatactggtctctgccatcctcctcaccacgctggccgcctgctgctgcgtccgccggcagaagtttaaccaacagtataaagccccgtcatgctctcttctgcctccagcctctccctgtttacgtcttcctctcagacttcagctggactcaagtcttgtccgtcttaaaaatagtgagaagcccctcagccactttccccttcgtcctcccactcttca

SEQ ID NO: 71705 - DNA, 1220 bp, Homo sapiens; identical to SEQ ID NO: 67359

SEQ ID NO: 71706 - DNA, 717 bp, Homo sapiens; identical to SEQ ID NO: 67360

SEQ ID NO: 71707 - DNA, 427 bp, Homo sapiens; identical to SEQ ID NO: 67361

SEQ ID NO: 71708 - DNA, 416 bp, Homo sapiens; identical to SEQ ID NO: 67362

SEQ ID NO: 71709 - DNA, 497 bp, Homo sapiens; identical to SEQ ID NO: 67363

SEQ ID NO: 71710 - DNA, 498 bp, Homo sapiens; identical to SEQ ID NO: 67364

SEQ ID NO: 71711 - DNA, 780 bp, Homo sapiens; identical to SEQ ID NO: 67365
  misc_feature (1)...(780): n = a,t,c or g

SEQ ID NO: 71712 - DNA, 558 bp, Homo sapiens
cccccgaagggcccaggccctgctggacgtgacactgctggacatcaatgaccatgccccggctttcaatcagagccgctaccatgctgtggtgtctgagagcctggcccctggcagtcctgtcttgcaggtgttcgcatctgatgccgatgctggtgtcaatggggctgtgacttacgagatcaaccggaggcagagcgagggtgatggacccttctccatcgacgcacacacggggctgctgcagttagagcggccactggactttgagcagcggcgggtccatgaactggtggtgcaagcacgagatggtggggctcaccctgagctgggctcggcctttgtgactgtgcatgtgcgagatgccaatgacaatcagccctccatgactgtcatctttctcagtgcagatggctccccccaagtgtctgaggccgccccacctggacagctcgttgctcgcatctctgtgtcagacccagatgatggtgactttgcccatgtcaatgtgtccctggaaggtggagagggccactttgccctaagcacccatgtatt

SEQ ID NO: 71713 - DNA, 569 bp, Homo sapiens; identical to SEQ ID NO: 67367

SEQ ID NO: 71714 - DNA, 568 bp, Homo sapiens; identical to SEQ ID NO: 67368

SEQ ID NO: 71715 - DNA, 542 bp, Homo sapiens; identical to SEQ ID NO: 67369

SEQ ID NO: 71716 - DNA, 557 bp, Homo sapiens; identical to SEQ ID NO: 67370

SEQ ID NO: 71717 - DNA, 560 bp, Homo sapiens; identical to SEQ ID NO: 67371

SEQ ID NO: 71718 - DNA, 531 bp, Homo sapiens; identical to SEQ ID NO: 67372

SEQ ID NO: 71719 - DNA, 536 bp, Homo sapiens; identical to SEQ ID NO: 67373

SEQ ID NO: 71720 - DNA, 539 bp, Homo sapiens; identical to SEQ ID NO: 67374
  misc_feature (1)...(539): n = a,t,c or g

SEQ ID NO: 71721 - DNA, 568 bp, Homo sapiens
aagagtgtgggaaagccttcacccattcttcataccttactgatcatacaagaatccacagtggaaagaagccctatgtatgtatggaatgtggaaaagccttcactagatccacaggacttattttacacatgcgaattcacactggagaaaagccatatgaatgtaaggagtgtggaaaagcttttattcattcctcataccttacaaaacatgtaaggattcacagtggagagaagctgtatttatgtaaggcatgtgggaaagcttttactcgttcctcaggacttgttttacacatgagaacacatactggagaaaagccctatgaatgtaaagaatgtgggaaagcctttaataattcctcaatgcttagtcaacatgtaaggattcacactggagagaagccatatgaatgcaaagaatgtgggaaagctttcactcaatcctcgggccttagtacccatttaagaactcacactggagaaaaggcctgtgaatgtaaggaatgcggtaaagcatttgctcgttccacaaatcttaatatgcacatgcgaacgcaacgaaa

SEQ ID NO: 71722 - DNA, 572 bp, Homo sapiens; identical to SEQ ID NO: 67376
  misc_feature (1)...(572): n = a,t,c or g

SEQ ID NO: 71723 - DNA, 784 bp, Homo sapiens; identical to SEQ ID NO: 67377

SEQ ID NO: 71724 - DNA, 387 bp, Homo sapiens; identical to SEQ ID NO: 67378

SEQ ID NO: 71725 - DNA, 572 bp, Homo sapiens; identical to SEQ ID NO: 67379

SEQ ID NO: 71726 - DNA, 913 bp, Homo sapiens; identical to SEQ ID NO: 67380

SEQ ID NO: 71727 - DNA, 606 bp, Homo sapiens; identical to SEQ ID NO: 67381

SEQ ID NO: 71728 - DNA, 512 bp, Homo sapiens; identical to SEQ ID NO: 67382

SEQ ID NO: 71729 - DNA, 340 bp, Homo sapiens; identical to SEQ ID NO: 67383

SEQ ID NO: 71730 - DNA, 463 bp, Homo sapiens; identical to SEQ ID NO: 67384

SEQ ID NO: 71731 - DNA, 435 bp, Homo sapiens; identical to SEQ ID NO: 67385

SEQ ID NO: 71732 - DNA, 440 bp, Homo sapiens; identical to SEQ ID NO: 67386

SEQ ID NO: 71733 - DNA, 467 bp, Homo sapiens; identical to SEQ ID NO: 67387

SEQ ID NO: 71734 - DNA, 666 bp, Homo sapiens; identical to SEQ ID NO: 67388

SEQ ID NO: 71735 - DNA, 440 bp, Homo sapiens; identical to SEQ ID NO: 67389

SEQ ID NO: 71736 - DNA, 921 bp, Homo sapiens; identical to SEQ ID NO: 67390

SEQ ID NO: 71737 - DNA, 685 bp, Homo sapiens
gaatcttgcacgagcttaccctgcactgtgagttacctaaagctcggcgtccgtgatggtctacggcgcttctgaggcgatcaggcagcgtcagtcttcagccgggaagccaagaaggagtcagtcagagagccttgggccagagttccaggagctctgggagtggctgccaggactgttctacatttggcctgtgcccatggccatgtggaagtggtcactctcttgctggggagaagatgcctgattgacatctgtgacagactaaacaggacgtctttaatgaagttctgccaaggaaagagaaaataccttttaatcccagggaaaggattgcaatcaccacattataagagaactatgggggtatgaaacaaggctgaaggcttttaaccatgggagaaaaaggtgttggtattattcatatagcataacctgaggttggagaggaccacttgggagcctgtaaccaaaattaaaaggtaacttttgggatggacggaggttcccttgaagcagtgccaacctaaatttacctcaggtaagtagttagattaactttttcaagatttcagaccaaacaagacaacttgtattcagttgatgaattcctatgctttaatgtttttgtttgcccttaattattaaataaacatttgttctgaaaaactccaaaaaaaaaaaa

SEQ ID NO: 71738 - DNA, 436 bp, Homo sapiens; identical to SEQ ID NO: 67392

SEQ ID NO: 71739 - DNA, 394 bp, Homo sapiens; identical to SEQ ID NO: 67393

SEQ ID NO: 71740 - DNA, 707 bp, Homo sapiens; identical to SEQ ID NO: 67394

SEQ ID NO: 71741 - DNA, 873 bp, Homo sapiens; identical to SEQ ID NO: 67395

SEQ ID NO: 71742 - DNA, 609 bp, Homo sapiens; identical to SEQ ID NO: 67396

SEQ ID NO: 71743 - DNA, 435 bp, Homo sapiens; identical to SEQ ID NO: 67397

SEQ ID NO: 71744 - DNA, 427 bp, Homo sapiens; identical to SEQ ID NO: 67398

SEQ ID NO: 71745 - DNA, 411 bp, Homo sapiens; identical to SEQ ID NO: 67399

SEQ ID NO: 71746 - DNA, 402 bp, Homo sapiens; identical to SEQ ID NO: 67400

SEQ ID NO: 71747 - DNA, 1009 bp, Homo sapiens
agagaatccttcagccactggggaatttctaagaaatgtcgagggtttgagacatcccagaattaatgtcttagatcctggccagtggcctcaaaagaagccctgaagctggatgactcccagatggaagccttgcagtttgctctcacaagggaactggctattattcaaggacctcctggaacaggcaaaacctatgtgggtctaaaaattgttcaggccctcctaaccaacgagtctgtttggcaaattagcctccagaagttccccatcttggttgtgtgttatactaatcatgctttggaccagtttctggaaggcatctacaattgtcagaagaccagcattgtgcgggtgggtggaaggagcaacagtgaaatcctgaagcagttcaccctaagggagctgaggaacaagcgggaattccgccgcaacctccccatgcacctccgaagggcctacatgagtatcatgacacagatgaaggagtcagagcaagagcttcatgaaggagccaagaccctggagtgcaccatgcgtggtgtcctacgggaacagtacctgcagaagtacatctcacccccagcactgggaaagtctcatgaatggccccagtgcaggatagtgaatggattttcttcccagcactggaagcattccatgatgctggagtggctaggtcttggtgtcggttctttcacgcaaagtgtttctccagcaggacctgagaatacagcccaggcagaaggggatgaggaggaagaaggggaggaggagagttcgctgatagagatcgcagaggaagctgacctgattcaagcagaccgggtgattgaggaggaagaggtggtgaggccccagcggcggaagaaggaagagagtggagcagaccaggagttggctaaaatgcttctggccatgaggctagaccattgtggcactgggacagcagctggacaggagcaagccacaggagagtggcagacccagcgcaaccagaaaaaaaaaa

SEQ ID NO: 71748 - DNA, 402 bp, Homo sapiens
tcgcttgagctggtcgagtataaagttgcccgcatcgccaccaccatgccttacattccaggttttctttccttccgcgaatatcctgcgctgctggcagcgtgggagatgctgtcgcaaaagccggatttagtgtttgtcgatggtcatgggatctcgcatcctcgccgtcttggcgtcgccagccattttggcttattggtggatgtgccgaccattggcgtggcgaaaaaacggctctgcggtaaattcgaaccgctctccagcgaaccgggcgcgctggccccactgatggataaaggcgagcagctggcctgggtctggcgcagcaaagcgcgctgtaacccgttggttatcgctaccggccatcgggtcagcgtggacagcgcgctggcgtggtac

SEQ ID NO: 71749 - DNA, 292 bp, Homo sapiens; identical to SEQ ID NO: 67402

SEQ ID NO: 71750 - DNA, 370 bp, Homo sapiens
acttcagggcttcttggtgtttgggacagatgccctgatcggtcacgcggctccctcgaccaggggttgggtgcatctgccgaatcacctggaccatattggccagctgcaggttggggcggaagctccgccgaggaaagctctttcggcactgagggcatgtgaagcacctccgaggggctggaggcgggggcagtggggtgacggggtctagatcctcttcctcaacctcctccagcacttcctcctcgtcctcctcatcctcccccctcaggtcctcctcctccatgtcccccaagtagtagtccaggtcttcctcctcgtcctcctcctcccacacatagtccatgttgtcccagctggacctgct

SEQ ID NO: 71751 - DNA, 668 bp, Homo sapiens; identical to SEQ ID NO: 67404

SEQ ID NO: 71752 - DNA, 627 bp, Homo sapiens; identical to SEQ ID NO: 67405

SEQ ID NO: 71753 - DNA, 520 bp, Homo sapiens; identical to SEQ ID NO: 67406

SEQ ID NO: 71754 - DNA, 447 bp, Homo sapiens; identical to SEQ ID NO: 67407

SEQ ID NO: 71755 - DNA, 641 bp, Homo sapiens; identical to SEQ ID NO: 67408

SEQ ID NO: 71756 - DNA, 406 bp, Homo sapiens; identical to SEQ ID NO: 67409

SEQ ID NO: 71757 - DNA, 568 bp, Homo sapiens; identical to SEQ ID NO: 67410

SEQ ID NO: 71758 - DNA, 617 bp, Homo sapiens; identical to SEQ ID NO: 67411

SEQ ID NO: 71759 - DNA, 976 bp, Homo sapiens; identical to SEQ ID NO: 67412

SEQ ID NO: 71760 - DNA, 882 bp, Homo sapiens
gcgctgagccggctccgagaactctgtcgtcggtggctgagacccgagctgctctccaaggagcagatcctggagctgctggtgctggagcagttcctcaccatcctgcccgaggagcttcaagcctgggtgcgagagcactgcccagagagcggggaggaggcggtggccgtggtgcgggctctgcagcgagcgctcgatggaacctcatcccaggggatggtgactttcgaggacacggctgtgtctctaacctgggaggagtgggagcgcctggacccagcacggagggacttctgcagagagagtgcgcagaaggattccgggagcacagttccgccgagtgacactgtttatggaccgtaagagctgaccgctgtctgaaggcttgcccacagaccttacactcaaaaggattctctaaaaagtgaattctttgatgttgatcaaaccatgccttacgcctaatgacttttccacattcactgcattcataagactttgctcttgtgagaattcgctcatgccccaaaagcaaagatctttgattgaagggtttgccatcctcatcatatctgccctgcttccaccttgtttgcgcattctgatcttgaataaggttaaggttttgaaggaagcccctgctgtattcatcaccactagtagggaaagtaagcctgcaactgtccacaaattctttacacttatgtaacttttctgaaagtttctcagctgattcctgcattaccactgatatcttatatgactctaaatcttcagaaaatttctgttttggagttagctttttcatcttgtgtctggcttcagaacctagccaaataacaagaaaagatgtaaatgacctatccactgcatttgaaa

SEQ ID NO: 71761 - DNA, 119 bp, Homo sapiens
gcgatggaaatcgtccacgagccgcgcgacctcgagcgttacatgcgcgaggccgtgaaggtgtcgaacgattcgccggtgctgctcgaccgcttcctgaacgacgcgatcgagtgcga

SEQ ID NO: 71762 - DNA, 398 bp, Homo sapiens; identical to SEQ ID NO: 67415

SEQ ID NO: 71763 - DNA, 400 bp, Homo sapiens; identical to SEQ ID NO: 67416

SEQ ID NO: 71764 - DNA, 398 bp, Homo sapiens; identical to SEQ ID NO: 67417

SEQ ID NO: 71765 - DNA, 510 bp, Homo sapiens; identical to SEQ ID NO: 67418

SEQ ID NO: 71766 - DNA, 1883 bp, Homo sapiens; identical to SEQ ID NO: 67419

SEQ ID NO: 71767 - DNA, 1177 bp, Homo sapiens; identical to SEQ ID NO: 67420
  misc_feature (1)...(1177): n = a,t,c or g

SEQ ID NO: 71768 - DNA, 1655 bp, Homo sapiens; identical to SEQ ID NO: 67421

SEQ ID NO: 71769 - DNA, 1268 bp, Homo sapiens; identical to SEQ ID NO: 67422
  misc_feature (1)...(1268): n = a,t,c or g

SEQ ID NO: 71770 - DNA, 100 bp, Homo sapiens
tgaattttcattttacagggaagtgtttgtttatgtcagggctcagtgaggtccagctgacccatatggatgatcacactctaccagggtattgaagctc

SEQ ID NO: 71771 - DNA, 636 bp, Homo sapiens; identical to SEQ ID NO: 67424

SEQ ID NO: 71772 - DNA, 1783 bp, Homo sapiens; identical to SEQ ID NO: 67425

SEQ ID NO: 71773 - DNA, 389 bp, Homo sapiens; identical to SEQ ID NO: 67426

SEQ ID NO: 71774 - DNA, 406 bp, Homo sapiens; identical to SEQ ID NO: 67427

SEQ ID NO: 71775 - DNA, 382 bp, Homo sapiens; identical to SEQ ID NO: 67428

SEQ ID NO: 71776 - DNA, 359 bp, Homo sapiens; identical to SEQ ID NO: 67429

SEQ ID NO: 71777 - DNA, 385 bp, Homo sapiens; identical to SEQ ID NO: 67430

SEQ ID NO: 71778 - DNA, 954 bp, Homo sapiens; identical to SEQ ID NO: 67431

SEQ ID NO: 71779 - DNA, 375 bp, Homo sapiens
tcaaaaaaagtaataataaataaaataaatgtttatcttagaatagattcatatgaaatgtcagaattttctaagtgttaaaaatactgtttttggcatacagagtttcatcatgtctgagttaagtgaagaactctaaaatatgtttttttccatcaagcttcgtttagaggcacttcatcagatcctcgttctattgtctgggatggaagaaaaaggtagcatctcactggcaggaagcagattgagttcaggcttccagtcctccacactactcacgtctgtgaggctgcagttcctagcagggtgttttggtttaggcactgttggtctcacaggagccaagggagagagtggccgtttgcatcacctacc

SEQ ID NO: 71780 - DNA, 537 bp, Homo sapiens; identical to SEQ ID NO: 67433
  misc_feature (1)...(537): n = a,t,c or g

SEQ ID NO: 71781 - DNA, 449 bp, Homo sapiens; identical to SEQ ID NO: 67434

SEQ ID NO: 71782 - DNA, 386 bp, Homo sapiens; identical to SEQ ID NO: 67435

SEQ ID NO: 71783 - DNA, 231 bp, Homo sapiens; identical to SEQ ID NO: 67436

SEQ ID NO: 71784 - DNA, 507 bp, Homo sapiens
tcgccgattcgtcggtatccagacctgacgctgcaccgcgccattaaatatctgctggcgaaagagcaggggcatcagggcaacaccactgaaaccggcggctaccattattcgatggaagagatgctgcaactgggtcagcactgttcgatggcggaacgtcgtgccgacgaagcaacgcgcgatgtggctgactggctgaagtgtgacttcatgctcgaccaggtaggtaacgtctttaaaggcgtaatttccagcgtcactggctttggcttcttcgtccgtctggacgacttgttcattgatggtctggtccatgtctcttcgctggacaatgactactatcgctttgaccaggtagggcaacgcctgatgggggaatccagcggccagacttatcgcctgggcgatcgcgtggtagttcgcatggaaactaataatatgaacgacagcattttcccattcagcctgatctgcgggtacggacattaaatccgatagcatggc

SEQ ID NO: 71785 - DNA, 458 bp, Homo sapiens; identical to SEQ ID NO: 67438

SEQ ID NO: 71786 - DNA, 344 bp, Homo sapiens; identical to SEQ ID NO: 67439

SEQ ID NO: 71787 - DNA, 344 bp, Homo sapiens; identical to SEQ ID NO: 67440

SEQ ID NO: 71788 - DNA, 255 bp, Homo sapiens
tggctgatgggcgcattccggtaattgccgggaccggcgctaacgctactgcggaagccattagcctgacgcagcgcttcaatgacagtggtatcgtcggctgcctgacggtaaccccttactacaatcgtccgtcgcaagaaggtttgtatcagcatttcaaagccatcgctgagcatactgacctgccgcaaattgggtataatgagccgtcccgcactggctgcgatctccgggtccgacgctggaatgcgt

SEQ ID NO: 71789 - DNA, 595 bp, Homo sapiens
tacgcactgactggtgcgttggttattgtcaccgggatggtgatgggaaatatcgccgattatttcaatctgcctgtttccagtatgagtaataccttcaccttcctcaacgccggcattttaatctctatcttcctcaacgcctggctgatggaaatcgtcccgttgaaaacgcagttacgttttggctttctcctgatggtgctggcggttgccggtttgatgttcagccacagcctggcgctgttctcggcggcgatgttcattctcggggtggtcagcggcatcaccatgtcgattggtacattcctggtaacacaaatgtatgaagggcgtcagcgcggttcccgcctgttatttaccgactccttcttcagtatggctgggatgattttcccaatgatcgccgcgtttctactggcgcgcagcattgagtggtactgggtttatgcctgcatcgggctggtgtatgtcgctatttttattctgaccttcggctgtgagttcccggcgctgtgcagccatgcgactaagttgggtaccgccagtagttatcccagtctggacgttgtacagctacggacattgaatgcgt

SEQ ID NO: 71790 - DNA, 202 bp, Homo sapiens
tcggtcagccgctgtttgtgcgcgataaccgcacggtgacgctgactgaagcgggcgaagagctgcgcgttttcgcccagcaaacgctgttgcagtatcagcagttgcgccacaccatcgatcagcaagggccgtcgctctctggcgaattacatatcttctgctcggtgaccgctgcctacagccatctgccgccgattct

SEQ ID NO: 71791 - DNA, 552 bp, Homo sapiens; identical to SEQ ID NO: 67444
  misc_feature (1)...(552): n = a,t,c or g

SEQ ID NO: 71792 - DNA, 426 bp, Homo sapiens; identical to SEQ ID NO: 67445

SEQ ID NO: 71793 - DNA, 353 bp, Homo sapiens
attccgtacacgcacttcgacgtccagtttttggagaagtttggggtcaccttcaggagggaaggcgagacggtcactctcaagtgcaccatgctggtgacgccggacctgaagcgggtgcagccgcgcgccgagtggtaccgcgatggtgagtaggacacggcccagacccgggcacacaccaggaggcttttggacggaaatgtcctttaaatgtgggtgtcaatgtggcttttgtctctaccactgggtcagctccagacagcgaaacaaactgagggactgtagaggacttggtggcccaccgttcgccttgaacttcatccaggagaatcctggagagggagaccccg

SEQ ID NO: 71794 - DNA, 340 bp, Homo sapiens; identical to SEQ ID NO: 67447

SEQ ID NO: 71795 - DNA, 334 bp, Homo sapiens
gccagcagggcgcaaaaaaagcctcttttgacaccattgtcgccagtggctggcgtggggcgctgccgcacggcaaagccagcgacaagattgttgcagcgggcgagtttgtcactctcgatttcggtgcgctgtatcagggctactgctctgatatgacgcgcaccttgctggtgaatggcgaaggggtgagcgccgaatctcacctgctgtttaacgtctatcaaattgtcctgcaggcacagctcgcagcaatctccgcgattcgccccggcgtgcgctgccagcaggtttacgatgccgcgcgccgggtcattacacaagcaggttatgg

SEQ ID NO: 71796 - DNA, 435 bp, Homo sapiens; identical to SEQ ID NO: 67449
  misc_feature (1)...(435): n = a,t,c or g

SEQ ID NO: 71797 - DNA, 481 bp, Homo sapiens; identical to SEQ ID NO: 67450

SEQ ID NO: 71798 - DNA, 281 bp, Homo sapiens
cgggcagcagcagcgcgtggcgctggcccgcgcgctgatcctcaagccgaaagtgctgctgtttgatgagccgttgagtaacctcgacgccaacctgcgtcgcagcatgcgcgacaagatccgcgagttgcaaaagcagtttgatatcacctcgctgtacgtcacccacgatcagagcgaagcctttgcggtttctgatactgtgctggtgatgaacaaggggcacatcatgcagatcggctcaccgcaggatctccgggtacggagattgaattggtaat

SEQ ID NO: 71799 - DNA, 427 bp, Homo sapiens
aatatggctctcacgccgctcagcgtggcggataaatgcaaagagttaatggcgcaaaaacccggtagctggatcttcacctcagcaacgctgtcggtgaacgacgatctgcatcatttcacctcgcggcttggcatcgaacaggccgagtcgttgctgttgcccagcccatttgattacagccgccaggcgttactctgtgtgctgcgcaatctgccgcaaaccaaccagccaggttctgctcgccagttagcggcaatgctgcgaccgatcatcgaagctaacaacggtcgttgttttatgctttgtacctcgcacgccatgatgcgcgatctggccgagcagttccgcgctaccatgacgcttcctgtattgttgcagggggaaaccagcaaagggcaactgttgcagcaatttgtcagcgccg

SEQ ID NO: 71800 - DNA, 399 bp, Homo sapiens
tggctgaatcccgcgtctttaaaattgccgaaagtcgtgcgaacaaagacgaagggccgaagaacatcgccgatgtgctcgacgcaaccgtggcgcgtattgagcagttgtttcagcagccacacgatggcgttaccggggtaaacaccggttatgacgatctcaacaaaaaaaccgctggcttgcagccgtcggatttgatcatcgtcgccgcgcgtccgtcgatgggtaaaacaacatttgcgatgaacctcgtcgaaaacgcggcgatgttgcaggataaaccggtacttatcttctcgctggagatgccatcagaacagatcatgatgcgttctctggcgtcgctgtcgcgcgttgaccagactaaaatccgtaccgggcagctcgatgacgaaa

SEQ ID NO: 71801 - DNA, 367 bp, Homo sapiens
gtgccggatgtaaaaacatgcccggcgggcgtctttatgcccacacacttgaagcaatcattccaggctttgcagtatcagcgccggtagaacgcaaggtcacacgcgagaaaatctccttcttaaccgaagaaagcgccgttaccctcgattttcaccgcgagcagccagatgttccgcaacacgcatcttataccgtattgcgtaatcgtctggacccgtggttgatggaacaagccgagcaggcgggcgcgcagtttatcccaggcgttcgcgtcgacgcgctggttcgtgaaggaaacaaggtcactggcgtgcaggctggggatgatattctccaagcgaatgtggtgattctggttgtgcc

SEQ ID NO: 71802 - DNA, 423 bp, Homo sapiens
atctctggaagactacgtttcccgcatgaaagaagggcaggagaaaatctactacatcaccgcagacagctatgcggcagcgaagagcagcccgcacctggaactgctgcgtaagaaaggcatcgaagttctgctgctttccgaccgcatcgatgagtggatgatgaactatctgactgagttcgacggtaaaccgttccagtcggtgtctaaagttgacgagtcgcttgaaaaactggctgacgaagttgatgagagcgcgaaagaagcggagaaagcactgactccgttcatcgaccgtgtgaaagccctgctcggcgagcgcgtgaaagatgtccgtctgactcaccgtctgaccgatacgccagcgatcgtttcgaccgacgcggacgaaatgagcactcagacggcgaaactgttcgt

SEQ ID NO: 71803 - DNA, 451 bp, Homo sapiens; identical to SEQ ID NO: 67456

SEQ ID NO: 71804 - DNA, 493 bp, Homo sapiens; identical to SEQ ID NO: 67457

SEQ ID NO: 71805 - DNA, 424 bp, Homo sapiens; identical to SEQ ID NO: 67458

SEQ ID NO: 71806 - DNA, 155 bp, Homo sapiens
tggcggtgcattacctagagcgggtgagaattgccgaacatgcgcataagtttcccggacagatttcaggtggtcagcagcaacgcgttgccattgcgcgttcgctgtgtatgaagccgaaaattatgttgtttgatgagccaacgtcggcgctc

SEQ ID NO: 71807 - DNA, 325 bp, Homo sapiens; identical to SEQ ID NO: 67460

SEQ ID NO: 71808 - DNA, 209 bp, Homo sapiens
gactgactatcgcaccgaatttactgaaggagctgcaggaaaaagtttcgccagtggtacgtaaattaatcccaccttctcagacgttcccacgcccagctcccatgagcgaagcggagttccgttgggagcacaatcaggatgcgatggcggtagaaaaactgtctgaaggcattcgtctgttcgccgttgatcaacgcaaactggaa

SEQ ID NO: 71809 - DNA, 497 bp, Homo sapiens
gacaaagaagaatatccgcaatccgcagccatcgacctgcgttgcgtaaatatggttgccgatctgtggcatgcgcctgcgccgaaaaatggtcaggccgttggcaccaacaccattggttcttccgaggcctgtatgctcggcgggatggcgatgaaatggcgttggcgcaagcgtatggaagctgcaggcaaaccaacggataaaccaaacctggtgtgcggtccggtacaaatctgctggcataaattcgcccgctactgggatgtggagctgcgtgagatccctatgcgccccggtcagttgtttatggacccgaaacgcatgattgaagcctgtgacgaaaacaccatcggcgtggtgccgactttcggcgtgacctacaccggtaactatgagttcccacaaccggtgctcgatgcgctggataaattccaggccgacaccggtatcgacatcgacatgcacatcgacgctgccaccggtggcttcctggc

SEQ ID NO: 71810 - DNA, 217 bp, Homo sapiens; identical to SEQ ID NO: 67463

SEQ ID NO: 71811 - DNA, 431 bp, Homo sapiens
cttgtcgttctggcaaaactaacctctgtgttgcggttcgcgaaacccagggtaaaggcctgatgccagacggcaccacccgtttttcttacaacgggcagccgctttatcactacatggggtgctctacattcagtgaatacaccgtagtcgcggaagtgtctctggcaaaaattaatccagaagcaaaccatgaacacgtctgcctgctgggctgtggcgtgaccaccggtattggcgcggtacacaacacagctaaagtccagccaggtgattctgttgccgtgtttggtcttggcgcgattggtctggcagtggttcagggcgcgcgtcaggcgaaagcgggtcggattatcgctatcgataccaacccgaagaaattcgatctggcgcgtcgcttcggtgctaccgactgcattaacccgaatgag

SEQ ID NO: 71812 - DNA, 315 bp, Homo sapiens; identical to SEQ ID NO: 67465

SEQ ID NO: 71813 - DNA, 568 bp, Homo sapiens; identical to SEQ ID NO: 67466

SEQ ID NO: 71814 - DNA, 402 bp, Homo sapiens
agaaaaaggtttcactcgcccgccggccattcaggatccagccattacgcatgcgctcgatggccgtgatgtactcggttttgcgccacaaggcaccggtaaaacggcggcgtatctgctgccagcgttgcagcacctgctcgatttcccgcgtaagaaatccggtccgccgcgtattttgatcctcaccccaactcgcgagctggcgatgcaggtgtccgatcatgcccgcgaactggcgaaacatacgcatctggatatcgccaccatcaccggcggcgtagcctatatgaaccacgcggaagtgttcagcgaaaatcaggacatcgtggtcgccacgaccggacgtctgctgcaatacataaaagaagagaacttcgattgccgcgcggttgaaacgct

SEQ ID NO: 71815 - DNA, 448 bp, Homo sapiens
gccgcaatttgcacgcgctggcgttaaatattttcaaagatgaaggccgcgaagcgtttctgaaattaatggaaaccaccgatatcttcatcgaagccagtaaaggtccggcctttgcccgtcgtggcattaccgatgaagtactgtggcagcacaacccgaaactggttatcgctcacctgtccggttttggtcagtacggcaccgaggagtacaccaatcttccggcctataacactatcgcccaggcctttagtggttacctgattcagaacggtgatgttgaccagccaatgcctgccttcccgtataccgccgattacttttctggcctgaccgccaccacggcggcgctggcagcactgcataaagtgcgtgaaaccggtaaaggcgaaagtatcgacatcgccatgtatgaagtgatgctgcgtatgggccagtacttcat

SEQ ID NO: 71816 - DNA, 299 bp, Homo sapiens
aacaactacgctaaacaaattgccagcctgaacgatcaaatctcgcgcctgacaggcgtgggggcaggggcgtcacctaacaatctgctggatcaacgcgatcaactggtgagcgaattaaaccagattgttggtgtagaagtcagcgttcaggatggcggcacttataacatcacgatggccaatggttactcactggttcagggaagtacggcgcggcaactggcggcagttccttccagcgctgacccttctcgtacgactgtcgcttatgttgatgggacggcaggcaatattga

SEQ ID NO: 71817 - DNA, 345 bp, Homo sapiens
gggggtacgctttccggtaacccgattgcgatggcagcgggtttcgcctgtctgaatgaagtcgcgcagccgggcgttcacgaaacgctggatgagctgacaacacgtctggcagaaggtctgctggaagcggcagaagaagccggaattccgctggtcgttaaccacgttggcggcatgttcggtattttctttaccgacgccgagtccgtgacgtgctatcaggatgtgatggcctgtgacgtggaacgctttaagcgtttcttccatatgatgctggacgaaggtgtttacctggcaccgtcagcgtttgaagcgggctttatgtccgtggcgcacagcatg

SEQ ID NO: 71818 - DNA, 366 bp, Homo sapiens; identical to SEQ ID NO: 67471

SEQ ID NO: 71819 - DNA, 199 bp, Homo sapiens
gcgatacctattccgtttctattccgctgggagccaccatcaatatggcgggcgcagcaatcactattaccgtgttgacgctggctgcggttaatacgctgggtattccggtcgatctgcccacggcgctgctgttgagcgtggtggcttctctgtgtgcctgtggcgcatccggcgtggcgggggggtctctgctgct

SEQ ID NO: 71820 - DNA, 554 bp, Homo sapiens; identical to SEQ ID NO: 67473

SEQ ID NO: 71821 - DNA, 439 bp, Homo sapiens
ataagattgataaggaccgttatctctccggcaatcctatcgaggtgacggtagaactgagagatgaaaatgacaaacctgttaaggaacaaaaacagcaactgaataacgcagtcagcatcgacaacgtgaaaccaggagtcactacagactggaaagaaaccgcagatggcgtctataaggcgacctataccgcctataccaaaggcagtggacttactgcgaagctattaatgcaaaactggaatgaagatttgcataccgctggatttatcatcgacgccaacccgcagtcagcgaaaattgcgacattatctgccagcaataatggtgtgctcgccaatgagaatgctgcaccgcaagtctcgtacgatgggtatcatcagggtattcccactctcgacgatgtacgggtacggacattgaatccgtaagcagg

SEQ ID NO: 71822 - DNA, 140 bp, Homo sapiens
gccaacgcgcagcaagggctgcccagtggtatcaccctgaagctaaataaccttgtcgataaaggcctggttgatcgtctgtatgcggcctccagctcgggcgttccggttaatctgctggttcgcggaacgtgttcgct

SEQ ID NO: 71823 - DNA, 441 bp, Homo sapiens
cgcgcgaatgacgctcatccccggcacacatctgctggaaaacatccacaacatctgggtgaacggggtaggcacgaatagcgcgccgttctggcggatgttgcttaacagctttgtgatggcgttcagcattacgctcggcaaaattaccgtctcgatgctctcggcatttgccattgtctggtttcgttttccgctacgtaacctcttcttctggatgatttttatcaccctgatgctgccggttgaagtacgtatcttcccgacggtggaagtcatcgccaacctgcagatgctcgacagctacgccggtttaacgctgccgctgatggcctcggcgaccgctactttcctgttccgcaagttaaatatgtcggggccggacaaggtggtgccagccgcgcggatctccgggtacggacctagagttcgtaagcaaga

SEQ ID NO: 71824 - DNA, 654 bp, Homo sapiens; identical to SEQ ID NO: 67477

SEQ ID NO: 71825 - DNA, 242 bp, Homo sapiens
atcggggtaaaacggtttatgacgtagcgtcaggggacgcgttatttatttctgaactcggtccgttaccggaaaatgttacctggttatcgccggaaggggagtttcagaagtggaacggtacagcctgggtgaaagatgcagaagcagaaaaactgttccggattcgggaggcggaagaaacaaaaaacagcctgatgcaggtatccagtgagcatcttgcgcctcttcagaatcctgta

SEQ ID NO: 71826 - DNA, 533 bp, Homo sapiens
ttggtagaccatgacacggattctatgtcgcgacccggacatcgtattgattgccatatcgatgaggtttttatccgtcaccagattgaacttgagcgtctaacttcgattgccataaccttgccgggaattattgatacggaaaatggtattgtacatcgcatgccgttctacgaggatgtaaaagagatgccgctcggcgaggcgctggagcagcataccggcgttccggtttatattcagcatgatatcagcgcatggacgatggcagaggccttgtttggtgcctcacgcggggcgcgcgatgtgattcaggtggttatcgatcacaacgtgggggcgggcgtcattaccgatggtcatctgctacacgcaggcagcagtagtctcgtggaaataggccacacacaggtcgacccgtatgggaaacgctgttattgcgggaatcacggctgcctcgaaaccatcgccagcgtggacagtattcttgagctggcacagctgcgtcttaatcaatccatgagctcgatgtt

SEQ ID NO: 71827 - DNA, 441 bp, Homo sapiens
ctattccgcttctgctgattccattcctattctgtgcattaccggccaggcaccgcgcgcccgtctgcataaagaagattttcaggccgtagatattgaagcaattgctaaaccggtcagcaaaatggcggttacagttcgtgaagcggcgctggtgcctcgcgtgctgcaacaggcatttcacctgatgcgttctggtcgtccgggtccggtactggtggatttaccgttcgacgttcaggttgcggaaatcgagtttgatcctgacatgtacgaaccgctgccggtctacaaacctgctgccagccgtatgcagatcgaaaaagctgtagaaatgttaatccaggccgaacgtccggtgattgttgccgggggcggggtaattaatgttggcgcaaaggcgctgaaacagcagtttgctagggtgtccaccgtcccggc

SEQ ID NO: 71828 - DNA, 394 bp, Homo sapiens; identical to SEQ ID NO: 67481
  misc_feature (1)...(394): n = a,t,c or g

SEQ ID NO: 71829 - DNA, 333 bp, Homo sapiens
cttccatttgttctcattctccttccccagctggggctgatgaacctgtcgcacgcatagcctcggctcagggctgatgtttggtgctgttcccacagtcacctctgtcctgtgcacacctgtatggagggtgcttggcccttcactgtgcaacagagcgcccagccacagaacacccagccacagaacacatggccacagaacacgcagccacagaacacccagccacagaacacatggccacagagcacgcagccacagaacatccagccacggggctatgcctcaaactgaggcagtgtcttgacagacagctggaagacacggccctgg

SEQ ID NO: 71830 - DNA, 810 bp, Homo sapiens
attcagatgtccgtcctgtacatcggctggactgggatgagcctggcgtggcgcaacttaattttgcttgactgtgcaacaacgtatcgaagtcgaaatgctcggttatctgttcttcgtcggtaatcgcaaagccacgccgctgccgtatcaaagccagccggatgactcatgcgactggtatcgcctgcgtcatgaagaagcgatgacgccggatgcggtggtgcgcctggcggaagcggcatatgaaaaatatggcttcaacgatttcaaactgaagggcggtgtactggccggggaagaagaggccgagtctattgtggcactggcgcaacgcttcccgcaggcgcgtattacgctcgatcctaccggtgcatggtcgctgatcgaagcgattaaaatcggtaaatacctgaaaggttcgctggcttatgcagaagatccgtgtggtgcgcagcaaggtttctccgggcgtgaagtaatggcagagttccgtcgcgcgacaggtttaccgactgcaaccaatatgatcgccaccgactggcggcaaatgggccatacgctctccctgcaatccgttgatatcccgctggcggatccgcatttctggacaatgcaaggttcggtacgtgtggcgcaaatgtgccatgaatttggcctgacctggggttcacactctaacaaccacttcgatatttccctggcgatgtttacccatgttgccgccgctgcaccgggtaaaattactgctattgatacgcactggatttggcaggaaggcaatcagcgcctgaccaaagaaccgtttga

SEQ ID NO: 71831 - DNA, 621 bp, Homo sapiens; identical to SEQ ID NO: 67484

SEQ ID NO: 71832 - DNA, 572 bp, Homo sapiens
catgctacgaattctagcgtccgacccggagatcgtgacgcctggcggtgaaataagctgggttgacgctaatctcggggtcgatgaaatccgcgagcaactgctctcttcaccgcacagtctgttcccggtatgtcgcggtgaactggatgaaatcatcggtattgtacgtgctaaagaactgctggtggcgctggaagagggcgttgatgtggcggcgattgcttcggcgtctccggcgattatcgtcccggaaaccctcgatccgatcaacctgttgggcgtgctgcgtcgtgctcgcgggagctttgttatcgtgaccaacgagtttggtgtggtacaaggtctggtcacgccgctggatgtgctggaagccattgcgggtgaatttccggacgctgacgaaacgccggaaatcattactgatggtgacggctggctggtaaaaggcggtgcagatgtgcgtgcctttcagcaggcgcttgaggctgaccccccccttgagctgggatgatgacctgacgtttgcggtcatcggtgatgtacgggtacgcgagcttgaattcgtaatc

SEQ ID NO: 71833 - DNA, 437 bp, Homo sapiens; identical to SEQ ID NO: 67486

SEQ ID NO: 71834 - DNA, 389 bp, Homo sapiens
ctcgcctggaaagggttaattaccgatccccatatggatggttcttttgatgtagaagccgggctgcagatcgcgcgtaaattgctgcttgagctggtgaatatgggactgccactggcgacggaagcgttagatccgaatagcccgcaatacctgggcgatctgtttagctggtcagcaattggtgctcgtacaacggaatcgcaaactcaccgtgaaatggcctccgggctttccatgccggttggttttaaaaacggcaccgacggcagtctggcaacagcaattaacgctatgcgcgccgccgcccagccgcaccgttttgttggcattaaccaggcagggcaggttgcgttgctacaaactcaggggaatccggacggccatgt

SEQ ID NO: 71835 - DNA, 337 bp, Homo sapiens; identical to SEQ ID NO: 67488

SEQ ID NO: 71836 - DNA, 455 bp, Homo sapiens; identical to SEQ ID NO: 67489

SEQ ID NO: 71837 - DNA, 396 bp, Homo sapiens; identical to SEQ ID NO: 67490
  misc_feature (1)...(396): n = a,t,c or g

SEQ ID NO: 71838 - DNA, 402 bp, Homo sapiens; identical to SEQ ID NO: 67491

SEQ ID NO: 71839 - DNA, 625 bp, Homo sapiens; identical to SEQ ID NO: 67492

SEQ ID NO: 71840 - DNA, 453 bp, Homo sapiens
  misc_feature (1)...(453): n = a,t,c or g
ccaccagagagcagtgaactgagtatccagccagctgcacgaaagagcagcagagtcaaaggaagtggcaggaaaaaaataatgggcaaggcaaaaatgatgaaataaaaatccaggaagcaacataaagtattaacaaaaccaaaggttggttctttaaaaatagtacaaaaatagacaagcctctggttatattaagatgccacagagaaataggggannnnnnnnnnnnnnnnnnnnnnnnnnnnnnnnnnnnnnnaaagttgttcgtgctggtgggaacgctttatccgatgatttacggcctgctgggctggggacgcctctccgttggcgcgccgtattttaaccgcgcgacgttaccgtttggtctgttgatgctggtggtgattgtgctggcgacgtttgtctctggcaaacgcgtgcagcttccggcgctggtagctcatgcgg

SEQ ID NO: 71841 - DNA, 127 bp, Homo sapiens; identical to SEQ ID NO: 67494

SEQ ID NO: 71842 - DNA, 335 bp, Homo sapiens; identical to SEQ ID NO: 67495

SEQ ID NO: 71843 - DNA, 346 bp, Homo sapiens
tacctgttattgtttgtctgcttccttgtgatgtctctgctggttgggctggtgtacaaatttaccgccgaacgcgcgggcaaacagtcgctggatgatttgatgaacagttcgctgtatctgatgcgcagcgaattgcgtgagatccccccacacgactggggtaaaactctgaaagagatggatttaaatctctctttcgatctgcgtgtcgagccactgagtaaataccatcttgatgatatttccatgcaccgactgcgtggcggcgaaattgtcgccctggacgatcagtacacgtttttgcagcgtatcccgcgcagccactacgtgctggcagttggtc

SEQ ID NO: 71844 - DNA, 372 bp, Homo sapiens; identical to SEQ ID NO: 67497

SEQ ID NO: 71845 - DNA, 596 bp, Homo sapiens; identical to SEQ ID NO: 67498

SEQ ID NO: 71846 - DNA, 207 bp, Homo sapiens; identical to SEQ ID NO: 67499

SEQ ID NO: 71847 - DNA, 335 bp, Homo sapiens
tcacggttgcctggacttcgacgacagtacagacgacaaagagtacgtcttcgacgtgaaacgtacattgcaatctgtggcgaaaagagaaatagctgcccttgcccgaacaatgatcaaagatggcgactgcttttttctcgactccggctcaacctgcctcgaactggcgaaatgcctggccgatgcgcgggtaaaggtcatctgcaacgacattaaaatcgccaatgaactgggctgttttccccatgtggaaagttacattatcggaggactgattcgcccaggttatttttcggtaggagagagtctggcgctggagatgatcaatgcct

SEQ ID NO: 71848 - DNA, 518 bp, Homo sapiens; identical to SEQ ID NO: 67501

SEQ ID NO: 71849 - DNA, 405 bp, Homo sapiens
tggatgatttcgccagtgtgcagaacattattaacaacagtgaagaatttgccgctgccgtgaagaaacgcggtattactgatgcgaaaaaagtgattaccacgccgctgaccgtaggttatttcgatggtaaagatggcctgaaacaagatgcccggttgctcaaagtcatcagctatcttgatgtcggtgatggcaactactgggcacatcccatcgaaaacctggtggcggtcgttgatttagaacagaaaaaaatcgttaagattgaagaaggtccggtagttccggtgccaatgaccgcacgcccatttgatggccgtgaccgcgttgctccggcagttaagcctatgcaaatcattgagcctgaaggtaaaaattacaccattactggcgatatgattc

SEQ ID NO: 71850 - DNA, 522 bp, Homo sapiens; identical to SEQ ID NO: 67503

SEQ ID NO: 71851 - DNA, 493 bp, Homo sapiens; identical to SEQ ID NO: 67504

SEQ ID NO: 71852 - DNA, 210 bp, Homo sapiens; identical to SEQ ID NO: 67505

SEQ ID NO: 71853 - DNA, 108 bp, Homo sapiens
tggcgtccgttgaataacccgaaacatttagcggtcagcagcttctccatggaaaacccgcaaggctttggtctgttgcagcgcggtcgtgatttctcccgctttgaa

SEQ ID NO: 71854 - DNA, 317 bp, Homo sapiens
cgcgtggactgtgcgcaggcgtgctggaagagacggtttcctgttttgctgataatccggaaaatattctcgcctggttagggccggcaattggtccacgcgcgttcgaagtggggggggaggttcgcgaggcgtttatggcagtagacgctaaagcaagtgcagctttcattcagcatggtgataagtatctggcggatatttatcagcttgcccggcagcgtctggcgaacgtgggtgttgagcaaattttcggcggcgaccgttgtacatatacggaaaatgagactttcttctcttatcgtcgcgacaagacc

SEQ ID NO: 71855 - DNA, 537 bp, Homo sapiens; identical to SEQ ID NO: 67508

SEQ ID NO: 71856 - DNA, 214 bp, Homo sapiens
tcgacgccattatcgcccccgatgccaacgccctgcccgctgccgcacaagccgcagaaaacttgaaaaatgacaaagtagcgattgtcggattcagtacgccaaatgtgatgcgcccgtatgtagagcgcggcacggtgaaagaatttggcctgtgggatgtggttcagcaaggcaaaatatcagtgtatgtggcggatgcattacagtaaaa

SEQ ID NO: 71857 - DNA, 485 bp, Homo sapiens
gggatgcatgactgagatggagtttgggggaaactgttactacgtaagagctcctacctaccgaccatgggtgacacgcagacaccttcccatgcctgattcattcacatctcctactagctgtgtgaggcagctcctactggctccgttgaaacagatgtgaagtaactagctcaagcagctctaagtccaagttaacgtttgggtttcagggcctgtgtgcttcatccgtcatttgtgtttctgaaaagcgagatgaataaaagttccagaatggcaaacacgatcttcgggccccaggacagcagcattgagtgattctggtcacacggggaggcagccgtgggcacgcctgtccctggagctcacaacccggtgggcaaccgtggacccacagatcatcggggtcgcggttgccggtcaggaaatctccacccgtccattccagttggtcactggtcgcgtatggaaaggttccgcgtttg

SEQ ID NO: 71858 - DNA, 129 bp, Homo sapiens; identical to SEQ ID NO: 67511

SEQ ID NO: 71859 - DNA, 334 bp, Homo sapiens; identical to SEQ ID NO: 67512

SEQ ID NO: 71860 - DNA, 339 bp, Homo sapiens
actggcaggcgcattgattgcccagggggttatggattttctgcctacgattgcgattctgaccgccgcagcaagtctgggctgctggctaagttatattcaggggcgctggttagggaataccaaaacggtgaaaggctggctggcacagcttcctgctaaatatcaccagcgcgccacctgcatgtttgaccgccacggtctgctggcgctgctggctggacgttttcttgcatttgtccgtacgctgctgccaaccatggcgggaatttccggtttgccaaaccgccgcttccagtttttcaactggttaagtggattgctgtgggtcagcgtggt

SEQ ID NO: 71861 - DNA, 423 bp, Homo sapiens; identical to SEQ ID NO: 67514

SEQ ID NO: 71862 - DNA, 358 bp, Homo sapiens; identical to SEQ ID NO: 67515
  misc_feature (1)...(358): n = a,t,c or g

SEQ ID NO: 71863 - DNA, 226 bp, Homo sapiens
agctctggtgacaccctggcgcgtattccgcaggaatccggcggtaccaaggacatcaccggtggtctgccgcgcgttgcggacctgttcgaagcacgtcgtccgaaagagccggcaatcctggctgaaatcagcggtatcgtttccttcggtaaagaacccaaaggtaaacgtggtttggttatcaccccggtagacggtagcgatccccgggtaccgacatcaa

SEQ ID NO: 71864 - DNA, 349 bp, Homo sapiens; identical to SEQ ID NO: 67517

SEQ ID NO: 71865 - DNA, 468 bp, Homo sapiens; identical to SEQ ID NO: 67518

SEQ ID NO: 71866 - DNA, 236 bp, Homo sapiens
tggatatcggcattggcgaagaaaaccgtaagcgctggctgcgtaccggtaaatgctctttcctgccggaagagcgcgaatggatggacaggctgatgagctgggggttggtcgataccttccgccatgcgaatccgcaaacagcagatcgtttctcatggtttgattaccgctcaaaaggttttgacgataaccgtggtttgcgcatcgacctgctgctcgccagccaccccctg

SEQ ID NO: 71867 - DNA, 422 bp, Homo sapiens
tcagacataaagggattaaaaccctgagaacgttcgggcgggccgggttaatgttattcaatgcgctggtcggcaaaccggaatttcgcaaacatgcgccgctgctggtgcgccagctctataatgtcggcgtcctgtcgatgctgattattgtggtttctggcgtgttcatcggaatggtgttggggctgcaaggttatctggttctgaccacttatagtgcggaaaccagtctgggtatgctggtggcgttatcgctactgcgtgaactggggccggtggttgccgcgttgttgtttgccgggcgtgctggttcggcgctaaccgcagaaatcggcttgatgcgcgctacagagcatctctccagtatggagatgatggcggtggatccgctgcgtcgggttttttctccccgcttctgg

SEQ ID NO: 71868 - DNA, 253 bp, Homo sapiens; identical to SEQ ID NO: 67521

SEQ ID NO: 71869 - DNA, 439 bp, Homo sapiens; identical to SEQ ID NO: 67522

SEQ ID NO: 71870 - DNA, 174 bp, Homo sapiens
gcgctatatcaaagaactggcgacccatcacgtcggcggttatctgaagattgccccggaacataccgaagaagggccgttatcgaagatgatgaagccgggcatgggcagctatgaccgctttaaagacctgttcgatacttgctcaaaccaggcaggtaaagcgcagtatct

SEQ ID NO: 71871 - DNA, 331 bp, Homo sapiens; identical to SEQ ID NO: 67524

SEQ ID NO: 71872 - DNA, 337 bp, Homo sapiens
ccgcgcgatgccgactgggtcgattactccacggttaccgccctaaaaatgacagcattacgaatggcgtggaaaggtttcgcgcaacgtgatgatgagcagatggccgcgtttcgccagtttgttgcagagcagggcgacagcctgttttggcaggcagcctttgatgcgctacatgcccagcaagtgaaagaggacgaaatgcgctggggctggcctgcatggccagagatgtatcagaacgtggattcaccagaagtgcgtcagttctgcgaagaacatcgtgatgacgtcgatttttatctctggttgcagtggctggcttccacgccagttt

SEQ ID NO: 71873 - DNA, 245 bp, Homo sapiens
gcggtgctaacttcggctatgacaacctggttgtcgatatgctgggcttcagcattatgaagaaagtgtctggtaactcgccggtgattttcgacgtgacccacgcactgcaatgccgcgatccgtttggcgcagcttccggtggtcgtcgtgctcaggtggctgagctggctcgacccggtatggcgtataggtcggtcgcgccagtttattccgcgcatcggatgtcgggtcggacgatgaat

SEQ ID NO: 71874 - DNA, 362 bp, Homo sapiens; identical to SEQ ID NO: 67527

SEQ ID NO: 71875 - DNA, 495 bp, Homo sapiens; identical to SEQ ID NO: 67528

SEQ ID NO: 71876 - DNA, 298 bp, Homo sapiens; identical to SEQ ID NO: 67529

SEQ ID NO: 71877 - DNA, 467 bp, Homo sapiens
  misc_feature (1)...(467): n = a,t,c or g
tcacttcattacgcattnnnnattgtacccggagatcactctggcgaacgaattcctgcccggtgccgggttggatatgttgcagctggcgaccgtcgatatctcgaaatatcagagcactacggaagcggtacaaagcagttcccacggcattatgggcacgattttgtcgctggtgccgacgaacattgtggcgtcgatggcgaaaggcgaaatgctgccgatcatctttttctcggtgctgtttggtctggggctttcttccctgcccgcgacgcatcgtgaaccgctggtgaccgtgttccgctccatctctgaaaccatgtttaaagtgactcacatggtgatgcgttatgcaccggtgggtgtgtttgcgctgattgcggtgacggtggctaactttggtttctcgtctctgtggccactggcgaaactggtgctgctggtgcatttcgccattctgttct

SEQ ID NO: 71878 - DNA, 447 bp, Homo sapiens; identical to SEQ ID NO: 67531

SEQ ID NO: 71879 - DNA, 307 bp, Homo sapiens
ataaacacggcctgaaactgtatgttcagcgtgtgttcatcatggacgacgcagaacagttcatgccgaactatctgcgcttcgtgcgtggtctgattgactccagcgatctgccgctgaacgtttcccgtgaaatcctccaggacagcacggtaacgcgtaacctgcgcaatgcgctgaccaagcgtgtgctgcaaatgctggaaaaactggcgaaagacgacgcggaaaaataccagaccttctggcaacagtttggcctggtactgaaagaaggtccggcggaagatttcgctaaccaggaagc

SEQ ID NO: 71880 - DNA, 454 bp, Homo sapiens
attgccgagcgtgctggcggtttatttggcaaaaaggtgctcgatgtcggttgtggcggcggcattctggccgagagtatggcgcgcgaaggcgcgacggtgaccggtctggatatgggctttgagccattgcaggtggcaaaactgcacgcactggaaagcggcattcaggtggattacgtgcaggaaaccgtggaagagcacgcggcaaaacatgccgggcagtatgatgtggtgacctgcatggagatgctggagcacgtccccgatccgcagtcagtggtcagagcctgtgcgcaactggtgaaaccaggcggcgatgtctttttctcgacacttaaccgcaacggcaagtcatggctgatggcggtggttggtgcggaatatattttgcgcatggtgcccaaaggcacgcatgatgtgaagaagtttattaaaccggcagaattgctgg

SEQ ID NO: 71881 - DNA, 201 bp, Homo sapiens; identical to SEQ ID NO: 67534

SEQ ID NO: 71882 - DNA, 424 bp, Homo sapiens; identical to SEQ ID NO: 67535

SEQ ID NO: 71883 - DNA, 715 bp, Homo sapiens; identical to SEQ ID NO: 67536

SEQ ID NO: 71884 - DNA, 304 bp, Homo sapiens
gctgcaaactgaaattggcagcatggtctatgcggtgaaaccaggcgatggttctgcgcgtgaacaggcggcgagctgccagcgtgtgattggcggtctggcgaatattgccgaggagtacgcgactaaacgctatcgttctaacgtcatcaactgggggatgttaccgctgcaaatggcggaagtaccaacctttgaagtgggggattacatttacatccttggctttaaagcggctaagtatagtccgggcacggcgtttacagtctatgcgatctccgggtacggacctcgaatctgataa

SEQ ID NO: 71885 - DNA, 217 bp, Homo sapiens; identical to SEQ ID NO: 67538

SEQ ID NO: 71886 - DNA, 530 bp, Homo sapiens
caatatatgcgtagcgaagaggagatgtgtgagctgtttgccgacatccccgaagcccttgccaacaccgttgagatcgccaaacgctgtaacgtaaccgtgcgtcttggtgaatacttcctgccgcagttcccgaccggggacatgagcaccgaagattatctggtcaagcgtgcaaaagagggcctggaagagcgtctggcctttttattccctgatgaggaagaacgtcttaagcgccgcccggaatatgacgaacgtctggagactgaacttcaggttatcaaccagatgggcttcccgggctacttcctcatcgttatggaatttatccagtggtcgaaagataacggcgtaccggtagggccaggccgtggctccggtgcgggttcactggtggcctacgcgctgaaaatcaccgacctcgatccgctggaatttgacctgctgttcgaacgtttccttaacccggaacgtgtctccatgcctgacttcgacgttgacttctgtatggagaaacgcgttcaggt

SEQ ID NO: 71887 - DNA, 349 bp, Homo sapiens
gttgggcattcagatgcgatgattggcactgccgtgtgcaatgcccgttgctgggagcagctacgggaaaatgcctatctgatgggccagatggtcgatgccgataccgcctatataaccagccgtggcctgcgcacattaggtgtgcgtttgcgtcaacatcatgaaagcagtctgaaagtggctgaatggctggcagaacatccgcaagttgcgcgagttaaccaccctgctctgcctggcagtaaaggtcacgaattctggaaacgagactttacaggcagcagcgggctattttcctttgtgcttaagaaaaaactcaataatgaagagctggcgaactatctgg

SEQ ID NO: 71888 - DNA, 348 bp, Homo sapiens; identical to SEQ ID NO: 67541

SEQ ID NO: 71889 - DNA, 560 bp, Homo sapiens
gcagactgttctgccaaccacgacgctgcgcgaagtgaaagaactgaccgagcgtaacggttttgcgggctatccggtcgttaccgaagaaaacgaactggtgggtattatcaccggtcgtgacgtgcgttttgttaccgacctgaaccagccggttagcgtttacatgacgccgaaagagcgtctggtcaccgtgcgtgaaggtgaagcccgtgaagtggtgctggcaaaaatgcacgaaaaacgcgttgaaaaagcgctggtggttgatgacgaattccacctgatcggcatgatcaccgtgaaagacttccagaaagcggaacgtaaaccgaacgcctgtaaagacgagcaaggccgtctgcgtgttggtgcagcggttggcgcaggtgcgggtaacgaagagcgtgttgacgcgctggttgccgcaggcgttgacgttctgctgatcgactcctcccacggtctctcacaaggtgttttgcatggtatccgtcagggccgtgccagtcatcccgatgtacgggtaccgacaacgaatcagtggtcagtgctgacct

SEQ ID NO: 71890 - DNA, 486 bp, Homo sapiens; identical to SEQ ID NO: 67543

SEQ ID NO: 71891 - DNA, 254 bp, Homo sapiens; identical to SEQ ID NO: 67544

SEQ ID NO: 71892 - DNA, 358 bp, Homo sapiens; identical to SEQ ID NO: 67545

SEQ ID NO: 71893 - DNA, 485 bp, Homo sapiens; identical to SEQ ID NO: 67546

SEQ ID NO: 71894 - DNA, 344 bp, Homo sapiens
actctagaggatctgctgatggcgttagatggagagcaacatcttcagcaacaggtatcggaaaaagtattagccgataatgtgttaattgcccctggttctgttaaacctgatgcgacattctggtcggccttaatccaggatcgctataacgtgatgacctgtattgaaaaagacgcctgcgtcctggtcgagcaagatctgaatagtgatggtcaggcggagcggatcctgtttgcttttaatgatgacagagtcattgtctatggctttgactcagacagaaaagaatgggacgcgcttgatatgagtttacttccgaacgaaataacgaaagaaaaatt

SEQ ID NO: 71895 - DNA, 408 bp, Homo sapiens
atttcctgttagcgttcaaaaccacatttttgctcccgattctttccgccatttttgtcatgctggcgatgtactacgtcatcaccccctttggtggctggatcaacggcggtatccgtactgtgctgactgccgcaggtgagaagggcgcgctgatgtacgcaatggggatcgccgcggcgacagcaatcgaccttggtggcccgatcaacaaagccgcaggttttgttgccttcagctttaccactgaccacgtattaccggtcaccgctcgttctatcgctatcgttattccgccgattggtctggggctggcgaccattatcgaccgtcgtttaaccggcaaacgcctgttcaacgctcaactttatccgcagggtaagaccgccatgttcctggcgtttatgg

SEQ ID NO: 71896 - DNA, 408 bp, Homo sapiens; identical to SEQ ID NO: 67549

SEQ ID NO: 71897 - DNA, 379 bp, Homo sapiens
ttcgcatcctcggcattggcccgtgggaaagacgcctgcgcaccctcatcgaacaatatcaactggaagatgtggtggagatgccgggctttaaaccgagccatgaagtgaaagcgatgctcgacgacgcggatgtcttcctgttgccatcggttacaggtgcggatggtgatatggaaggtattccggtggcgctaatggaagcgatggcggtcggtattccggtggtttctactctgcatagtggaataccggaactggtggaggctgacaaatccggctggctggtgcctgagaacgatgctcgcgccctggcccaacgactggcggcgtttagccaattggaccccgacgaattggctctgttcttcaagcgcgc

SEQ ID NO: 71898 - DNA, 339 bp, Homo sapiens; identical to SEQ ID NO: 67551

SEQ ID NO: 71899 - DNA, 571 bp, Homo sapiens; identical to SEQ ID NO: 67552

SEQ ID NO: 71900 - DNA, 336 bp, Homo sapiens
cctgtggtagtgctgtcgagtatagcctatgttgccacctttatgtgtctggtgaaaaggttgcacctgatccagaacatctcatgcgttcgcgttactgcgcttttgtgatgcaagacgcagattatttaataaagacctggcatccctcttgtggagcagcggcgttacgtgccgaattgatggccggatttgcgcatactgaatggttgggattgaccgtatttgaacattgttggcaggacgccgacaatatcggatttgtcagttttgttgctcgatttaccgaaggtggtaaaacaggtgcaataattgaacgttcgcgatttttgaaag

SEQ ID NO: 71901 - DNA, 530 bp, Homo sapiens; identical to SEQ ID NO: 67554

SEQ ID NO: 71902 - DNA, 355 bp, Homo sapiens
aaagaccaaactgcagccttgagttcaggtagttatgtaaaatgtgatgagacgcaggagtgatgtaattactccagtgtgaatgcatttccctctctgcggttttactgggtcaagtgcaccgctgcattaattaaacaaatgcgtaattaattacagcaaatccacaacaacaacaaaatagtcccttgcccaggccccatgtttcagttctaaaataagacgttctctgttgaattaggtggaaacggccacagattctgacacggagagccgcggtctgcgggaataccactctgtcggggtgcaagtggaagatgagaagcggtaactcagcccctcctgacactgtgtg

SEQ ID NO: 71903 - DNA, 723 bp, Homo sapiens
tacgaactctaggtccgtacccggagatctggctctgaaggggctacgtgttttgctcgtggaaggtaacgacccccagggaacagcctcaatgtatcacggatgggtaccagatcttcatattcatgcagaagacactctcctgcctttctatcttggggaaaaggacgatgtcacttatgcaataaagcccacttgctggccggggcttgacattattccttcctgtctggctctgcaccgtattgaaactgagttaatgggcaaatttgatgaaggtaaactgcccaccgatccacacctgatgctccgactggccattgaaactgttgctcatgactatgatgtcatagttattgacagcgcgcctaacctgggtatcggcacgattaatgtcgtatgtgctgctgatgtgctgattgttcccacgcctgctgagttgtttgactacacctccgcactgcagtttttcgatatgcttcgtgatctgctcaagaacgttgatcttaaagggttcgagcctgatgtacgtattttgcttaccaaatacagcaatagtaatggctctcagtccccgtggatggaggagcaaattcgggatgcctggggaagcatggttctaaaaaatgttgtacgtgaaacggatgaagttggtaaaggtcagatccggatgagaactgtttttgaacaggccattgatcaacgctcttcaactggtgcctg

SEQ ID NO: 71904 - DNA, 744 bp, Homo sapiens
tttaaaacaattacagagaaaactttattttgggccatttaggaggtttagatcattttgatcatcttcagctgtcttctcttcacatacaggaaaggccttggaaagcagtcgttgcgccagacagcccagggaagagcggcagcctgaggacctagggccacctgctgttccctgggattcatgtccttctggggaggagggaggacccaggacaatggctgctgttcatgatctggagatggagagcatgaatctgaatatggggagagagatgaaagaagagctggaggaagaggagaaaatgagagaggatgggggaggtaaagatcgggccaagagtaaaaaggtccacaggattgtctcaaaatggatgctgcccgaaaagtcccgaggaacatacttggagagagctaactgcttcccgcctcccgtgttcatcatctccatcagcctggccgagctggcagtgtttatttactatgctgtgtggaagcctcagaaacagtggatcacgttggacacaggcatcttggagagtccctttatctacagtcctgagaagagggaggaagcctggaggtttatctcatacatgctggtacatgctggagttcagcacatcttggggaatctttgtatgcagcttgttttgggtattcccttggaaatggtccacaaaggcctccgtgtggggctggtgtacctggcaggagtgattgcagggtcccttgccagcttcat

SEQ ID NO: 71905 - DNA, 630 bp, Homo sapiens
agagtcaaatagcagatgcaggaagatgccaggtgaaagatgccggggtggcccagctcggctgtccctgctgcttgacctgcccactcgccctcttccccacccccgacaggtgattgacttcggatccgccagcattttcagcgaggtgcgctacgtgaaggagccatacatccagtcgcgcttctaccgggcccctgagatcctgctggggctgcccttctgcgagaaggtggacgtgtggtccctgggctgcgtcatggatgagctgcacctgggctggcctctctaccccggcaacaacgagtacgaccaggtgcgctacatctgcgaaacccagggcctgcccaagccacacctgttgcacgccgcctgcaaggcccaccacttcttcaagcgcaacccccaccctgacgctgccaacccctggcagctcaagtcctcggctgactacctggccgagacgaaggtgcgcccattggagcgccgcaagtatatgctcaagtcgttggaccagattgagacagtgaatggtggcagtgtggccagtcggctaaccttccctgaccgggaggcgctggcggagcacgccgacctcaagagcatggtggagctgataagcgcctgctc

SEQ ID NO: 71906 - DNA, 849 bp, Homo sapiens; identical to SEQ ID NO: 67559

SEQ ID NO: 71907 - DNA, 916 bp, Homo sapiens
ggttcgacgatttcgtcctggaaaaactgtgggtggtgaacagagagaacagcatccatcatctggagaaaaactaaaatacaaccagcaaggggaagtacaacaacttcaccagaatttgcaccggctccagattctatgcaactcagctgaaaatgagcttcgatatgaacgagggcagaacttggacttaaagcaacataatagcttacttcaggaagaaaacattaagataaagattgaactaaagcatgcccaacagaagttattagacagcacaaagatgtgctcttcactcacggcagagtacaagcactgtcagcagaaaatcaaggaactggagttggaagtacttaaacacactcagagcattaaatcacagaacaacctacagggaaagctggttcaggagaaatctaaagttgctgatgcagaggaaaagattttggacctgcagcggaaattagaacatgctcataaagtctgtctcacagacacttgtatttcagagaagcagcagctagaggaaaagataaaagaagcaacacaaaatgaagctaaagtaaagcaacaatatcaagaagaacaacagaagaggaaacttctatatcagaacgtagatgagttacacaggcaagtgagaaccttacaagataaagaaaatctactggaaatgacctgttctcagcaacaatccagaattcagcaacaagaggccctacttaaacaactggaaaatgaaaaaagaaaatatgatgaggtaagaaagtaaatagacatgcttctcagttttcctattcccattagtaacagctaattattattgagtgcctagcactttactaaacctaatcctttagtcagggttcagtcaggaaagtagaatctactctaggtatttcaagcaagaagagaa

SEQ ID NO: 71908 - DNA, 385 bp, Homo sapiens; identical to SEQ ID NO: 67561

SEQ ID NO: 71909 - DNA, 1362 bp, Homo sapiens; identical to SEQ ID NO: 67562

SEQ ID NO: 71910 - DNA, 624 bp, Homo sapiens
ttttgccacttaaaaatttctcaaatttcttctttccacgtaattgtgacataggtattatttgtgttatatcccagatggctcactagggctactaatgtttagagtttgatttgtgtctttagcagtaaacattttaaaagaaacttttagcagttttttagggtaattacatgtcttcctttcaagggtccagattatagactctacaagagtgaaccagagttaacaacagtggcagaagttgatgaatctaatggagaagaaaaatcagaacctgtttcagagatagaaacttcagttgttaaaggttcccactttcctgttggagtagtccctccaagagcaaaatcaccaacacccgaatcttcgacaatagcttcctatgtaaccttgaggaaaactaagaagatgatggatctaagaacggaaagaccaagaagtgcagtggaacagctctgtttggctgaaagtactcgaccaaggatgactgtggaagagcaaatggaaagaataagaagacatcaacaagcgtgcctgagggagaagaaaaaagggttaaatgttatcggtgcttcagaccagtcacccttacaaagcccttcaaatttaagggataatccg

SEQ ID NO: 71911 - DNA, 337 bp, Homo sapiens; identical to SEQ ID NO: 65754

SEQ ID NO: 71912 - DNA, 1165 bp, Homo sapiens
aactggaagagcaggtgaagaggctccttgggtgggcacccctggcgtcctcccatgagggcagcctcacaggggtgtctgcctgtgagttttgttacagggcctcaccaagagagggcctatggaggccgaggaccagggggagcttttcctgcacctccggtcagtggcacgtgccccccagaccttatctatgcaccgactccagagaaagctgaaggaggcagccagaaaaatcatcagcctccgcctggagaaagagcagctcatcgagatggggaacaggctccgtgcagagctgggccgacccgaaaggtggctgttgcaccacgccctccctcctgcccctgaggcccggaagccaggcgaggagcccaggaggcctttggatcgcagcccacctttgggacaggtgcagccccattttacatctcaggacgccaagagtgccgaggatgaggctccttccagacacttgggaaagcaccagccccgctcagcacaggtgggcagcagacttgacgccctgcaaggcccgaagacacaacacagcatccacacggtgacctgtaaatcacctcggcagaaagaagacaggtccccaaagccaccccaggctcccaagcaccctgaggagcatggtcgccaatcccacagctcctcctcctttgccagtggcaccctccaggacatgtggaggttgctagacctgggatccagcccttctggtgtcacctcccagggtgactcaactccagagctcccagctcctccagcagccgacaggaggcccgtcaagatgcaggcaggcattgccaccccagggatgaagacagcagcccaggcaaaggccaagaccacaggagcctcccggtctcatcctgcaaaagctaaaggctgccaggggccccccaagatccgtaactacaacattatggactgacttcctccccccaccccgccccactaaggggtgctcggggcctccgcatggtgcctgtgctttcacctacatgttgtgggggggtgtgggcacagcgtgcagggtggaggcagggagctgcagggcaggctcccaaatgctgctgaggcgaccctgctgactgaaggcctccctgagcacagggcccattaaaaccaggttcctccctggggaaaaaaaaaa

SEQ ID NO: 71913 - DNA, 5176 bp, Homo sapiens
ttatttcccccccccaaaataagggtccttcccaaaaatccccaggtaggttttaattcccccccctataaggaaaaaacttttcccttgcaagcccgcgtaaactttggcccccccaaggatcctttaaaacggcccccccttttttttttttttattccagagaagtttgtatttgggccttaagcttttgaaaataaagtttagagacatagcatatgaataccactgtaatacacatgaaatattctatcagaccctaaaaattaacataaacttttaactttctcatagtcaacaaaatagtggctggttgccaattttattagataagttggttacagcattttaattatcattttacgtctatctaggtgtagctgaaattcaaaatgcacatcaaagtaaaactatatcacaactcaatgccatactaaatgtacttggcctctgcaatagaattctagtcagacttcattttttactcccttcttatgacccaagtggctttaacaggaatgcaggacttagtgctgatcatcacacaacataccactttctttttagaacctctacaaaattttgaggggagatggtggcattagccctgtggaacagatcttgatcacctcaataacactggcccattatctgtccctgcctgaacccattggtgaaatagtacaagggtgcacaagcccttcactgattacatggcaagtgttacagtagccttagccattagggaagggggaggttacatcataggtacaaaatacagtataaaagcgttatttaaccattccacactggagggttactctgatggccttccaaacccagtcggtttggatggttagcccacttaaaccaaatacatcacttaaggtaaacaatataaacataccaaaaaccctgtatggttaaatacaatttccatggtacaaaaatcaaagcctggagatgtttttacagattgctttttacacaatgtcttaaattgccaaatatttacaacattaaagaggaaatacattgtgatgcagagtaaaattctgaaatgattattataaaacctcaatctatctacgtgaggcactcctgaagcaagtggcattagccatgaggtcctttggtacaaggcccattgcttgaagaaccacagtagctgctgtggctttagcatgcttcttattagggctggcaaagctgggctggtaagcgcttccatttatcaatacctattcaagaaaaacatacaattgggctggtaagcgcttccatttatcaataccctaaagagaaaatgtttgcgatgatcagggccactatcatggaccaatagaaattcaggtggttgccaccttcttttattacagatctccatcaaagcagacacaggatgtttgcctgacagatctttcattgcagcagagaagttcccagacctcttttgtgctctttctcctactgcaacaagaccttttcggtctgtcttaaaatcaactaggatgggttccttattgccttctttgttttttcctaatccttctccttctctccagcccatttttctcatcaaaacggctcccattcctccagttaccggggctgctcttaagaactgatcctttttaatccaggcttgggcaccagtattggccaactgttcttgtgtcaaaacctgtactcctgtacttcctgtgaactggccaggaatagagttcagctgagcccaggcatcaatcctttcctgagctctatttaacatgctcatggcttcaagatcaaatgcattctcactgagtcttttctgagcaagtgcccgttcactcattgctgtagagatgtccacaggctctgagggcaaattgctgctgaaaacattatcatcatctttgttttcttcaccatttttctccacaggaacccattctccataaacactatccgcttcttttttccgatgttgagatccagatgatacagggaattcttttgttaatgttacctggctttttggtggagttggttttgctgcagcaatattcagattgaaaaaaataggtttgggttcactgagtttaaagggatgatgataaaaaggaggttcttcttcctcttcatccgaaacatgaggtttattcactattacatcatcatcttctttactctgtgcgatctgtttacatttctcagttagttcttctatagtagctcctcctgactttttagcaactttctcttctatagtaggtggaggtgcaggctttaggtttggtggtaaagggacaccagccttagcacacatggcagctgcattagctttggctatttcaagtaattgagccttatccaaatctgtcagacgtttgggtgatctgcctcgttcagaagacctggatcttttacgacggatgggagatctgctaaaccttcttcttaagggtgttcttgatcgccttaatctgactggtgagatactgaagcttcgtcttcttaccacagaccttgatcttctccggcggcttggggtgcggctccgacggctaggggtgcggctccggcggctgggggtgcggctgcggcggctgggggtgcggctgcggcggctgggggtgcggctgcggcggctgggggtgcggctgcggcggcttggggaaatgctaaagctccttcttctacccacagatctagaccttcgtcgacgacttggagtatgactccgactccgacgacttggggttcgacttcgagctctaactgtctttcggttatccctggagcttgatctttttctttttctttccctagacttggatctgtgctttggagatcttttgcgcttctcttttgatacagatcttcttcctctagactttgatcttgatctgctgcttctcctcctgcggtcttggaacgtgaccgtgaacgtgtctgaagagcgatgagacttggacttagatgatctctttcttgccctagaacgagattcactggtaagcttgcgtgatttgtgttcagaagatttggaacgcttacttcgagatcttaatgaagagtctcttttcttctctttctcccccttatcacggttcttatttttcttgcttttttcgtgagtgtccttaacttttacaaaaatttcactaaccacctttttcccccgaagaaagacccggaagctctttcctggcatactactttacaaccgggctggaataaagattctgtaccggtccaaaatcacttgcaagtaaaaggcccttcaaaggccagctctagggcttggaaggacgttccatgtcctaggggaagaaaccggtctcactaaatctgcttcattaatatcctcaatattggcagaaaatcctgaatcaggcaagtgctctctttaggaggggggaggtacttctttttctcctccactactttctttaagactgaatcagagctgctaatgtctggtacatctctttttacgggtaatggttcattcgtatcactactaacaaggttaatattagatggtaaatcaagatgaatatctttagcaggcaaaggcccttcaatgtcagcttcactaccaccactaggactggtggaaattagcatgtcatgttcagtatcttgagtagttaaagataaatcaacatcatatttattaactaaactgagagtagatgctgtggtaaattcaatacccttactagttccctgttgcatcaggttccagagcaaaaggaccagtagaagatagagtttctcctgcatcagcttcactaacaccagggtaggtatccaatactgtgcgctgtttagtctcactggtgggcaaaattttctcttcaccaatttccccaacaggactagtaccagcagcacacactgtattatgttccatctctttagcaattaaatgattatttatattaaggtctatatttataccatgttcgctttcgtaaaagtcacctttcaggtgttcctcagcatgtggttcttcacctgaatgcaatgcaatctcctgcatgccaatctctggagcaagattttgatcaccagaggatagattaattcctttcataacatgtgatgacatgatactagattccagtatcattggtgtggactctatagccacctcagttggtattacttgagtctgctctgagactgtgacagcaggctctgaaactgtcacagtcgattcctggacagaaacagatggttctgaaacaatcatagaaggttgaaggactgacaccgctggttccagaacaggcacagaaggctccagcgcagaaacaactggcacaggaatggtaacatagtctggctcagccacaacaggaggctccgggacagtcacaaccgaaggctccaggacagttacagtcgaagactccaggacagtcacagtcgaagactccaggacggtcacagccgaagactccaggacagccatagctgaagactctggggcagccatggctggcggctccagaatgctctctgccagcactggagtagttactgctggaaccaacaaggatgtagatacttctgaggcaacatgtcctgaggctctcatggaatcaaatgtttctgctgtctctgacataacaggaggctctgatgctaacacagttggttcagctgacatggcgggagtttcagataccatacaagtcactggtctctctggaacaacttcatgttcttctgctactactgcagactctacaggtgttaacgtaattgaagattctggctctggtggtggttctggaacagtcacagcagcctctgatactaaaactgagggatctgatgctgacactgaataatcagtaggcactgctgaaggctccgaaatctcactttgactcacaggaggctcaggctgcgatacagactcttcagatggtaatgatggcacctctgtaggccaagtattttcagctgttaatgctgactgctcagtgggcaatgctggaccctctggtggttcctcaggaggcaatggtggtgtcattggtggctcctcaggtggcaacggtggcattgttgggggctcttcaggaggcaaaggtggcaccatatatgcctctgtatatgtgtcagtgtaagaatcggtgtaagaatcagcagccatagacatcattgaacgatc

SEQ ID NO: 71914 - DNA, 2295 bp, Homo sapiens
ttttttttttttaagattccagctttttttattttttccccttttacacaaaacaaagtagaagaaataatacaggattaaaactgcaaaagtagttaatcagtagaatatgtatgcacacaaaaaatccagataggaagacaggcttatttacaatgaaagtaaggtaaaattaacgtagttttcttatgaaataataaaaaaaaatcaaacatatgctacaatgggcaccactgttcacagcaatattaaagaggagaaaacaacacttatttaatagggacagatataccacaaggtacaacatcagtgcaataaattcacaaaactatattacagctagttaatcagtttaagaattgttcccgtcagtcacattttttggccctcagaagttcattcctaaagatttcaactactctaaatttctagctaccaagaagttaagaatgattataagaagctttccaaggagttatgaaatctttgtagaccagaggccaactatcatcacctcaagtctgctctcaccaacagcccttgtatttttcagggagaaatctctaggaaaaaagtcagacaccagtgtagtcactatctcccatgtcaaacctaggggactaaaatggtcagtattaccataaaatgataattttgaggtttaccttaaaaggcttattctggtctcaaaaattagataagattatcttctactgaaatgaatattgactaaacatagaagactgctgtccttttgccagtcttagagtgaaagtcatagacatgagtcttaacctactgtatactatagctaatgtcagctgaaaatctgaaattaaaagcatgctagaaatcctaaatgcaatcttttggaagtctgctattaaaaagcctttaaggatttactaacttcgagtctaagtgcaaggggacgaaagcttaagcctgtcagacattccttttcttggacaaaaagatcaaagtttcctacaaattgctaagctttgcacaagggagaagcctacatgtactagtgcatggaatcagtttcatcttatttcatggggactcttctcccactggaaagaaacagaatgaggaatgaatcttaattggtctcttcatcagaagtggtaaacttggtctctatattcacgaagtcagacagttttttaagcagactgtggaagcagacagaaccagcttcctgtagccacagaccactacatggtatctaagctaaagcaaagatgaacaattatccagattcacttgaactgtactaaagggcaaggttcaccactacaaaaaggaagttgtctaaaagcaagaattcaattaacgctgggtaagaaaagtcaaaacactaatgagttgtccatgaagccaactgctaagaacgcgctcaactatacgcgacatgaagacactatgcacgaagccttacttggcgagtctgaatttctattaactaagggcagagtgagggagaacaaagagctacttccgtaacattttagtatccagatagtacagcagaaacggttcccggggcaatgggtgctgcattaatcacactgattaaagcagatgaatcattccgtttttcctttttctttttgtttgagaagtttgtttatctccctcttggccattcccaatgtacttcaaaaatgattcccatgttgggtttaggtccagggaagcaataagtaaggaagtcactatcaggtaggtgaagaagcaggttgtggacttgttgtcccacccaagcaaaccgcagcaagggaaacgatcatggtcatgaagtacatcttaggtttttcttcctttagtgtgaaagagccgtttccacccaacccacagctctgcgtccgagtttttactagattgctgcaaatttcatggaatctttgctgttgttccagtggtccatttattggagcccaaaaattctaggcgctagaatggggaacaaggtagtcagccaagccacaaaaacataacaaaacaggaaacgccggacagaacagatggatctagatagtagataatcagaaacaccaaagaaacccacacccatgatggcaggtggaaaccaggctctttcccatcggaggactttatcagccatcagcatcacttctccccatccttgcagctgttcttaccaaacttgcagtctctgcagccagcaggttggtgctgcgattatctccctccgccatcgtctcggggatgcagtctctacaagcgcaggccacctccgcaacgagtcctccactcgtgccgaat

SEQ ID NO: 71915 - DNA, 4028 bp, Homo sapiens
ttctatcagctgctctctggtgcctctgaagagctcctcaataaacttaagcttgagagggatttcagcaggtataactacctgagtctggattcggccaaagtgaatggagtggatgatgcagcaaattttagaaccgtgcggaatgccatgcagattgtgggctttatggatcatgaagctgagtctgtcttggcggtggtggcagcagtgttgaaactggggaacattgagttcaagcccgaatctcgagtgaatggtctagatgaaagcaaaatcaaagataaaaatgagttaaaagaaatttgtgaattgaccggcattgatcaatcagttctagaacgagcattcagtttccgaacagttgaggccaaacaggagaaagtttcaactacactgaatgtggctcaggcttattatgcccgtgatgctctggctaaaaacctctacagcaggttgttttcatggttggtaaatcgaatcaatgaaagcattaaggcacaaacaaaagtgagaaagaaggtcatgggtgttctggacatttatggctttgagattttcgaggacaacagctttgagcagttcattattaattattgtaacgaaaagctgcaacaaaacttcattgaacttactcttaaagaagagcaggaggagtatatacgggaggatatagaatggactcacattgactacttcaataatgctatcatttgtgacctaatagaaaataacacaaatggaatcctggccatgctggatgaagagtgcctcaaacctggcacagtcactgatgagaccttcttagaaaagctgaaccaagtatgtgccacccaccagcattttgaaagcaggatgagcaagtgctctcggttcctcaatgacacgtctctgcctcacagctgcttcaggatccagcattatgctggaaaggtgctgtaccaggtggaaggattcgttgacaaaaacaatgaccttctctatcgagacctgtcccaagccatgtggaaggccagccatgccctcatcaagtctttgttccccgaagggaatcccgccaagatcaacctgaaaaggcctcctacagcaggctcacagttcaaggcatccgtggccactctgatgaaaaacctacagaccaagaacccaaactatattaggtgtatcaaaccgaatgataaaaaagcagcacacatcttcaacgaggctctagtgtggcatcagatcaggtacctggggcttttggagaacgtccgagtgcggagggcaggctacgccttcaggcaggcctatgaaccttgcctagaaagatacaaaatgctttgtaaacaaacatggcctcattggaaaggaccagccaggtctggtgtggaggtcctatttaatgaattagaaattcccgtggaagaatactcctttggtagatcaaagatattcatccgaaacccaagaacattattcaaattagaagacctgaggaagcaacgcctggaggacttggccactctcattcagaagatatatcgggggtggaaatgccgcacacacttcctgctaatgaaaaaaagccaaattgtgattgccgcctggtacaggagatatgcgcaacaaaagaggtaccagcagacaaagagttccgccttagtaattcagtcttatatccggggttggaaggctcgaaaaattctgcgggaactgaagcatcaaaagcgctgtaaggaagcagtcacgaccattgctgcatattggcatgggacccaggtacgtagagaatacaggaaattcttcagagccaatgctggaaagaaaatctatgagtttacgcttcagagaattgtgcaaaaatacttcttggaaatgaaaaataagatgccttccttatctccaatagacaagaattggccctcaagaccttacttattcttggattctactcacaaggagctaaaaaggattttccacttgtggaggtgtaaaaaatacagggaccaattcacagaccagcagaaacttatttatgaagagaaactagaagccagtgaactcttcaaagacaagaaggctttatacccatctagtgttgggcaaccattccaaggggcttacctggaaatcaacaagaaccccaagtataagaaactcaaagatgccattgaagaaaagatcatcattgctgaagtcgtgaacaaaattaaccgtgctaatgggaagagtacatctcggattttcctcttaacaaacaataatctccttcttgctgaccaaaagtctggacaaatcaagtcagaggttccactggtggatgtgaccaaggtatcaatgagctcacaaaatgatggcttcttcgccgtccacctcaaagagggctcagaagcagctagtaaaggagactttctcttcagcagtgatcacctgattgaaatggccaccaagctctatcgcacaactctcagccaaaccaaacagaagctcaatattgagatttccgatgagttcctggtacagttcagacaggacaaagtatgtgtgaagtttattcagggaaaccagaaaaatgggagtgtcccaacatgtaaacgaaaaaacaaccgtctccttgaagttgctgtcccttaactggcgcctcctctctactttcatggacttgttcctttgtaatagtgcaatttggttttgttttatttggggttcattgtatgtttgggaatcaccaaaggcttttagagttctttggcaaaataaaaatatttgactaatcaatttttattattggaatagttttaacctttcaaatacatgttctgtcctggagcaggattgtagaaactaacagtgtctattttcatgtctgatgtgttcttcctttagtcatcatgttaggtctgtgtaccctaaatcagcatattactcataaatcattaattaatataagcataggaaatggtcttaaaagatactgcattcattcatcagatatttattccatgcctactctatgctaggcactgtgctagatggtatgaaaacttattaggaacctttttgtttttgagaccattgcattctggctggtttgtgctggtttaacgacatctaagaaggtttagaaatggtgagaccaaaacaataactgttaatgatggacagcattattaggaaccctgtagtatgatatttaacaatataggcttcaagaagggctggtcctaagagggggcagaaatgaatgaccaggttaaatccctctacatgtggtttctgtttgaaaaaaagaaaactgacatttgaacaggacttttaatttgtttaaaactctggtaattacttgtaacagtagaaaatagaagtcattcttattttagaaaaagtgacagaagcagtccagtaagattatatgtttctgtttctggtaaataccatatatgatcctcgaaatgataatatctccagaatattgttttcacccaaatttgagtagatattttaaacacctaacaaagtaaagggctaaaagccattcagatagcagtaaaacattctgtatgatgtgcaataaaacatccaagatcttttttgaaagttttatttataatatacatttttgtatgagaaaggtgattggtacagggtgcctattttagtcatggatcaaaatttgtgtaacttgcagggctttctttctttttcttcaaatttacaagggttcattttggaaactacattttaaactttggaatcaaattgtttcttatttgggaggataatgtatatacattggtattatgttaaataataaaattgttctaatttggtgccattttcctgaatcacaactgtatttttgtatctcaagctattttcatatgttatgtgtcaatgtatcatctctcagaaaggttttacaatccaaacattatatgttctctgtgtaactgaatttcacttatcttttataaaccagaaacattaattgaaaatattttctggggattttctcttgacttgtatttttaaaaattgctcacata

SEQ ID NO: 71916 - DNA, 2331 bp, Homo sapiens; identical to SEQ ID NO: 65758

SEQ ID NO: 71917 - DNA, 559 bp, Homo sapiens; identical to SEQ ID NO: 65759

SEQ ID NO: 71918 - DNA, 850 bp, Homo sapiens; identical to SEQ ID NO: 65760
  misc_feature (1)...(850): n = a,t,c or g

SEQ ID NO: 71919 - DNA, 6171 bp, Homo sapiens
atgaattcatttctgtcttttcccatctccttgtgtagtgcccggaaggcagtggatgaggaagaggaagcagttgaagaacgtcgcaatatgcgaactatctgggtgactggcagaaaaggtttaactgaaagggaagcagcagcccttatagtggaagaagccagaatgattctgcagcaggacttagttgaaatgggagtgcaatggaatccatgtgccctgttacattctagtacatgctcattgactcatagtgagtccgaagtaaaggaacacacatttatatcccaaactaagagttcttataaaaaattaacatcaaaagaacaaaagtaacacaatatttagtgattcttatattaagcattcaccaaatatagtgcaagacttaaataaaagtagagagcatacaagttcctttaattgtaatttccagaatgggaatcaagaacatcagacatgttccattttcagagcaagaaaacgggcctctttagatataaataaagagaagccaggagcctctcagaatgaggggaaaacaagtgataagaaagttgttcagactttttcacagaaaacaaaaaaggcacctttgaatttcaattcagaaaagatgagcagaagttttcgatcttggaaacgtagaaagcatctaaagcgatctagggacagcagccccctgaaagactctggagcgtgtagaatccatttacaaggacagactctgtctaatcctagtctttgtgaagacccgtttaccttagatgagaagaaaacggaatttagaaattcagggccatttgctaaaaatgtatctttgagtggtaaggaaaaagataataaaacatcattcccattacaaataaagcaaaattgttcatggaacataacactaactaatgataattttgtggagcatattgtcacaggatctcagagtaaaaatgtgacttgtcaggccactagtgtggttagtgaaaagggcagaggagtagctgttgaggcagaaaaaataaatgaagtgctgatacaaaatggttcaaaaaaccagaatgtttatatgaaacaccatgacatccatccaattaaccagtacctgcgaaagcaatctcatgaacagacaagcactattaccaaacagaaaaatataatagagagacaaatgccctgtgaagcagtcagtagttacataaatagagactcaaatgttactatcaattgtgaaaggataaagcttaatacagaggaaaataaaccaagtcattttcaggcattaggagatgatataagcagaactgtgatacccagtgaagtacttccatcagctggagcatttagcaaatcagaaggccagcatgagaattttctaaatatttctagactacaagaaaaaacaggtacttatacaacaaacaaaactaaaaataatcatgtttctgacttaggtttagtcctctgtgattttgaagatagtttctatctggatactcagtcagagaaaataatacaacagatggcaactgaaaatgccaaactaggagcaaaggacaccaacctggcagcagggataatgcagaagagcttagtccaacagaactcaatgaactcttttcagaaggagtgtcacattccttttcctgctgaacagcaccctctaggagcgactaagatagatcatttggaccttaagactgtaggtactatgaaacaaagcagtgattcacatggggttgatatcctgactccagaaagcccgattttccattctccaatactattggaggaaaatggtctttttttaaaaaagaatgaagtttctgttactgattcacaattaaatagttttcttcaaggttatcaaacacaagaaactgtgaaaccagttatacttctgattcctcaaaagagaactcccactggtgtagaaggagaatgtcttccagttcctgaaacaagtttgaatatgagtgatagtttactatttgatagcttcagtgatgactatctagtaaaagaacaattacctgatatgcaaatgaaagaaccccttccttcagaagtaacatcaaaccattttagtgattctctgtgtctacaagaagacctaattaaaaaatcaaatgtaaatgagaatcaagatacccaccagcagttgacttgttccaatgatgaatctattatattttcagaaatggattctgttcagatggttgaagctttggacaatgtggatatatttcctgtccaagagaagaatcatactgtagtatctcctagagcattagaactaagtgatccagtacttgatgagcaccaccaaggtgatcaagatggaggagatcaagatgaaagggctgaaaaatcaaaattaactgggaccaggcaaaatcattcattcatatggtcaggggcatcatttgatctaagtccaggactgcaaaggattttagataaagtatccagtcctctagaaaatgaaaagctaaaatcaatgactataaacttttccagtttgaatagaaaaaatacagagttaaatgaagaacaagaagttatttcaaacttggagacaaaacaagtgcagggaatttcattttcttctaataatgaagtaaaaagcaagattgagatgctagaaaacaatgccaatcatgatgaaacctcatccctcttacctcgtaaagaaagtaatatagttgatgataatggtctcattcctcctacacccattccaacatctgcttctaagctgacatttccagggattcttgaaacacctgtaaacccttggaaaactaataatgttttacaacctggtgaaagttatttatttggctcaccttcagatattaaaaaccacgatttaagtccagggagtagaaatgggttcaaagacaacagccctattagtgacacaagcttttcacttcagttatcacaggatggattacagttaactccagcctcaagcagttcagaaagtttgtccataattgatgtagcaagtgaccaaaatcttttccaaacattcattaaggagtggcggtgcaaaaagcgattttccatctcactggcttgtgaaaagattagaagtttgacatcttctaaaactgctactattggcagtaggtttaagcaagctagctcacctcaggaaattcctattagagatgatggatttcccattaaaggttgtgatgacaccttggtggttggactggcagtatgctggggtggaagggatgcctattatttttcactgcagaaggaacaaaagcattctgaaattagtgccagtttggttccaccttctttagatccaagcctgactttgaaagacaggatgtggtaccttcaatcttgcttgcgaaaggaatctgataaagaatgttctgttgtcatctatgacttcatccagagctataaaattcttcttctttcttgtggcatctccttggagcaaagttatgaagatcctaaggtggcatgctggttactagatccagattctcaggagccgactcttcatagcatagttaccagtttctttcctcatgagcttccactcctagaagggatggagaccagccaagggattcaaagcctggggctaaatgctggcagtgagcattctgggcgatacagagcatctgtggagtccattctcatcttcaactctatgaatcagctcaactctttgttgcagaaggaaaaccttcaagatgttttccgtaaggtggaaatgccctctcagtactgcttggccttgctagaactaaatggaattggctttagtactgcagaatgtgaaagtcagaaacatataatgcaagccaagctggatgcaattgagacccaggcctatcaactagctggccacagtttttctttcaccagttcagatgacatcgctgaggttttatttttggaattgaagttgcccccaaatagagagatgaaaaaccaaggcagcaagaaaactctgggttctaccagaagagggattgacaatggacgcaagctaaggctgggaagacagttcagcactagtaaggacgttttaaataaattaaaggcattacatcctttaccaggcttgatattagaatggagaagaatcactaatgctattaccaaagtggtctttccccttcagcgggaaaagtgtcttaatccttttcttggaatggaaagaatctatcctgtatcacagtcgcacactgctacaggacgaataacctttacagaaccaaatattcagaatgtgccaagagattttgaaatcaaaatgccaacactagtaggagaaagcccaccttctcaagctgtaggcaaaggcctacttcccatgggcagaggaaaatataagaagggtttcagcgtgaatcctagatgccaggcacagatggaggagagagctgcagacagaggaatgccattttcaattagcatgcgacatgcctttgtgcctttcccaggtggttcaatactggctgctgactactctcagcttgaactgaggatcttggctcatttatcccatgatcgtcgtctcattcaagtgttaaacactggagctgatgttttcaggagcattgcagcagagtggaagatgattgagccagagtctgttggggatgatctgaggcagcaggcaaaacagatttgctatgggatcatttatggaatgggagctaaatctttgggagagcagatgggcattaaagaaaatgatgctgcatgctatattgactccttcaaatccagatacacagggattaatcaattcatgacagagacagtgaagaattgtaaaagagacggatttgttcagaccattttgggaaggcgtagatatttgccaggaatcaaagacaacaacccttatcgtaaagctcacgctgagcgtcaagctatcaacacaatagtccaaggatcagcagctgatattgtcaaaatagccacagttaacattcagaagcaattagagaccttccactcaaccttcaaatcccatggtcatcgagagggtatgctccaaagtgaccgaacaggattgtcacgaaagagaaaactgcaagggatgttctagcccaatcataggaggcttcttcatccttcaactccatgatgaactcctatatgaagtggcagaataagatgttgttcaggtagctcaaattgtcaagaatgaaatggaaagtgctgtaaaactgtctgtgaaattgaaagtgaaagtgaaaataggcgccagctggggagagctaaaggactttgatgtgtaactgggctgttgatgaagtcctcccagggaagcctgtgcagatgcagtcacctggaaagaacagagattaccctttcacctacctcagcaaaacaaactttcaagtcttgatagacttagcctagtaattttatagtgagagtttcaaactatatatcagtgtctatagcatcaaaaacttctgggggcgtgggggaagtagaataccaagtataatagttacattcactttcaaagagcatctatgaatttgccttttgtaacttactgtggctttaaacatattcagaacagatgcttgaaatatgcacttagcactttggttccacatctgtctgggtaaaccatgaagaaaatgaagctgctgcctcaatcgacccagacagcagccataggcagataaagatttggtttcaccctggtggtggtaggcatcgtgtgtgactttttttcctctaatatcaattttacagtacggaaatagtattttaaaatagtattggctaataaattatgaattctataaagtagtaagacttggtatggttggagtgtaggaatgaatattcatgaaatgtttcttattgcttttccttccctaattcatacaatgaatgtatttggaatacttacatattataaaataaactatacctcttcaagaggtatcctgttctgtaagatcagatgtttttattgcaggtcaatataatactgccagagacagaaaatacccccttatcagtcccttagtgcctctttctgtttgtggcatggtgagaaaacccatgctgaaaagattgtactttgtgatcccaatcagagggatggagctaatctttttgttgttgaaataaaatgaatttatgagaaactttaaa

SEQ ID NO: 71920 - DNA, 559 bp, Homo sapiens; identical to SEQ ID NO: 65761

SEQ ID NO: 71921 - DNA, 2285 bp, Homo sapiens; identical to SEQ ID NO: 65762

SEQ ID NO: 71922 - DNA, 3874 bp, Homo sapiens
ttttttttttttctcattaacaaagcagtcaattccctttatttttaaaattttatgtacacatatgaatgatctgtataatgtacattcaatatagagaagctttatatatgtgatagttgtagagaacatttcagaatgatactcatcttttacatgacatcttgacatccatttttaaatttgttttgcacaagctccttgtcattcaatttggtaaaagccagttatacatactaatgtgtactgtgagcctttcagaagggttaatgattgagggatgccagtgaaggggtgcaggggacaaaacctaataggtcttgggatgggtggggggggagggatgggccacggcaggactttggatgcagggagagggggaaaatattctttccggggggggaaaaggtgacttagcccaatttttgttggcctgtagccacaacccttacagtccatgcctagttcaaaaaaaaaattccaaaactaggaagaaagttttgtctttttgattcacagttttgtaaacagatataaaggaacaaatgtgcttacatcccccaagaaaaaaaaaattcttgtgtacccacttatgttgatccacagagtgctttcttataatgtgatacaattaggatcactgactttttttcctaaaaatatatttatagaaaaaggaataacactgtcatgaaaccaggagaaaggcagtaagagtttgcttcaacgtatcagctggaggaatgtggacttggcactggcctttcagcgtttattgtctctcgtgaatatttcaagtctgatagccaaggtcgcctgcctcatggtctacaggaggtggcaggttagacatgactgatgtagatgtacctgcggtaaggtagccagcaactccaggtcctgtgaggtatcctgctgtttgtgactcagaaatgaacaaatcatgtttctgatctttgaaggcactccagactgaagaacggcacaggatttcattcacctgttctccatactgcaaacttcgagtcattgccttgagagctttaacaatctgagccttagtggctgctgggctgtccaggttttcaaggccaatgccttcgagtaattttaagaggtatggaaccaaatctgctttcagggcttgtgctactaattcactctgctccttctgaaacattcgattaattgcttcacaggctagaccaacagtatctgctcgctttttcattccattcatcagtgggccaatggtctctaaagatgccatggctcgaacacacagctcattttcagacaaggcatggataacccgaatggcactcttaggaatggcattgttcctatgattcattgcctggataactttgggaagatggcccaatggcgggacctgatctgccagctgaggttgtgcgctgaagagacacactgttgccattgtcaaggtttccagagtttctccatgaggattgttcttctctaggagctcagttaatttttctaacagggcaataagaaattctctaggctttcttagaacccaggctggttgtgcaataaagatcctcaagaagactcctccaacagcaagttccccctctgcttctccaaacaccacagcaaaatcttcaggcaacttccagtttgcctcagggttgtcctgctgatttttaaagtgctctagcatcatttccctaactgttgtggacactttatctctggaattatcattccaaattaactcaggattttcatgagttccttcaaaaaatatgtacagcagcttcaggattgtctctcatagcatcccatgaaaacgcttggtagaaatttcattaacggtaattcgaacctttggacctatcagtttatctgctgtcattttggcaaaaagttctgctgtttgggctcgaacctgtggatgtgttgaattgcagaacatatccagtaaatggaatcaaagcaccctttgccattgcttctttgattaatttttgtactcggatgtccaaagcataaagagtttcccagaaccaagctgaccgacttgatggcaatgaatgtagaagagccaataaactggacaaaacccattgattcagcaatattgttgacacagtcttggttagatgtcactatattcacaacctcttaaagccaacctgctgtacttgaccagctccatgaaacgcggagaagagaaaatatcaacttaaagtgcccaatgcattcactctcagaacctggattgtattttatgacatttctcagagcctccaaagccatttctactctcggtaagcgatctccatgttgctctgactccacttttgccgcgtgtgtgatggccatgaatgtgtgcaagtattgggcctgcgagcctatataatccaagagacttgcagcaaatgcttttggatcctccagttggaaagtaggaacttcattatacaccctaacaaaaatctcccctacaataagttatttggcatgatcactgtagacaaattctgatccataagttttgtcacaatcaccttttttaatcatgttttcttgttgggattcaagaaattcaagtaattctgctcttgtagaattgttccatatcaaatatggactttctgtgttgctgttaagcatcttcaaaatctcagtcacactagccacagcaagttttctagcaacatagggtgtcagcatgccagctaagcttttccttatggttggattttctggagttgcttgttcttcagccaaataccctccaaggcgactcagagcatggacactcagtttggcaaggctgtttgctacctcctgctggtttgtttcttcacttttctgaatgccactctcttctagtgtgtagtcataattaaacagaaaaccaaggagataccacaaaattccagcctgaaataggtgtgtctgtagccagaaatccacagcaaaagaactgacacattctaccccaagagcagctacgcggggaatactcttgccaaaatatagtacccgacagagatccttgatgatgctaggcatttccgtgatcttctctcggcattcctcaaactgagcagccacactgtagcatttacttatgtatccacacacctgtactgacatgtcacttggtttactagaacgagtcaagacagccacacagcgactaaatgcctcttgtaacacctctagtccattctctcttctgagctcttcagcattgagggctgaacagttgacagtatggaaagctagctctgtagccgcaggcaacaatggtgattcttttgagaaaaggaggtcatctgaagtttccattgttatagtccgaataagcatggggtatcctgcatatttataaggctgtaaatcttctttatgacggttgaagaggatgctctgtgtttttagaattaaaattatattctctggatctggcccatccactatttttgctgatttggtacataaaaattcatatgctttatttactttttcaaacatgtccctcccttctggattcttatcagggtggtacttttgtgcaagtctgaagtaagctttcctaatcttgctctcatcatgcggtccctgtccttgaggcagattaagcacttcataagcatcatctattgacatcataggtggcttcttttctacttctttcttccaggcatcaagggtatcttttagaagcttaaccgggtctttaattggccaatctggaaaccggagtgtatcacacagttgtttgaggtaataaatattacaaaatagttcattttcgagttgtggatagttgattataggaatggggcaatactgataaagtgctcttgtgttactctgaagacgaggtgtg

SEQ ID NO: 71923 - DNA, 3050 bp, Homo sapiens; identical to SEQ ID NO: 65764

SEQ ID NO: 71924 - DNA, 1316 bp, Homo sapiens; identical to SEQ ID NO: 65765

SEQ ID NO: 71925 - DNA, 1296 bp, Homo sapiens; identical to SEQ ID NO: 65766

SEQ ID NO: 71926 - DNA, 1205 bp, Homo sapiens; identical to SEQ ID NO: 65767

SEQ ID NO: 71927 - DNA, 4650 bp, Homo sapiens; identical to SEQ ID NO: 65768

SEQ ID NO: 71928 - DNA, 1700 bp, Homo sapiens; identical to SEQ ID NO: 65769

SEQ ID NO: 71929 - DNA, 2265 bp, Homo sapiens; identical to SEQ ID NO: 65770
  misc_feature (1)...(2265): n = a,t,c or g

SEQ ID NO: 71930 - DNA, 2486 bp, Homo sapiens; identical to SEQ ID NO: 65771

SEQ ID NO: 71931 - DNA, 714 bp, Homo sapiens; identical to SEQ ID NO: 65772

SEQ ID NO: 71932 - DNA, 354 bp, Homo sapiens; identical to SEQ ID NO: 65773
  misc_feature (1)...(354): n = a,t,c or g

SEQ ID NO: 71933 - DNA, 378 bp, Homo sapiens; identical to SEQ ID NO: 25831

SEQ ID NO: 71934 - DNA, 308 bp, Homo sapiens; identical to SEQ ID NO: 36642

SEQ ID NO: 71935 - DNA, 1277 bp, Homo sapiens; identical to SEQ ID NO: 65777

SEQ ID NO: 71936 - DNA, 1322 bp, Homo sapiens; identical to SEQ ID NO: 65778

SEQ ID NO: 71937 - DNA, 3506 bp, Homo sapiens; identical to SEQ ID NO: 65779

SEQ ID NO: 71938 - DNA, 1476 bp, Homo sapiens; identical to SEQ ID NO: 65780

SEQ ID NO: 71939 - DNA, 2862 bp, Homo sapiens; identical to SEQ ID NO: 65781

SEQ ID NO: 71940 - DNA, 919 bp, Homo sapiens; identical to SEQ ID NO: 65782

SEQ ID NO: 71941 - DNA, 1204 bp, Homo sapiens; identical to SEQ ID NO: 65783

SEQ ID NO: 71942 - DNA, 1873 bp, Homo sapiens; identical to SEQ ID NO: 65784

SEQ ID NO: 71943 - DNA, 803 bp, Homo sapiens; identical to SEQ ID NO: 65785

SEQ ID NO: 71944 - DNA, 357 bp, Homo sapiens; identical to SEQ ID NO: 65786

SEQ ID NO: 71945 - DNA, 867 bp, Homo sapiens; identical to SEQ ID NO: 65789

SEQ ID NO: 71946 - DNA, 2367 bp, Homo sapiens; identical to SEQ ID NO: 65790

SEQ ID NO: 71947 - DNA, 2078 bp, Homo sapiens; identical to SEQ ID NO: 65792

SEQ ID NO: 71948 - DNA, 409 bp, Homo sapiens; identical to SEQ ID NO: 65793

SEQ ID NO: 71949 - DNA, 969 bp, Homo sapiens; identical to SEQ ID NO: 65794

SEQ ID NO: 71950 - DNA, 1683 bp, Homo sapiens; identical to SEQ ID NO: 65795

SEQ ID NO: 71951 - DNA, 4279 bp, Homo sapiens
caagtctataagggtcgacatgttaaaacgggtcagttggcagccatcaaagttatggatgtcactgaggatgaagaggaagaaatcaaactggagataaatatgctaaagaaatactctcatcacagaaacattgcaacatattatggtgctttcatcaaaaagagccctccaggacatgatgaccaactctggcttgttatggagttctgtggggctgggtccattacagaccttgtgaagaacaccaaagggaacacactcaaagaagactggatcgcttacatctccagagaaatcctgaggggactggcacatcttcacattcatcatgtgattcaccgggatatcaagggccagaatgtgttgctgactgagaatgcagaggtgaaacttgttgactttggtgtgagtgctcagctggacaggactgtggggcggagaaatacgttcataggcactccctactggatggctcctgaggtcatcgcctgtgatgagaacccagatgccacctatgattacagaagtgatctttggtcttgtggcattacagccattgagatggcagaaggtgctccccctctctgtgacatgcatccaatgagagcactgtttctcattcccagaaaccctcctccccggctgaagtcaaaaaaatggtcgaagaagttttttagttttatagaagggtgcctggtgaagaattacatgcagcggccctctacagagcagcttttgaaacatccttttataagggatcagccaaatgaaaggcaagttagaatccagcttaaggatcatatagatcgtaccaggaagaagagaggcgagaaagatgaaactgagtatgagtacagtgggagtgaggaagaagaggaggaagtgcctgaacaggaaggagagccaagttccattgtgaacgtgcctggtgagtctactcttcgccgagatttcctgagactgcagcaggagaacaaggaacgttccgaggctcttcggagacaacagttactacaggagcaacagctccgggagcaggaagaatataaaaggcaactgctggcagagagacagaagcggattgagcagcagaaagaacagaggcgacggctagaagagcaacaaaggagagagcgggaagctagaaggcagcaggaacgtgaacagcgaaggagagaacaagaagaaaagaggcgtctagaggagttggagagaaggcgcaaagaagaagaggagaggagacgggcagaagaagaaaagaggagagttgaaagagaacaggagtatatcaggcgacagctagaagaggagcagcggcacttggaagtccttcagcagcagctgctccaggagcaggccatgttactgcatgaccataggaggccgcacccgcagcactcgcagcagccgccaccaccgcagcaggaaaggagcaagccaagcttccatgctcccgagcccaaagcccactacgagcctgctgaccgagcgcgagaggtggaagatagatttaggaaaactaaccacagctcccctgaagcccagtctaagcagacaggcagagtattggagccaccagtgccttcccgatcagagtctttttccaatggcaactccgagtctgtgcatcccgccctgcagagaccagcggagccacaggttcctgtgagaacaacatctcgctcccctgttctgtcccgtcgagattccccactgcagggcagtgggcagcagaatagccaggcaggacagagaaactccaccagcagtattgagcccaggcttctgtgggagagagtggagaagctggtgcccagacctggcagtggcagctcctcagggtccagcaactcaggatcccagcccgggtctcaccctgggtctcagagtggctccggggaacgcttcagagtgagatcatcatccaagtctgaaggctctccatctcagcgcctggaaaatgcagtgaaaaaacctgaagataaaaaggaagttttcagacccctcaagcctgctggcgaagtggatctgaccgcactggccaaagagcttcgagcagtggaagatgtacggccacctcacaaagtaacggactactcctcatccagtgaggagtcggggacgacggatgaggaggacgacgatgtggagcaggaaggggctgacgagtccacctcaggaccagaggacaccagagcagcgtcatctctgaatttgagcaatggtgaaacggaatctgtgaaaaccatgattgtccatgatgatgtagaaagtgagccggccatgaccccatccaaggagggcactctaatcgtccgccagactcagtccgctagtagcacactccagaaacacaaatcttcctcctcctttacaccttttatagaccccagattactacagatttctccatctagcggaacaacagtgacatctgtggtgggattttcctgtgatgggatgagaccagaagccataaggcaagatcctacccggaaaggctcagtggtcaatgtgaatcctaccaacactaggccacagagtgacaccccggagattcgtaaatacaagaagaggtttaactctgagattctgtgtgctgccttatggggagtgaatttgctagtgggtacagagagtggcctgatgctgctggacagaagtggccaagggaaggtctatcctcttatcaaccgaagacgatttcaacaaatggacgtacttgagggcttgaatgtcttggtgacaatatctggcaaaaaggataagttacgtgtctactattttgtcctggttaagaaataaaatacttcacaatgatccagaagttgagaagaagcagggatggacaaccgtaggggatttggaagggatgtgtacattataaagttgtaaaatatgaaagaatcaaatttctggtgattgctttgaagagttctgtgggaagtctatgcgtaggcaccaaagccatatcacaaatttatggcctttaagtcatttggagaattggtacataagccattactggtggatctcactgttgaggaaggccagaggttgaaagtgatctatggatcctgtgctggattccatgctgttgatgtggattcaggatcagtctatgacatttatctaccaacacatatccagtgtagcatcaaaccccatgcaatcatcatcctccccaatacagatggaatggagcttctggtgtgctatgaagatgagggggtttatgtaaacacatatggaaggatcaccaaggatgtagttctacagtggggagagatgcctacatcagtagcatatattcgatccaatcagacaatgggctggggagagaaggccatagagatccgatctgtggaaactggtcacttggatggtgtgttcatgcacaaaagggctcaaagactaaaattcttgtgtgaacgcaatgacaaggtgttctttgcctctgttcggtctggtggcagcagtcaggtttatttcatgaccttaggcaggacttctcttctgagctggtagaagcagtgtgatccagggattactggcctccagagtcttcaagatcctgagaacttggaattccttgtaactggagctcggagctgcaccgagggcaaccaggacagctgtgtgtgcagacctcatgtgttgggttctctcccctccttcctgttcctcttatataccagtttatccccattctttttttttttcttactccaaaataaatcaaggctgcaatgcagctggggctgttcaaattctaccatcaggtgctataagtgtttgggattgagcatcatactggaaagcaaacacctttcctccagctccagaattccttgtctctgaatgactctgtcttgtgggtgtctgacagtggcgacgatgaacatgccgttggttttattggcagtgggcacaaggaggtgagaagtggtggtaaaaggagcagagtgctgaagcagagagcagatttaatatagtaacattaacagtgtatttaattgacatttcttttttgtaatgtgacgatatgtggacaaagaagaagatgcaggtttaagaagttaatatttataaaatgtgaaagacacagttactaggataacttttttgtgggtggggcttgggagatggggtggggtgggttaaggggccccattttgtttctttggatttggggtgggggtcctggccaagaactcagtcatttttctgtgtaccaggttgcctaaatcatgtgcagatggttctaaaaaaaaaa

SEQ ID NO: 71952 - DNA, 341 bp, Homo sapiens; identical to SEQ ID NO: 65796

SEQ ID NO: 71953 - DNA, 335 bp, Homo sapiens; identical to SEQ ID NO: 65797

SEQ ID NO: 71954 - DNA, 1391 bp, Homo sapiens
ttttttttttttttacaactgaagagaaagttcctatttattctcaaatgccctgactaaactgctcaaaagcagtttatattttcaaaccaatgtcatgtcctcaacataaagttcaaattcatttactgtccatgacacttaagcatccagatcaataaattacaatacacatattctgtaagagtcttttataccaagaagcaatgtttttggtcttcggcagtgacatttcctccccattcaccacacaaacgcaggaagctctcgtaacatgaggacaccaaagcgctgccactctcgctgataaatccacagttcctgtgttgtatccaaacaagccaacactgcccctcctttccatgcaatcagccgggggtccatgtcctttaggcctttggatcacatccacattttcaaataatcggcctgaagggatggtgggcattttgttgagaattctgtgctgcaaaaaattcttgaagctttaatgaaaacatcaaaccacctcccaccactaggatgtagctgtacatcttctttttggtgtcgtcagatgaacagcagtctatgctatggaggatggctttatccaggcccagggcttttccttcaaacagcgagatggcagtcttcctggacatcagtgcagtgagggcctcctcggaatcgttgccggccatcaggccatctccctgtgcagaccccaaatctacctcctgggaatggagtctttctggaagatcagaggactggccacgaagatccccttcaaatccaataggtttggatgcagactttcggtcagcagtagcttttgcagactgttcttgtttgctctgtgtggccagcaggtaatgttcatcgtgaggatcctcaggatcgccctgagatctgtgctgcaaagtcgtcattttctgtccaacgattccaaaagttgcggggtaaaacaaagccattggagcctgcagtttttcatctcctaatcgaaactggtaaagcagggcaggagaatcaggatgtcgaatctgaaactcatggtcctgaagcccagagatgtcctgatctaaatgacaaaaagtttctttaaggtgttgcagaagaagacaatccattttatttgttaactggcattctctgtaagggaacccagctcgctgcattagccagtaaaaacatcttgacacatcagatcctccgtatgccagacaaagccgagtattccgatgagacaccccatcctccacacagcatacacttgtcttctggtccccaacgtctacaatacacgtgctgcttaagccacttccataggtggcacacacagactcctgatggaccacaatccctgaaaaacccatcttcattagtatcatattcactctcgtgcc

SEQ ID NO: 71955 - DNA, 3111 bp, Homo sapiens; identical to SEQ ID NO: 65799
  misc_feature (1)...(3111): n = a,t,c or g

SEQ ID NO: 71956 - DNA, 2849 bp, Homo sapiens
gggccgcgcaaggacccgctgcggcacctgcgcacgcgagagaagcgcggaccgtcggggtgctccggcggccccaaaacaccgttgtaacctgacaaggtggtggcaaacggggtaagccgggaactcggggcgccgcgctcctacgtcttctcccgagttcaaccggtatctcttcaactgtggagaaggcgttcagagactcatgcaggagcacaagttaaaggttgctcgcctggacaacatattcctgacacgaatgcactggtctaatgttgggggcttaagtggaatgattcttactttaaaggaaaccgggcttccaaagtgtgtactttctggacctccacaactggaaaaatacctcgaagcaatcaaaatattttctggtccattgaaaggaatagaactggctgtgcggccccactctgccccagaatacgaggatgaaaccatgacagtttaccagatccccatacacagtgaacagaggaggggaaagcaccaaccatggcagagtccagaaaggcctctcagcaggctcagtccagagcgatcttcagactccgagtcgaatgaaaatgagccacaccttccacatggtgttagccagagaagaggggtcagggactcttccctggtcgtagctttcatctgtaagcttcacttaaagagaggaaacttcttggtgctcaaagcaaaggagatgggcctcccagttgggacagctgccatcgctcccatcattgctgctgtcaaggacgggaaaagcatcactcatgaaggaagagagattttggctgaagagctgtgtactcctccagatcctggtgctgcttttgtggtggtagaatgtccagatgaaagcttcattcaacccatctgtgagaatgccacctttcagaggtaccaaggaaaggcagatgcccccgtggccttggtggttcacatggccccagcatctgtgcttgtggacagcaggtaccagcagtggatggagaggtttgggcctgacacccagcacttggtcctgaatgagaactgtgcctcagttcacaaccttcgcagccacaagattcaaacccagctcaacctcatccacccggacatcttccccctgctcaccagtttccgctgtaagaaggagggccccaccctcagtgtgcccatggttcagggtgaatgcctcctcaagtaccagctccgtcccaggagggagtggcagagggatgccattattacttgcaatcctgaggaattcatagttgaggcgctgcagcttcccaacttccagcagagcgttgcaggagtacaggaggagtgcgcaggacggcccagccccagcagagaaaagaagtcagtacccagaaatcatcttccttggaacagggtctgccatcccgatgaagattcgaaaatgtcagtgccacacttgtcaaacataagccccgacacgtctctgctactggactgtggtgagggcacatttgggcagctgtgccgttcattacggagaccagggtggacagggtcctggggcaccctgggcttgctgtgtttgtgttccacctgcacggcagattcaccacacgggcttgccaagtatcttgctgcagagagaacgcgccttggcatctttgggaaagccgcttcaccctttgctggtggttgcccccaaccagctcaaagcctggctccagcagtaccacaaccagtgccaggaggtcctgcaccacatcagtatgattcctgccaaatgccttcaggaaggggctgagatctccagtcctgcagtggaaagattgatcagttcgctgttgcgaacatgtgatttggaagagtttcagacctgtctggtgcggcactgcaagcatgcgtttggctgtgcgctggtgcacacctctggctggaaagtggtctattccggggacaccatgccctgcgaggctctggtccggatggggaaagatgccaccctcctgatacatgaagccaccctggaagatggtttggaagaggaagcagtggaaaagacacacagcacaacgtcccaagccatcagcgtggggatgcggatgaacgcggagttcattatgctgaaccacttcagccagcgctatgccaaggtccccctcttcagccccaacttcagcgagaaagtgggagttgcctttgaccacatgaaggtctgctttggagactttccaacaatgcccaagctgattcccccactgaaagccctgtttgctggcgacatcgaggagatggaggagcgcagggagaagcgggagctgcggcaggtgcgggcggccctcctgtccagggagctggcaggcggcctggaggatggggagcctcagcagaagcgggcccacacagaggagccacaggccaagaaggtcagagcccagtgaagatctgggagaccctgaactcagaaggctgtgtgtcttctgccccacgcacgcacccgtatctgccctccttgctggtagaagctgaagagcacggtcccccaggaggcagctcaggataggtggtatggagctgtgccgaggcttgggctcccacataagcactagtctatagatgcctcttaggactggtgcctggcacagccgcgggccaggaggctgccacacggaagcaagcagatgaactaatttcatttcaaggcagtttttaaagaagtcatggaaacagacggcggcacctttcctctaatccagcaaagtgattccctgcacaccagagacaagcagagtaacaggatcagtgggtctaagtgtccgagacttaacgaaaatagtatttcagctgcaataaagattgagtttgcaaaaaaaaaa

SEQ ID NO: 71957 - DNA, 1920 bp, Homo sapiens; identical to SEQ ID NO: 65801

SEQ ID NO: 71958 - DNA, 642 bp, Homo sapiens; identical to SEQ ID NO: 65802

SEQ ID NO: 71959 - DNA, 585 bp, Homo sapiens
ttttttttttttaggcattcaggctctttaatgtctgaggatggggggaagaagtcaatggtgaggcttctctgggaaattctgcaggccttgtagttctctaagcccctctagcaacatgtggatatgggctttgatattcatggagtccttggtgaggctgttgctgagccttatgaaaacctatgagttcaacatctgtgaggagagagctcttacgatcaatgaacttgagagcttctgccagtgtcaactccaggaaaaaaccatatcccagggccacatagatgcgtgaagtatctgggaccactgtgtcaacgaagaagttacagcccaaatccacctgcatatataactccgagtgcttagcttcctggagtcgctcaatgacatttctcagttgaaggtatttggccagctgctcatataccttgtctcgatggtccagcacctttcgcaagtcccgctgcagcacgtcactgatgaaggtctcgtagcgcagcactttctcccccgtggcctccaccgcccgccgcttagggggcgtcgccatgatgggctcctcaggccgccagcaataagaac

SEQ ID NO: 71960 - DNA, 1606 bp, Homo sapiens
ttttttttttttcgtatttcaagggtttttattctgagcagtaggtacaaaaaataatgacatagttgtgtctaattctgtatagttcaggcaccctccacaggctgtcaatctctgatttgatctacttttaccagatttaacagatccttgaatttactttactgtatatacttccttcttgctcacattgggaatcaaactaatgctggaaacatgcatcttcagacttcattgaggaattccagattgagacacgctgggatgtggattgagtccatggttagagaagatggattaaatggaaacaaaacaggaaacatgtgcttggcatctaatagcagttgctgagggtcattccgctcttgtagttgtgcctggattgttcgtataaaggccactgttacccgttcttcaaattcattcaggggagtataaaggtttaaaattttgacaatctgctgggtgctgagggaggtacacagggagcagatagcctctgcgtcctcctgggttttcttctttaattgcaggagctgggctgcttggatcagaggttccatggtctgaactgctccactctggtgaaggtttcttccccgaagccactcctcaagctgacttatattgtacctgagttgcatgcctgtgctccaagagcagacgtccttccgcaggagcaggtcattaagagtcactgcgttgatcatgtagaagagctgtttgaatacctgcaggatgatctcagggtccaagccctggtcacacatgactgtatgaaaggcattcatctggcggatgatagcttccaggcggtatgagttatcctcatctgccatgctggaggagtgcttctgggagccagtgggcttcacaccagatagaccctgaatgctctaattttccaacatggcagaaactatcatcggctgtaacacaccctcggcaattttaatgagctgctggtagatctgaatggaaaggtcacgtcaggcacctgacggtattcggtgaggtcaaaattcttaagacagtgttcaattctgctttgcagtgttctgagtcatgaagccctcatccccgctgtactgcttcagacagtgaagaaggcgggcaggtgttggataaccagaatgacgtcatctcaaagtcatcattgtgctttttcaggactttcttaatgccgttgatggtggaggtcagcagggagtgcaccttgagatcgtcgttggtgtagtcccgcgtgccggatgcacatgtagaggatgtaggcggggagacagggcactgtgcccgacagcatctggggcttcaagtctgtcaccaggttccggatgaggagggcctcgtcctctttgtggtactccagcatgccctggaaatccttctctttccgctggaccgtgacctgcctgttgagctcatggcgcttcctctcactctgggccaatgcctgggcagcttctaggtcctgggctttcttcatgtaaatcttcagttgctttttgagcttcctctcattcttttccagcttttctaccagttctttaaggtccagattctcgttggtcagccgggatatttcctgctgaacgccgctcgtgcc

SEQ ID NO: 71961 - DNA, 1297 bp, Homo sapiens
actgagatcgtgccattgcacttcaggccaggcaacagtgcaagactccgtttcaaaaaaaaaagaacataaaccaagcattttttaatctcttaccacctcaggttcagactagacagataaaaaattccctgggtggactctaagaacctacatttgcaaaacaacatttattcttttaaaaaatctatatacattgccatacaaagataccacattgaagcagttctcaggaaccttccagtgagccttctcttataattgcccgagcaagatttcgtgccagagaaagtctcagcatttccaccttggtggtctctatgtcatcatcctggagctgctcggtatcagattctccatgcacaggtcttcttgacgtcaagtcctccagacaccgcatcaactcataagtctgttctgctgagaaaatcacctgtttctgttccaaaaggggcaaggcatctgtcagcagagtcatccagaaagaccgaggggcaatccgagacgtcatcaaggacagaaggagagaagctgcgtcggcaaaacgcttctccccgtacatacggtggaactcgcgatactttcccaggaatgtcagtcggtcactgagcatcatggctggccccaggttgtcaatgagatccaaatcagaaaagcagcctcgctcacagtaatccctgaggaacctgtctgacacgagcgtggcaaaggcggcatccttagcacggatgctccaagagagggcagaacccaggcgattgttgcggacggctttcatggctaagatcttacaaatgctgcgaacttgttcagtcatctgccgctgctcacagatccgcagcaccttcagggctttctgctcggtgttcagaggtatccgctcaatgtgcagctccagggagactcggcccagctcggggcagtaatcaaagtaatcgacccccagctgccacaggctgggatgagcaaacagtcccgaggcgtactccagcaggaggaactctctcatgttggaaccgaaatagaggttgtgtgactggaggagcttgcagtggtccagcaggtctgtcaggtgggccacaaaccaccagttgctcagggcgatgcttttagctcgatacttttggaggacttgaagggcaccaggaaactgccgacatcttgcccaactcccagtgaagtgcaccccagctgtttcctcttgccagacagcaaggaactggcccgtcttcagaggaagctgtaagccaggagggaagaagggaccctgtggaggactcctgccatctctcgtgcc

SEQ ID NO: 71962 - DNA, 1059 bp, Homo sapiens
tcccctcctcccgcccacgccccgctccccgcccccggagccccgcggacgctacgccgcgacgagtaggagggccgctgcggtgagccttgaagcctatggctttgggcccgggtgggagccgccgcaggtgcatgatcttggtgtgtagtagcaaatattcaaacgagaactttgaaggcctgaagtggagaagggttccatgtgaacagcagttgaacatgggtcagtcggtcctgagagatgggcgagcgccgttccgaagggacgggcgatggcctccgttgccctcggccgatcgaaagggagtcgggttcagatccccgaatccggagtggcggagatgggcgccgcgaggcgtccagtgcggtaacgcgaccgatcccggagaagccggcgggagccccggggagagttctcttttctttgtgaagggcagggcgccctggaatgggttcgccccgagagaggggcccgtgccttggaaagcgtcgcggttccggcggcgtccggtgagctctcgctggcccttgaaaatccgggggagagggtgtaaatctcgcgccgggccgtacccatatccgcagcaggtctccaaggtgaacagcctctggcatgttggaacaatgtaggtaagggaagtcggcaagccggatccgtaacttcgggataaggattggctctaagggctgggtcggtcgggctggggcgcagagacaactgcaaggcttctaatggccaatgctggaacaatgacagcaaggaataaataaagtgatatttaattataacccaaagcatactacagctgttcatgatcccatactgacataaataaattgttgaataaattaataaatggagaagaaacaaaccttccaggcagaagaattccaaataatgtatgtagatgctgcacactgagagagataaagcatagctccccactcctaagtgtgggctacacatagtcactttctgctcaagagtacaggatggaaaaaaggaaaaaaagagtaacattccaatcacctgcaccattcaggtgatcgaggtcct

SEQ ID NO: 71963 - DNA, 1386 bp, Homo sapiens; identical to SEQ ID NO: 65807

SEQ ID NO: 71964 - DNA, 875 bp, Homo sapiens; identical to SEQ ID NO: 65808

SEQ ID NO: 71965 - DNA, 1519 bp, Homo sapiens; identical to SEQ ID NO: 65809

SEQ ID NO: 71966 - DNA, 338 bp, Homo sapiens; identical to SEQ ID NO: 65810

SEQ ID NO: 71967 - DNA, 5533 bp, Homo sapiens
  misc_feature (1)...(5533): n = a,t,c or g
ttttttttttttctttgaatgtttactaagcagtcagaaggtgacttactccattcccccaagttccaagncccctgagcatagaggggtttaaggggttagggaggagtaccacaggactgaagaggaagtagagttaagggcttggcaagttgcccactcctatccctcggtctagctgcctcagaactaaaggaggcctggaactaacaagtcactccccttcccagattaagatgaagccagctggcctttggatgcccccagggaagaggtggtggcagcagtggcatgagggatccctctgtaactcccacatgcccaggtcatctgcactggattagatgtccatttcaaattgtgcgtcatcgggtatctcttccctctgtctcctgctcctttcagctcctccagcttggagagaggggctgttgggaggagttgtgaccccgggaatctgagggaggcagcaggggggtgtccgggcaatgggtgagttcttgcactccagcaagaaccttttcgtcgtagatgattctggtgcctctggttaggagaggccaccatcggccgtccaattctcttcttcggtctggttagctgaggtgatgggatttcccctttgagagcagggactgaaggaagcagactggcctataaaagggcaagtcagcacactgtagccacaataggtttaaagggtcttaaaacattaataattttattggtagcggaattttattacattgaacacaagttgaaataagtgggtccagaaaccttgatgatgtagtttcattcctatagtttcatttcactgggtttgatctataccttagcaggatgtttcttcacaacttgaaggctcactaaagatgtgcaaggtcttcttctgcctccactaaaatctcaatactggcccccataataatggcaggatttatttcgattccttatcagaaccaatgctaggggctctcaaatctcagcactgtaaacaatctaatggcttcaaatatttccatatcttatattctcattcacaagaagaaatcctgtgttagaactagaagactcttgagttcaatttcagatgagaaaagtgaaacccagaaaggtgagatgatttgcctaaggccataaagcttcaagcggcagaaatgaaaatagaatttaggctctgactactgactactgctccactgtatccatgctgtctcctcccatatcccttgtatattttgaaagtaattaagttcttacctgagctaggttttatccaaatgttcaggttggtaaaatagcagtaaagtagtgccaggaagaggcaggcagaggaagaagagatttagcaggtgaaatgaggttgggagcaggctactgggatccaaatagtcagaaagaaaggaaggaagtgctggtaagaaggaagggaggagcgtatcctaaagaactactcccaactatacaactgttgttttcctcccaattttcctagggattcctcataattatctcctttctcttcataaattctacttactgacctgaaataaaatttctcatttggttgtcctcaaggtgcagaatatggacttaaggctcctccagacaattcaaatgtattgtagacagttaagatagaataaaactcacctttttgtcccactgaataatttatttaatattatttctcactagtatatatttcatcaagagtagtttcattcatttcaccaattttaggtgatttttcttgttgctgttaatggtaagtggaaacagcaagatacacaggtgatccaaggagtcttttgtgccccacccaactgcccccacaaaggtcaaggggccccttaatgatacttgatgtggttatcaatcactacaaagtagtagcttcaataaacaacactttcaaaatccattcaaaacaaaacataagacataagcttaattaaggaagctttctcatatgtaagatgatatagaagattaaagaagcaggtatatctgacacagaacaaacatggtgtgtctgatgtggtcctggctttaggacctgggcagagaaaattaagaattcctgttggcataagtgtagaaaggtgctgctaatatagttctgtccctagttactactctttctctgtgcatccttctttgccttcatatgagttttggcttctccatcagctccaaacattttcttgttttcttttctgtattgcctatactgaccaggaaaaattcagctatattaaaacacaaataagttgatgactatacttttcagtgggataacttttccttctctatgctgattctcggcatagcctatggtttggccaaagcagcccattccagggttcctctgtttagcttgttaaacatattgactctccatgcttagggccatggaactaagcctggaattactcacatatttataaatattactcagctgattcaataatacaacagaatgacaggagtcacctccttatgtcccaactcatataaagcttaaaatatctataaccagacaaatctttcagataaaaaaggtcaggaagcacagaaggaacctgaagttgataatttgggtgtccctacatttgtttagtgtcatctgatttaaatccaattgttcttattgacattctcatgatccatagagaaaaaacctatcagtggcctatctgctagctaaagtcagataagacacattgccagagcttgaaactttctcatatgttaaaggattatggaagacaacaagggaacaaggaatgtttaacacagaataaataggtaaatagtcttaaaagtgcttttttaaggcagtctaagaagggactcaagtgttaaatgtgagaagcctgttacaaatatagtattaaccatctggttcaatataatgtggattgagtggtacctgcatgaccactgaaaggatcacaccccacttctaaagactgttcatctttttattgaatattctggtaaatatttcacattaatacaggctacattacgtagagccactatatgacaagaaatttactcaactttttccttttaagtatgtaaacaattatacatgtatttatcaccctaaaaggttcgaaacatgtaatcaactaattctcttctgcatacaagtagtattctggtatgtttagccaaaaagcactaaggtcatatgaatcttaagttcaaaatgggctaaactacccagagaacataatcagggtggataggaaatcaatttggttcttatacatgggggcaatcaaattttccatttgctaaaagcctcaggggaaaatttccttaagggcacattaaaaaaaaaaatcccccatgggttcttcccaaggtcataggtttcttaaacaaggctaaagagtaaagaccttctaacttaggttgacatatttgagatgcatggttccaatatgaggtgcccacgtgccaggccaaatctgaaaagggggaggaaaaattggaatttctaattaggaatctttagacagttacaaaatgaatatataaatgcaatggcaattcactgtttctgcctaggaagaatacacatatattaaataaagtgttcagtagcatcatcttgatattgaaaaagcaatccagatcgaaatggtcaattatgacttttgatattcagtacttatacttctcacaaaacaaaaagaatgatgtgacaaatctaaaaaacaaaagagcattaagcccattttacctgctgggcatcagtgcattcagttgaattttggataacttttatcatagggttccaagcaggatctggattgtgaagtccattaaacagagggcctcctggaacatcagcaagctgaggatgagagggtattatggtgcctccatacatggaaattggcagacctttagaaaaatccacaaaaccacttgccataggctgatgaaaaatgttagagggggctaccattccagaatcatctctctccattggctgatgttgggagaatgtgcttgggtctgataattgttgatgcattggatggttccccatcacagattgcgaccaacctgataagccttctgacacagcattgacaccaaatgaccagattccactgtgtccaacgggagcgacaaaactggtccccgccggggcttgtgcaacagaccctccttgccgaattcgggccagtctctctgttccaattgggggaggtatctttcgatcttgactggcactgactccttttggttggcccaacgttggtggggcagaagtggctgaaagaggtgaagatgatcccgaagaaacagatggaataggagagtcacatgagtttgaggcgcttgtccaaggatggggagaaaaatgttgtctgttgaaactaggagtcccaacaggagctggcccttgcaggaaaacccttgttcctggtatgccggaaaaacttgccagaggagcagaagaggaagatggggagctgcctgatgggtcaatggatggtaacccaactggaactaattagaaactcgcctgggaaaggtggtctgaaacccaggtgcctttgagttatccagggtgccatgttttccaagtgtcccaagccactgagttaccccaggaaacgctgacctgaacagtgaaagaggcatctgtagcaactcgtgaggacagtggaccatctccccagccctggttagctggcacctgactactatcaaaaagactgctgaagtgattgaaaagtgtggctgggccaaatgtaggtggcaaagacttatttgctgggtttatgtgcatctgagaaccattcataatgttcacagctgaagaaacgtgcactgcagctggtgggccttgaggtggtgttaaagtaactggattcgtaacaaaaatagactggggatcctggtgaatagttgcatttggtaccatggagtaaaaagaacctctgggctgcattcgatcgcaagggggaaactcgaggtgctggtacagctaactgaggtaaattactggtgtcctgattatcagcagcaaccatttctgggtgatgtcaaagtcaatggagcaggttctgagttagatgcaaaaggcattgacataggacttaaatcagacacactggatggctgtgcctcctcttgtgtgttactggaagtaggagtgggactactggatgggtgagtttctggagctcccggggtgttgctggcagagctactgcaactgtttgcagttgaagatggggtacataggtttgccatgggctggtcctgtgtggacactttctctttggtgggtggcacagcagagaaagactccatcttttgtgaagaaagctgtgcttgaggaagtacttgcaggtaggaaatgtgggtggggagcttgccccgcttagtgattaggtgcagagggagacagaaggccagggaactacaagtgcttgtcacagaagaaatcactgttgctggaggacttgtcttaggcacacaggcaaacaactgc

SEQ ID NO: 71968 - DNA, 676 bp, Homo sapiens; identical to SEQ ID NO: 65812

SEQ ID NO: 71969 - DNA, 1315 bp, Homo sapiens; identical to SEQ ID NO: 65813

SEQ ID NO: 71970 - DNA, 1218 bp, Homo sapiens
cccacgcgtccggccatacaaatgcaatgaatgtgataaaaccttcaggaagaagacatgcctcatacaacatcagcgatttcacacaggaaagacttcctttgcatgtactgaatgtggaaaattctctttgcgcaaaaatgatcttattacacatcagagaattcacacaggagagaaaccgtacaaatgcagtgactgcgggaaagccttcactacaaaatcagggctcaatgttcatcaaagaaaacatacaggagagaggccctatggatgtagtgattgtgggaaagcttttgcgcacttgtctatccttgttaaacacaagagaattcacaggtagtcattttgggaaagcctcttgccagatgtaggcccttaagatatctgcaaagaagagtaatttcatgaatgcagactacatggttgtttatttagtgatcagttacttcatgttttgtgtcagagaaaacatgtacaaaacatttgagaaaatattttaggacattatgtctaaaaattgtatactgagaaaaatcctatgaatgtggcagactataaaagcctttggtgggaagataaaccccctcagaagtgatcatagatcatgaataaactactaattcgtggaaatgtaataattataggaacgtctttgcccaaaaataaaacctcaacagattgagagagttcacactggagaaatactttcctctggcagtgaatgtggcagggttttcagtaaaatgttttgcctcatcgtgtgctaggaaataatgcagaaaaaaactaatgaaaacattcaatgtagaagacttttaggaaaacaacagagaatttaatgaaggaaagaagccttggcaaaatgatggatgagagctttctgtcacaattctaaccttaacagataatatgcctcatgtgcatttgggaacaggatagcttgagccatattcctagttgccttgtcactgattttatacattttaaattgtgacttcctctaatcacgaactaaaatttaatattgtatataataccggagtattttatgcctgcctcattttattatatgattagctcctgcatttctttagttctaagtttgtgttatttcagaataactaaagtacttcagaatgaaactggatacagtatattcaattcataagtgtaattgaccatacttgaatatgtttaagtttataagtaacatct

SEQ ID NO: 71971 - DNA, 2113 bp, Homo sapiens; identical to SEQ ID NO: 65815

SEQ ID NO: 71972 - DNA, 4352 bp, Homo sapiens
  misc_feature (1)...(4352): n = a,t,c or g
ttttttttttttaaataaaagttttattcggagaaaaatagaaccaccacgtacacagggancaacaagagcacaaaaattcaactgatacagaacaacaactgaaattcaccaattatcccaatgtagtttgcaattacttttcagtttcttaaacagctccccctcaacttttttttttttaacagtcttgctaatttttcagctgaaacagcatcaagttttcaaagaattaagagccctcggggaggggaccccgcttttcaagatactgaaggtgacatcaagagtctcctcctaacagggaccaactcctatcctaaaagttgcttacgaagtaacttgaatcttgtggttttaaatagtcctacatctccacagaccatccaggggatgagtttagaacactgttggttggatgggtcccggtatgaagagaggggtaaaccaaataggctggcatttgccttgtcaagctgagccccatataaagaaatccagtgaaggaagctgaggaaaatataggcaatggctggctccaataaggattaccaagttccgaataccacatatagttagacaccagtgtgcaagttgatgcaactagaaagaaatagacgactttttaaaatacctggccacaggtctttgagaactcaagcaaacaatcaacagtagacacaagagtcaaaaatcttctcaggttgaagattaggacataggtaatcttcctaacggctccaacaggcaaggaaatatgctgtggcaaaaagcattaagtagttctgatttttaacgagcataaacaaaattttctgcttctcctcccttcaaagcttcaaggaaatagaaacaaggaaacaaaataaaaacaaaaaaaaatcagtgacagtaaagagaagcctttgcttgaattatcaattcgaaaaacagtacttttgccattttgtatatataaacaatcttgggacattctcctgaaaactaggtgtccagtggctaagagaactcgatttcaagcaattctgaaaggaaaaccagcatgacacagaatctcaaattcccaaacaggggctctgtgggaaaaatgagggaggacctttgtatctagggttttagcaagttaaaatgaagatgacaggaaaggcttatttatcaacaaagagaagagttgggatgcttctaaaaaaaactttggtagagaaaataggaatgctaaatcctaggaagcctgtaacaatctacaattggtccaagttgaagacaaaactgtccaaacaacatttaaagtctaaagtatgttgaaaactagttgcaaagtttttgctcctgtaacaatttacaaaacacgttcattttggtctcttttgcaattttcttattgtattcatttttaatataaagagttggatttttctcttctatgatgttcctctagtacaactgatcattaattttctactttagctatttttataagtacttgttaatcagcacagttaacttggggctaagccatatacacacatcccatactcataaatgaaaatttttaggatgtgaatatacaagatattatgtaagcaactgtccccctacttgaaaacttgtttccaaataattttttttaaaaaacatccctttcagtgtaacagaacatcacctagtaaaatatcaatagctatgacaattcatttctcttttcaagggaaatcacaaaacgggtgaacaaccaagtcaagggtggtttttctatttgataaatacatccagaactctgtacagtaaataaagtttgcatgcagtttaagtatctttaaatgacattttaagcaaataaaccttttgcttcataattaatggtgtgtaagaaccctcccccctttttaatagccacagggatctctttcccagttccaaagaggaattcatgaagaccaggtacgttcttaagtgttttctgcccatcatactaaataacatgcaaagagttcaacaacattcttcttaaaggtaagtattactctttaaaatgggcatgttaaccaatgagaaaaagtccactcaactatttccattaattacactgcttcatttggtcatcggtagtaaaaaaggagtcaaataatattgaatcaacaggttagtttatccactggctactgcatatgacaccaaatgctgcaaggccaacattctatgcaatatagttgtactggtttggattttctttatctctttccatgtagtcccggtcaattaaagattctattctcttcttaagatcagcaggctttactggaaatttcaactggttgtacacttctgaaacaaggagattgtggctaagtgtctttctcatcttcataattcgaacaattgcagcatcaatttgatactgtctgtcttgaaatactctttctgtagtgcttgcttgttcttcaaccgtttctttcatctggatttgattgatctttatcctgaaaagtttatgtttgaaatcatcattacaaatgaacttgtcaccatcttcaatgtctttgccctttggatttttcgccagaactctagctttgccacaggctaatgactgcagtgttctccttaactctccatcctctattccagttgcctgcttgatctcttctaaactgaactcctctccctcattaaacattagcagcaccagtgtttgaaaaagagagacctggagttcctttttaccctctttaaattctgcttttaacacacagtgtcctagggttgactgccactgaagtttcctgccactatgtttgcctaggtaaaatgtcttgaaaatctcctgaagttttaccatctctggtggtaaatgaacttccataggcacatatgtcggccaatagcccattgtcaggatattcacagttaactcaatatttcccggaacattctgattctgcatatactgtttgaactgaatcatgatgtctttagaaagttccatgtctttaaacattccttcaagtttgctggtgaaagcagctccgcattcatgtttaagtttggacagcattgatttttcagcatctacagatgcactctttccgactaacaggcgcttggctaaatctttcttatagaaggcctcaaaaacatccttgccatagataaatctaaatatgatcataattttatccaacattttctcaagttcttcatctgtagcttctttgttgcctgcacgaagttttgaatctacatacttagctataagttcagctggtttatttggtcttttgttaatgaacgtttcaaatgcttctttcatggcattgataaatttctcattcttcagaaagcagatatcaattatatggtcaaccttatctttaaaatccagcaattcttgaaccatggttttatctttttcaggattaattacaatagtgctgccaaatgccttgatatattagatccactgctgcaaaagaacctgaactccacctcgaactctactgaagagctgatacagaagagacaaatcttgaattcggttttcatcaaggaggttatttaaacctttcctgaagaattgctgttaagtgttcacctagaagttgtttttctacagtagcaattaatgacttctgggtggtctgatctaagtaagtaataagtctgtctgcttcttcttctagacgtttgttaacatgatgtagatattcaggaacctctctttcttgcattaatttttggccttcagctgcatagagccggttagtttcttccaaaaatcgttgttcaaaagaatcttgataaatttgcaaatcagacagcatgcttaaaaggcttcgaagtaaacttctatcaattgcttcaccattcctttccctctcaatcaagagaagaatgccatcaattgtcttattctgcactttctgatcacttataatatgagccctaaataactccagtcccatgtcccaaatggagggtagcattgaattctgaagaacgtaagttctatccagaaacaaaaaaatgctcctgatcatgatcatttgtctgcaatggttttgccagcatctatcaatcttctttaaaaaaagaacgctatccaatgaatcctctctgaattgatgaatctgtgctttgatgtgatcttcgcagatctgtctcagctgtttgtacaagtttgcagaaatcttgtaagaacagagattttctacagcctggtagagttcttctaaattgtacttaattgaagtactattctgaatagcttccactgcttctttcagtttttgccaggtttcatctgtgtagttttctggtaatttaggcttatctgcaaaatccggatcaatcat

SEQ ID NO: 71973 - DNA, 5153 bp, Homo sapiens; identical to SEQ ID NO: 65817

SEQ ID NO: 71974 - DNA, 2142 bp, Homo sapiens; identical to SEQ ID NO: 65818

SEQ ID NO: 71975 - DNA, 1327 bp, Homo sapiens; identical to SEQ ID NO: 65819

SEQ ID NO: 71976 - DNA, 1502 bp, Homo sapiens
ttttttttttttttctattgcttaatagaaaacatatttttattccgtactttaaaaatatagactttctagcaacttataaatttctattataataataaattgatactttgagccaagaaaacaatataaccaaaaattcatttgttccctttgtttaggggtgttttacatttatgcataattttgcttttataaaagatgattgttacaatcaggtatacaactacttggttatgtctaagttctgtctcttaaaatatgttcttttagagaattcatttaatcatcttattcttttcttcaattttctccaaacagtggtagaagtactatttgatagacagaataaagaaaattgtttttggccacacccagatcatactgatatctacagcatagtcctggctacaggggagctcaactctaactcgtgaagcgggcctggtttagaaagtaacaatgaggtagtaactcatgatagtgctagctgttatcaaaaattaacaactttaggtatttttgttttgggtttttgcggtttaggtacatccaaaatttcttcatagtctgcactcattccctttgcccagcgaccaactgtgaccattcgctctgaattctgactttcagggcaatctttctttaaatgttccacagagccacaaagtttgcaaccgccaccatcagcatagagtcctttgggattatcaggacaagatctagacaggtgccccatttctccacaaacaaaacattttgcaaaaggaaattcgccaagagccgggtctactttagccttacacttggttatttcgtgctctgtggacccacacctgtaacatatcccagtgcccatgtcttgattttcaagggcggcggggcaatctgcaattccatgaccaggttttctacaatggaaacacaccattgcatttttctttgccgcttgtctttttaatcttcttccttcccgtcgactgtctttctttaaagcaactgcaatttcttcccttacttcctcactgtctgttgctataatttgcccattgtgaaccatctgtgaattctgtcttaggtattccatgaatccattcacatcttcatttaagtactcttttttctttttgttctttttatgttttgcttggggtgcatcatttttgagggatagcctattggcttcaagttgtttacgctttggtaggttttggcttgttccctcaaaggatcccttcttcatgtcctcccatgatgttgcaggcaagggtctcttgttatatgtggtactaactcgggcccacctggtcataatttcatcagtggtaccttatcaatttttaagacaagcaggggtggttagccatcaacaacaaaaacaacaaaactaaagagacatgctatatcactatatgtcacatatgcccatatgttaaacttttaattattaaaacactttttatttcagttagatatctgtatacatatttaatggctataat

SEQ ID NO: 71977 - DNA, 1188 bp, Homo sapiens; identical to SEQ ID NO: 65821

SEQ ID NO: 71978 - DNA, 2201 bp, Homo sapiens; identical to SEQ ID NO: 65822

SEQ ID NO: 71979 - DNA, 3244 bp, Homo sapiens; identical to SEQ ID NO: 65823

SEQ ID NO: 71980 - DNA, 989 bp, Homo sapiens; identical to SEQ ID NO: 65824

SEQ ID NO: 71981 - DNA, 914 bp, Homo sapiens; identical to SEQ ID NO: 65825
  misc_feature (1)...(914): n = a,t,c or g

SEQ ID NO: 71982 - DNA, 1950 bp, Homo sapiens
ggcacgagcacaatgtttgatgctggtgcacatatacaatacacacatgcacaacactgtgtctgcaatgatataatagggctaccaagaccaagagagtaaatatcaacttaagaacacttctaactttagaatttcattttattaaacatacttttaaaacaagcacctcttggcaataaaagcaaaaacaaaaaacaaacaaacaaaaacccaaccaaacaatagtactccttccactctatgctaacggaagacttctcacaccagccagttaaacaatgaaattcttaaacacgcagcctgctggggctgcatgcagagctaaaatgcaggtgtgctgacttcttggagctggagcagaggaaaacatcaaaaagcatatctggaatctatcacagctttctttcttaagcaaataaaaatgcaaattagtttcataaccacaattcaatttatcaaactttttctgaagaattttcatttaattatgtatacataacaggaaataaaactttttcacaaacactctcaaggcttacgattatcaagaaaatgacaaaagtaaaagcaggaggaatattaaacacatggcggggaggtcaatttccgtttctgctcttaaaaagtaaaaaaatcaccatataattaagtacaaaaacctgcattgaatgacaactgctggtgtatttacttgatcagaaatgaagaccaagaatataataaagccctatgataatattcaccgggagcactcccctcagtgtgtgtacactaacaggttggcaaagtttctggagcattagcttatagaaacacaggagtccttggttagctgcattatatggaacgttctcttctgaaatgcacccacgattcagtttcacttacaaattgcaaactaaagttatctcttcagaaaaatatctgtttggcatctcctggactttgttccattggacagtagggacattttaatttgctaccattaaacattttattcagggcatctcttgatataatatgaccacagaccaatttcatgggtggattgttatctgttgtttgctgacgaagaatggggcaggcaaatatagagtgatacccagcacttttttacccaaggtcccacttcaataggtaattcatctttctggttccaaactccagtacactgcctctgttcaatcacggctttgatgttaattaaagctggcagcgccacacaacctgctgagaaactgacactgagaggggactccacggagagccccaggagggcacaagcatcccgtgtaaagatgtcacagatatcagcccactggtttgcatcaagtaggtgaacatatggtgagttctcaatcccttgtctcaggtacacaaggcttcccatcaaaacctgaatgtctttttgatgatttagggcaaatggctgaaaatttttagcatattgtaatgcctctcgctgatttgtggttccacccattaacaagctaataaaatacagtctgtgtagcttaaattccaaggagctgttttgagctataagcatttcccggtttgacactgcccactccagagcaggtctcagaactctgacctttaatgcctctaatattctatttaactccacaaatggttccttctgacttgggtctacagaaagaccagattcctgacagagctcctcagccacatccagcattccttgtcgaaagaagtgctccaccatcacctcattgagaagcctttggctgtctgcctgccagcagccatctattcccacactgctaatgtcagaatcaaaattcttatcaatggcttttccaacccgagaaacactgctgtggatgtctttgtggtcggaggccaatttttgaacagtatcctttattcttttacagcactgtgtcaaaacaagtgaaagtgtccctgataattcagcatctt

SEQ ID NO: 71983 - DNA, 1819 bp, Homo sapiens; identical to SEQ ID NO: 65826

SEQ ID NO: 71984 - DNA, 789 bp, Homo sapiens; identical to SEQ ID NO: 65827

SEQ ID NO: 71985 - DNA, 1264 bp, Homo sapiens
ctctagtgctggaaatttatctttgacagaggaagaatgcttttgaaaacagttcttacgtgattttatgtaacttaatttgccctggaaaggaaatgtctcgtctctggtatgggaaaaaagggagaagacatcaaccaattaatcataaatacactctgattactacaagggaagacataaattcaaagcaggttgctacagtgaaagcagacctggagtctgaatcttttcgaccaaacctaagtgatcccagtgaacttttactgccagatcaaattgaaaagcttaccaagcatcttccaccaagaacaattggctatccatggactcttgtttatggtactggaaaacatggcacaagcttgaaaactctttatcgaacaatgacaggtttagacaccccagtgctgatggtgattaaagacagtgatggacaggtttttggtgcgttagcatctgagccactgaaagtgagtgatggcttttatggtactggagagacctttgtttttacattctgtccggagtttgaggtctttaagtggacaggagataatatgttttttatcaaaggagacatggattcactagctttcggtggtggaggaggagaatttgcgctttggcttgatggagatctctaccatggaagaagccattcttgtaaaacgtttgggaatcgtacactttctaagaaggaagatttctttatccaagatattgaaatctgggcttttgaataaataaaatgctctctgtcttagcaggagaatggcccaaacctgacatggacaagcattgtttggaaagttcaagaagcaatacagtgtaacatgtcacttgtgctttaaaattagtctgtatcaccatttattacagttataattttggagtttatttttcaaatcatgttcttgtcccagagttctttaggttaacactagggactgcgtccatgtactagtataacagcttgggtttgttagaatttgggcaacattttgattataatgacaacttcattttcacatgttactcagttccctaataggatggtgctcttttgttgaacctgtattgatttttttttttttaactatattgattcgtttactaaaacagtctaattggggcattgaggaaatgaagactggatacttctgtatctgtgaagttggcacaggtaacatttggacatgttcatcttattcttaggaaggaaaaaatcacttgccaaaataatacatacttcatagaccaa

SEQ ID NO: 71986 - DNA, 1265 bp, Homo sapiens
  misc_feature (1)...(1265): n = a,t,c or g
tttttaaaggttttaattcaatattttattatagtccaccgtatataagataatatttcatgtagggttacactgatggatagtctagncaaaagaaatatgctagcacagggtgggtaactgaccaactaaggatgcactgaaccaacagactacttcagtaagtccttgattattgccagcttttctataatgttcaggttctcaaaggtcactgaattttataattatctccaaacaattttcttcatgggtcatttaaggctttgtctaaacaggctgggtgtgttgccaagcgacatcaaccatctcctctgcttaattctgcttccaaaataacttcagtggcaccagaaaaatcagcataggagtgaagactgttatcgcctgtcagttctacttgtgctgtatcagatcgcaatttccattctactgttccagtctgaaaagtttgactacttgttctaatagaaatgctatctacttttaggccaactgacccacactcaaacttccaggaaatataagcaaaagatgatccttcctttcgggccaaatataccatgtgccagtctgtttcaacttttctgaatatagattccattttccacacgccattctcccatccagaaatggtttgattgttatttgaaactcgaacataacgatctttcacaatattgtaacaaaggtggagctgtttagaaatcttctcattttcacagggaataaacaaggtttcttttctctgtagacccatttcacctcgggctactctccaagccactgacccagatattcttcccccaagttctccaggtttaggggttttgggagatataaattcaacaagctccacaattatcctctggagaagttctttccttctgttttctgacaaaaacagttgcctctgcttattaagcccattaatagtgtctcgaagtaatgcttctttaaccttagttcttctggcaatcacctcttcatgtttgcaggaatatcgccaagtgacatcaactacctcatcttttgaaaatgctatgacataggaaagcttcttgccccatcctatttcataaaggagtggcttgtcacagacatcttcacatgcatcacagtgcagccaccgctgctgagaaggagaatagacttctgtccagacatggtctgtgtaatcccaaacatagcgagcttcaaaccctacagctcggcagcacagtgtaaaacaattggcccactcgccacaccgtccacatcttgtt

SEQ ID NO: 71987 - DNA, 1113 bp, Homo sapiens; identical to SEQ ID NO: 65829

SEQ ID NO: 71988 - DNA, 862 bp, Homo sapiens; identical to SEQ ID NO: 65830

SEQ ID NO: 71989 - DNA, 1856 bp, Homo sapiens; identical to SEQ ID NO: 65831

SEQ ID NO: 71990 - DNA, 2569 bp, Homo sapiens; identical to SEQ ID NO: 65832

SEQ ID NO: 71991 - DNA, 1022 bp, Homo sapiens; identical to SEQ ID NO: 65833

SEQ ID NO: 71992 - DNA, 397 bp, Homo sapiens; identical to SEQ ID NO: 65834

SEQ ID NO: 71993 - DNA, 1106 bp, Homo sapiens; identical to SEQ ID NO: 65835

SEQ ID NO: 71994 - DNA, 1999 bp, Homo sapiens; identical to SEQ ID NO: 65836

SEQ ID NO: 71995 - DNA, 2646 bp, Homo sapiens; identical to SEQ ID NO: 65837

SEQ ID NO: 71996 - DNA, 2560 bp, Homo sapiens
gcggccgcggcataggggggcactgtggacttgcgcgagtatgctggctgtgtcagtgctggccgcagtccgcggcggcagacgacggtgaggcgcgtccgcgagagcaacgtcctccacgagaagtccaaggggaagacgcgcgagggagccgaggacaagatgaccagcggcgacgtgctgtccaaccgcaagatgttctacctgctcaagaccgccttccccagcgtccagattaatactgaggaacacgtggatgcagcttgatcaggaggttatcttgtggggatcataagattcctgaggatatcctaaagggaagtaactactccctaaagaggtacccagcagaaagtgttactgtctggattgaccccacttgatgctacacaggaatattacagaggatctttcgaaagtacgtcactactatggtgtgtgtggctgtaaatggtaaacccatgctaggagttatacataagccattttccgaatatacagcttgggcaatggtagatggtggttcaaatgtgaaagcccgctcttcctacaatgagaagaccccaaggatcgttgtgtctcgttcccattcagggatggtcaaacaggtcgctcttcagacttttggaaaccagactacaattatcccagctggtggtgctggttataaagttttagcacttttggatgtgcctgataagagtcaagaaaaagctgatttatacatccatgtgacatacatcaaaaagtgggatatatgtgctggtaatgccatcttaaaagccctaggggggcatatgactaccctgagtggtgaagaaatcagttacactggttcagacggcattgaagggggactccttgctagcatcagaatgaaccaccaggccctggtcagaaaactcccagatctagaaaagacaggacataaatgagcataactgattacagggtacagttcttcacagctgaaatggttagcctgagatgctggaagcttcaaaggattggtggagactatgcatggttaaggccatcccgaactttttaaagtatttatgaagcatcagagacttattttccctgtaatagaatgcaaaatcagggaaaatgggttgctttgtgtctcaagtattgtctttatttttgagactattttcatacagttgtcatacacaaggcgcatatatatatttgtgaattaaaatctgtagctgagtctacattgttatgagtcaccattttcacacaacatcatgaatcttcactgttagtactttcatatagaattcggttgaaggaaagattgatttttgtgtagatgtttaatataactttacaactatatctcattgaaaataaagtcattggggatttttacctctaatttggatggaaagcacaagaagccacacattcattaatatgcaacaaatgttgtatttatgttactgaatatttctatggattaaaatagaaaaagtttaattgattttttcttttaaattttaataacaggttcaccagctggtagaaaatagagacacatgatgactttgcattggtaataatttcctgtgtgtatgtgtgtgtggttgttttgtttttataaagaaatgttgttgtttgtacccatggagtttatcatttttgccatgcttgctatttttctatttacccatagagaaagatgctatggttgatccttttccttctgtccatcaacattaatcattaactttggaagggtcgggtttaaggtttcagggttagcactatagttttggttcattttctcattaacgataaaatatgctgtaaggcactataagaatataaatgattctattacaattgaaagttacttgacattacatgaattgaactgcctttcattatcttcagacactttgttttagtattttttttttaatttgctaggtttgtatatagaagatcctttcattatcaagaatgagtatggttgcttttgccatggttgcttttactattaataaatgtatctagcctacccaaactctgtagtaacttttgagattctcttaatttcccctcagattaaaatagagaaggttgaaggtactttttgatgaaatttttttctagtctggttagaaaaaaaaagttgtgacatattcattgtgttaccgtaactagaaccttgctttgtgaactgtctttcattgggatgtatggtttctctcaatgtgaaatctggaaacttcatgtaaactacccatgccgttatttcatgtgactccagtgcccttgtattccataacatgctgatgagagggatttctcacggtttctttctttgctaaattttttaaccataaagcagcttaccctttattttcccatcttggaagtaaaattgaccaaagaatgtacgttctagcctggtggaatgtgcatactttaggtttgtatgttacattgtccaaagccctttactttcttattagtaaactgaatctaatatgacacaaatgttttcacccaatctcttgcaactggtcaaattcgagaaggtgtg

SEQ ID NO: 71997 - DNA, 1673 bp, Homo sapiens
ttttttttttttatcatcaaatcggatctttactcaactatggtgaatgccatggaacataatacaaacatggatgttactggagtttatatttttaaattcaaaattgaaaaaatacaaattgaaaaatagaaatatttaattattaaaattttctctttcataattctttttgcgcctttgagttgaagccaaaaggctggccgtcttcccttccacaccgagatgtcagtgtcaggcctcgggtggcacggtggggacgggcagtttagaattcagccttgaatccttcaactgggaacgatgtttaatttgattcaggttcgtaacggaaaacagctgttcacaagcgtgggtactcccaaacacagatattcaggacaactactggagatagttgtagaatctcaccatcttcacacagacttgtatttaggaaccagcaccgtattgcactgtagttcaattactatttatggtctgcattcacacaagaaacatctgccaacaaaggcaaactggacaatgtctgttccttctcatgagtctggattccgagagcctttgggggaatttggtcttcaaccccaggacgtaggtgaatacagtccgggccacctctttcatttctgaaagccgactgcagcacaggaaagagtaaaggttttttttccttgccggtggattccccaggaccaagcatacaccatcatacattcaagtagctgtttgtggacatccttgcggagaaatattcagtgttcagaacggtcataaccttgaccagaagtctttgactaaccttctcaggggaacccactgtggcttttgcctgatttaaaatgaaccaagttggttaacttgaacagttcagatttcttccacaaccaagtcacagagcttctgtgaaatctctcaggtcaagtcaccatcaactcactcgtgactgaagtccaggagcggaagtgtcgagagcatcgcggtgtggttctggttcaagttgcttcagaaccaagtcaaactccttgatgatggatgcaacggaccccaacttcccgtgtccttgccaaaatgtgtcgccttggatcaaggtgtcctgccaagtccccctgtcatgacgctgtcctgtagttgtgcttcgggaactctggccagtctatgtgaaacttttctctcaatatacaaaaaaaattagtcctttcccagtgttgggcctgccttggcaccatgccacagacttcttcggtcacatcaagattcttaacaccacaaataaataaagctaactgggtggtaatagtttatgagcagcgaaagaaaaggccacaatcaatttgactctttcaagcaactggacttgtaaatcccccgagttatctccaactcactgtgcaacgcaaatgcccgttagacttaaataacggtctcaacagtcatgtgtttctgtgcaggacacgtcactctgctcctttataaacttgccatctgctgtagctctgaatgcccaggtcattcttctcacgtgattccggaacggcgtaccactgccgcgccacttctgttaattcgcttttcaaaacaaaccctattgacatttgagtccctttttcagttcgttgaggatggcatctcgagtctgttctgtgtactggtcgtagctcttactatgcttt

SEQ ID NO: 71998 - DNA, 2142 bp, Homo sapiens; identical to SEQ ID NO: 65840
  misc_feature (1)...(2142): n = a,t,c or g

SEQ ID NO: 71999 - DNA, 2502 bp, Homo sapiens
gggcaatggcatcaacgtcctcaaaattgcccccgaatcagccatcaaattcatggcctatgagcagatcaagcgccttgtttggtagtgaccaggagactcttgaggattcacgagaggcttgtggcagggtccttggcaggggccatcgcccagagcagcatctacccaatggaggtcctgaagacccggatggcgctgcggaagacaggccagtactcaggaatgctggactgcgccaggaggatcctggccagagagggggtggccgccttctacaaaggctatgtccccaacatgctgggcatcatcccctatgccggcatcgaccttgcagtctacgagacgctcaagaatgcctggctgcagcactatgcagtgaacagcgcggaccccggcgtgtttgtgctcctggcctgtggcaccatgtccagtacctgtggccagctggccagctaccccctggccctagtcaggacccggatgcaggcgcaagcctctattgagggcgctccggaggtgaccatgagcagcctcttcaaacatatcctgcggaccgagggggccttcgggctgtacagggggctggcccccaacttcatgaaggtcatcccagctgtgagcatcagctacgtggtctacgagaacctgaagatcaccctgggcgtgcagtcgcggtgacggggggagggccgcccggcagtggactcgctgatcctgggccgcagcctggggtgtgcagccatctcattctgtgaatgtgccaacactaagctgtctcgagccaagctgtgaaaaccctagacgcacccgcagggagggtggggagagctggcaggcccagggcttgtcctgctgaccccagcagaccctcctgttggttccagcgaagaccacaggcattccttagggtccagggtcagcaggctccgggctcacatgtgtaaggacaggacattttctgcagtgcctgccaatagtgagcttggagcctggaggccggcttagttcttccatttcacccttgcagccagctgttggccacggcccctgccctctggtctgccgtgcatctccctgtgccctcttgctgcctgcctgtctgctgaggtaaggtgggaggagggctacagcccacatcccaccccctcgtccaatcccataatccatgatgaaaggtgaggtcacgtggcctcccaggcctgacttcccaacctacagcattgacgccaacttggctgtgaaggaagaggaaaggatctggccttgtggtcactggcatctgagccctgctgatggctggggctctcgggcatgcttgggagtgcagggggctcgggctgcctggcctggctgcacagaaggcaagtgctggggctcatggtgctctgagctggcctggaccctgtcaggatgggccccacctcagaaccaaactcactgtccccactgtggcatgagggcagtggagcaccatgtttgagggcgaagggcagagcgtttgtgtgttctggggagggaaggaaaaggtgttggaggccttaattatggactgttgggaaaagggttttgtccagaaggacaagccggacaaatgagcgacttctgtgcttccagaggaagacgagggagcaggagcttggctgactgctcagagtctgttctgacgccctgggggttcctgtccaaccccagcaggggcgcagcgggaccagccccacattccacttgtgtcactgcttggaacctatttattttgtatttatttgaacagagttatgtcctaactatttttatagatttgtttaattaatagcttgtcattttcaagttcattttttattcatatttatgttcatggttgattgtaccttcccaagcccgcccagtgggatgggaggaggaggagaaggggggccttgggccgctgcagtcacatctgtccagagaaattccttttgggactggaggcagaaaagcggccagaaggcagcagccctggctcctttcctttggcaggttggggaagggcttgcccccagccttaggatttcagggtttgactgggggcgtggagagagagggaggaacctcaataaccttgaaggtggaatccagttatttcctcgcgctgccgagggtttctttatttcactcttttctgaatgtcaaggcagtgaggtgcctctcactgtgtatttgtggtgggcgggggctggaggagagggtggggggctggctccgtcccctcccagccttttgctgcccttgcttaacaatgccggccaactggcgacctcacggttgcacttccattccaccagaatgacctgatgaggaaatcttcaataggatgcaaagatcaatgcaaaaattgttatatatgaacatataactggagctcgtccaaaaagcacactacgacagaactggacgttagaagttgtcattataaagcagccttctaataaagttgtttgcaaagctgaaaaaaaaaaaaaa

SEQ ID NO: 72000 - DNA, 2366 bp, Homo sapiens; identical to SEQ ID NO: 65842

SEQ ID NO: 72001 - DNA, 1594 bp, Homo sapiens; identical to SEQ ID NO: 65844

SEQ ID NO: 72002 - DNA, 1632 bp, Homo sapiens
gccaggggtccaggggaggccaggggtgagaggccaggcccagcctgccagctgtgtggggggccgacaggtgaggggccgtgttgtggggcaggagggccgggtggggggcccctgctgcccccacggctactgtactcatgccgcctctgcaccttcgtgtcccactactcgagccacctgaagcggcacatgcagacacacagcggagagaagccgttccgctgtggccgctgcccctacgcctcagcccagctcgtcaacctgacacgacatacccgcacccacactggcgagaagccctaccgctgtccccactgcccctttgcctgcagcagcctgggcaacctgaggcggcatcagcgtacccacgcagggccccccactcctccctgcccgacctgtggcttccgctgctgtactccacgaccagcccggcctcccagtcccacagagcaggagggggcggtgccccggcgacctgaagatgctctgctccttccagatttgagcctccatgtgccaccaggtggtgccagtttcctgccagactgtgggcagctgcggggtgaaggggagggcctctgcgggactggatcagaaccactgccagagctgctattcccttggacctgccggggctgtggacaagagctggaggagggtgagggtagtcggctgggagctgccatgtgtgggcgctgcatgcgaggagaggctggagggggtgccagtggggggccccagggccccagtgacaaaggctttgcctgtagcctctgcccctttgccactcactatcccaaccacctggcccggcacatgaagacacacagtggtgagaagcccttccgctgcgcccgctgtccttatgcctctgctcatctggataacctgaaacggcaccagcgcgtccatacaggagagaagccctacaagtgccccctctgcccttatgcctgtggcaatctggccaacctcaagcgtcatggtcgcatccactctggtgacaaaccttttcggtgtagcctttgcaactacagctgcaaccagagcatgaacctcaaacgtcacatgctgcggcacacaggcgagaagcccttccgctgtgccacctgcgcctataccacgggccactgggacaactacaagcgccaccagaaggtgcatggccacggtggggcaggagggcctggtctctctgcctctgagggctgggccccacctcatagcccaccctctgttttgagctctcggggcccaccagccctggggactgctggcagccgggctgtccacacagactcatcctgaactaggtccttcttccccatgttttatacagacggaccagaagccacctttttctcccccgctggccaggggctccacacagactaacgtaggcactataaggaccagcccaaccccatgggcgggggggcccatatggaccaggggaccttgccttgactgaggcacttcacgagctcagtgagaagggccctgtattcacctccactgcccccaggggctgtggacaaaccggctgggggactgcccagcctcccacctgtttatttaacttatttcagtgctttataataaaggaaacactaacaaaaaaaaaaa

SEQ ID NO: 72003 - DNA, 809 bp, Homo sapiens; identical to SEQ ID NO: 65846

SEQ ID NO: 72004 - DNA, 1197 bp, Homo sapiens
ggcagcctgagcgaggagacccccgccggcccccccacctgctcagtgcccccagcctcagccctacccacacagcagtacgccaagtccctgcctgtgtctgtgcccgtctggggcttcaaggagaagaggacagaggcgcggtcatcagatgaggagaatgggccgccctcttcgcccgacctggaccgcatcgcggcgagcatgcgcgcgctggtgctgcgagaggccgaggacacccaggtcttcggggacctgccacggccgcggcttaacaccagcgacttccagaagctgaagcggaaatattgaagtccagggagggagcgccccgggccgcgtccgccccgtcccacactacgcccccgccccactcccggggcctgctaatctgaggccgatccgggaccggcctccttgcgtctcccattcccaagattgtcccgcctctgccaatccccgccgtccttccagcccacgacctgccgcgccgaggagcggcatctgtcccgtttcccgattgggtctgtcgtctctctccgcctagcgacagattccttctattaagggattggctcgctgagttctaagctctaaatgggtcaactcctttgttttccgcctagcgacaagggatttgctcgcacggcattggctccatcccctagtcgctggacagctctttttttgattggctcaaatcctgtaaagggcttgaccagtctctacatagtcaccgtccgcttttcctgagttctccctcccaattggctccagcttcctgggggcgtggccaagccctcctcttcccagaattggcccggggccttcaatttacgttctttacactacggggactggggtcgtctttgcccacgtcccgacaacttgttccctgaccccctcagggatggccccaaactgtccctgcctctggcaccccctttcattggttccatccatccccacaacagcctgccaatcgaagcccgtccctgcatccaggatggtaccagctcccgcccctcgccccccacctccacaggtgccttaaagggccctcgtccacccaaggtggggggcaggggccctcactctccggccctggtgtgggggagagagtgaggggttgggggatcggcagttgggaggggcgctctgagattaaagagttttacctctgagataaaaaaaaaa

SEQ ID NO: 72005 - DNA, 2228 bp, Homo sapiens; identical to SEQ ID NO: 65847

SEQ ID NO: 72006 - DNA, 720 bp, Homo sapiens; identical to SEQ ID NO: 65848

SEQ ID NO: 72007 - DNA, 1771 bp, Homo sapiens; identical to SEQ ID NO: 65849

SEQ ID NO: 72008 - DNA, 1309 bp, Homo sapiens
ttttttttttttaatagccaagtattccatttattaacaaaataagtcttaccaagggagagctctgttcgtcccaaacaggccccgcagcccccgcgctgccgcatcagaccagaaggagggaggagtggggagaagaccccagtcgctggggggtccactctgggggctctgccgggccaggcctaggagagggcgggggctgctgtgatccgagagctccctgacgccccaaccttccccgaacgcagctaacgagctcgtgacatccgctgacatcgccaccggtctgctttggagggatctagcgagagtcacctaccccacccctactgccaggggaggggtcgttgcccccccgagggagagaaaaacaaggactataatgcacttcgcaaaatgtaaggggccggcttcacgccagcggggccttctgggactttgaattcaaccaggtgagcgctccaggtgccccgacaggcgcactgtagccactgggtgttaggggcgggagtctggaaggtgacggtagacggccacttgggcccttctgggggcgagcctactggtggggtcagggctctccgtgctcagagcaaggtagaggagcaaggccctacttttggggggcagggtccagaccaaggaccctatgcgcggagggtggcgggggaggagtcccggagcagtgtaccaggtcaatagagctccagggcccctgccacccaggtggccccctccacccccaaaatgagttacaaaaaaaacctcctctctgttacttgtacaacaaaggaaaaaacaaaacaaaacaaaacaaaaaacaaaaacagaacgcaaatggaaggaaacaagagggaatgaagggggaagagggaaaaagagaaggcggaaacgtagttttaagttaagactcatgcaagaaactccccaggaagggaaaacaaaacgtctagaagaacccaaagaccccaactctccctcaaaccaaaccaatcaaaaccaaaaaaagaggaaaaggaataaaaaatgtaaaacttatatctaagaaaaaataacagaaaggaacaggggcggggatcatgtcgttatttgtgggattaatattattatttgggagaacacagactttttgcataccattgactcatgtgggccgttaatgcacttatattcccagcttgtaagctaacattatagtaaataaatacacagtccggtggggaagggctgggtggggaatcccggcagggtcaagcagtagtggaggttgcagcggcgacggcaggtggggagggaggaggaggga

SEQ ID NO: 72009 - DNA, 1507 bp, Homo sapiens
ttttttttttttgttgagcagttgtttattctggccctcacagccttggctagtccacaaaggccctggggatgggcaacaggctacaggaacccacctgtcttcctggtcagggcccctggcccctagcagcaggccaatcctggtggggcacagggttctgtgccctttggctgcctacctctgaatatcctggccagcaagccatgccttccccgcccctggggccctgggagcccttcagctcctgtccccataatgggtcctgggcctaggatgaggggaaggtcccagtttcttgtagggtgttatctgggggtcctggtgtgggttgagctggagggctgtggggccccaagacccctgtgccattggggtgctccaccctctcaaacaggatgagcatctcacagtgcggggtctgcgggaacaggtccactgcccacagccttgaccggccggaagggaatgcccttcacccggttagatggggctctgcagaggtccacaaagttgcccatggctgcccgggggttgcatgagacgtacagcagccgcctgaggttcttagctctccggatggccaggatcaccttggaatgcaagccagcacggggtgggtccaggatggccacgaggtgctgggaggccagtctgctcaccagggtgggcaccaggtcctcggccctcccgcagtggaactccacattactcaactcattgtcctgggcgttcacccgggcgtcctccacagcctctgggcatagctcgaccccaatgaccctctttaccttccgggccagggccaggccaatggtgccggtgccacagcacacgtccagcaccatgctccccgcatccaattgggcccagtcctggatgactgtgtagagcacctcggctgcgggtgtgttcacctggaagaaggcgtgtggagagatccggaaggtcagccctagcaggtcctcgtggatgcaccggtccccagccacatgctccaggggcaggccctcctggctaggagtctttcgctgtccctcctccacaaagtagaggcaggtcactccactggccctgcctggccctgctgtgaagtgctgcgctagggaggtcttcagctctgccagctcctcagggctcagcttctgggggtggaagtaggcaatggccatggcctggtggcggcggctggtgcgcacagtcagctgcttccagtggcctgtgtacgtctctgggtcgtatgccgagtatggagtggaccggatgaactcctggaaggccttcaccacctgcttggtggcttcggggatgtgcacggtgtcaaacggggctgccacagcacacgtcccgcccttgtacttgccgagccgacagcccacggtgttatcctccccatccaccccgacgccaaccagaaactcacacttattacaaatactcagtctgctggggtgatagcctgaccccctccagcgggcagcaggccttgttgtgctagtgcctctgc

SEQ ID NO: 72010 - DNA, 430 bp, Homo sapiens; identical to SEQ ID NO: 65851

SEQ ID NO: 72011 - DNA, 1104 bp, Homo sapiens
caaaacttttcttttctttttttggcatgcaggctctttttactgttctgagcagtgttttgcaatgtgtgacccctccgcactgttggtgaacatacagaacctcctatatgggcacccaagcccaggccagtgtgaaaaccttggcgggggggtgggggagaatgagaaggggaggcccctagcctgactcagaggtgaagactgctaggccctgctgtccttggggtacgaactgtcaagggcctttacctccccccgcccccgcgggtgggcttttggaaggtggatctcccaggacgtcatgcagctccgggccatccaagatatcaggaaattgttgagcacccgttacccagccggggaactgggctttgacctcaatttcaagcctttctggaatctccccattcacaatacggagagaactctcaaagggactttgctgcccacccagtggcactgtgaaactggccgatttgggcaccagacgctgagccactccatccctagcaaaccccagcatgacactccctggcagtagctcccgaacgtccacatcgccacctccgttcctagtcttgccaaagaagatctctagcttgtccagcagctcctcctcactcagcctgaggctggcaggaaatccagtgaccaacaccctccggccactcaactggctggacaccatcacctggatggtggtgaccatgggcagctccaagggctggacctgcacccgcagccggcactcctccatgttgatcgtgtgctccttttgttgcagcacctgctcagccactttggggtcatcaaaggtgatcagagcagagcccgcaagcagagggcagtggatccgcaaattggaaactaaagacttaggcacttccgggtcctgctgggtgtgtcctcggaataccagggggatcttgggcactgaaaatgggaccttgtctttgggggagtccccgagctcctttctcagctgctgcaggtcccacagcctcatcttgagtctggcctgctcctcctgaagggcgtggagggcggtctggcctgctcctcctgaagggcgtggagggcggcatccagtggggctgacat

SEQ ID NO: 72012 - DNA, 1924 bp, Homo sapiens; identical to SEQ ID NO: 65853

SEQ ID NO: 72013 - DNA, 1966 bp, Homo sapiens; identical to SEQ ID NO: 65854

SEQ ID NO: 72014 - DNA, 1925 bp, Homo sapiens; identical to SEQ ID NO: 65855
  misc_feature (1)...(1925): n = a,t,c or g

SEQ ID NO: 72015 - DNA, 2265 bp, Homo sapiens; identical to SEQ ID NO: 65856

SEQ ID NO: 72016 - DNA, 5433 bp, Homo sapiens; identical to SEQ ID NO: 65857

SEQ ID NO: 72017 - DNA, 723 bp, Homo sapiens
ttttttttttttccccttcccctccaaagtccagggccaccagaactgactttattaaaaaaatgacaaaacaggtctatacatatttacaggctgggagccaggaggctcaggtccgacagcaggggccaggctgctcacttcttggagagcttgacttgcttgtgcttggggggtgcccacttgaggcagacggagtccactgtgatgggtggtttcttatactgggcacttttgaggtgctcctccaccagcttgggtgtgacacagatcacgtgctggcccttccagtacttgaccatattgagggattgcagggtactgatgatgtcattttgggtgatactggtcatctggctgaggtccttgatggacagtgtgcccccggaagttcccgcaggatctccagcagctacaccaggaccagtagctgcggtagctgaaggcttgcccagggtcagacagcggcttctccggggagccgactgtgctctccagcttggagagctcataactgaaacccgatgaggaacttcccgtagccgcggcgttggtaggggggcaaggtcaggatgcaggccacattgtttccatccggggactcctttctccttggagaagtagccaacaatgtgggccccctgccggtccacctcagtcaggatgtaaaaacgaacgggttcccttaaaagtacatgtcttatggtccaagaaaagcttggc

SEQ ID NO: 72018 - DNA, 764 bp, Homo sapiens; identical to SEQ ID NO: 65859

SEQ ID NO: 72019 - DNA, 1181 bp, Homo sapiens; identical to SEQ ID NO: 65860

SEQ ID NO: 72020 - DNA, 1055 bp, Homo sapiens; identical to SEQ ID NO: 65861

SEQ ID NO: 72021 - DNA, 767 bp, Homo sapiens; identical to SEQ ID NO: 65862

SEQ ID NO: 72022 - DNA, 955 bp, Homo sapiens; identical to SEQ ID NO: 65863

SEQ ID NO: 72023 - DNA, 951 bp, Homo sapiens; identical to SEQ ID NO: 65864

SEQ ID NO: 72024 - DNA, 1842 bp, Homo sapiens; identical to SEQ ID NO: 65865

SEQ ID NO: 72025 - DNA, 856 bp, Homo sapiens; identical to SEQ ID NO: 65866
  misc_feature (1)...(856): n = a,t,c or g

SEQ ID NO: 72026 - DNA, 2424 bp, Homo sapiens
tttcgtctgaggctgaggctggggaacatcgggcagcatgagcggctgcgggctcttcctgcgcaccacggctgcggctcgtgcctgccggggtctggtggtctctaccgcgaaccggcggctactgcgcaccagcccgcctgtacgagctttcgccaaagagcttttcctaggcaaaatcaagaagaaagaagttttcccatttccagaagttagccaagatgaacttaatgaaatcaatcagttcttgggacccgtggaaaaattcttcactgaagaggtggactcccgaaaaattgaccaggaagggaaaatcccagatgaaactttggagaaattgaagagcctagggctttttgggctgcaagtcccagaagaatatggtggcctgggcttctccaacaccatgtactcaagactaggggagaccatcagcatggatgggtccatcactgtgaccctggcagcgcaccaggctattggcctcaaggggatcatcttggctggcactgaggagcagaaagccaaatacttgcctaaactggcgtccggggaagcacattgcagccttctgcctcacggagccagccaatgggagcgatgcagcctaaatccggagcagagccacactaagtgaagacaaaaagcactacatcctcaatggctccaaggtctggattactaatggaggactggccaatatttttactgtgtttgcaaagactgaggtcgttgattctgatggatcagtgaaagacaaaatcacagcattcatagtagaaagagactttggtggagtcactaatgggaaacccgaagataaattaggcattcggggctccaacacttgtgaagtccattttgaaaacaccaagatacctgtggaaaacatccttggagaggtcggagatgggtttaaggtggccatgaacatcctcaacagcggccggttcagcatgggcagcgtcgtggctgggctgctcaagagattgattgaaatgactgctgagtacgcctgcacaaggaaacagtttaacaagaggctcagtgaatttggattgattcaggagaaatttgcactgatggctcagaaggcttacgtcatggagagtatgacctacctcacagcagggatgctggaccaacctggctttcccgactgctccatcgaggcagccatggtgaaggtgttcagctccgaggccgcctggcagtgtgtgagtgaggcgctgcagatcctcgggggcttgggctacacaagggactatccgtacgagcgcatactgcgtgacacccgcatcctcctcatcttcgagggaaccaatgagattctccggatgtacatcgccctgacgggtctgcagcatgccggccgcatcctgactaccaggatccatgagcttaaacaggccaaagtgagcacagtcatggataccgttggccggaggcttcgggactccctgggccgaactgtggacctggggctgacaggcaaccatggagttgtgcaccccagtcttgcggacagtgccaacaagtttgaggagaacacctactgcttcggccggaccgtggagacactgctgctccgctttggcaagaccatcatggaggagcagctggtactgaagcgggtggccaacatcctcatcaacctgtatggcatgacggccgtgctgtcgcgggccagccgctccatccgcattgggctccgcaaccacgaccacgaggttctcttggccaacaccttctgcgtggaagcttacttgcagaatctcttcagcctctctcagctggacaagtatgctccagaaaacctagatgagcagattaagaaagtgtcccagcagatccttgagaagcgagcctatatctgtgcccaccctctggacaggacatgctgaggcaggggacagtgtcccctgctaccgcccgcccctacccatggcccgttgctggatgactgttactcttttttcagaaggtgttgggattatcacaggttaagccttttgttccccgtctgcacctgaagggttgtcgcctggcctgggagagcctcttccaggttttgacctgcaggcagtgctctctaacaggaccatcacagcttctgaactgagccggagagagagaatggaattgctgacccctggaactggcgggtattctggtcattgaggagacaccatagtggaaactggggcttatgctgctgcctccagggtgtgaggtgggtggggacctgtgtcaggtgtggatagccatttctgctcaaccacacattctctaagaaacagcttgaaagctctgtctgggtcattcatttaaactagaagcagaggcacttaaaacatgtaccaggaaccatttaacaaagaatataaaatgtcacaatctgtgtactgttaaaaaaaaaaaaaa

SEQ ID NO: 72027 - DNA, 1469 bp, Homo sapiens
cccacgcgtccggcatctaccttcccgtggttaaagagaaactggaacagtaaatggcagtatgtataatggttaagagcaagaccggaggctcagccagttcatcaaagcctacaagacgggcaacatggaccaggcgctgtccctgtggttcctcctgggctggattggcggagactcctgcaacctcatcggctccttccttgctgaccagctgcccctgcagacctacacggctgtgtattatgtcttggcagacctggtgatgctgacgctgtacttttactacaagttcaggacgcgcccctctctgttgtctgcccccatcaactccgtgctgttgttcctcatggggatggcgtgcgccacaccgctgctgagtgctgctgggcccgtggctgcccctagggaagccttccgggggcgggcgctcctgtccgtggagtcgggcagcaagcccttcacccggcaggaagtcattggcttcgtcatcggctccatctccagcgtgttgtacctgctttcccggctgcctcagatccgcaccaacttcctccggaagtccacccaggggatctcctactctctgttcgcgctggtgatgctggggaacacgctgtatgggctgagcgtgctgctcaaaaaccccgaggagggccagagcgagggcagctacctgctgcaccacctgccctggcttgtgggcagcctgggcgtgctgctgctcgacaccatcatctccatccagttcctggtgtacaggcgcagcaccgccgcctcggagcttgagcccctcctccccagctgaccagaaccaggctgagcgcaggaggacaggcaccaccggatgccacaccaggcaggaggaggtgtggacagtgatggtacggcggccctgcatcagcctgcgggtggcctctggatcctccgtggaccgaaccgtccccccaggaacacaccttcaggtagaccccgaagcctcaaggccggggctggagcggagaccccagggcctctcaggagacagtgaggctgcccctcctaccacctacctcattctgcctactcaccccaggggccacagccacagcctgctggactcaggactgtcctgtcaactccagacaactgaaataaacaggccgggtacagtggctcgcacctgtaatcctagcactttgggaggccgaagcgggtggaccacttgacgtccgtagttcgagaccagcctggccaacatggtgaaacccccatctctactaaaaatacaaaaattagccaggtgtggtggcacacatctgtagtcccagctacttgggaggctgaggcaggagaactgtttgaacctgggagacagaggttgcggtgaaccgagatcgtgccactgtactccagcctgggtgacagagtgagactccgtctcaaaaaaaataaaaaagataaccgaggaaacggtaaaaaaaaaaaaa

SEQ ID NO: 72028 - DNA, 1293 bp, Homo sapiens; identical to SEQ ID NO: 65867
  misc_feature (1)...(1293): n = a,t,c or g

SEQ ID NO: 72029 - DNA, 607 bp, Homo sapiens; identical to SEQ ID NO: 65869
  misc_feature (1)...(607): n = a,t,c or g

SEQ ID NO: 72030 - DNA, 1071 bp, Homo sapiens
ttttttttttttctaaagctttatttattttataaaatgcatagaataaattatactagtaacattttaaaaattaacatctttgtattcagcagtcctgggtcaggaggcaggaggagagtagtggggacgggatggctcactgggcagctaacccgtgtaggccacttcctcctcgtcactgccatcggggaccgcgtctgtcccaaagtagcggtcgccaaagttcccaatgcctgggatgatgcggaaaaggtcattgacccgcttgtccaccgccgtggtgatgattctcactcgcggaaatgcataggccactgagtgcacgcccatctctgccatgagcagcgacagcaaaaagatcttgtcctcaggcacgtcgtggtccaggagcacgcgcactgccatcatggccgccgcgcccgtggacacggtgcagtccatgaggatcacgtggtcatcgctgatgtccttgggcagcctcaggtagtggagctcgggcagcaggggtcaggctcgggctccccggtaagctggttggtctggatgaggatggtgccgatgcgcacgtctttgcacacagcgcgcagcgcgggctccatggtttcaccggcgcgcagaatggacacaccggtgatctgcttccccgcatagcacttgcccgcatagtcctgcccctgcggggtctgtacgacgcagtcctgaaagggcaggaaggagagcgcgtgctcgatgagcagccgcatcagtctcttggagtagaagatgaactcgtcgcgactggtctccttgtccctgtggggccaacagttgagcgggagcacgcgcccggggccgccccgtccccaggtgggccctcacctgatgatggtgtgcatgccccgtacctgcggcgtgctcttcaggacgctcagcgtccggggcagcgggtggcactggtgtgccgaggccagcgcagccctggggacaaaccgatggggaacactcaagaagggggtcttttcccagagccctccctccccacaggacggctgtgcgtcactgtgaggggaaccctcggccaagctggcg

SEQ ID NO: 72031 - DNA, 1586 bp, Homo sapiens; identical to SEQ ID NO: 65871

SEQ ID NO: 72032 - DNA, 1012 bp, Homo sapiens; identical to SEQ ID NO: 65872

SEQ ID NO: 72033 - DNA, 1991 bp, Homo sapiens; identical to SEQ ID NO: 65873

SEQ ID NO: 72034 - DNA, 872 bp, Homo sapiens; identical to SEQ ID NO: 65874

SEQ ID NO: 72035 - DNA, 2434 bp, Homo sapiens; identical to SEQ ID NO: 65875

SEQ ID NO: 72036 - DNA, 671 bp, Homo sapiens; identical to SEQ ID NO: 65876
  misc_feature (1)...(671): n = a,t,c or g

SEQ ID NO: 72037 - DNA, 1821 bp, Homo sapiens
ttttttttttttctggtacccaaagggtcctttattctttatcatcctatttgagttttattgtttttacacagctgggaaatgcttaaggtacaaattaataaattttaaactcagtatggaaaatacatttaataaattaaagcaaaaaccaaagatctgaggagatccaagagatcaagacaatctgtaaccagagtctgaagtatccaaggagctactttttttggaggcatattctcctcagcttccagttatcatttgataaacacatcagcaaaaggttcagtgttttaaacaaatgtagactttattttgtactgtacaaagtgctaatgtcagtagatccattaaaatatagaatatttaagaaagatcattaataaaagtaatggtcattcaatttaatgttacagtttacagcgttttactgctagtgttttaagtcagcatgagcagtatcaaagtacttatgtagctagtttctaaaactttacagaaaacccagtacaattccaagtgcttatagccaatataagcatatttcatattagaaatagttatccatatgttaacaagaaactatggtcctcaaatatgccaattttagagtctaataactactgatagtaactatgtaaatattttggaataaacagttatttacgcaagccacacttcagctgagatgatcactagacatctgtttccagagcttcaacaatgtgtgcagcagaaggacgatctttagggtcttcattagtgcatacagagaagagttcaattactttctggtatgattcatccagttcttccatattaataggtggcctagttcccaacgctgcatagtatgcttcatcatcaaaatcactttcatcaaaagttttatcttcatcatcatcatcatttgaaagattaatgtgtggaatcgataaagtcatcatttcccacaaagtaaggccaaaggcaaatatgtctgccttgtcagtaataacaccattctcctccacagcttctttgggtttccatggctctgtgccaatgtaacaagcctcagggtcagtcacagtcatattttcatccagtggtagagagactcctacatcacagattttaattgtttcaaaatcgcctttaattacaacatttgaagactttatgtctccatgaagcagtttcttttcttggtgcagatactttaaccctcttgccatattcaaagcaacttttaaaattatggctgctggaaaaggatcttggctggctttatatcgttcttctattaagtcatttagagacttttcacctccatattccatagcaagacacagactgccatcattggcttcagtaaaagcacgataaccaacaatgtttggatgatgaaggcttttcaaaatcttagcttcatccattagtctcttttgatacacacttcgataatgatcattacatataggattaatcttttttacagcccaaggagaatgagacaaacctcttggagatcttttcattaggtacacatttaccccagtaccaaagccaagcttctgcataaacggagaggccgggatatttatagttggagttgaacataatacagatttctttttttctgataatttgcttggtgtcttgaaattactgatcccttccattgtgaaagccactctcagtccagagtctcaccgcctggaaggaaaggtcggaggtgaaaataagtcgtggccaagtacctcttcaaaattggtcccgagcggcccccagcgagaccctgcagctgcctctagcaccaacacatacgcccgctcgtgc

SEQ ID NO: 72038 - DNA, 354 bp, Homo sapiens; identical to SEQ ID NO: 65879

SEQ ID NO: 72039 - DNA, 1498 bp, Homo sapiens; identical to SEQ ID NO: 65880

SEQ ID NO: 72040 - DNA, 2420 bp, Homo sapiens
ttttttttttttgctcataaacaattttattttttttctcagtatgtgcccttgaagattccaaaatgttggagtttctgattctcctgggatcaaaggtaaaagcattgtatggaaacactcaaccttggctcattaccctcctgaggagctaagtctggaggcctcagagagagggagctgacattcacaacttattccaagatgggtaacccagtgaacaaagaattagtaaaacatagactcagtctgtagagggcttcaaatatacatattctatatatataaacctgttatataggatttcaacttattggtttccttgtgatttgtaattaaagtacaaattataaagatgttgcacactgctgatttccccttctcagcccccctccctccccaacataaataacattacaaaggtcaggtgatcctaagaatttttgttgttgtaaatattttgtttttaaaatcatattccccttcctcccctgcaaactacctctgagagtttgtaacacagcagcatggaatggacaagactggggacagcatggaggtctaacggagagagcgcagaacgttgcttctcactgacgggcaccagatgggcttccgcatttccattgacaacagaggctacgacaggaagcagagaatgtgcaatgcggcttcatcctcctccaaagagaaggctagctggaccactgagaaaagccctaaaggcattgaggtttttggagacagagcacagctccagaaatgtcttggctcagtatttacacaatatcttgaagctgcactttccttttaagaaatgtgtgtttctgaaggtgcctcttctgaggttggttgggggaaaggagaaacgtaaaaacaaaaacaaaccaattcccacatatgtaaaagtcctgttataagtcttagttattttcacacacatcattaatagtagatactgacaatgattggtttcttttcttattctttttttttagagcatgagtaaagagaaagagagaaggaagaagtgcactaaggagagcgccgtcccttcttcagcattaagtgacactggatggtctggattcggttcttggctgggacaaactcgggctgaagcttcaatgtggattcataccacaccagtgctttttcaaattcttccattgccacgtagacattgcccagagtgaagtggttcacagcaaagtgtggtgcgatctctactgccatggtggctactatgacggcgtcattccagagcttggcattgtgcaagatgttggccaggctaatcaggggcacatccttcatctggtgtggcgcatagtgcagagcctggcggaggcagtcgattgccttctttccttggcctttcaccctccagtagagggctgccatgctggagaggacccaggacgtctggttcttttccaaaactttggcaattcgggtgccaatctgttcaagcgactgttgtggatattggtctttgccgagattttgtaatacctctgttaactgactctcccctgtgtagtgcaggctggctcggttggaaaccccatgcaagtggtccagggtatgcatactcgtggggagattgccattgcaaagaggctccattgctggctgctgtataggggtggcaaaatctatgtgttctgtgatgtcaatgttttttgaagaaactgcaagccaggtactcacgatggcagtcagctctacccagcggagtttgaggcattcgtccgggctgggccatcccagacgctggtagtcacgtttttttccttgtggcccaggagatgccaccttggggccagtgatctctaggtttgcttggtaacgatgtccattttctatctgacctgtttctacttttttcccaggagttttcttatgatctcctttgggtttctttacacgtttgacctggaatgtaatccattctgttgcttcatcatcttcacttctgcagtctccatagcaagagcttctggccactccatcctggggacctttcttcagcacccgtattccttgtaagtctagacgccgccctttcatctctagtgcacccccaaagccttccaaaggccatgcctgttgaaattcatccaccaaagccagtatttcttctgacattttggtttcatctgaattctccatctcatcagaaccattgctctcctcaaccaccgtactttcaagtctaagggcatctgagtccctccctgaattctcaacagagaatacagggtcctcctctgttcctctctcagagggctcttcttcagcagcatccagtgactgtgagttgtcaaaatatttctgtttgtcatggctgttgtccagggttttctcatgacaattaccactgcaaacagaagaagtgatgttgtacagaaaaggat

SEQ ID NO: 72041 - DNA, 1770 bp, Homo sapiens; identical to SEQ ID NO: 65882
  misc_feature (1)...(1770): n = a,t,c or g

SEQ ID NO: 72042 - DNA, 4242 bp, Homo sapiens; identical to SEQ ID NO: 65883

SEQ ID NO: 72043 - DNA, 1002 bp, Homo sapiens; identical to SEQ ID NO: 65884

SEQ ID NO: 72044 - DNA, 1887 bp, Homo sapiens; identical to SEQ ID NO: 65885
  misc_feature (1)...(1887): n = a,t,c or g

SEQ ID NO: 72045 - DNA, 2085 bp, Homo sapiens; identical to SEQ ID NO: 65886
  misc_feature (1)...(2085): n = a,t,c or g

SEQ ID NO: 72046 - DNA, 923 bp, Homo sapiens; identical to SEQ ID NO: 65887

SEQ ID NO: 72047 - DNA, 989 bp, Homo sapiens; identical to SEQ ID NO: 65888

SEQ ID NO: 72048 - DNA, 1364 bp, Homo sapiens
ttttttttttttgagacggagtctcgctctgtcgcccaggctggagtgcagtggcgggatctcggctcactgcaagctccgcctcccgggttcacgccattctcctgcctcagcctcccaagtagctgggactacaggcgcccgccactacgcccggctaattttttgtatttttagtagagacggggtttcaccgttttagccgggatggtctcgatctcctgacctcgtgatccgcccgcctcggcctcccaaagtgctgggattacaggcgtgagccaccgcgcccggccaagttatgatttcttacagccacatgggcgctggtgggaacaaagcaggcgggtcccacaggagcacctgccacccggagggccacctcctgcagtgtctgtaaccgccagagctcttactgtgtttcctaagtgcttgttcttataaaaatcaattaaaacaggaagaggcagggggagccgagggggtgctgcgcccagagagagggtgctaggctgctggcccagcaaggcctcaaggaaagcaggggtccgccaggacccctccttcagacagaggcctcgggcttgggccgtttcaggatgagacgggagatatgttccaggcctgggcacgggacaagcagtcccccgaaaatgctgaccagctcccggtctgcagcgtgggtgcccaggtgggtggtgggtagacatcctggggtgccgacggttgactggttctggggaagggccgcgcagccctgggggatccctgccccaccctggactggacaggacttgggaatgggctggcaaagccacccctcaacctgatgaaaccccttggagcacccagaccacatgcctgaggacaggctcagaccccaggctctgggggttcccgggggactaccagaagccccaagtcaccccataaaagcctcccaagccccagtggccagactcacaccccactttccagacagaaaccaaggctgggatagctgctggccaccagcagccgccccacccccacctgcaacaccagcccagctcaagacaggcctggggcctccaccctggcagggcccacggagggcccatgagccccaacactcttgcctcagggggcctgggggtgggagatgccccctcctcgtgtgcacgctcacctgcccctccctgagcagtgcatcagccagcgccaggctggaggttggaggccgccacccttttactggctggctggcaggcaggaggctgtgctggggagatgggacacagctccctgcccaagggccagcatggctgctggtgccccaagattcaggccaggcctgtcactggtgtcttcggtccctctggggaatt

SEQ ID NO: 72049 - DNA, 1734 bp, Homo sapiens
aaatttgtatttcgataaccattagtgcagtgcggtggaagtcaagatggcggcgcggacagcgttcggtgctgtgtgccggcgcctctggcagggattggggaatttttctgtaaacacttctaagggcaatacagccaaaaatggtggcttgcttctcagtaccaatatgaagtgggtacagttttcaaacctacacgttgatgttccaaaggatttgaccaaacctgtggtaacaatctctgatgaaccagacatattatataagcgcctctcggttttggtgaaaggtcacgataaggctgtattggacagttatgaatattttgctgtgcttgctgctaaagaacttggtatctctattaaagtacatgaacctccaaggaaaatagagcgatttactcttctccaatcagtgcatatttacaagaagcacagagttcagtatgaaatgagaacactttacagatgtttagagttagaacatctaactggaagcacagcagatgtctacttggaatatattcagcgaaacttacctgaaggggttgccatggaagtaacaaagttttgtttctttatttttttagacacaattagaacagttaccagaacacatcaaggagccaatctgggaaacactatcagaagaaaaagaagaaagcaagtcataaagcctcagggaggccatttttgcctaaatttgaaatgagggtgggccagatgagtatgtttaagtggagagtgcttccagctgagatgatttgagtctgtcctaactgctccattgagttctcgtgccctcatcagctgagggcagggaatggaactttaatggaagaaccacttttatctattctttttattcattgtttcagttctgatttcagcaaacatgagcaaaccactttgactgaaagcagaaagagtgaaaattctattttgttacgctactggtgttcaattattagtttgtaccatttttaatttatgtcagttgatgcatctgaaaataagtgcttggagtgttcgtacccttatttttttttaagattcctagaaggaatctttggttaattcagattgagcagttaaagtttttgctatttacctttgtgcaggctggcatatgctaatttgggggtggtaaccaaccgattttatctcatgtaagcattacattttgaagactgaatatacttcacagcagatcaaacacatttatggcatgcactgacctcttcttggagcccagaactttatagagttgcctaccagggttactgtaatggaatttatgatcttaagaaattactagttgtattatttatcctatgattcattcattcaataagcttttactgcataaactttacatccagcactgtagttaagtacccaaaattgaatagaaataatggcttttgaaaattgcacaaagcaggccaggcacggtggctcacgcctgtaatcccagcactttgggaggccgaggcaggcggatcacgaggtcaagagatccagaccatcctggctaacacggtgaaaccccgtctctaataaaaatacaaaaattagctggacatggtggcacgtgcctgtaatcccagctactcaggaggctgaggcaggagaatcgcgtgaacccgggcccggtggaggctgcagtgagacgagatcgcgccactgcactccagcctggcgacagagcgagacaccgtctcaaaaaaaaaa

SEQ ID NO: 72050 - DNA, 1799 bp, Homo sapiens; identical to SEQ ID NO: 65890

SEQ ID NO: 72051 - DNA, 1798 bp, Homo sapiens; identical to SEQ ID NO: 65891
  misc_feature (1)...(1798): n = a,t,c or g

SEQ ID NO: 72052 - DNA, 4138 bp, Homo sapiens; identical to SEQ ID NO: 65892

SEQ ID NO: 72053 - DNA, 1413 bp, Homo sapiens; identical to SEQ ID NO: 65893

SEQ ID NO: 72054 - DNA, 840 bp, Homo sapiens; identical to SEQ ID NO: 65894

SEQ ID NO: 72055 - DNA, 1372 bp, Homo sapiens; identical to SEQ ID NO: 65895

SEQ ID NO: 72056 - DNA, 1529 bp, Homo sapiens; identical to SEQ ID NO: 65896

SEQ ID NO: 72057 - DNA, 1219 bp, Homo sapiens; identical to SEQ ID NO: 65897
  misc_feature (1)...(1219): n = a,t,c or g

SEQ ID NO: 72058 - DNA, 2609 bp, Homo sapiens; identical to SEQ ID NO: 65898

SEQ ID NO: 72059 - DNA, 2338 bp, Homo sapiens; identical to SEQ ID NO: 65899

SEQ ID NO: 72060 - DNA, 2530 bp, Homo sapiens
tgcagcgggcgtgagttgggggaggacgggttgccgactcgcctacctagcggtctcttgattgtcgatattttgttggcataggtttatgtagagacgtatacatatatatagacacactgtctttaaatctaggcctgtatccggtgtccgaggcgaactcagtaagatgatgttaagaggaaacctgaagcaagtgcgcattgagaaaaacccggcccgccttcgcgccctggagtccgcggtgggcgagagcgagccggcggccgcggcagccatggcgctcgctcttgccggggagccggcaccgcccgcgcccgcgcctccagaggaccacccggacgaggagatggggttcactatcgacatcaagagtttcctcaagccgggcgagaagacgtacacgcagcgctgccgcctcttcgtgggaaatctgcccaccgacatcacggaggaggacttcaagaggctcttcgaacgctatggcgagcccagcgaagtcttcatcaaccgggaccgtggcttcggcttcatccgcttggaatccagaaccctggctgaaattgcaaaagcagagctggacggcaccattctcaagagcagacctctacggattcgcttcgctacacatggagcagccttgactgtcaagaacctttctccagttgtttccaatgagctgctagagcaagcattttctcagtttggtccagtagagaaagctgttgtggttgtggatgatcgcggtagagctacaggaaaaggttttgtagagtttgcagcaaaacctcctgcacgaaaggctctggaaagatgtggtgatggggcattcttgctaacaacgacccctcgtccagtcattgtggaacccatggagcagtttgatgatgaagatggcttgccagagaagctgatgcagaaaactcaacaatatcataaggaaagagaacaaccaccacgttttgctcaacctgggacatttgaatttgagtatgcatctcgatggaaggctcttgatgaaatggaaaagcagcagcgtgagcaggttgatagaaacatcagagaagccaaagagaaactggaggcagaaatggaagcagctaggcatgaacaccaattaatgctaatgaggcaagatctaatgaggcgtcaagaagaactcagacgcttggaagaactcagaaaccaagagttgcaaaaacggaagcaaatacaactaagacatgaagaggagcatcggcggcgtgaggaagaaatgatccgacacagagaacaggaggaactgaggcgacagcaagagggctttaagccaaactacatggaaaattatgtctgccatttcctaaggtgataaaagaaaatgtggctgaagttacccgaagttcagcttgcagtgtaattcagaagagttaagaccagaagtactggaatcatacttcctttcaggtcaaaacattttgtgggaaatatcctgttcgtgacctaggagaaacaagacagaaaaaaaaatctttcttcatttatgaatttcttactccatacaagcagtttatggatgtctgggcaatcatagcacttgccatttaaaaacatgctacaggggcacattttctgtggttaaaaatgatctccagaataagtgtaaactgcagttttcctttgcattgagggttttggctttttatttgtaaattaaatcaagatgttacccactccttggtgtggtggtcttgctggttcgtgttgggaagtagtatggcagcaatgcacaaattcagaatagccaagaaatccctccttttcaacgctctgtgcctgggaaccattagaggagttttaaaaaccatccctcatagcccacaattttgggtcaactctcaaaattgggaataagaaaactggcactgttgggagaaaaatcgttcttactgaaacatgaactggctcaggcaagcaaatagcgggagtcggcacaggaaggagtgtgtgctgcggggatgcgtggtggcgtcaccttcaaaactaaagtgttgccaggcggacagatgagtccttgatcttgtttcctgatcttgtttccatttgactgaattctgaaccttcattgtcttcacagtcttgccacttgcctagtgaggcttttccgaacctggaaggagacgtctagaaatcccaactttgctgtaacagacaaaaggacgtggaatgtactttctgctacagccattacagtcaactagatttgagtgctgccgctgaactacagcttgtacactacacggtccacagagccgagcaataacttctttacccaaaaagtttgcatggaagataaacagcaggatgccagagcctgaaaatgggagatgtgtgtgaattacttcaaaggcaaccttcagtccccagaggaacactcaacaccagatggaagcaggcccctgagctgggcctggtcagacaggcatcacccactctgcctggaggctcagaggaggctggccctctcaaagctcgtgtcacctggcatttg

SEQ ID NO: 72061 - DNA, 2105 bp, Homo sapiens
ttttttttttttatgtcattcagcctttactgtaaaaaaggaaacaataaaaacaaaaccctattaataaacacaatgcaaacaatgcccgagattatcataaaaacatactagcaagccacaagtaccagagaggggtgaacaggcatatctgctagctctcctcttgcagtcctcagcctcccacaggaggcacaaggtccaaactattcctcaaaaaaaaggacagcctctttatgctgaaataggaactttaaaggaagctcttcttgtagtccaaatggacgtaccttgtggtatggctgtaaggactcgattttacggcttgtgtattcctaactatagctaggcctgtcacctgctgttcctgtgatctcagctttacctagaagagctcctgaaacagaatgggtacacgaaaatctggaatgaatagctatctgctcaaaaacgattgtttaaaaacagatgattggggccgggcgcggtggctcatgcctgtaatcccagcactttgggaggccgaggcgggcggatcacgaggtgaggagatcgagaccatcctgggcaacatggtgaaaccccgtctctactaaaaatacaaaaattagctgggcgtggtgatgccagccactcgggaggctgaggcaggagaatcgtttgaaccagggagtcagaggttgcagcgagccgagactgcgccactgcactccagcctggcgacagagcgagactccgtctcagaacgaacaaagaaacaaacaaaccagatgactgggagactgaagaggaaaaaagatgggagaaaacgtagggaaaggatggggcctcacagactcagctgtgggtgggggggtaaatcattacctcaggagaagcccaaggaattgtccccgaggtgagctttggaaagaaaacaaaaacaaaaacaaaaacaccaaaaaacacctaaatttcctgtattaaagtgacacataatcatgttttctgattctcttcactgtctgcctgcggggagggggtggggaaggtgttaatgatgctgatccctacttctgcttcaaggagatctggtggggaattcttccaccagtccagagtttgctggtgctgacctcatccctgtatcacgggcctagaatgtgggaggctaataggatgggtgggttgcaggaggtagaagaggggatggcctagagagtttctccattcagagctggagagttgttgaagggaagggtattttaaaagggctccacccacccctagccccagcccctcagctgtggggagaggccacctcctctgatggggtctcgatgctgctgctctgttcctggtctggcacgtcctcctcttcctgctccaagctgaagttctcgagctcctgaaaaatctcatccatgaagtcctgggagttctgtttgtaagacacagctaatcgaattgcatcattgaagagcttcacaacattggtaccatcagcagccgagacgaaatacaggggcagggagaacttcttggcaaaattgaagcttttttgggtcacgtttatgtctgctgtagagagaaggtaggacattggtctgtctgtcaagggaagggaagaaggtttggaggggggggccactggaggccttcattccagaaagtgggataggcagggatgattgggaaacaggtcctagaaagagctcagttaatagggatctgtgtcttggaaagagggcaggtcggcttagctggcttctttataaggtgggaagaatgcaagcaaccaaccaagggttgtatcttatcgtgggagggaggaccaatcactgaaggttgcctgcccggggaatggaggaggaaatgtatgagggcaggtccccagtgaattgctaacacccaggtgcagggatggccccaccatcaattttattggccaccacgatgcatgggatctctggcctgaactcccgaagctctgtataccaggtgctcaggttcctatgggtgactttcctctggacatcaaacaccatgatgcaagcgtgggtcttgtggtagtaggaggcatgcatgctctggaaccgttcctggcctgccgtgtcccaaaagtc

SEQ ID NO: 72062 - DNA, 1841 bp, Homo sapiens; identical to SEQ ID NO: 65902
  misc_feature (1)...(1841): n = a,t,c or g

SEQ ID NO: 72063 - DNA, 3395 bp, Homo sapiens
tttagttttggatacacagtgcacttcattccaagagatcttactagagatccccgacagtcagaagatttcccgcttgatcaggatatttctcgacgtgtgttattgctttgcttgtcacagttttctagggaaactgggtgtcagggtaacactcctaggctggcctcccatgagggagttacctctaggaggcggcaggagttttatctggcactgaaaacttgctggttggttttctagatccatgtttattttcagttcaaagacaaagtagaaaacttgagagtggaaaatgttaccttttagttcacactcctaatcccttagtccccataaaataaacattctaaagtgtaagcagtagaaataatggaaactccacagaaacagaaataaattagtttctttcagtcttggtggaggtccttttgccgaacaccatactccactgtgaacagaattcatcttgaacgaagaagaaatctttggcctatttcaccatgtctccagcattgcataacagacatttttcaaattcagtttcttctccaactgcagcaaaaaggcaaagagtagtctgtttcaggagtctgcatcgggtcctgtgagagccttgtccacttagaacaagcctttaacttgttctgtttcggtatcaagatctatgtcataaaagcagggccgggtgggcagtcctggcatggtgctcatcgttccgaccaaagggtaaatgaacccagcgcctatgctggcccggacgtcactgataggtaagatgaagtcccttggcacaccttttttgtcaggttggtgagatagagaaaggtgggtctttgccatgcagatgggcaaatttccaaaaccctgttgagtgtaacgatctattttggcttgtgcctcaggagagagttcaatatctttggctccatagacagcctgagcaatggtccttatcttgtccacaattggaacctgaacatcatacaggaactggaatcggcttcttttactcgcagcctctctcacagcccgagccaagtccaccgatccttttccaccaaccgaccagtgatagcaggggactgcatcaaaggcaccagcccgctttgcaagctcacacaccaagtcaatctcagcgcgggtgtcggtcttgaagacattcagagccaccacaacgggaaccccaaagagctgagtgatctgaatttgcttctggaggttacagcagccgtctgccaccagctggatgttctcctctgtatattctttcttaagaggaacaccagccgttacacttggcccgcctccatgcatcttcagagctcgcaccgttgccactaacacaaccacgttgggcaccaagccggaagctcggcacttgatgttgaagaatttctccattccgatgtcagcaccaaagccagcttcggtcactacaaatccttcttcaccaaccagtttcagggcaattttatcagccaacactgaagagttgccgtgagcaatgttagcaaaagggcccgcatgcacgaacacaggtgtcccttccagggtctgcatcaggtttggttttattgcatctttcatcaaaactgtcaaagcacctgtcacccccaaatcatctgctgtcacaggctgcccgcttttgtcactggccaccaccatccttcccagccgtgccttcatgtctgcgaggctgtccgtcagggccagcaccgccatgatctcgctggccactgcgatgtcaaactgcgcctgccggtaatggcccttctctgtgtttccctgcccgatggttatttttcgtagaaatcggtcatttgtatccaatactctctgccacgtgatggtagatgggtcgatgtcgagacgggcaaatttactcacttcctcttctgtcagtgtgctcggatcagtcttatttattcccagtttttttagccgagcaagctgaatttctgaaaattctctgacaccattcactaaaggaaccagccgattatacagagccttatctgtttgcgtgttttcatgaagaatcctcgtgtcgatggcggcagccagcaagttattggcagcggtgatggcgtggatgtctccagtcaagtgaaggttgaactcctccatggggatgacctgggcatatccaccacccgcggctcctcctttcactccaaacgtcggtccttgggaaggctgcctcaagcaggcaaaggagttgacattcaggtgtgcggtcagagcctgcacaagcccgatggtgactgtgctcttcccttctccaagaggggtgggtgtgatcccagcaactaagacgtattttccatctgcttgatcctttaacctttctagcacggacaaacgtactttggctttgcttttgccatagatttcaatttcatctgcaagcaatccaatctccttggcaaggacatccacagcttttggagtttgtcctcttgaaatctcaatgtcacttggcacaggggagagaggctgaagtttcaagcagtgaagtctccaccgcctgtgctgctgttcacgaagccatctccttccactactgaccatgttctgaattcgcagagctgcagcaaggagaatcacatcatcttcctcaatgagtccaccaaaatgtattcttggagagccacacccaaccttccctgacaggaagtcatgggagcagttgagaacagtagttcctggttgtatccaagtaaggggaatctcttctggcttaggtgagcctaggaccacaatgtcagcctcgtgaagcttgctttgaagctggcgtgttttccactggatgctcattgtcatggacccttttctctggaacaggcattgtagagcagcttccaaagacccatgggcccccactaccaaaatcttctttccatctaggttgacacctgatttttcaagaagttcaattacagctttggcaacaggtgaaacaaaacattcatgggcatcccctcgcaccagcttccccaggtttatgtctgttactccatccacatctttttctggtttcaaggcattgaggactttgttgctaaacaagttctcagagatctgaagggcaaggccatgtactctggtatcttcattgatctttaagatttcatctataatctcggcttcactgctatctggacgcgaggcaaactgtgagtgatgttcagaccagcctcctcagccaaatctctggttgatttcctagcatcaagcttgtccgtcacctcgcctggataacttgcaacgaaccgcgcttgaagcgcagcagtttttttcttgccaataaactatagatacttcttttgaattctgaatgacttctctgacgacggagtcccgcgccgcgggcgttcggccgccggggctgc

SEQ ID NO: 72064 - DNA, 1753 bp, Homo sapiens; identical to SEQ ID NO: 65904

SEQ ID NO: 72065 - DNA, 1159 bp, Homo sapiens; identical to SEQ ID NO: 65905
  misc_feature (1)...(1159): n = a,t,c or g

SEQ ID NO: 72066 - DNA, 1249 bp, Homo sapiens; identical to SEQ ID NO: 65906

SEQ ID NO: 72067 - DNA, 5664 bp, Homo sapiens; identical to SEQ ID NO: 65907
  misc_feature (1)...(5664): n = a,t,c or g

SEQ ID NO: 72068 - DNA, 1336 bp, Homo sapiens; identical to SEQ ID NO: 65908

SEQ ID NO: 72069 - DNA, 1512 bp, Homo sapiens; identical to SEQ ID NO: 65909

SEQ ID NO: 72070 - DNA, 1318 bp, Homo sapiens
ttttttttttttgtttgcagcacaatttattatctggccatagtatttgggtacattatcaggtaccgatttaacaccatgtaacctctcttgacacagagcaacccaaaaagaaaactttaaaatgtgcgacagaattaaatatcaagctttgtcatctaaaatcgtataaatataaaatatcagtcatttctggaaacatcttaagaaaatccggcaaccacatgtccattgagtaggtgtctgatgttgacggtgcttacattcaggacatatcacctcagatccaacacaattatttttattgtcttttaccaacacatgtttgcattatactgaacagcctgggctccttggtgtgtggatgaaagcccttttttttacaagcagaaacctcaagcatgccagcattggtgagcctgaagatgccagtgtctttatgctttggtgagcaaacaatggcaatggcctctggcaacatgagttgataggaacagtgagtgtgaagatcaacgctggataaaaatgcagtttgagtgggatgtgtatggatccatcctagagtgaggagatcatgttgatcctgaacattgaataattcctctacattctccatgtcacaatagtctggtcccgcagactgctttggcacaattacatgggtaatagtaaattcattatgtgtcagttttccacagagtattccacaggtttctattcctctcactgtattagattctgccagttgcagaaatttgtggcaaagatcttctggcaaaactacacatcgcagtccttcaaccactaaattctgaacagcacttagagtagcagcttgcgtttaagccctgtttacagggaggagagtggctagcataattggtgccatcacttttattaggttgatctgcaaatacattcagcaaggaattgttctggtgtgtggaaaagcaggacaaagtgctcccatcaatctgctctgacagccctgaggtttgctgacttcgcatttgacctcgggctaactcttgcttcttgagttgatcttcgaaaaacagaaactgctccgattctagctgctgctggcgcatctgagcaatccgcttcctttctgcctctatcaatctctgatgctccaattttttgagaatttcagctttatatttgtttttgctttgcaaatattcttggtattctacgttatatttctttaaaaggtcgtttttcaattcatctgtccttgggaatgcaatctccttcagtttcttcataatatcctgcttttcaggtactgcacattgctggtaatcctcgtgcc

SEQ ID NO: 72071 - DNA, 3593 bp, Homo sapiens; identical to SEQ ID NO: 65910

SEQ ID NO: 72072 - DNA, 3031 bp, Homo sapiens
  misc_feature (1)...(3031): n = a,t,c or g
ttttaatgagagtattgtggtagacatgaaaagcggcttcaatctggaagaactggaaaagaacaatgcacagagcataagaggtgagaattgtgtgtcgctgctgtcttcatcagctgacaggccagtggagctcttacctgtttacatgggcttgctttctttcccagccatcaagggccctcatttggccaatagcatccttttccagtcttccggtctgacaaatggaataatagaagaaaaggacatacatgaagaattgccaaaacggaaagaaaggaagcaggaggagagggaggatgacaaagacagtgaccaggaaactgttgatgaagaagttgatgaaaacagctcaggcatgtttgctgcagaagagacaggggaggcactgtctgaggagactacagcaggtgaacagtctacaaggtcttttatcttggataaaatcattgaagaggatgatgcttatgacttcagtacagattatgtgtaacagaacaatggctttttatgatttttttttttaacattttaagcagactgctaaactgttctctgtataagttatggtatgcatgagctgtgtaaattttgtgaatatgtattatattaaaaccaggcaacttggaatccctaaattctgtaaaaagacaattcatctcattgtgagtggaagtagttatctggaataaaaaaagaagatacctattgaaaaatgtaagttttatttacagatcaggccacaggttacaaaattaaaaccaacagcagttttgaattatctgtaccagctagctgaactagccatatcagttcttctttccagtcattcagcattgtagtaagaaaacacttggtaaggcagatggagacatatttatagtctatagtctgtctgggaagctgactgccagacagggcagtttgtcatctttacctagctgacacatctttttccatggcttgctaccgataggcattgaagcctagcaactgttacttcccacgcatgctatcttccaggacttcctgagaaatgcttgcttacagttcaaattctgtttcactttatgtttgagatctcggtatatcttcggattaggttgaatttgcctgttgggtctggaatataccatttttcccaaacatcagtatatgaagcagtccttccccatggcttcaaatgtccattccaatggagtaacttggcagcctttacaaactgaggtgaatatcgttttccagcactggaaccaaggtggcggacattccacataggatcgatggtagagtgctgttgataaaatacgataagcagaggaggtgttgtgatgctaccagccagggttctgctatacagtccctctcttggtgggacagaaaacaaatgtttgttagtgaaaagtactgactaactcctgttagtcaagactctaggaattgaaatacaacagtttttcacagctaggccagttacatacttactctacattgagtttcatccatttttccagttggttagttatattctgtcgtttccattccgtcaggtttgcaacaaaaactccaggattaaatgagcaagtgctggctttcatggaaagcttacgaattctttcctttttatagtcaagatagccaatgtaattgtactggtttcctgctccacggatgacaactttagtagaggctgaatcacaatcttctgaaaatgcagctgcatgtcctggcttcagtgctgtattgtaaagggcaagaatatcaccttgcacaattacatcatcatccatgtatatggccttctttgcgctgggaaccagaattggcaagtagaaccttgcaaaggttaaaggtttcatggattccccctggtcaggatcctcctttacttttccttccaaaagtttagggtcaaaattgacaattttgtatctgatgcttttcagggaatcactgttgagccaggaccggagatggtctgctgtattgttgagagtaacaatgtagaaaatcacattggagcgagtgttgtgctgaatgctgtttatagctgcaatggcccccccaagcctgtcttcagatgcagcgatgaccacaggaatctcctcttgtctcccatctactgcatgtcggagagcatttgggacaaagtctataggttgaggccctacaattcctgaatctgtaacctcattccttaacaaactgctcaagctgaggaagttatggtgcaaaaccagtaagaagagagcaacagccaggaccaagatgatgatgtttactttacggaatgacatctttttcttctgtcatataaatattagtttttaacccctttcatctggctggctccccacttggcattcaaaggtcaaggtagcctcctcccaaactcccacgttgagctgcacctcccctgagctcccacatctgggcctccctctccccagggctaatccagctgtcatgtatttctggcgtgatgtggctgtctcccttgacacgctctgggctcttccaaggcaacagcctggtcttggtaacaaccgtgtcctcggtctgctgtactttgaagtgatcggaaagtgatgtgacgctccggggatcccaccaggctcagagacacccctggttagggctccgacaagtcgttcccctcaaaggctcgccgcggccgcccttactgcaggcgatggaggagatgcggatgcagcccgcgccccgacccgccctgccagctcagcgcccgcgccgcaggccccggagcccagcccgttgtctggccgcccgcgttccctgcacgctgggccgagcacacttgccctctagctccgtggcagccgcgcagccccactacgcccagccagcccgcagcggtaaccgctagagcgtcgcgccaagcaggcgcgcggggcagccctgccgccggggtcctcgcagggaaaaaggccgtcgccatggagacgcggggggccggcggcgnttggcgccanagaatactgtcaaggacagttttcgggacggggga

SEQ ID NO: 72073 - DNA, 5268 bp, Homo sapiens; identical to SEQ ID NO: 65911

SEQ ID NO: 72074 - DNA, 5654 bp, Homo sapiens; identical to SEQ ID NO: 65912

SEQ ID NO: 72075 - DNA, 353 bp, Homo sapiens; identical to SEQ ID NO: 65913

SEQ ID NO: 72076 - DNA, 1956 bp, Homo sapiens; identical to SEQ ID NO: 65914

SEQ ID NO: 72077 - DNA, 3390 bp, Homo sapiens; identical to SEQ ID NO: 65915

SEQ ID NO: 72078 - DNA, 1079 bp, Homo sapiens; identical to SEQ ID NO: 65916
  misc_feature (1)...(1079): n = a,t,c or g

SEQ ID NO: 72079 - DNA, 985 bp, Homo sapiens
  misc_feature (1)...(985): n = a,t,c or g
ttttttttttttgcatatttaccacatgtcatgtatttctgaacaaagggaaagagatacaaattcctaccattaaactggcttggttgttgtttgggttggagtagcctgtgggggccttggggaagggtgtcgtttctttctagtagtctcatgtcgctttaggtcagctgggctggcttacacgcgctgtgcggtcttcatggagatgggagctctgtgtgtcagcacaggaagtggtctcccagcgttcagcctgaagcagcccaagtcctgtaggtgcttgcccgtctctaaaccccccagaaacatcagtgcaagaaggaagagactgctggcaaagatgactcccaaggctgttctccgctctggtgggacaacctgggtgctggccccaaggggctcctccagagagatgtgtgtgacctggcaggtgtaagtggcacctgcagagccaggttctgcggtgagagaggaggagatgctgtaggtgcctgccacgctttgcctgaggctggagaaggaggcaccagagacttgggctggggatccacccagctcctctcgggtccacgtcaccaccacatccagagggtaatagccagcaatgtcgcagatgagggtgggcagcagagcttcgtttgccaagctcagtcgtactttaggggaagcttggatgttgagctggatgatctgctgagctcggtacagagaggtggtgatctggcaaatgtaggtcccctcgtcctgtatagtgaggccgggcagggtgagggaggcatccctggccatgcccagttgtgcaggctccagggtagcgcccttccgcacagcctgcccctgccctgcggtccagctgtacaccaactgacccctgcccttgtgctgcagtcgccactccacactgatgaggtccaagcccggtgccatgggaattccacctcactgcctagggtcttcgatagggtttcgaanggccgggccc

SEQ ID NO: 72080 - DNA, 1719 bp, Homo sapiens; identical to SEQ ID NO: 65917

SEQ ID NO: 72081 - DNA, 1619 bp, Homo sapiens; identical to SEQ ID NO: 65918

SEQ ID NO: 72082 - DNA, 2193 bp, Homo sapiens; identical to SEQ ID NO: 65919

SEQ ID NO: 72083 - DNA, 2517 bp, Homo sapiens; identical to SEQ ID NO: 65920

SEQ ID NO: 72084 - DNA, 2432 bp, Homo sapiens
ccaggccgtggagttaaatgggacctgattaacggcaaagctaacagtaataaatctcttccaacaccagctgtcctgctttcacccactaaggagccaccacctctgcttgccaaaccaaaactggaccctctgaagctccagcaactccagaaccaaatccgactggagcaggaggccggcgctcggcagcctccgccagccccgcgcagcgcgccgccctcgccccccttcccgccgccgcccgccttccccgagctcgcggcctgcacgccgcccgcgtccccggagcccatgagcgcgctggcctcccgctccgcccccgccatgcagtcctccggctccttcaactacgcgcgccccaagcagttcatcgccgcgcagaacctcgggcccgcgtcgggccacggcacgccggcctccagccccagctcgtccagcctcccgtcgcccatgtccccgacgccgaggcagttcggccgcgcccccgtgccgcccttcgcgcagcccttcggcgctgagcccgaggccccgtggggctcctcctcgccgtcgcccccgcccccgccacccccggtcttcagccccacggctgccttcccggtgcccgacgtgttcccactgccgccgccaccaccgccgctcccgagcccgggacaggcgtcccactgctcgtcgcctgccacccgcttcggccacggccagacgcccgcggccttcctcagcgctctgctgccctcgcagccgccgccggcggccgtcaacgccctggggctgcccaagggtgtcacccccgcaggatttccaaagaaggccagtagaactgctagaatagcctccgatgaggaaattcaaggcacaaaggatgctgttattcaagacctggaacgaaaacttcgcttcaaggaggacctcctgaacaatggccagccgaggttaacatacgaagaaagaatggctcgtcgactgctaggtgctgacagtgcaactgtctttaatattcaggagccagaagaggaaacagctaatcaggaatacaaagtctccagctgtgaacagagactcatcagtgaaatagagtacaggctagaaaggtctcctgtggatgaatcaggtgatgaagttcagtatggagatgtgcctgtggaaaatggaatggcaccattctttgagatgaagctgaaacattacaagatctttgagggaatgccagtaactttcacatgtagagttgctggaaatccaaagccaaagatctattggtttaaagatgggaagcagatctctccaaagagtgatcactacaccattcaaagagatctcgatgggacctgctccctccataccacagcctccacccctagatgatgatgggaattatacaattatggctgcaaaccctcagggccgcatcagttgtactggacggctaatggtacaggctgtcaaccaaagaggtcgaagtccccggtctccctcaggccatcctcatgtcagaaggcctcgttctagatcaagggacagtggagacgaaaatgaaccaatttaggagcgattctttcagacctcacttcttgcaggctcctggagatctgactggttcaagaaggaaaactctgcagaatggactgcaaagtcagtgggttaccaaccccagatctaagctggcaactagatggaaagcccgtacgccctgacagtgctcacaagatgctggtgcgtgagaacggggtgcactctctgatcatagagccagtcacgtcacgtgatcgcccggaatctacacatgtatagctaccaaccgagcaaggacagaactcatcaagctgggagcttgtggttgcttgctaaagaagcacacaaaccccctgtgtttattgagaagctccaaaacacaggagttgctgatgggtacccagtgcggctggaatgtcgtgtattgggagtgccaccacctcagatattttggaagaaagaaaatgaatcactcactcacagcactgaccgagtgagcatgcaccaggacaaccacggctacatctgcctgctcattcagggagccacaaaagaagatgctgggtggtatactgtgtcagccaagaatgaagcagggattgtgtcctgtactgccaggctggacgtttacacccagtggcatcagcagtcacagagcaccaagccaaaaaaagtacggccctcagccagtcgctatgcagcactttcggaccagggactagacatcaaagcagcgttccaacctgaggccaacccatctcacctgacactgaatactgccttggtagaaagtgaggacctgtaatccagcattcttgttaaagctgaaacactgaaacagccattgccttgaccaacatattcctttgtcacattatgtaaaaggcagaaacatacctttgactataaaaaaaaaa

SEQ ID NO: 72085 - DNA, 7131 bp, Homo sapiens; identical to SEQ ID NO: 65922

SEQ ID NO: 72086 - DNA, 1455 bp, Homo sapiens; identical to SEQ ID NO: 65923
  misc_feature (1)...(1455): n = a,t,c or g

SEQ ID NO: 72087 - DNA, 3892 bp, Homo sapiens
ttttttttttttcacagtgaaaatggttttatttaacatgcagcaaaacaagggcagcagagctgggatatccagtacagccatttgccacgaagcactgacctcaacagtaacgagtaacactcaaataactgtaatgtctagagcataacacaaagttccatttccacatagtaattccacagacattcccagggctgcagcagccagtctctggaaagctcttggatttattccttaagtagtgaaaaatgattcacttttgacttgtcctcttctaatgaagcagtgaaacctgcttgctaaagacagcgaggggcagggaagggatatgacctcttcccatagtaaggaataaggaagcctggcaaggggcagggaggaaccagggaacatggtctgtgccaccttcctttccccagagatgtccgattgctgagcttgttcaactgggctccgcaagcttcccccgtgtctatggcagctggtgattttttttttgtgacggaggcttggagtacatgtcccaggatcacatccagcagctagagtggctgggacaagctggcgggggccaagcactgttgaagcaatagggtctggtgactcagctcaagtgtggcccgatctcatcacctccagacccaacatctcgctgacagtgcccctcagtagctggggaacagttgaggtttctgggcagcacattaggacatatgtctagtgtaacatttgtgatcctgaggcctcctgtgtccagccacaggtgccacaccacatgccatctggtgagaggagagggaggccaaagcagtaggatgtagagtggcggtagattccaaggggaggatagcagtttatttcatgccaagcaagaggtagtcagtaggatggcctgtccccacggctggaggcacgcttttcccagaaagctgagtacctgcttctggagaaggggaaatactggctctcttcattttccttcctatccctagttgggcctgtcatgaggccaaattccatgtcctgccaagatgtccataggacacagcctgccactgccagggacaagcacacaactcatcactccgtggccattccaggacgatgctgtccaccagaggcagggctggggactttgcagtatgccagttccttattctgggccaggcaccttcctgggccacctccctggggatggcagcaggagctggttggcgggggaagcatggaattgcaacagggctgcagccccttgggccgtgcatctgtcaggtgtgaggatgtggctcttgtggggaatgacccatgacagtctctctttagagactcccaccccccaccccccaccccagtggcttcagtgaatgccagtagaaggaaagcaaacacctacgccaagcctgggggtccatgttcccgggacagcagtgaagtcaggggccactccgcacccctgacagcatatggccacttcaagtcacacaggtagataaaaacaggtccttttaggggccaaaggagaggttatcacagcagcagtttggttctcagcagaaatgcccagggcccctgttccacatcaaagctacaagcactgttgtcagggcatggagagtgacgggaccagagccctcctcgtctcagggcagcctgcctggcttcaaggtggagatcacagcgtcctctggggtcataggttcccccactgttccacaggagggaactggtccacctcgcccacctctgtgctcagctgctcccccagggcgaaggtcagcttataccgaagccgcaccttctccttcagtggattggccagcaacatgacctgggtgatggctgcaggtggctggatggggctaaatggagagagttctgtcccagaaggtggctgcaacttcactttcattgacttgggcactgcagcctgcagcacgatgctcttgacaggtaagggagccgtgttcagcatggacaccaccaccaccagcacgtcaggtcgtcctgggggacactccttggcaaagtggaagaggatgcggaagccgtttttatcgtaggctgtcacaggaagggcactgctaggcttgatcgattccaggggcacgtggatgctggccagggagagctcaggccccttcggggggctgccctgggactggaaactcagtggctggaagagcgggctgccgggccccgtggagaagggcaggaggggcctggctggggtggtggtggggatgagaggggaggtagtgggtttcaccaagcccgaggtcactttggcctcttctagaagctgatcgagggcatccaggtggtgcagcgcgctgttgcccaacgccaagccatggtgcccagggactgcgggctcaacttttggggccaaggctggggccactccagtagaaaacaaggaggagcccgcactgggggcaggaacactggctgggaccacaggagctgggaagggaggcggcagtggagcttgggagctgcttgaggagggggctgagggctggagcagaggagcgtcggaggcgccacaggcagcggtccccggcctggggctgaagaagtccaggtcggactgttccctctggagcaggtgccactggctgttcccagctgactctttgggaggaacattaggggctgggtcggcgaggcccaagcagagtagctcctcgtccagccaggagagggcgttgcttgtgctgctgggccccagggtggcctcggcctggctagaggagcggctccgtggaggtcctgaggcctggggtggtggagggaggattgggatgcctgaggagggtggagtaggtgctggggccaacacggaggacaaactgttggtcgtgtccagctccgcaaggtcgatgagcgtgccttggttactgcactgactgtttccttccgagtcaggcagggttaaggtagccacctcgccattgatgacctgcccttcaataattgttttgtaagagttgatgacccgggagaggttgtcactggcttgcaggatgtcccccaaactgttatcattgtcctcagtctcactggcgagtttaaataaagtccgcctcttgttctcacactgatcaaacagctccttcatcagctctctgtccccgtccgaagagtcctcctggctgtaatgaagcagcatctcactgagcagtctcacgttgttgttaacttcctctaacgtgtgcagacgcttggtcaccttctggatccgtgcctcgtcttccctcaccatggacttgatgagcttgttggcctcctgcaggtcatctgggtttttgcttttcagcagcttggctaaaagcttggacttctcctcatcatcaaaaacagggtttttgggacgaggtggtggagaggggatcagcgtcctatccacaggaattggtgggtcagactgcactatgccctgtctcttcagcatgtggtaggcgtctttgatctttgcttcttctggcagggccatggtccagctgtacagcagctcaataaccttggtcttcactttctcagacaccctgtcccccaggtacgtcagggcctggagcgcctcccattcctgtggggactggatcttgtgggccagcagtcggacggcgatctgtggcctgggggacaagcagaacacactccagtgcactaagcctggggctacctggctggccctccttggccatggttgttccccttcccagtccgctccctctcagctgcccccacagtgctgagactcacccttccagctccttgttgatctgatcacagaagccaattatgtattcccagtcctcctggcggttggaaggattggtggctttattgagccaggactccaggctttcccacgaaatagtcgacc

SEQ ID NO: 72088 - DNA, 283 bp, Homo sapiens; identical to SEQ ID NO: 65926

SEQ ID NO: 72089 - DNA, 1642 bp, Homo sapiens
cgcggccgcgtcgacataaatgtgaggaatgtggtaagggcttcactcaggctgcacattttcacatccatcagagagtccacactggagagaaaccctacaagtgtgatgtgtgtggtaagggcttcagccacaattcaccattaatatgccatcggagagtccacacaggagagaagccatacaagtgtgaggcgtgtgggaaaggctttacccgtaatacagatctgcatattcatttcagagttcacacgggagagaaaccctataaatgtaaggagtgtggtaagggcttcagtcaggcttcaaatcttcaagtccatcagaatgtccacactggggagaaacgattcaagtgtgaaacgtgtgggaagggcttcagtcagtcctcaaagcttcaaacccatcagcgagtccacactggagagaaaccatatagatgtgatgtgtgtggtaaggacttcagttatagttcaaatcttaaactacaccaagtaattcacactggagaaaaaccatataaatgtgaggaatgtgggaagggcttcagttggagatcaaatcttcatgcacatcaaagagttcactcaggagaaaaaccctataaatgtgagcagtgtgataagagcttcagtcaggccatagattttcgggtacatcagagagtccatactggagagaagccatacaaatgtggtgtctgtggtaagggcttcagtcagtcctctggtcttcaatcccatcagagagtccacacgggggaaaagccatacaaatgtgatgtgtgtggaaagggctttagatacagttcacagtttatataccatcagagaggccacactggagaaaaaccttacaaatgttgaagagtgtgggaaaggctttggtaggagcttgaatcttcgccatcatcagagggtccacacgggagagaaaccccatatatgtgaggagtgtggtaaggccttcagtctcccctcaaatcttcgagtccacctgggtgttcacaccagggaaaaactctttaaatgtgaagagtgtggtaaaggcttcagtcagagtgcacgtcttgaagcccatcagagagtccacactggagaaaaaccatacaaatgtgacatatgtgataaggacttccgtcaccgttcacgtcttacatatcatcagaaagtccatactggtaaaaagctttagaaatgagaaatgtgttaccaacttttgtctgaatgcacatcttcaagtttttggctagtccatgctggtggtaaaccctgtaaaactactgagagtggaagggggtttgttcacacttgggaatctttctaacaaatccatcaagatgataacacagaaccatgaacaggaatagaactcgtatttaggggagaaatagggctggtggctctcttggtaagatctagttaatataaatgatcacctttcattgtgaatatatgcctgaagataatgtgtggaaggatatttgccatatgctaactggttttttggccagggagagttttgggttattatcccttttctttaattttcattttatacttacagtgatcattattttcataaaagctgtaaagctatgaaaaatgaataaaattactaaaaattttctgtaaaaaaaaaa

SEQ ID NO: 72090 - DNA, 1759 bp, Homo sapiens; identical to SEQ ID NO: 65928

SEQ ID NO: 72091 - DNA, 2492 bp, Homo sapiens
agttgcgtggaatttatccaaatccagaccgtgggtgccctttccccaccaccatcccagctgttctcaccctgggaaggggagcggcgggttggcacggccagtgtcctccaaccagtgaagaagcgcaaagtggacatgcccatcactgtgtcctacgccatctcagggcagccggtggccaccgtgctggccattccacagggccagcagcagagttatgtgtctttgaggccagacttactgacagtagacagtgcccacctgtacagtgccactgggaccattactagccctacaggagaaacctggaccatccctgtttattctgcccagccccggggggaccctcagcagcagagcattacccacattgccattccccaggaagcctacaacgcagttcacgtcagtggctcacccacagccctggcagctgttaagctggaggatgacaaggagaagatggtgggcaccacatctgtagtgaaaaactcccatgaagaggtagtgcagacccttgcaaactctctctttccagcacagttcatgaatggcaacatccacattccagtggctgtgcaggctgtggcaggcacgtaccagaatacggctcaaactgtccatatatgggacccccaacagcagccgcagcagcaaactccccaggaacagacaccaccaccacagcagcagcagcagcaactccaagttacttgttcagctcaaactgtccaggttgctgaagttgaaccacagtcacagccacagccttccccagaacttctgcttccaaattctttgaagccagaagaagggcttgaagtatggaaaaactgggcccagaccaagaatgctgaactagagaaggatgctcagaacagattggcacccattgggaggcgccaactgctgcgattccaggaagatctcatctcctctgctgtggcagagttgaattatgggctctgtctaatgacacgggaagctcgaaatggagaaggtgaaccctatgacccagatgtgctctactatattttcctgtgtattcaaaagtatctttttgaaaatggaagggtagatgacattttctccgatctttattatgttcggttcacggagtggctacatgaagttctgaaggatgttcagccccgggtcactccacttggctatgtcttgcccagccacgtgactgaggagatgctatgggagtgcaagcagcttggggctcactccccctccaccttgctgaccaccctcatgttctttaataccaagtacttcctattgaagacagtggaccagcacatgaagctggccttctccaaggtcttgcgacagacaaagaagaacccctctaatcccaaggataaaagcacgagtatccggtacttgaaggcccttggaatacaccagactggccagaaagttacagatgacatgtatgcagaacagacggaaaatccagagaatccattgagatgtcccatcaagctctatgatttctacctcttcaaatgcccccagagtgtgaaaggccggaatgacaccttttacctgacacctgagccagtggtggcccccaacagcccaatctggtactcagtccagcctatcagcagagagcagatgggacaaatgctgacgcggatcctggtgataagagaaattcaggaggccatcgcagtggccaatgcaagcactatgcactgagatgccttggccatggcacaagagaaaccagccaggaaaaaccagacagactttcacactaaagaagaggcctccatttttttttttcttttttttattgggggagttacgaagcctttcaggctgcttctgtttaaaatataaaagaaaactttgccccctttgcatcttcataaacctgctgcgggcagactcctcagccgatggtggctctgggtttccttgagtgtcatatgtcctagaaagttgctggctgactcttttttgtctggggcctggggaaagggcttggactgtgaaaagaaatgtgggcccctttccatcttcaagagagatggaattaatgatgggatgggaccctggggagggaatcttcccccagccgacttcccactgggctgaccagactttgctggacccacagggggaacgatggtcctttcccttccctccatggatcagccataaccttaggcaccttaatgggaagaaaaatgagggggaacttcaattatgatttattaaagacaatttctattacaccctcctttatgacaagtgacattttagatgtaaaagtaaaaactttaccatgccttttttttttttttgttggcctaacattgaggccttaaaacctgaggctcctgtgcctgatggaattcttgtaacatacacttgtgtatcatataaagataccactctgtttctcttatgtattcttactctagttgtttattaagaatgacaagcacgtcttttcaaaaaaaaaaaaa

SEQ ID NO: 72092 - DNA, 1459 bp, Homo sapiens; identical to SEQ ID NO: 65931

SEQ ID NO: 72093 - DNA, 2852 bp, Homo sapiens; identical to SEQ ID NO: 65932

SEQ ID NO: 72094 - DNA, 2028 bp, Homo sapiens; identical to SEQ ID NO: 65933
  misc_feature (1)...(2028): n = a,t,c or g

SEQ ID NO: 72095 - DNA, 1697 bp, Homo sapiens; identical to SEQ ID NO: 65934
  misc_feature (1)...(1697): n = a,t,c or g

SEQ ID NO: 72096 - DNA, 1132 bp, Homo sapiens; identical to SEQ ID NO: 65936

SEQ ID NO: 72097 - DNA, 2433 bp, Homo sapiens; identical to SEQ ID NO: 65937

SEQ ID NO: 72098 - DNA, 2227 bp, Homo sapiens; identical to SEQ ID NO: 65938

SEQ ID NO: 72099 - DNA, 928 bp, Homo sapiens; identical to SEQ ID NO: 65939

SEQ ID NO: 72100 - DNA, 1031 bp, Homo sapiens; identical to SEQ ID NO: 65940

SEQ ID NO: 72101 - DNA, 885 bp, Homo sapiens; identical to SEQ ID NO: 65941

SEQ ID NO: 72102 - DNA, 1126 bp, Homo sapiens
gtggcgccgggagcaaaagcagcatgatgcagctcatgcacctggagtccttttatgaaaaaacctcctcctgggcttatcaaggaagatgacactaagccagaagactgcataccagatgtaccaggcaatgaacatgccagggaatttctggctcacacaccaactaaaggactttggatgccactggagaaagaagtcaaagttaagcacttacttttcattggattgcttcataatttcttggtgatggaaaattcattcctaaagcaacaagattaaaggatgtttgggtaagcaattagtttacctgtcttttctgggaccttacacggttcatccatgattgcattttcttttagaattggagtttaatgaataaaaactttaatataatctactgattctttatctcactaaggtgaaacactcttatcttacagaaatatttccccttttctttgcttttaggttggcattgcaaatggtacggtcaccgaacaggctacaaagaatgccctttctttatcaaagacaaccaaaagttacaacagttcagagtagcacatgaggatttcatgtatgacatcatacgagacaataaacaacatgaaaagaatgtaaggatacagcagttaaaacagttactggaggattctacctcaggtgaagataggagcagctccagttcctctgaaggtaaagagaaacacaagaaaaagaagaagaaagaaaagcataagaaaaggaagaaagaaaagaaaaagaagaaaaaacggaagcacaaatcttccaagtcaaatgagggttctgactcagagtgacaaggatgtgacttgttcaacattctcttctcaaacactgaccaaggaacagaggaagatgcagtcagagaaagcagcaggatagagacgccgagagaggagtatatgtgggtcacagcagtgagctcccacccgccttgcagtgaagatgtgaccccaggagagggagtgtctccttccaggtgctagctctggacagcagctgattttaggcaggaaagtttcttcatcgttgtcctccctgctggtcacatgagtttacgattcctttgaagtgtctcccacagggtggcaggactggg

SEQ ID NO: 72103 - DNA, 2225 bp, Homo sapiens; identical to SEQ ID NO: 65942

SEQ ID NO: 72104 - DNA, 3289 bp, Homo sapiens
gctggccttttgctcacatgttctttcctgcgttatcccctgattctgtggataaccgtattaccgcctttgagtgagctgataccgctcgccgcagccgaacgaccgagcgcagcgagtcagtgagcgaggaagcggaagagcgcccaatacgcaaaccgcctctccccgcgcgttggccgattcattaatgcagctggcacgacaggtttcccgactggaaagcgggcagtgagcgcaacgcaattaatgtgagttagctcactcattaggcaccccaggctttacactttatgcttccggctcgtatgttgtgtggaattgtgagcggataacaatttcacacaggaaacagctatgacatgattacgaatttaatacgactcactatagggaatttggccctcgaggccaagaattcggcacgaggtttttttttttttaagtgggacaattaaaaatttaaaaaataattttaaaatagaacagcttagagataggaaacctaaatttatttcccaattccttactgtgcccccaaaaccagggttcaccaaaagggctgtcctcccaacaattttctgaattctatatattcagcattaaattccatgataaagttggaaatccattcaccatttgtaatacatattgatgcatttaataaaattgcatgggccgtatcttttgcatttctgtatcctagtattaagtacagtgcctaccacaggccaggttctcaatacttgaataaatgacacaaaaatagccaggaccagcaagttttttctgggtgggcttcatagaatctctgtacttgctggaatcaccatgaaatccatggtcttcagctttgcattttcagcaacatagttatattgagttatcctcaggtgagcagtgagacccttgggagcggattcatggtagggtggctttgtaatgtgtcaccttggtgaggctatgtttcccggaactctcttccagtaagatgggccacaagagacattttgcttgataaccggagggcggaagtgaagcagcagcacattgtttttacacttggaaggttggtgctggggcaccaggcgttgttgcagttcacacgttgccatgtatctgctagatcacctcgttggtgtgggcagtagtcaggcctgcagccaggcctgcagctgctccaccttccccaggatcatcctttcagcttctctaattcctgggccagatgcatatttaactctgtgaggaagggcaccagcttcttctgcaggacacccacatcatcgaagctggaggtggtgagagactgacatgggttccaggccatcctcgtgggttccagctcgtgctcgtgggctccactgtgtcctcggtctcccacactttacatccatcttcccttcccgagtgcctgccctgcagacttgaatcctacagtctgtagaagcctccagtcaactgctttctagctccaggttttttaaggtctttggaccttggcaaccagactgctgtatctcggaagcgggttccacccaggctgaaaatctccgtgatcacgggtgtgccagcccctcctgcctcttcctctggggccaatttggaggcagaatcatccttgttctcctccttgtcctcctctgggtcaggtggctcttgcttcacagaaggcaggcctgggtctactgccttgctagggcagccaggcaccaatacgggagaagtcaggacagctgtgcctggtgtccactcgtcctgggtatccgccttctcttgcttcacctggggtaaggccacaacccaactcatgccagaacactgggcytcctgcaacagggcttctgtggaagctgcaacagggcccggcacctgcacaggamtgcttgcgcccttcccgtaaaaaacacaaggttcagtgcccaggcgggggcagcacaaagccaccacctgcttcctgcttcgttggagcctgggtatggtctggttgggctgtgcgtgtagccaaggtgggcttcaaggtagggccaagatggtgccgtcgggcagagctgggcctctttcgacgacggtaaggtgggggcgatcctgccccatcctcagactctgaccagacactgggcagcagccgcttcatggcaaactgcaggcattggcgccaacgacacttctggcgcttctggttgctgcccccgaatttgggcttgtcgcagcagaagtcgcagcggccacatccattccgccgtaggcaggctgcacaggccccgcacttgcggttctgccggcggttcgtgtagggctgtagctcgtcctcgtctacacagtaatagatgaactcggcaggtggcgagggggccagggctctggggtgcggctctgtgggctctggggactgtgatgggggtggtggaggcagtggctgggctccggggcgccgcctggcagccatcttggagtcacagcctcccttgcggcgggcatgtttaccccgtaggcaacgtcgctggacacatttccactggcgcctgagaccagggcggggagggcgaaggcagatggggcaatggccacaatcytcttgggtctgacagccccggcatactccacaccctcggctcttaaacattctctgttcccggttgaaggcaattctctgtgctcgacagtctttgcacaacgttttgagccgctgcctttgggtgccatcccctgagaagctgattccacagttctcacagcacccaggagcagggaatgaagctggggctgtgtcagtgtcagccttggtctcatccctcggggcctccttcctgacctcaccactctggggtccaacctgacgtttccgagtcttggctggccttgaaggcttctttcgcttcttgctggcaaccgccacgggatgggccttgggggctggatagcacaagatgccttgtttgaagtcgaagagggtgagatcacacgcagggcccaggtatcgagtcagctcaactttgcttcggatcctgtctcctgtggggctctggtaataggtgtctgagcgtccacaggtggcccctgacttgcgaaagacttcgcggcgcttccagccagggcccagggccgggcagtccagccagtcctcagccatggaggccacaggaagcagcagtagccagtttggcaccaggccggtatcttccgccactctaggcccgtggacccatggcgagggtccctcctgcacctcccgcctcgccctcctccccttcctcctcctccgcggccggggggagtatcacacaaa

SEQ ID NO: 72105 - DNA, 3233 bp, Homo sapiens
  misc_feature (1)...(3233): n = a,t,c or g
gcccttaaaaattttttttttccctaaaaccttaaaattcttgaggggggttgggccaaaaagttccccccccaaaaaaagggtttcttccaaaaattcccaacgagggtttaaaaaggccccccaaaaagaaaaaaaataaatcttcccccccccggttaattttggcccccccaggggatctttaaaagggccccccctttttgtttttttattatcatctttttggtttttttttttaaatattaaaacaataaatctttattaaacagttttcacggcattttaaaataaatttaaaaaataaatatttgcattatagcagaaagtcacatgtattgcatcaactcacttttacaatttaatggcatgagacaactaagcatcagcaccataaaactgttaagatttgtttcttaaattcaaggaaatagctctaaagcactgcagcatcaataattttgaaagctataacccagtgattggtgctcatagtagccaatgtttctttttattactgggcaactgtgggagacagagttcttccagtactaaatattaataaggttctctgatcgacaatcccccatctatcagtgtgtcagggattcacaaaggaaaaggaactgcagggttatgtaggtatattcccctatctggtggatttaggtttgcacaaagacacttattctagcaaaaaagaaaagatagtgtttccaccatggctaccttttttttctttttatagagtctcagagtaagatttaaatcataatttttaacctttaaaagtctgttcaagttcaattacaaccatagaaactgtactggtatcagaacataactattttattacaaaacttaacattatttacaaaatgaaaaaataatcaaatgactattgcaggccaaagttaaaggtttctcactcaatgattgaagaaaaattaagcaatatttccatgcactcacaccagatcatttctgaaatatgcaaactcttaaaattcatgttagtaaaactttaatgtattcataatacttgctatgtttattagaagatggtcaaaaaaaatccatggttctgtacaataatattaacagtttgttcattttcctttaatattttttggcttccatgaacactcgtagattgaacattctgcaagtaagaattataatagtacctctgtcaccttgctgaattcatcaccacaagaaaaacacaaatagtttaatgcttttgcactaaactgaatagttataactccaaagttatattaaactgaagccttcattgtgatcaatagcttggatcagtttagagcgtagagtttctttttctgtatattttggaagatccagaagattaaaacaagtatgggaaactgggagatactcctcaccacctcctgtggactggatgactagtttcagactcttcataccaagaataggaatgcgatcactacctgtcaaaaataacagaaactgtttcttcttttccaatggtaattcgtgaaatacttcccaaaaaatttttatcgtaggatgttctgcccaatattcccctttgtattctgtattcttttccagttccttccaatcataatttgtatttccaatgaccattgcttgtagttcattaggctgaaagagcagaaggacttttcctccacagaccttatgaaagcccgcatgaaaagcatcaaataaggaagccactgatttattgaatatgtaatccacataagcatcgacaaactcttgccgattttgtttgttaacagctgtgtctgcaccatttagaaccagctctttcacttctgttgcaccaaagttttcaactgtgatcgtaaaattaagacaaaatgtttcctctatgtcatcttctggataatccagtaactgttgcatgcttctcccaacatcaggcattagttctttcaaatcatccaaggatggcttctttttcagtagtttcttatataaagccaaaggaaaatggaggtccacaatggtacaattataaattgctaagccacagataccaccaatcaaatggaacaaatctctgtcttcaaatgtcttatcagaaaaccaaatgagcctggaatcttcataatacctaaacatgccgtatttaggatccaataattccctcatgatgagcaagaaaaattctttgcgcacccctcctgcatccacagcatcttctccaacaaatataaccttgagtggcttcttgtaatctatgttctttgttttcctaaggacttccattgcatctcctacaatattttctctacgcaccactagaattaagcagggattcacagattcaatcactgggagaaaaagagaggagacattctgcctgtgggcctgatcaatagccatctgcatctgtaagactgcatcggtctgtaacagagtagtttttgcttgggcatcaaatacaaatggatatgtacagattgtaacagggatatctgccaacattccataggcctgctgttggacccagttgatataatcatttcttatgtctatcaattcttgtacttcatgtatataaaatttatcatactgtataatctgtcccattttctcatttaccctatgtagtatttctaaaacctttaatgcagtatgaagaaaactgttgaaaattcttctttcagaagggggaataccgatcttgtagagtttcaaaagatgtaccacaacttccttaaaaagttctactatcttgaggaatagtggaggttcaagtactgaccaccagttttcaagtactttcaggggtgccttttctaggttcacaagagctgtaccaaagggaattgctattgctgagaaattggtggaatcactcatcaggggacattctggtagagtaagataaaacctcaatgcctcaacatcaggtaaggagctagtcagtttaggaaataagattcttttccaaactaagctgccacctgctgagatatctgcggatgatcaggttgtataagtttgtggaataaaagcctagcagcattcatatcaacccctnaaaatctggtacctgttctatagtgatcatcattgctaacagctnaaaaacttccatttaggcaaccagaggaagaaaacgttccatctatctcattggctatctccacaggaaaccttccagnaggatagctcagccatttctgaattagagcttcattcactgtccagat

SEQ ID NO: 72106 - DNA, 680 bp, Homo sapiens; identical to SEQ ID NO: 65944

SEQ ID NO: 72107 - DNA, 4280 bp, Homo sapiens
  misc_feature (1)...(4280): n = a,t,c or g
aagaaattgcaggtgctgcagcagagaacatgttaggcagtttgctgtgcctcccaggttcagggtcagtgcttcttgacccctgcactggttctaccatatcagagacaacaagtgaagcttggagtgtagaggtattgccaagtgactcagaggccccagacctaaagcaggaggagcgtctgcaagaactggagagctgttctggactgggtagcacatctgatgatacggatgtcagggaggtcagttcccgccccagcacaccaggcctcagtgttgtgtccggcataagtgcaacctctgaggatattcccaataagattgaagacctgagatctgagtgcagctctgattttgggggtaaagattctgtcactagtccagacatggatgaaataactcacgattttctttatatacttcagccaaaacaacattttcaacacattgaagcagaagcagacatgagaatccagctgtcttctagtgcccaccagctgacctctcctccttctcagtcagagtctctgctggccatgtttgatccactgtcttcacatgaaggggcttctgctgtggtaaggccaaaggttcactatgctaggccatcgcatccaccaccagatcccccaatcctggaaggagctgtgggaggaaatgaggccaggttgccaaactttggttcccccatgttttaactcccagctgaaatggaggcattcaagcaaaggcattccttacccctgagagactagttcgaagcaggagctctgaatatagtatcttctgtccggagacccatgagtgaccccagctggaaccggcgtcccaggaaatgaagagcgagaactccctccagctgcagccattggtgctacttctttggtggctgcacctcattcatcatcttcatccccgagtaaggactcctcaagaggagagactgaagaacgcaaagatagcgatgatgagaaatcagacaggaacagaccttggtggagaaaacgttttgtttcagccatgcctaaagctcctataccatttagaaagaaagaaaaacaagaaaaagacaaagatgatctggggcctgacagattctcaacactcacagatgatcccagccctagactcagtgcacaagctcaggtggctgaggatattctggacaaatacaggaatgccattaaacggaccagccccagtgatggagcaatggcaaactatgaaagtacagaggttatgggtgatggtgaaagtgcacatgattctccccgtgacgaagcactgcagaacatctcggctgatgatctcccagactctgcaagccaagcagcccacccgcaggattcagctttctcttacagagatgcaaaaaagaaactgaggcttgctctttgctctgcggactctgttgccttcccagtgctgaccccattcaacaaggaatggtttaccagaccacacagacccagaagacaatgaaattgtatgcttcttaaaagttcaaatagctgaagcaattaatttacaagataagaatctaatggctcaacttcaagaaacaatgcgctgtgtgtgccgttttgataataggacttgtaggaaactgctggcttcgattgctgaggactacagaaaaagagccccatatattgcttatctcactcgttgtcgacaaggactacagaccacacaggctcacctggaaaggctattgcaaagagttttgcgggacaaagaagtggccaatcgatactttaccactgtctgtgtgagattactgcttgagagcaaagaaaagaagatcagggaattcattcaagactttcagaaactcaccgcagctgacgataaaactgctcaggtagaagattttctgcagtttctttatggtgcaatggcccaggatgtcatatggcaaaacgcgagtgaagaacagcttcaagatgcacagctggccattgagcgaagcgtgatgaaccggattttcaagctcgccttctaccctaatcaagatggggacatacttcgcgaccaggttcttcatgaacatatccagagattgtctaaagtagtgactgcaaatcacagagctcttcagataccagaggtttatcttcgagaagcaccatggccatctgcacaatcagaaatcaggacaataagtgcttataaaaccccccgggacaaagtgcagtgcatcctgagaatgtgctctacgattatgaacctcctgagcctggccaatgaggactctgtccctggagcggatgactttgttcctgtgttggtgtttgtgttgataaaggcaaatccaccctgtttgctgtctactgtgcagtatatcagtagcttttatgctagctgtctgtctggagaggagtcctattggtggatgcagttcacagcagcagtagaattcattaaaaccatcgatgaccgaaagtgaccaagaccaaggcccaccaaggcagcagactgttaatcagacaaacagatctctgagaaggtgcatcagctgctttgaaggctgaagattgttttgtatgatactgcacagcatcaggcattttaaagcagatctttactaaacaggttaatgagctaacaagcaggttctctcgtctttgggctctttcctttctgagttgcatattctattttcttgtccccaagtagagactagtactacaaaaagggaccacatttttcaagtatttctaagtataaaaaacaaaacaaaaatctcttaggaaatgtctagacctccattcttggattccctttctttccttttattttaaaaaagaacagtacccctcttttaagatgctgtcttacattaatgagcatctaatggaaagaaggtatgagttgcactgaggattagaatagtggtgcgttagtggcattatctataaatacactcacctaaattgaaagctaagaaggaaatgtaaatataatatatatttatatttgatgtaatatggacatctgcagattctaataaacaaggactattgctgatagtaggctgtgacatactgtcttgtgaaatggtttccttgacaaaatttaagctgagcttaaaagcaaaaaaacaaaaagtacacagaaatatttattaaaatgtaatacagtttattgaactttctaggtatggagtttgatggacagggctgcctttaatgagtgtgaaggtcactaagtcacttagacatctcaccgtggaagtttgtgagcctgcattaggagatagactgattaccatacatgacataaaaaggaacagtggatagctcatactttatggtggttcttctcctccgaaataatatactgcagaaatcccagacagagctccttacaaacctttaattgtaatatatttttgatgattattcacattgaatgcacagaccaagaattcagtgaatgtcattttttaaaaaactaatttgtattgtctgctctagtgatacaagttttactagtgataaactattttaatcaaccatactattcttatggaaaaaaatatctattttggcaggtttctgtgcctttatttccctcttctgaaaaaaagtctgtgttttcatagtttggtttgcattgtatatcaataattaatcaggaatgggttttggtgcctgaaaaattggccatggaggcacaccaaagcttcaagcacaagtcttgtacatgggccatcactgtctggtttcacttcgtgtgtttcctaaacacatttagctgcttttttaacaaactcagccccatacttgagtcccttgttgttgggagcatttccaggcatcttttaagggaactgtgacaaacagcctcgggcagatgaacacggaggctctctgttgtctgtctctgagatctttgtgtctgggaatgcctaaagattttatttttttttctttggttttattttattttattttatttttttgagacagagtctcaccctgttgcccaggctggagtgcaatggtgcgatcttggctcactgcaacctccacctcccagttcaagtgattcccctgcctcagcctcccgagtagctagggactacaggcgcatgtcacccaagcccggctaaatttttgtatttttagtaggaaacgggggttttcaccatgttgggccagggtggatcctcaatctcctgaacctcgtggatccacccgccttngggcttcccaaagtgccgggatttacaagcgtggaaccacctgncccagccagaaattaggattttt

SEQ ID NO: 72108 - DNA, 1195 bp, Homo sapiens; identical to SEQ ID NO: 65946
  misc_feature (1)...(1195): n = a,t,c or g

SEQ ID NO: 72109 - DNA, 793 bp, Homo sapiens; identical to SEQ ID NO: 65947
  misc_feature (1)...(793): n = a,t,c or g

SEQ ID NO: 72110 - DNA, 1407 bp, Homo sapiens; identical to SEQ ID NO: 65948

SEQ ID NO: 72111 - DNA, 3013 bp, Homo sapiens; identical to SEQ ID NO: 65949

SEQ ID NO: 72112 - DNA, 1063 bp, Homo sapiens; identical to SEQ ID NO: 65950
  misc_feature (1)...(1063): n = a,t,c or g

SEQ ID NO: 72113 - DNA, 722 bp, Homo sapiens; identical to SEQ ID NO: 65951

SEQ ID NO: 72114 - DNA, 1180 bp, Homo sapiens
cccgggggtaaaaattttttttaattaaaccccggaaagcaaactttccaaccgccaggctatggcggttgtttttcccccttttccccttaaaaattttttttttccctaaaggctttaaattttggagggaggttgggccaatttgtcccccccccaaaaaaaaggttctttcccaaaattcccaagttggtttttaaaaggccccccataaggaaaaaaatttttccttgccatccccggttaaatttgggccccccaagggttcttttaaaagggcccccccttttttttttttttttttttttgcatcaacatttttattgaaatacaaaaagtgcaaacggtgaaatacatgattggtgccaaggaagtcattaagtgtgaatgtgaacactggattcacacagtacaagcacccgctccctggggtacagaccagtgggggacatgagaaagaccaaatagatccgaaaggctccccagtgaatggggctgtgagcgacacttgatacacaaaggagggcggagagcagagcagccctggccgaggctagagaccaagggactgatgaagaaccagcagcagcccaggccccagggggctggatgcactgctgatggtcttgggagagcccagcgaagttatgcccaggcccagcctggcttgcggatggggctgggctggtcagtgaggatccccacagtacgggctctggaatcatcctgcctggccaaggtcatgggggcagggtcactgcaggtacttccctgtactccccaaggacaaggctgcaggaagagggatccccaggaaggagtgtaattctacgagacagtgggagtgagatcagccatcactggggccgaggttctttgaaagacaacagggctggcccgggcgcagtggctcacgcctggaatcccagcactttgggaggccgaggtgggtggatcatgaggtcaggagatcgagaccatcctggccaacatggtgaaaccccgtctctactaaaaatacaaaaattagctgggcatggtggcatgcacctatagtcccagctactcaggaggctgaggcaggagaattgcttgaacccagaaggcggaggtgtgccgagatcgcgccactgcactccagcctggtgacagagcgagactccatctcagaaaaaaaaaa

SEQ ID NO: 72115 - DNA, 2426 bp, Homo sapiens; identical to SEQ ID NO: 65953

SEQ ID NO: 72116 - DNA, 688 bp, Homo sapiens; identical to SEQ ID NO: 65954

SEQ ID NO: 72117 - DNA, 881 bp, Homo sapiens; identical to SEQ ID NO: 65956
  misc_feature (1)...(881): n = a,t,c or g

SEQ ID NO: 72118 - DNA, 782 bp, Homo sapiens; identical to SEQ ID NO: 65957

SEQ ID NO: 72119 - DNA, 1366 bp, Homo sapiens; identical to SEQ ID NO: 65958
  misc_feature (1)...(1366): n = a,t,c or g

SEQ ID NO: 72120 - DNA, 1438 bp, Homo sapiens; identical to SEQ ID NO: 65959

SEQ ID NO: 72121 - DNA, 1415 bp, Homo sapiens; identical to SEQ ID NO: 65960
  misc_feature (1)...(1415): n = a,t,c or g

SEQ ID NO: 72122 - DNA, 2964 bp, Homo sapiens; identical to SEQ ID NO: 65961

SEQ ID NO: 72123 - DNA, 2465 bp, Homo sapiens; identical to SEQ ID NO: 65962
  misc_feature (1)...(2465): n = a,t,c or g

SEQ ID NO: 72124 - DNA, 1010 bp, Homo sapiens; identical to SEQ ID NO: 65963
  misc_feature (1)...(1010): n = a,t,c or g

SEQ ID NO: 72125 - DNA, 1835 bp, Homo sapiens; identical to SEQ ID NO: 65964
  misc_feature (1)...(1835): n = a,t,c or g

SEQ ID NO: 72126 - DNA, 1031 bp, Homo sapiens; identical to SEQ ID NO: 65965
  misc_feature (1)...(1031): n = a,t,c or g

SEQ ID NO: 72127 - DNA, 764 bp, Homo sapiens; identical to SEQ ID NO: 65966

SEQ ID NO: 72128 - DNA, 1674 bp, Homo sapiens; identical to SEQ ID NO: 65967

SEQ ID NO: 72129 - DNA, 1640 bp, Homo sapiens; identical to SEQ ID NO: 65968

SEQ ID NO: 72130 - DNA, 4100 bp, Homo sapiens
  misc_feature (1)...(4100): n = a,t,c or g
ttttttttttttgagaatggaagcaaaacttttattccttcttggctggagaaaggagaaactatgtgggtggttgtgtacccaggacccccattccttcaccccctcccaagaaccaaaagaagacaaagcagcggccacccaaatgggctcccctcttgcccaaagtgaaagccgagaggtgcagcggcttggctggggaggcaggtgagcgcaagcaccggcacagggcaggggccggcttgcagtgacagggcgggcggcccagggcggcccatggggccggggtttgaaggggaagaggcgccggggcttgcttgggtaagcggggcaaggcttgggggggctgccggcttggcacggggccccaggactcaggggcaccaacaacgcgggtaagggggctggcctgggaatgggcttcgtcccccccaatttgacccaccagttgtgtacttccccctttgtccttgaagcaggtaaggacactcctgtagagccaggctgcccgacgtgctttaaccaggatctcctcggcaggggggtcctttgggccatgaacccccaccagcaagcatgttggatgcctgctttggcggcagtcctatggtgaaagcggttctttctggccctacggtaggccgttgcttcagcccccaggcccctgggccaccacccttggctggcgtcagcaggccccaggacccccgngcccccatgccttgggggcacaggtgggccttgggtcagagagtctaccaacacttgatgatgtctcgtggggagcctgtgttgctgacgagaccgggggccctgtgactttggcccttgaaggggctgcccccaatgtggtaggggccgccgtacttgatggagatgaggtagctgccaggtgccatgggggtataggtgacgcggtagccctcagggcactcctggcaatccatcttcaccttggaggggccgtcaatggtcaccgacagggcaccagctcccgcattgctcgtgttcacgacgaactcagctgggttccctgtgacaccgccttccagacctgctccgtaagcagacaccaagcctgggtcccctccatgcccaggctccccaactcggatcttgaaggggcttccagggatgtgggtgccgttgaacttgacgtcaatcaggtaaacgccattctcccgagggatgaagcgcacagcatacttatcttggtcaatttctgtgacatagcactcctccagggctcctgaggggctgtgcaccttggcatcgatcgcccccttggccccgttcaggctgactgcaaaagaggctggctggttgacctttagccctgactcctggaagcacagcagacatggttagatgggggtgcttgagccagggcaagggaggacggaaaggccccaggagcaacaggcccgcgggtcgcacttacccatctggcgtccaacttggtttaaagagggagagccactgatttgcaaggggcagcaagccacaggcgcacatccccgcccctgcccccacactctgccgtcgcacacacccaggtggcaggaagggagggctgccccaccctgtgggcagcacccagccttggcaggctgtccctctttaaaccgcagccctggtgctcaaggggcacaggcttctgttcaaagcctccagacctgagacacgagaaaaactccacgtggtgggcaggatatttcctgccgaccccaagcgtgggctgcacccggccagagcagaggcctggaacccagagctgggccaggggggtcactgaacacagggccaaggcctggtctctgcggtggctctggtctgtccgggcccaggagccccaggtgggcggtttctctcggtgcctcacccgaaggctagaaacagtgaggcggcgggcgtcgccagacggagaagccacaggcaccacgaaggggctgtcgggaatgtgttcctcgttgaacttgactgagacttcgtagtcacctggctccttggaccacataagccacaccacaggagccgtccttgcggtcctcaaaagagatctcagccttgctggggccctcgacagcaatggccaggcctccagcaccagcttcccgggtccagatactgaaattcggcttgccaattagagcttctagtactccccagtcccaggtcctccaagcacggacctatgtgactccccctttccactaggggccccacggtgaactggaaggggctccccaggcacgtgcttggcccttgtacttcacgcttgactgtgtgtgtgcccatctcagcgggaacaaagcggatgcagtaggtgtggttctccccttccacgatctcggccctcatgggtccttcccgatgggctggtcacctgggctgtcatatcctggatgctaatttcagggattttcaggctgaggtcacaatgactaccaacgttggccactgaaggagcccgacgcctgcgggtgatggctctctttcacccggccctcgcctgtcaccttcacagagaaggggctgccaggcacgtgctggtcggcaaacttgatgttgatgatgtagttccctggctctgttggggcagtaagggaccctgcacgtcccgtcctccaggtcctctgtgttgatgtccaccttgctggggccctcaatggacaggctgagcccaccatagcctgcatcgcgggtatcaatgataaactctgcaggctcaaaggtgtggccttcgtgaaggccctgaccagagacccgaacacgactggcatccccaatttccgactggctgatcaccaccgggatggggctgctggccacgtgctggccatttttcttcacatgcaccaggtgctcccccgtctccttgggcacgaatgaaatccccacgtggccattacgcagccgcttcagcaaacagggctcctcccggcccgagggcgggaccacagtggccgtcagcaggctgagatccgtctctgagatgttgatggggatgtcggcagcagagccgacctttaggtgggacatacgcatggagtcgtcacctgtgacccgagcagtgaaggggctgcctgggacgtgctgttcattgtacttgactagaatgctgtagtcccccggcagcacaggcaggtaggacacgctgcatgtcccatcctggttgtcagtgcagctgatttctgctttggacgggccctcaatggccagagacaggcccccctctcctgcatccttggtgttgacggtgaaggtggcaggcttgttcactactccatgggtgaggccaggcccataggcagtgacatggccacagttgacgtaatccacatagaactgcaaggggcttcctgggatgtgcatgttgtcatagcggatgtccatctcgtgcaggccagcctcgctgggtgcataccgcacggtcacggtgccgtctttgttgtcagtgatgggggctgccgccagcctagcctaagggcatccaaacctcccctgtgatctcgcccttcttgatggtgaaggggatgacaaggtcaaagggcctcaggctggtcacatccagcccattgacacccaccaggggcctctccggggcccaagtctgctggccgccctgggcgtaggtgtactgtggggccagctgctgagaccgtagagggggctgcaccgagggctggtccccagccagagccgtcacttggaaggggctgttgggcacgtgctcgccaccaaagcgcacacagatgacgtatttgcccggctggggggccaagtagaagatgtcgaaagtgccgtcctcattctccaccacgtccacatccacctctgagccatcaggcgtgcacacggtgcacgtcactttgcctttgcctgccgccttagtgtccacagtgatcaccgtctcctccccaatctgaatggtggggccgatgccagcacctgtgacagtgcacttgaccttggacgcatctgtcacatcatgcacagggaccttgaaaggactgcctggcacttgatggccaccataggtgacgttgaggctgtaggtgccagcctcataagggatgtactcgaccgagcagctgccc

SEQ ID NO: 72131 - DNA, 3428 bp, Homo sapiens; identical to SEQ ID NO: 65970
  misc_feature (1)...(3428): n = a,t,c or g

SEQ ID NO: 72132 - DNA, 826 bp, Homo sapiens; identical to SEQ ID NO: 65971

SEQ ID NO: 72133 - DNA, 1091 bp, Homo sapiens; identical to SEQ ID NO: 65972

SEQ ID NO: 72134 - DNA, 881 bp, Homo sapiens; identical to SEQ ID NO: 65973

SEQ ID NO: 72135 - DNA, 1796 bp, Homo sapiens
tggccatctttactgtgggctgaagcctgtgcgcttactcgcgcatgtgcaagccttccctcgctttcctcttccaagtagccttgcctagagcggagcctcccgcgccatttctgtgcgcctgcgtagcgtgaccctgcgcagcctgggaggcgggtcttagctccaggtgcgtacggcatctgacttgacgtggcccacaactgaaaggtctggggagaaggcgccgtgtccgggtgtggagaggggcgtcgtggaagcgagaagagtggcccgtccctctcctccccctttccctctttcggaaagtggtttctgcggggcccgggagcctcggagtaccgaacctcgatctccggggcggggtccttggtggggactgagcgccccctcccggggacgggcggtctggccgcggagtcccctgcgggagcgtgattggctggaaacggtcccgaacccccaggggagcccgatccctgggggaccctggcttcggactccagtatctgtcgtcgcagggtccctgccctagtggcctatgtcccttgctcggggccatggagacactgcggccagtacggcggcgcctctgtctgaagaaggggaagtgacctccggcctccaggctctggccgtggaggataccggaggcccctctgcctcggccggtaaggccgaggacgagggggaaggaggccgagaggagaccgagcgtgaggggtccgggggcgaggaggcgcagggagaagtccccagcgctgggggagaagagcctgccgaggaggactccgaggactggtgcgtgccctgcagcgacgaggaggtggagctgcctgcggatgggcagccctggatgcccccgccctccgaaatccagcggctctatgaactgctggctgcccacggtactctggagctgcaagccgagatcctgccccgccggcctcccacgccggaggcccagagcgaagaggagagatccgatgaggagccggaggccaaagaagaggaagaggaaaaaccacacatgcccacggaatttgattttgatgatgagccagtgacaccaaaggactccctgattgaccggagacgcaccccaggaagctcagcccggagccagaaacgggaggcccgcctggacaaggtgctgtcggacatgaagagacacaagaagctggaggagcagatccttcgtaccgggagggacctcttcagcctggactcggaggaccccagccccgccagccccccactccgatcctccgggagtagtctcttccctcggcagcggaaatactgattcccactgctcctgcctctagggtgcagtgtccgtacctgctggagcctgggccctccttccccagcccagacattgagaaacttgggaagaagagagaaacctcaagctcccaaacagcacgttgcgggaaagaggaagagagagtgtgagtgtgtgtgtgtgttttttctattgaacacctgtagagtgtgtgtgtgtgttttctattgaacacctatagagagagtgtgtgtgttttctattgaacatctatatagagagagtgtgtgagtgtgtgttttctattgaacacctattcagagacctggactgaattttctgagtctgaaataaaagatgcagagctatcatctcttaaaaggaggggctgtagctgtagctcaacagttaggccccacttgaagggagaggcagaattgtactcacccagattggaaaatgaaagccagatgggtagaggtgccctcagttagcacctgtcccatct

SEQ ID NO: 72136 - DNA, 2707 bp, Homo sapiens
ccgccagcctgggctccgcgcagcccaccgatctgggcgcccacaagcggccggcatccgtgtcgagcagcgctgccgtggagcacgagcagcgtgaggcggcagccaagcgagaaacaaccgccgccgcctgcgcaccggggcccggccgacagcctgtccaccgcggccggggccgccgagctgagcgcggaaggtgcgggcaagagccgcgggtctggagagcaggactgggtcaacaggcccaagaccgtgcgcgacacgctgctggcgctgcaccagcacggccactcggggcccttcgagagcaagtttaagaaggagccggccctgactgcagttgcaagaacagcaaggaaaaggaagccctctccagaaccagaaggtgaagtcgggccccctaagatcaacggagaggcccagccgtggctgtccacatccacagaggggctcaagatccccatgactcctacatcctcttttgtgtctccgccaccacccactgcctcacctcattccaaccggaccacaccgcctgaagcggcccagaatggccagtcccccatggcagccctgatcttagtagcagacaatgcagggggcagtcatgcctcaaaagatgccaaccaggttcactccactaccaggaggaatagcaacagtccgccctctccgtcctctatgaaccaaagaaggctgggccccagagaggtggggggccagggagcaggcaacacaggaggactggagccagtgcaccctgccagcctcccggactcctctctggcaaccagtgccccgctgtgctgcaccctctgccacgagcggctggaggacacccattttgtgcagtgcccgtccgtcccttcgcacaagttctgcttcccttgctccagacaaagcatcaaacagcagggagctagtggagaggtctattgtcccagtggggaaaaatgccctcttgtgggctccaatgtcccctgggcctttatgcaaggggaaattgcaaccatccttgctggagatgtgaaagtgaaaaaagagagagactcgtgacttttccggtttcagaaaaacccaatgattacccttaattaaaactgcttgaattgtatatatatctccatatatatatatatccaagacaagggaaatgtagacttcataaacatggctgtataattttgattttttttgaatacattgtgtttctatattttttttgacgacaaaaggtatgtacttataaagacatttttttcttttgttaacgttattagcatatctttgtgctttattatcctggtgacagttaccgttctatgtaggctgtgacttgcgctgcttttttagagcacttggcaaatcagaaatgcttctagctgtatttgtatgcacttattttaaaaagaaaaaaaaagccaaatacattttctgacattgtaagattgccttactgtctgtcattccttattgctggcccctttctcaggccggaggccaagtggtggagaaggaaaggaaatgatcgaacgggcatgttgtcaagtgggcatgccactgggaaataccaccagtttaccctgaaacattgtcctcagaggagtaggaaaggggattttgaatctctattttgctcaaaagttcagttcctgagatactgatgactgagagtgctgctgggaaattttcaggattgtgtggtcttttggggttttttgtttttttttttttaaaaaaaatttgaccgttgttcactgtcccacgtgatcagttgtaagattacaatgctgcatgctagtgggttacataaaaaacaattccagtgatggaaggcggttataatggatggtggtgtgtacaagatggcactgccatctttgagcagagcccagctctgcagcgccacttcatctttttaaacaccctataggtctgtttgttgttgctgttgtcctttattttgaaagagttgcaagagaagttacagtccaggtgaacttggagattgtgggattggttttgtttctgttttgttttgtttatcatttacctgtagtgctattgctgttgatactatcacctataccctgtttctagtgagtgctgaatacagtatggtacaatgacagtaacagccgcgtggtgctgccaggactgcccttgggcatatcagtgacagcccaaatgtgggtggaggaaacctgtaatttccttcttaacatgtgtttgaaataccaagtgaataatactgttctggaaaaaaatgataaactagtggaaattaaagaaattaagggttttatataatagacaggccccacctctcaaaatatttttagaagtctttttgtaaactaatttcttttgatcactattttgcatcagtaaaatgatttttttaaaaccaataaatcatcaattattagaaatagttgtctcacagggatactggtttttcttttgggctgttatgatttaacattgacaggaacactattttaaatccttacgttcaggtgtttgtaacttggccttataattaggctgaattatggcttcaaggtctacaatttatgtgtatggttcacagcctagctttctatttacatttgaaaatacagatttttaccaactttggattcttttttaggtatatggttgcctttcctttttaaattgttcaaaactattttttaatggtcag

SEQ ID NO: 72137 - DNA, 1233 bp, Homo sapiens; identical to SEQ ID NO: 65976
  misc_feature (1)...(1233): n = a,t,c or g

SEQ ID NO: 72138 - DNA, 1191 bp, Homo sapiens; identical to SEQ ID NO: 65977
  misc_feature (1)...(1191): n = a,t,c or g

SEQ ID NO: 72139 - DNA, 1406 bp, Homo sapiens; identical to SEQ ID NO: 65978

SEQ ID NO: 72140 - DNA, 2408 bp, Homo sapiens; identical to SEQ ID NO: 65979

SEQ ID NO: 72141 - DNA, 733 bp, Homo sapiens; identical to SEQ ID NO: 65980

SEQ ID NO: 72142 - DNA, 727 bp, Homo sapiens; identical to SEQ ID NO: 65981

SEQ ID NO: 72143 - DNA, 1148 bp, Homo sapiens; identical to SEQ ID NO: 65982

SEQ ID NO: 72144 - DNA, 1538 bp, Homo sapiens; identical to SEQ ID NO: 65983

SEQ ID NO: 72145 - DNA, 2780 bp, Homo sapiens; identical to SEQ ID NO: 65984

SEQ ID NO: 72146 - DNA, 1606 bp, Homo sapiens; identical to SEQ ID NO: 65985

SEQ ID NO: 72147 - DNA, 1338 bp, Homo sapiens; identical to SEQ ID NO: 65986
  misc_feature (1)...(1338): n = a,t,c or g

SEQ ID NO: 72148 - DNA, 1673 bp, Homo sapiens; identical to SEQ ID NO: 65987

SEQ ID NO: 72149 - DNA, 1009 bp, Homo sapiens; identical to SEQ ID NO: 65988
  misc_feature (1)...(1009): n = a,t,c or g

SEQ ID NO: 72150 - DNA, 2535 bp, Homo sapiens; identical to SEQ ID NO: 65989

SEQ ID NO: 72151 - DNA, 569 bp, Homo sapiens; identical to SEQ ID NO: 65990

SEQ ID NO: 72152 - DNA, 1315 bp, Homo sapiens
ttttttttttttgaagttcatcatctttagacttaaggaattaacaagggtcagggagactacaccaggctgagggcttcttggttcctggagacatgcccagctacagcaaacacagggaaacacgaagggggcagctggaagatttggtcttgaacttggggggtgggtaagtgatgatccccacgactggagcagcaggaagaagttgtgtctgaggaagtgctgggccgcccagagggacagccctgccctggagcttgtcgccgggagggaagggaaacaagccccctccctcagtgctgaggaaaaggcacttggctgggtctcctcctgccctctccccatccgtgggagagacggggtccttgcctccttgcccctttcagccgcccagaagccggtcctggttcagcctctggaagaagcttttgccgaactcataggtgctgatcatgatggcacaggagggggcagccttgatgatccgaggaaggaagcctgcaaagagtcccttggtgcccgactcggcccggatcctccgcagcagcagccaggtggagtccacatgcagggggttcactctcacagcctccatcgctcccagagcgacctggcgttgggtctttaccacgtcaaagggtagagtcagcactgcagccaccgtccctgagatgccaccagccacaaagctcatgcccacagaagtctggtccttcggcctgaacccattgagccagctcttcaccagctcatagttgaaccagtacagggcttggggtgggggatgcactgagaagggcacatctcgaagggcagtggggccccagcccagccacagtgagcgccagccaccctgagccactgcagttcgaacacaggcacccagctcccggtacgacacatgctgagcctgcagctttgtccgcataagctccagggggctgatcacagtcacggtgcccactgtgtggggattgggggtgacaatggggagaagtgagatcacaggtcttacatggcatcacctacctgctgtcccaggtctggggacctagaacacccccctatccctaggctggcagaggttggggctgggagctgggactgactgggtttgggcagaggtggggacagagggaggtcaaaggcccaagactatgctcacggcgggccagcgcgccagccaccatgggtgcgtagaggtcagaggtcagggctcgaccacacaggaaggccttcagttggtcataggcagtgaagtagatggcggtagctggcacagtcatcaccagggtggcggggagctcgtgcc

SEQ ID NO: 72153 - DNA, 1441 bp, Homo sapiens; identical to SEQ ID NO: 65991
  misc_feature (1)...(1441): n = a,t,c or g

SEQ ID NO: 72154 - DNA, 1951 bp, Homo sapiens; identical to SEQ ID NO: 65992

SEQ ID NO: 72155 - DNA, 2725 bp, Homo sapiens; identical to SEQ ID NO: 65993

SEQ ID NO: 72156 - DNA, 302 bp, Homo sapiens; identical to SEQ ID NO: 65994

SEQ ID NO: 72157 - DNA, 354 bp, Homo sapiens; identical to SEQ ID NO: 65995

SEQ ID NO: 72158 - DNA, 2729 bp, Homo sapiens; identical to SEQ ID NO: 65996

SEQ ID NO: 72159 - DNA, 1446 bp, Homo sapiens; identical to SEQ ID NO: 65997

SEQ ID NO: 72160 - DNA, 2190 bp, Homo sapiens
  misc_feature (1)...(2190): n = a,t,c or g
attacgccaagcttggcacgagggacccctccaaactgtgtagacatagtctaaaatgtttggagtgtaatgaagtcttccaggacgagacatcactggctacacatttccagcaggctgcagatacgagtggacaacaaatgaagaaacacccctgccgccagtgtgacaagtctttcagctcgtcccacagcctgtgccggcacaaccggatcaagcacaaaggcatcaggaaagtgtacgcctgctcgcactgcccagactccagacgtacctttaccaaacgtttgatgctggagaagcacgtccagctgatgcatggcatcaaggaccctgacctgaaagaaatgacagatgccaccaatgaggaggaaacagaaataaaagaagacactaaggtccccagtcccaagcggaagttggaagaaccagttctggagttcaggcctccccgaggagcaatcactcaaccactgaaaaagctgaaaatcaatgtttttaaggttcacaagtgtgccgtgtgtggcttcaccaccgaaaacctgctgcaattccacgaacacatccctcagcacaaatcggatggttcttcctaccagtgccgggagtgtggcctctgctacacgtctcacgtctctctgtccaggcacctcttcatcgtacacaagttaaaggaacctcagccagtgtccaagcaaaatggggctggggaagataaccaacaggagaacaaacccagccacgagggtggaatcccctgatgggcgccgtgtcagacagaaagtgcaaagtgttgcgcaaaaacttttgaaactgaagctgccttaaatactcacatgcggacacacggcatggccttcatcaaatccaaaaggatgagctcagcccgagaaatagccacagatgctcccatgaggaaaatccccgtcccacattggaataaaaaagacatttttgttacaaagtttgccagtataatagagttaacagtactgtctaggctgttgcaatatattctctttcaatgtaccttccttcacctcgtcgtatatatcctcgataagtattaaaacagtatttgagtttaaaagagtttgtatatatttaaatgaataactttttatactctttgttacatgtttgtatcagtatttagtggaaaaccatttgagttgttttgggttagaatttttctttttgtactgtttctttaaaacagagttcttagtaacaggggcagttcctgaattcaaataaaccattttgtatgtttggattttgaatgggttaactaattacaggctaaaataatgccttttttagtgtttttaatttttagaattcactacataaattgtaagtaattgtgggtctcaaaaacactaggaacttttaagtgtcttagcacttcctcgatgtgcctgccctgagggagtgagttcacatttgagacaactgcactccagtgtggacgtgcctttgtcttcaggccatgccgaagggtgtttaaagcagtcttgcaggtcgctcctttcccagccgtggataaaaactgaagctaggaatctaataaggaatgctgatttcctcagttccattttgaggaatggggaaggctattctaaagaaaaaaatgggatttgttttctcggcagatctgcaaggctggctttaagagcacaaggagggaaagtaacgaaagggctggactactataaaagttacaaatacgtagttagaccaatagatttatatagtcaggtttttgtcatgtaatttattaactaactattacagaaacacagctaagaatatcaagtatttctctggctcttgacagaaaaaaatcagttgacttaaccctttgctgtcaaaagagttggcgtttcctgttctgggtgctactgccaaacgttatggtacttagagtcgggatgcacaacttcaaccaccgacttatcaatgcagccgcctgtgtattgcaattggccgttaccttaagcactgagccacccgggtttagttcagccatttcaagagtacatttaacgtcggcagttctgctttactaaaatgcagtagaggtactcttctgtcccttccgtttatagttctctgagagagttatattttttggttttgtttgtgtttcttttgaattnatatctgtattatcctgaacatgtttga

SEQ ID NO: 72161 - DNA, 695 bp, Homo sapiens; identical to SEQ ID NO: 65999

SEQ ID NO: 72162 - DNA, 2043 bp, Homo sapiens; identical to SEQ ID NO: 66000

SEQ ID NO: 72163 - DNA, 1994 bp, Homo sapiens
cggacgcgtgggggaagattaagtctgtagcactgtttgtagcagcgtgtccaaggcaagaactgataactctgagtgatgttcagaagtttgcagagataaatggttcagccctatgtagctacaacctaaagccttctgaatacactacatctccaaaatcttctgttctctgccccaaactaccagttccagcgagtgcacctattccattcttccatcgctgtgctcctgtgaacatttcctgctatgccaagtttgcagaggccctgatcacctttgtcagtgacaatagtgtcttacacaggctgattagtggagtaatgaccagcaaagaaattatattgggactttgcttgttatcactagttctatccatgattttgatggtgataatcaggtatatatcaagagtacttgtgtggatcttaacgattctggtcatactcggttcacttggaggcacaggtgtactatggtggctgtatgcaaagcaaagaaggtctcccaaagaaactgttactcctgagcagcttcagatagctgaagacaatcttcgggccctcctcatttatgccatttcagctacagtgttcacagtgatcttattcctgataatgttggttatgcgcaaacgtgttgctcttaccatcgccttgttccacgtagctggcaaggtcttcattcacttgccactgctagtcttccaacccttctggactttctttgctcttgtcttgttttgggtgtactggatcatgacacttctttttcttggcactaccggcagtcctgttcagaatgagcaaggctttgtggagttcaaaatttctgggcctctgcagtacatgtggtggtaccatgtggtgggcctgatttggatcagtgaatttattctagcatgtcagcagatgacagtggcaggagctgtggtaacatactattttactagggataaaaggaatttgccatttacacctattttggcatcagtaaatcgccttattcgttaccacctaggtacggcggcaaaaggatctttcattatcacattagtcaaaattccgcgaatgatccttatgtatattcacagtcagctcaaaggaaaggaaaatgcttgtgcaccgatgtgtgctgaaatcttgcatttgttgcctttggtgtcttgaaaagtgcctaaattaatttaaatcggaatgccatacacagccacagctatcaacagcaccaacttctgcacctcagcaaaggatgcctttgtcattctggtggagaatgctttgcgagtggctaccatcaacacagtaggagattttatgttattccttggcaaggtgctgatagtctgcagcacaggtttagctgggattatgctgctcaactaccagcaggactacacagtatgggtgctgcctctgatcatcgtctgcctctttgctttcctagtcgctcattgcttcctgtctatttatgaaatggtagtggatgtattattcttgtgttttgccattgatacaaaatacaatgatgggagccctggcagagaattctatatggataaagtgctgatggagtttgtggaaaacagtaggaaagcaatgaaagaagctggtaagggaggcgtcgctgatgccagagagctaaagccgatggcttcgggagcaagttctgcttgaacctagccgacggttatggaaacccattgacattccaaaacaatatatacacataactatgtatttgtgtgtgtgggtgtgtgtatatatgtatatgtatgtgtgtatatatgtatatgtatatacacacacacacataaatcagccaaaatcagagaaaaggaacagggatttaataccttttttatgcttatttttgtcaaacatgtactcctttcatacgggtggcttttacaaggcaacttccgtcatttaatgttttcaactgtaattgtcttaatggaaatgttaaaattcatatctgattaacatttttaa

SEQ ID NO: 72164 - DNA, 2076 bp, Homo sapiens; identical to SEQ ID NO: 66002

SEQ ID NO: 72165 - DNA, 1696 bp, Homo sapiens
tggggatggtgggtcctggggaaaaacgggcttttggtgtggaaatgacatctttcctgtttccgacctctgcctgcctcatgccaggtgagacctttcatgcctgtttccatgattgagaacatgggagtacgcttctttccacctacgttcctggtggattttcactggagttgggctgcactgtggaaaaggggttgggcagctcctgtggcacagtgagggggcatagaagcccaaggcagtcggtaagaaatcaccaatttattgaatgaaaaacccaacatcaactcagtccctcccacccccatctcctctctctggcccaggagacgctcaggacagcagggctgagccctgggaagggctggaggagagcttgggggaggtatggagaatgagaaaaacactttcaaaatgaagttctgtgcaaaaacttctgggaaggagtgagaggacaagagaaaagctccaaaggggctgtggggcgcagatggccgggctggggggtgcagagggctgggctggggccctgtgtcctcaaccactcctgagaacacggacggtcaggaatgaggggctcagaccccgggttggtgagagggaggtgacagggagggaaggagcctgctggagggaaacctggctgggaggatgggtcttgggcccaggctggggcctaaggagggggaagaacagagcagggaaaggcagaaaaactgacacggtgggaaggagggagatgaatgggagatgaaacagaatgtctgaggggcccacagacagcatgtatggtggtgggggtctgcctcccatctctccaagtccaggcagagctgtgctgggtgaggggctgggaggcagaggcaggagcatcattaacaagggtggaagccacgaagacagcgaccagtgcacagggtgtgtcacatggtacaaccaagagacttggcgtgcaaagaaccaaagaaacactcaggacacacacgacatctgcagggaacctgggggtggtgaggaagtcgtgcacgggtggtggggggagactgggaggcccctctgtcctagaaacgctgtgtcaccatagcaacagggtcctggaggcaggggagctgcctcctgcccctgtgagctgtgaagtaggggtcctgtgggctcagggtgcccccttaccctcccttgggaagctctggggcaggtggagaaccccataagagttgaaagtggccttgggtcctgctggaggcagcagagtgagtggatctggcagctgcatcctagaggacaccctggtggctggaggggctgggggaggactaggctctcctgctggggaccaggattccagctttctcatttccgagaaggaaactgataccacaaggaagagtttggaagtcgggtgaaggaaggcctgggggactcagtccaggggactatgggcaccagaaggcaaaaccaacacgccttgggcctggagcaggagggagaaggggaaaagcgggaaggaggaggggctgtgcaggggtgggctggaggggaggggagggaaggcgtccctgtggcagtgtccttcgggacctgggcgagtgagaggcagaccctggtgccagggaaggggtgctgggcccgggcctgctggcctccccctgccgcaggcggtgaggctggtggcagtgccaggagggaaagtgcc

SEQ ID NO: 72166 - DNA, 1515 bp, Homo sapiens; identical to SEQ ID NO: 66004
  misc_feature (1)...(1515): n = a,t,c or g

SEQ ID NO: 72167 - DNA, 4664 bp, Homo sapiens
ttttttttttttgtggttgtgttccaataaaaattttatttaacaaaatatgacagtgggggggccacagtttgcccaaactttgccttggaggacatgcagaggcaccctcagaattcagtgaaaacctgctcccatattgctaagactcatgaagtataatctctcaccttctttctctttcccctgcccaggccctaagttagggttcccatccatataacaaagacttctggtcaggtggcatttgctatctctgggattccctgcccatgaaagccacaaagagatttcttcttttacacaccctgaagcatattatggccccagcaaggctaactaaatcaaactgtggtttaaaaacaaaacaaaccaaccactgtgaaatatttatttttgttttgtagtattaagcatgattaaaccagtgcagaaaaataccaagtacattgggtgaacgatgagctagctgttctagtatttgctttttgtaatccagttaagaccatcagcatatacaacatcatcactaactcaacaatgtagctgcagggtaacatgtggataccctgtgtgctctactggcctccaaaggcattcaggggatcatcaaagatgttggacaccttgtgttcaaatcttggttcaggtgcggcctgtgcagatcggctttttggtttggttgtcttagcctggataccagaggagaagatgtcatccatatcatcatcaaatatagacttggcttccactttctttttggacttttcctttggttttacagttaagtcagcaaagatatcaatgttatcatcaaataaattagattcccaatgttttctccttctctctggttttctgagagggtttaattgcttccgtaggcaaaatatatcatccttgttaagcctcaaaaatatcgttgtgttgttaatatgacatccgtgctgactattgggattttgtctcattcttcttgactttctgatctgtaaagggggtcatcctcatcttccaggagaggaaagggatttgttttctttgctggttttggtttagcagactgaaagagatcatcatcactgctggcctcgcctagagcaggaaacatggggctctttgctttaccacccactggtgggttggcaggattctctgctatctttgccttgggttttgttctctccacagactgagatccagtgcccgtggaaaagatgtccccagaatcaaaaaggtcagcctcccctctggaatgacccagagactttgcaaaggggcttctgtccactccaggcacaggaccaccttcccaaggtgcagcggcagctgccagggcctcctcagtgctgtcttctccactggctgctctgagctgtggccgatggccatttggggaaatggcgccatcagcccactgtgcaatgggtcctctggggacgctcatgtcctcagtctcgctggactcctgagcagccagccgcctagctgcacgggtctgcggtctacgcttccctctcatcttgacacggctcttgtttgcactgtgtaaggtgtctgcctgagctggaagatcaaaactcacaccggcctccccactcccgggaaggacaggcacactttccagaccgtggctccttctgtgttcagatgaaggaaaagccaattctggcaaaacaggctttacttcagagatctgggaagccgctgtgggcagcaaggccgctgggttgatcgctaaatttgcctgaggtgtttctggcttccatatgcctttttctttactaccttgaatggattcaggatgtttctggtttttgaaagagtcaacagagtggtcttttttcactactctctttttctcttgtaccaaaggctgggacttggcagagctgaaaagatcatcatcttcatcatccccaaacaggctcccaactcttggctctaacagcttggtttttttggtgccagcaaaaaggtcaacatctgggtcattgtccttttggagcttgtggctgaaaagcagctcttcatcctggaagacacctgtgctcttggggtgggcatcaggaatcgcagccctttcctacttcttttctgtggagcctgggataatggttttgaatcttccaattttatcctcttcctcatcaaacaagctaagaacagttttggttcttaggcttggttcctttgtcccatggggatgatgaagaaaataaatcagaatgcttgactgtttcctgagcagatctagtcaaaagtccttccttttctgactcagccacatcagttctcccaaattttaatgactccttggcactctcaaccttcttatccacagacttcactccaagttgtgcctccttctcttcttcatcgctgaacagcaaaggtggtgcctcagagacagtctcttttttctttgttgcaggaggaacagatgtgggaggagagccaaacagagagcctccgctatcaacatcgtcttcaaagaggagtgacactctctgggtcttcttttggctgtccttggcaatggcaaaaagatcatcttcttcgtcttcctcaaagagactggtctttttcacagccttggcctcctggctctggagggtcccagaatccctgggttctcctttagacctgctgtcagatgctaagtgggtctgtgaagcaggaatattccactggtcctcctcatcactgctgaacaacagggcagatgctttctttttggagagctcggaggcttttgctttctcttctctctgagcttgtagacacaatgtctgcttcttagcagctgtacccccaaaaagattatcctcttcatcttcatcatcaaacagggaaaccgacgtggggagcttgccaggcagcagagatgcaccttttaagttactcgccctttgagaagaaaacaaatcctcagagtcctcctcatctgaaaataagcctttttgagtctttgtttctgatgagggcttgagatttttgctggaagataaggtaacctttttttctgctcttgctttattttcatctgtctgactcacagtggcttctggcgatgctacggctttttctttgaacagatctccttcttcatcaccaaagatatcagcagtggattggactttgcctgttttagaaggtttgctgtggggtgccgagaaaaagtcgtcatcatcatcaccatcatcatcatcaaagaggccagtgggagggggaccataggggcttttccttggagtgggctgctcaggcttctgtggctccttcagtgatggaacggaggcagcaccaaacacatccgtgtctcctaaaaatacagaaacagctcctgctgggattttctttccaggtttggatgatgaagactcctccttaacagaggctccagcttgccgatcctggggggcttccgtgaagaggtcactctcctcgtcctcatcatcaaagagccccttgcccccactgaacaggccacctccagagccaaatggcgagaagtcctcgtcggtcagcttggggggtgcgaataagttatcctcttcatcgtctgaaggagttctcctttccttcttctctttgagtgtcttccgaggttttgcttctcctgagggtaaggttgtcggctcctcgtccactcgacccatggcatcccccttgatgcgggcagccagctcatctgcaaacgatgtaggtctgcttcttttaggtctagtattttcttcaatgtcctcaatatcttcctcctccttctcagagtcagcaaaaaggtcacagccatcatcatcctcttcctcatcactcatttgtgtggtgtgctggttttgttcattgtcactgtgatgggcaaaatcttcatctgactcctcctcttctttctcttcctcagtgtccacaatactgccacgatcactgcctacagagccttcttcactggacagctctccaagacctacatcttcttgttccatgaacagctttgacccaatgagatatggtaaaggacgatcaatgtatagatcctttggttcaaggatcagttccacccgcccattagcatcatcttcctcggagtctgagtttcctgctttgatatcaagttgctcaaaggcactgtccaatacttgtaagccatagttcacagcctcctggactttaggaatgagatctacttctttctgctctcgtgtcttctcctgctctgttttttctgcctcagccttgagtactggctcctccacttcttcatcatatacacgattctcaatgaactgggtattagagagcataaggaagtcattgaagacattatgcaggcgacaatctgtggctttggtttcccgaattagtccgtccacttgtttcttgatttcatgggtcctagagatagtttgctgtgagaattcctgtagaaactgtagtaggcccgcgtcggccgccagcgaccagctctggctgctcctgcggatctcctccatcgaccacggccgctcccacacgggctccgacgctggcgccagctcctggtcgggggtcgtccggttcatcatcctagccgcccggctcggtgggctccgaagctgccagcacacgccgaggactgcagagccccggaagcctagccccagccaagctgcccggggcgtgac

SEQ ID NO: 72168 - DNA, 3067 bp, Homo sapiens; identical to SEQ ID NO: 66007

SEQ ID NO: 72169 - DNA, 857 bp, Homo sapiens; identical to SEQ ID NO: 66009

SEQ ID NO: 72170 - DNA, 1364 bp, Homo sapiens; identical to SEQ ID NO: 66010

SEQ ID NO: 72171 - DNA, 585 bp, Homo sapiens; identical to SEQ ID NO: 66011

SEQ ID NO: 72172 - DNA, 643 bp, Homo sapiens; identical to SEQ ID NO: 66012
  misc_feature (1)...(643): n = a,t,c or g

SEQ ID NO: 72173 - DNA, 995 bp, Homo sapiens; identical to SEQ ID NO: 66013

SEQ ID NO: 72174 - DNA, 2717 bp, Homo sapiens
atagaaaactgatactacggacataagaattttaaaaatttcttttgccaaagctggctaagggaatatttttattcttctgagggcagttaaggcttctgataagaaaagagagtctgaacagagcacacacatctggagctccaggagtgggggatgcagcatcagattccatcttgaatttctgctaaaatactttgtactcataatggatctcaacaaagatctgtatttcatctgtggctccatcttccctctgggtcaagtagatgttaagctggaccttggcacgcctcttaacatgaagagatctagctagacagacagactcccccatttatggaacaagaattcaatttattctctatttataaaacatttttttaaagtgccttgggtataaaaatctaaatgtctgcggtgtgatcagtcaggagcacgtaactatcactcttcgcatcctttggtcactgggagatcctttgggggctgggaggtccttctgtcccaggctaaaggaaaagcttcacaagggtaagagccacagaaccctcggcaagaaaggccggtcagggagaatgaatggtacagagaggaaaggaaggaaagggggtggaacagaggtagaaggcaaggaagggatgccgcactggagaccgatggggacactctaattgtgcaagagggaggatcttccttcttgaatgctgaacacagctagtctgaaccttccttggaaagtccagctgtttgcccatgcatagggccaactctccctgcaaagcagcaaatgtggcttctatcaggaaggaaaagtatccatcagtgtgacaagaggtcaccttcgaacttgcatgaactccttgcgcagccacaaagagtcctggtagaagtgaggatcgcctagtcttacggctgtccgtttatagaagtagcagtacaacactgctgctagtctctggaatacaaacagcatttgaagtccatctgtccatatgaagctgttggagtttttccagcgtaagttcatgacccagacatgaagggagatgctgagggcaaagtacacagctgtcaggatgatggtccctttgaacttatggaataggaggttgaccaggccagcctggaagacgaaggtgttgaagaacatgaggaaaatgatgatgatgttgaagaggactgcaatatcctggatgatgaagagcacaagctggatgacaggagtcttttggagcagttctgagaaggaattgacaaagaggtcataggacagcagcaggaactgcagagagagcaccaggctgtagttactggtctggagcatcttccttctgttttctcgggcccccaagggcacatcccacagttcccagaaaaccgctcctggctgtctccctaccactgagggagaggcttctagttcctttgaatgagagctgtttcccttgctctaaggcaagcacctccaaactccaacgtcggttgtcatgcggacatcgtcccggcttccggaagccggctttaaattccggaagtaaatggaggaggcgggccccgtctgcgccgtgcggcctgctagtccccggctttctcttcccgctctatggccagtctggccgccatgttggagctttcgctgttcggggcccggcctgctccgggccctcccagcgtcgccgctagctgacttagggctcccgcccacactgcgcacggccttgctgagggccggctcgtagtgggaggcttcgcgttcacctgaacatttccgcctcctctggatgggggatgagaggcggggctgatgcatcgcagcagtcctggaccctgacttcggacttggagaagaaacgccgaggaggaacgggagttagggggttagcagcttggcgcgctgggagccggccacccctggtctccggacttcacttcccaggaggcctcgcgcgcgactggaagtgctgcgagcctataagaaggcgaggcggcacccgccgctctgctctggggcggcattgccagccggctgtaggcattcagggcagtgtcttctgcatctcctaggaacctcgggagcggcagctccggcgcctggtagcgagaggcgggttccggagatcccggcctcacttcgtcccactgtggttaggggtgagtcctgcaaatgttaagtgatttgctcaaggtgcccatttcgcaggaattggagcccaggccagttctctgagcctatcattagggctaaaggagtgcgtgatcagaatggtgtctggacggttctacttgtcctgcctgctgctggggtccctgggctctatgtgcatcctcttcactatctactggatgcagtactggcgtggtggctttgcctggaatggcagcatctacatgttcaactggcacccagtgcttatggttgctggcatggtggtattctatggaggtgcgtcactggtgtaccgcctgccccagtcgtgggtggggcccaaactgccctggaaactcctccatgcaggctgcacctgatgccttcgtcctcacattgccagatgttggcagaagggctaatattgaccgtcttgactggctggagccttcaaagccactgggatgtcctccaggcacctgggtcccatgaccagctccccgtctccataggggtaggcatttcactggtttatgaagctcgagtttcattaaatatgttaagaatc

SEQ ID NO: 72175 - DNA, 2694 bp, Homo sapiens; identical to SEQ ID NO: 66015

SEQ ID NO: 72176 - DNA, 671 bp, Homo sapiens; identical to SEQ ID NO: 66016
  misc_feature (1)...(671): n = a,t,c or g

SEQ ID NO: 72177 - DNA, 508 bp, Homo sapiens; identical to SEQ ID NO: 66017

SEQ ID NO: 72178 - DNA, 820 bp, Homo sapiens; identical to SEQ ID NO: 66018

SEQ ID NO: 72179 - DNA, 714 bp, Homo sapiens; identical to SEQ ID NO: 66019

SEQ ID NO: 72180 - DNA, 354 bp, Homo sapiens; identical to SEQ ID NO: 66020

SEQ ID NO: 72181 - DNA, 644 bp, Homo sapiens; identical to SEQ ID NO: 66021
  misc_feature (1)...(644): n = a,t,c or g

SEQ ID NO: 72182 - DNA, 2306 bp, Homo sapiens; identical to SEQ ID NO: 66022

SEQ ID NO: 72183 - DNA, 1393 bp, Homo sapiens; identical to SEQ ID NO: 66023

SEQ ID NO: 72184 - DNA, 904 bp, Homo sapiens; identical to SEQ ID NO: 66024

SEQ ID NO: 72185 - DNA, 6305 bp, Homo sapiens
catcagcgggcgggggtgtcgccgaacaggctgctccgcagagcccgccgcgaccccgcgccgccccgccccgcggcctgcctgccagaggagccgagggggccgcccctcgcccaacctgcccgacatggggaaccccgggcccaggcgtgctggtcaccatgacaacagagacaggccccgactctgaggtgaagaaagctcaggaggaggccccgcagcaacccgaggctgctgccgctgtgaccacccctgtgacccctgcaggccacggccacccagaggccaactccaatgagaagcatccatcccagcaggacacgcggcctgctgaacagagcctagacatggaggagaaggactacagtgaggccgatggcctttcggagaggaccacgcccagcaaggcccagaaatcgccccagaagattgccaagaaatacaagagtgccatctgccgggtcactctgcttgatgcctcggagtatgagtgtgaggtggagaaacatggccggggccaggtgctgtttgacctggtctgtgaacacctcaacctcctagagaaggactacttcggcctgaccttctgtgatgctgacagccagaagaactggctggacccctccaaggagatcaagaagcagatccggagtagcccctggaattttgccttcacagtcaagttctacccgcctgatcctgcccagctgacagaagacatcacaagatactacctgtgcctgcagctgcgggcagacatcatcacgggccggctgccatgctcctttgtcacgcatgccctactgggctcctacgctgtgcaggctgagctgggtgactatgatgctgaggagcatgtgggcaactatgtcagcgagctccgcttcgcccctaaccagacccgggagctggaggagaggatcatggagctgcataagacatatagggggatgaccccgggagaagcagaaatccacttcttagagaatgccaagaagctttccatgtacggagtagacctgcaccatgccaaggactctgagggcatcgacatcatgttaggcgtttgtgccaatggcctgctcatctaccgggaccggctgagaatcaaccgctttgcctggcccaagatcctcaagatctcctacaagaggagtaacttctatatcaagatccggcctggggagtatgagcaatttgagagcacaattggctttaagctcccaaaccaccggtcagccaagagactgtggaaggtctgcatcgagcatcatacattcttccggctggtgtcccctgagcccccacccaagggcttcctggtgatgggctccaagttccggtacagtgggaggacccaggcacagactcgccaggccagcgccctcattgaccggcctgcacccttctttgagcgttcttccagcaaacggtacaccatgtcccgcagccttgatggagcagagttctcccgcccagcctcggtcagcgagaaccatgatgcagggcctgacggtgacaagcgggatgaggatggcgagtctggggggcaacggtcagaggctgaggagggagaggtcaggactccaaccaagatcaaggagctaaagccggagcaggaaaccacgccgagacacaagcaggagttcttagacaagccagaagatgtcttgctgaagcaccaggccagcatcaatgagctcaaaaggaccctgaaggagcccaacagcaaactcatccaccgggatcgagactgggaacgggagcgcaggctgccctcctcccccgcctccccctcccccaagggcacccctgagaaagccaatgagagagcagggctgagggagggctccgaggagaaagtcaaaccaccacgtccccgggccccagagagtgacacaggcgatgaggaccaggaccaggagagggacacggtgttcctgaaggacaaccacctggccattgagcgcaagtgctccagcatcacggtcagctctacgtctagcctggaggctgaggtggacttcacggtcattggtgactaccatggcagcgccttcgaagacttctcccgcagcctgcctgagctcgaccgggacaaaagcgactcggacactgagggcctgctgttctcccgggatctcaacaagggggcccccagccaggatgatgagtctgggggcattgaggacagcccggatcgaggggcctgctccaccccggatatgccccagtttgagcccgtgaaaacagaaaccatgactgtcagcagtctggccatttaggaaagaagattgagccggaggccgtactgcagaccagagtctccgctatggataacacccagcaggttgatgggagtgcctcagtggggagggagttcatagcaaccactccctccatcaccacggagaccatatcgaccaccatggagaacagtctcaagtccgggaagggggcagctgccatgatcccaggcccacagacggtggccacggaaatccgttctctttctccgatcatcgggaaagatgtcctcaccagcacctacggcgccactgcggaaaccctctcaacctccaccaccacccatgtcaccaaaactgtgaaaggagggttttctgagacaaggatcgagaagcgaatcatcattactggggatgaagatgtcgatcaagaccaggccctggctttggccatcaaggaggccaaactgcagcatcctgatatgctggtaaccaaagctgtcgtatacagagaaacagacccatccccagaggagagggacaagaagccacaggaatcctgacctctgtgaagagatcctggcatttctggtccaacccaagccagagaaccattaagaaggggccttcattctggattctccgacgcaacactgacgtcccagctgcgacgtactgtcactgatgagagactgggaagggaaaagcatatatatatagatatatagagatatagatatatatacaggaaacaccgcatccttgcactgctgctggggctggcagagcagttggctgacagcaacaaccgacatctgaacacctacatttcctttgcagacaaattgaagaactggtgggatttttttcaagaaaaaaaattatataataactataatcccttgctcacccctttcccccgccaaattaaaaacgccaagccagaccccgaatgattgtagaagtcccttccggccctggttttggcacgttacagttaacaagacgagcaattccatttgttcttctccaagcatctctaaggcccacttgaatgcaaaggaaaacacttgcacagcaaagcaagagaagtcacagcagcaagacacggcacaggtcaaccatttttccgagaaaaaaagaaaattccccacttgggaaggaaagaggaggaacactggattcttactttctggatcttgaacactgggctgcaaaaacctaccttccctctctcccgccttcccctcaccctcaactctcaatgtccttgctgtcattttctgtcctcggctccctcctcccccttcccccttcccccaccccacacccttcaccctctgtgtccgtggtccttcctgagggccactgcagatgactctcctttgaaatgagaaaaagaaaagaaagcaagaacagaaaacgaagccacaggaagggaagtaggacattgtatggtttatggtttctcattatgaaggtgcagcttgtaggaggtttgtacggatgtgctttgaagttatgtatattacatataacaggaaaaaatattaaaataaacagtgctggtaagtatgaagctgacattctaaaattataattatctgactgtgattgatgtatcctgaggttcctagatctcactgaactggcccagctaaggagacctggactctgggtgtgggttggctcacagtaggggctgacgggttcagtgtagtaatactgtgtgtggtgtttgtaattggttgattggtggggaggggtggggggccctaatggagaggtgtgggtttggcaagaaagaagcaacacagatgtcgtccccaaaatgccagttcaagacaccttctccctgcccccctggtagtaacagtcagggcctggtctgtgctcaggtactgggtcccagtctgggactctgctgctgaagttgccacagtagaggtccctggcttagtccttatctccctacggggcttgccttggttttcagtcttctctctctttctctcttttttttttttttgccacattctgcccttccctgaccccattgtaataaccaactccatatccaaagggaggtggtgctctcagccattgtagaagatggtggctttaacctgactgtctaaaaattcccagctaagccttttcctctactctcttccttgttctgaatcatttcttcttctcaggccaaagtagccatggtaaggaggcttcatggggcagaccctgaaagatcaaaactgcatttgcaaagccctcccctgtcccaggacaaagctgagactgacgggtgatgttgctcataggctccagctctgcataagaccttggcttggagacctccctctcagtcaacagctgaactctgagcttgtgcccagaaattaccccaagaccacaggaacccttcaagaagctcccatcacaagcttggcattgctctctgccacacgtgggcttcctcaggcttgtctgccacaagctacttctctgagctcagaaagtgccccttgatgagggaaaatgtcccactgcactgcgaatttctcagttccattttacctcccagtcctccttctaaaccagttaataaattcattccacaagtatttactgattacctgcttgtgccagggactattctcaggctgaagaaggtgggaggggagggcggaacctgaggagccacctgagccagctttatatttcaaccatggctggcccatctgagagcatctccccactctcgccaacctatcggggcatagcccaggggatgcccccaggcggcccaggttagatgcgtccctttggcttgtcagtgatgacatacaccttagctgcttagctggtgctggcctgagggcagggcaggaaaatcagaatagcatttgctttctctggggcaaaaatgggaaagttcagcggggcagcagaatcagtggcattccccctggtgcaggccggtgggtccactccaactccccctgagtgtagcagcacactttccatacaccaggttctttttacaatcctggtggaaaagccacagaaccttcttcctgcccttcttgagagttccccctctttctgggtcaagagctggagtggtggctccatcctctctgggccacttcggtctaggaactcatctttgcaggaaccaggagtcctgagcacactgaacacacctcagagggaggatccttgttgtggattttgcacctggctttggggcaggggtgaagtgaccaggcttagcttgtggagtttatgggccaccagggtttggggaaatcaccatcccgcggatgctgtgacctcccttctacggagatgcaggcagtgccacgagggaggaggggacctgcaaagctagaatctagggcactgtttcctccccatccttctctttgtagagaatagagacgtttgtcttgtctgtcttcaacctacttttccttttctcttttttgtttctcatcctctctgtgccacctctccacccaggaggccatgtagcatagtggaaaaagtccctgagggcggttaggagttctgggtgaccatcctggctcagctcctaactcaccatgtgacatcaggctatccccattccccctcttgggcctcagtttcccgacttgcaaaataagcagaaagaaccagatgctctccagggtctttttctactttgctatctcatgggtcttcattttctcttattttgttttctctggatcttttccatctgagggtacaggaagtaccaggacctgtttcagtttttgaatcctgcaagcacattccaagactggcctgaaactgcatgagcaacatcactcgaaataattttttttttcaaaagcaccttaacaaccaattgcgatgctgtcctgttcctttttactcacacccttctctcctttctcgtccccatgctcccccacctcagtgctccgtgctgtatgcgtgtgctctctgttcttgtatactcaatataagtgaaataaatgtgtttgatgctgaaccataaaaaaaaaa

SEQ ID NO: 72186 - DNA, 1595 bp, Homo sapiens; identical to SEQ ID NO: 66025
  misc_feature (1)...(1595): n = a,t,c or g

SEQ ID NO: 72187 - DNA, 1123 bp, Homo sapiens; identical to SEQ ID NO: 66026

SEQ ID NO: 72188 - DNA, 1369 bp, Homo sapiens; identical to SEQ ID NO: 66027

SEQ ID NO: 72189 - DNA, 860 bp, Homo sapiens; identical to SEQ ID NO: 66028

SEQ ID NO: 72190 - DNA, 871 bp, Homo sapiens; identical to SEQ ID NO: 66029

SEQ ID NO: 72191 - DNA, 885 bp, Homo sapiens; identical to SEQ ID NO: 66030

SEQ ID NO: 72192 - DNA, 3658 bp, Homo sapiens; identical to SEQ ID NO: 66031
  misc_feature (1)...(3658): n = a,t,c or g

SEQ ID NO: 72193 - DNA, 1820 bp, Homo sapiens; identical to SEQ ID NO: 66032

SEQ ID NO: 72194 - DNA, 635 bp, Homo sapiens; identical to SEQ ID NO: 66033

SEQ ID NO: 72195 - DNA, 745 bp, Homo sapiens; identical to SEQ ID NO: 66034

SEQ ID NO: 72196 - DNA, 727 bp, Homo sapiens; identical to SEQ ID NO: 66035

SEQ ID NO: 72197 - DNA, 530 bp, Homo sapiens; identical to SEQ ID NO: 66036

SEQ ID NO: 72198 - DNA, 524 bp, Homo sapiens; identical to SEQ ID NO: 66037
  misc_feature (1)...(524): n = a,t,c or g

SEQ ID NO: 72199 - DNA, 419 bp, Homo sapiens; identical to SEQ ID NO: 66038

SEQ ID NO: 72200 - DNA, 996 bp, Homo sapiens; identical to SEQ ID NO: 66039
  misc_feature (1)...(996): n = a,t,c or g

SEQ ID NO: 72201 - DNA, 2228 bp, Homo sapiens; identical to SEQ ID NO: 66040

SEQ ID NO: 72202 - DNA, 2631 bp, Homo sapiens; identical to SEQ ID NO: 66041
  misc_feature (1)...(2631): n = a,t,c or g

SEQ ID NO: 72203 - DNA, 1238 bp, Homo sapiens; identical to SEQ ID NO: 66042

SEQ ID NO: 72204 - DNA, 1777 bp, Homo sapiens
  misc_feature (1)...(1777): n = a,t,c or g
ttttttttttttaacatattaccacatccaacttctttattcttgagaaaacaaaaaagtccaaaatcaaaggaaagcacccgttttaaaccctcatatctttctcagggctcactgcagtctggccatatctcaagcaggtctgtccaatggcttggaacatagacttttgcagtgaaactttaaaaacattacttgaattaggattacacaaaaaaaactaaattctaagtgagcacaactatcgctgagaccctgaaatttcaggaaataaacatggttcaaaactcaaactgttcatcaaaataattacgcaggtcagccaccactgcagaaccatcactgctcagaggaattgagtcagcaatgactgatctcatcatctcttcattagcacataagcggttcaacttgggatacgcaaggagtctctgcagaggtacgaaaaatttatctccaacacagaagggtgtgggagagttctctatcttggccttctcaacctctgtgaagactggtccaaagcatgggacaggggcctttgagccaccaatgtctttgggcttatcaccccgttccccagcctgttctttccgccttggcaggtggctcactcttaagctttccacttgttgggacacctcattaaccaacacaagtttaaagaacctttcctgctgtaagcttgggtatgaggtggtaaaaacagctttataaacatgctgatcatgctgctctgaaagacatgattctgttgcctttcctccatttttccggaagattcctatctgggtacagtatccaacattctcagctccagctggtggttccccgacaccagtaaactccacagagtaatcatagcgatttgccacatataaagcccaggtctgaaactccattctggtccactcaaatttatgatctgaatctcttaaggtcactgatggaaacaggggattgaattcagagtttggtgtgctgatgacaatcatggatggagacaggtacccaaataccacttcaggacaatctggccagatcacctgaactccaaatgttctattaattcaatacacgttatcaagtcaaatccaagcaaacgagagtctctctccgcaacggagccatgatacaatgtgatggtcaaattcagatcccgaggtttcagaaaatcccccaggaaaggagctaacgaatcccctctccatcgtaatttatcctcattaatatctactccaacaagcaattcaatgcatggattgacttttagcagccttaagagtgaagtatcaccacatcccaggtctgcaaccttcttaggctcatgttgatccactaaatttttaacgaactggtaccgctgtctgtatagtggaggtttaaactgaattgccgtctccctgggaacttcttcaaaattaccgtcaaccacactactgcactgtagattattttcttccattttgtttcgaagttttgttgaaacaaaaatgaagatttatccttcaagctctatttgagagaatcagcactgactcagctcgtgcgctctcacggtcggccttgggccccgggagcctcatggtgcgccgagctccgtccctctaggctctcagttccaaggcgtcggttttgcgtctcgtaacggccgctgtggcgcatgcccagaagccattttcaaggtcctcttccgaaccttggcgaggaccccctcgtccaagctggcgtntgtggtttcagatcttcagttatcaggcngggggtctctaaaccc

SEQ ID NO: 72205 - DNA, 1802 bp, Homo sapiens; identical to SEQ ID NO: 66043
  misc_feature (1)...(1802): n = a,t,c or g

SEQ ID NO: 72206 - DNA, 1990 bp, Homo sapiens; identical to SEQ ID NO: 66044

SEQ ID NO: 72207 - DNA, 1481 bp, Homo sapiens; identical to SEQ ID NO: 66045

SEQ ID NO: 72208 - DNA, 1328 bp, Homo sapiens; identical to SEQ ID NO: 66046

SEQ ID NO: 72209 - DNA, 3294 bp, Homo sapiens; identical to SEQ ID NO: 66047

SEQ ID NO: 72210 - DNA, 776 bp, Homo sapiens; identical to SEQ ID NO: 66048

SEQ ID NO: 72211 - DNA, 570 bp, Homo sapiens; identical to SEQ ID NO: 66049
  misc_feature (1)...(570): n = a,t,c or g

SEQ ID NO: 72212 - DNA, 1253 bp, Homo sapiens; identical to SEQ ID NO: 66050

SEQ ID NO: 72213 - DNA, 1826 bp, Homo sapiens
  misc_feature (1)...(1826): n = a,t,c or g
ttttttttttttgccttctggatttttttttttttaaagggaggttggttcctgcatttccactctttgaccataggaacgcctggctacaaaaggggctgtaattggctgctgcctataggggccccaggtccttcctccaattgcaaggcagcaactccgaagttctaagtcccatggaaagtggcagtggttgggctggactgtggctggaggatcaccgggcctcggttctcaagcaccatctgtctggctgcagctgggcccttcagctgggggccagtgttgctttccagctgcccccaccgggtcagatcatctctgggcaaggaagagctgctgggcatctcttactgtccttctcggcagggccttcctccaccttgggtgcctcctgacgcctgccccggaagtcttcatctgaaaaggagagggaagctgcctcatcctctaccctgcagggcctcgctcaggcacggcccctagactgggcaagagagctgacccgactctctctgcccccttcatttgggacccatgcagatccccccaggtagacgatgcatgggtccagggagagaggcagcaggacactcaggtgctggccagggtccaccactgagctctgagaccttggacaagttctcccctcgtctttgggcctcaaatttcctcatctataaaatgggatggaaaagctggactatctagatgacctctgaggcccttccagtccttgtttctggatgcctcctgaccctcgaatgtggcatgaggatcagggttcagctgcgggcccaggagggtctgaggcagagtcttctggcccacgtggcctttggaagggactgggtgaaagttgagaagcctctgggcccacagactgaagctgcccagtgcttggttctcaggccgagggtcccccatgggggcaggcctgtctgccacctcacacccaaaagaatattccccagaaacagtacctggcacttcatgctacaggtacacatctaggtggaagtagggctagggccccttttcaggggttgcagaaagggggaagcaatgtcgaccaagtcagggggatccatatctttgggtcacctgccccccaaccctcagtgtgttcctccaggggacagggcgggtgctcccatgaaacacccaggaactccgctgggagatccccgatcatagagaagttggagcttcgatctcccctccagcctccccacacgcgtggccctccacatcatccaggaggttggctgttgacgcgacagcccccagcctgccaggccattcaggaaaaccgtcccagggatgaggggacactgccctagtcctcccagtcccactgactctctgccccacccctcaaagctctggaggtacctgacacacccacctgaccccccacacccttagtactgtcccccaggctcattttcctgaggtcagtggtatggccaggccctgacactctcgcccagcttacatctctggggatggagaaacagcttcctccctgtttccctctggctgctgagcctctgctatcctaggccctgtttgagaagcatgaataggagttctgataaaaaggtggaaagccgtatttctactcgaggaagggagggccaacatgcttggagtgaggaggactcgtgccccagttcaactagagaaatgaagggaaggtttgatattgatggaagaaccactttttctcccaagaagtacataacctcagaccaaaaaaaaagttaatagncnnnttncgngnctctnctgttncaacgttcacaggnnnnccggctcacccc

SEQ ID NO: 72214 - DNA, 1421 bp, Homo sapiens; identical to SEQ ID NO: 66052
  misc_feature (1)...(1421): n = a,t,c or g

SEQ ID NO: 72215 - DNA, 1668 bp, Homo sapiens
ttttacattttcttcttttttttttcttttaaatgagcaagtttgagagtctgcagtttggactaccatgagaattgataggaaggtgggagtcccaggcaatcccaggtcctgtagcagcagctggtggggttcccactccatgccgtgcagagcctgaactcagggatgacacctgcacctgctctctgggctgggctctggcacaggaagccccttaagcaaacaccccccgggcacagccaatgccaattagccagaacaaaaagctcgctgtaccaacacccatccatgggagacaagcaagttatttctgagcatcttcactgctgaaagaaaaccaaggctcagaagaggaccatggcttgccacctaggccaacggggacccaaagaatcccaccaagtgtcaagacaacttgccccatgctcttcacggagcgaccttggaaccctcccctgacaggcaccgctggctctcctgacgtggcctgcaagtgcacggagccccttcctcctcggccattcccagtttagattcccaggggaagcatcagatggcccctctcccctgctggcagcagagcagacggaaccagccagagcccagggcagtgctcacctgcaggccagtccactgcggccagcaccgccccctagaacctactgcgggcatggcggccgccagtcctgggtctcccggctcaggtagtgccaggaagctgcgggcatggcggacagctgtcctcggtctggaggcgccatcctggctttcaaatctgctccagaggttatctggggaggggctgctccctcacagagggagcctctaagcccaccaggcgggcactttcagcccaaagcctccgggccacctcctcatcctcagcctcgggggccggggccttctgtttgagtccatcgaagtactttccggaaatcatccgccagttcctccgccacggccagggtattgtgctgggctggggcgggccagcttcgggggctctttgaccaggcagccagaagatgggcccgagttgtggtgctggagaaaggtggagccatggatgcccgtgtgtctgcccagctctgtcctggccacgccggggtgcagggcgttgacagtcacaccagagccttgcagccgccggctcagctccttggtgaagaggacgatggcgagcttggctctggcagtaggcggctttggtgttatacttcctcgtctgccagttcaagtcgtcaaagtctatgtgcccagcaacatgggccagggacgagaggttgatgatccgcgaaggggctgaggctttcagcttgtccagcagcaagtttgtcaagagaaagtgacctggattaaggatgatgaaaaggtcacttttgactcacacctaaaatcccagcactttgggaggacgacgggggaggatcgcttgaacccatggtgcagcccctgcccaggcctcacccaggtggttaacgccaaactgcatctcgaagccgtcctcggtggtccagtgggggcaccgcatcacacccgcgttgttgattagaatgtccactcgctcctcctctggaagagaggggtggaggaggagacatcccggtgaggacagaccccagcctgatgcaccagcagaaacactcctgtgctcccacaacctgg

SEQ ID NO: 72216 - DNA, 1506 bp, Homo sapiens; identical to SEQ ID NO: 66053

SEQ ID NO: 72217 - DNA, 2625 bp, Homo sapiens; identical to SEQ ID NO: 66054
  misc_feature (1)...(2625): n = a,t,c or g

SEQ ID NO: 72218 - DNA, 807 bp, Homo sapiens; identical to SEQ ID NO: 66055

SEQ ID NO: 72219 - DNA, 1337 bp, Homo sapiens; identical to SEQ ID NO: 66056
  misc_feature (1)...(1337): n = a,t,c or g

SEQ ID NO: 72220 - DNA, 918 bp, Homo sapiens
ttttttttttttagaatatatttcattttattataaagcagtgctcccaaacttttcacagcgtacacctcgagggtggagaactaacatccaagcacacctggatggtggatgggacccacttctgggtaacctgatgaggaagctctagtgaagaaattcaggacgcggtcttcagagcagagggcttggttcaagtccctgttctgccacttactaactgcatgaccttgagcaagccacttaatttctctgctccttctctgtgaaatgggtacaatgtggtcagcagtaaaggaactaatacatgtacagcactcagcacaaagcctggcacacagcaggctctcaccaggtgccattctcagcacaactgcttggttgagctactgtggcagtggcaggttgtgccccaagggggtgggctcaggagcccgtgcagcaagaggcagtgaccaaggaggcaggggacaatagccctatcttttcaggatctctgccttggacctggagaatggagagactttgctcctatcacgtcccaagttgggaaaactaaggacgaagccggtgactgacatctgaaatggaatcctctgcatctccaagtggccctatacctgacaatatcattactagtgaaaaccaagtgacaaacacactcctcgaccccaagttcttccacatgtcccattgaggagagcacagccaataacgcagagtgtatttatgcgcagggctggctaaacaggctggctacgagtccggaacagtgtcaggatctggcttcccattggccgacatgacagaatccttctcgcgttgctctctgatgtactggtccaacagggtggtcagctggaggggctggtgctggagcagggagtgggtctgggctgtgaggcaggtggagttctg

SEQ ID NO: 72221 - DNA, 1373 bp, Homo sapiens; identical to SEQ ID NO: 66057

SEQ ID NO: 72222 - DNA, 3869 bp, Homo sapiens; identical to SEQ ID NO: 66058

SEQ ID NO: 72223 - DNA, 545 bp, Homo sapiens; identical to SEQ ID NO: 66059

SEQ ID NO: 72224 - DNA, 1350 bp, Homo sapiens; identical to SEQ ID NO: 66060

SEQ ID NO: 72225 - DNA, 1863 bp, Homo sapiens
  misc_feature (1)...(1863): n = a,t,c or g
ttttttttgtttcctccagtgtgatactttatttgtttttttgtgggaaacctctgggacctgccctggagagcctggcaactgcagggcactgtggggctgggaggtgcctcagcacgtggggccaggggctggcatgcaccgcgctgcacagatgaggtcggtggtgaccaggcagaggtgacaccagggacggtctccttgagctgcaacaactggcccgaggctggggaccccacatggtgatttcatcccaaacagttcttgattctacgtgacctgatttggggggttcaggtttaagggaggccaggtcttggacgggcccccgtggttctcggtgtgaaggggacgtctgctgctccccaccagacccgcagtcccagtctgccgggtcatgaggggtggaagtgcctgatgagcgccttcttgtcaatcttgcccatctggttccgcgggatctcctccaccagcaccagctccgagggcaccgcgtacggggccaggacatttctggcccactctttgagctccctgtgggacagtgagtgtccttctcggagggtcaccacagcagtgacccgctggccccatgtcatatccggaactccaatcacagccacatctgtgatgctggggtgggccagcaggtgccactccacctccagggcgctgaccttgtagcctccagtcttgatgatgtccactgaggtccggcctcggatccagtactggccatccttaaacaccacggtgtcccctgtcttaaaccagccatccagggtgaatgcactcttagtttcttctggtttattccagtattctcgaaacacggagggtcccctcaccagcagctccccctccttttcttcaaaccctggggtcaccttggtccccctctcgtctccctctgcgtggatggtgtaggagcaggcttccctctgtgggttttctgagacaatgcgcacctgtactccaggcagtggggtccccacggaacctggcaggcgcatggcagtggtcaggggcccggacagagccatgccgatctcggtcatgccataccgctccagcagggtgtggcccgtgatgttcttccacttctccagcactgggaggggcagggcagctgagcctgagaccatcagcctaattttttcttcacaaactgcacgcaagaaatcctgggcgtgcggctgggtaaaatgcctgtcgtagtactccatcagcttggtgtatattgtaggcactgccataaagacattgatccgcggcgtttcagaacttaagaacttttcccaaacctgctgagggctgaactcaggcatcatcacacaggtggctcccacccagagaggacagagcagcgcgttgaccacaccatggacgtggtgcagcgggagcacgtggaggatcacgtcgtctttggtccatgcccacttgtggaccagcccggtcaccacagccctgatgttttggtgcgtgctcagcacgcccttgggcctccccgtggtcccactggtgtagatgatcatggcgcccttgttcctccatccctgctctgggaccgggacctctgccggttcctctactgctccagtgtagatggctggtgtgagcggcagcagcgggacccccagcttcctgaccaccgggctcaggagctccaggtactcctggctggcaaggaccacagagctctgggagtcgcagatgacatactccagctgggccgcgggatgcttcctgtagaggggtactgccacaccgccgctcatccatgaggccctctgggccacgacgtaggaggcgtggttagctcataggaaggaggaatgccnctcnncagggtaggctatcgag

SEQ ID NO: 72226 - DNA, 1122 bp, Homo sapiens; identical to SEQ ID NO: 66062

SEQ ID NO: 72227 - DNA, 1850 bp, Homo sapiens
ttttttttttttctccgtacaagtattttatttccattacaatagtgccacgccaaaactacagtagctcaaaacataatacaaaaaatagattcccagctcccaaccccacgtccacgcacccacagagaagccagccctatggctccccaggcctaaggggaggggtctcacttcattttccttaaagctctggagcgggtagtggcagtggcaggggcttccacccctgctgggcctgagccctcttcttccccaaccccctgccggccccggcagacctgagccatgagtgtggtctccattccctcgggctgcacccccagccctaggacacctgcctctgtccagggagggggtccaagcccatggtgctggtgctgacactacaggaccaccaccctccacgcggaaggcaggagggtcgggggaggggaggcagaggggacaccatggctgggagaagcccgcctctatgtggcaaggggactgcggctggcttctgcttcagctacttctcgggttcctgtctcctctgcagagctaccaggactgctgcgtgctgggaccaggacctccatctggaatccactctcgataccctgcaccagcttggaggcagatcccaaggtggcaggggtgtccctgtgccgtctgcttcctctcgggcaggaggattccagcttcccgggtgaggggagagcactgtccaggcagggctgggccaggaggcctgggctgctgaggcgggaaagcggtggctgtggagggcacgtgctgcccccacctccgtctcggggcctggcttccccactggatggcagaggccgctccaggtgcttccacttggtggcgcccatgagtctgctactggagaagctgtggtctcagggaggagacagacaccacaggccagactgggtggaggaatcttcccctcacaatgtcccctggctaaaagcatccatctagctgcaagtactatcttgattcaacccaggggccgacaatggactgcagcccagggtaagtccagcagttttgcagtcttccgatgccctgtgccatggacctgccggccagagctcctgggctcccgtggaggttagccctgcaggcaccggggaaatggggctatggcctgtgcttcagtcaggacacctgggggctgcactgcggaggccaagggcatctaggagcaggggctgtctccttggggtggagactggcggctgcagcctcagataaggcactagaggactggactggtcctgggagccaggcccagccatgtggtggatgacggtgctcagagagaggatttgggtcctgcgggaggtgacagctgtttctcttttcttttttttgggacggagtctccctctgtcacccaggctggagtgcagtggcgcaatctcagctcactgcaacctctgcctcctgagctcaagagattctcttgcctcagcctcccgagtaactgggattacaggtgcccaccaccactcccggctaatttttgtaattttttttagtagagatggggtttcaccacgttggccaggctggtctcaaactcctgacctcaggtgatccgcccacctcaacctcccaaagtgctgggattacaggagtgagccaccgggcccagcctgttttctcttttctcctttccctggggaagagggttggccggacagaccctggtgtgggctgggatgggggactgctgcgtgctgggaccaggacctccatctggaatccactctcgataccctgcaccagcttggaggcagatcacaaggtggcaggggtgtcctgtgccgtctgcttcctctcgggcaggagga

SEQ ID NO: 72228 - DNA, 3458 bp, Homo sapiens; identical to SEQ ID NO: 66064
  misc_feature (1)...(3458): n = a,t,c or g

SEQ ID NO: 72229 - DNA, 1610 bp, Homo sapiens; identical to SEQ ID NO: 66065
  misc_feature (1)...(1610): n = a,t,c or g

SEQ ID NO: 72230 - DNA, 2208 bp, Homo sapiens; identical to SEQ ID NO: 66066

SEQ ID NO: 72231 - DNA, 2668 bp, Homo sapiens
ttccatttaaggagctttctgcatccactttatttagccagagagggaaggggttgacataaacgaaaaagtggatcaaatagtcaagaacatgatgggcgcggcaatgaactgaaccacttttgctaagtgacagaaaaatattctaatattaaggattattttacaactctatggaagtaatgcagtgatgcatcttgcatctgttttgtcttgatgacaaaacgcactcttagagtcacaagatcctgccttgtgttagttataaacaaaaatatatttatatatatatatttatgtaactactatgtgctttaaagaaaattactgtatgattcagcagggttttttcattctttctatcgccatgctgacgtgaatggcttcttagacaggaatcagcaatgaaatgggtgtttagtactgaaaaggcataaaattaaaaataatcatatgtttaaaatcccttaacatttttgtttcaaaaatgattaaggaactcttcatactgtttccttttgtttccatcagcccagagcaactgtggtttcatgggacttaacagttggggattggaggtaaggcttccataaagcataaatcagatgttttcatgctgaggcaggaaaacagaaagccccgtttgccaccccctcttcccaaatccttagctaattgttcggaaattttgtcacagctcatagaaaggtcattcattacaaaggaagaggcagacatggtttgaacctcctgtacggataaaaagattcgttctgtaaagtgatgaacttgttggtacagatggatctagaccagaaaaacaacatccttttgccacacatctgttttgaaaatgtagaaaatctcttattttgtgtttgttctcactcttgcatgggctgtttttcttagcaatcttgagacattcatcattgctcttttgagtgaaagggttcaggctttggaaaacagttatctttgagacatcagagaacatttgaaccaaaggtgtcgatccctcatgaactaaagctttattatgattttttttttctgatccctttgcaaccctgcacctaagccaaaagcattataatcttgtcatacttcagataagtccacgggagatgttccgagtgaactatagatgacattccactagggaattctatgttcagtgtaaatggtatcttgtataagttttagttttttgtttaccctttgtttcctgggctgagcttgtccagaaatcttgtcttcttcaggctacagcagcttagagcttgtttgtgtgtgtgtttgtttgtttgtcttaaaggtataggcaaaattttagtcttaacacctgtaaaccagtactggtgttgttctgtcctagaaattttagcactgctctgatacaataaagccttctttctctccaactggttcaacttcagcataggcaggatgtccagagcctcttctaaacttcatcgcaggccatctgcttgggcgtctctcaataaagaagatgctggctgctgatgttgggtggtgatacatatagactgtcacaagaatggctgtggctacaatgaggaccaggatgaggattccaacgatgaggccagcgtggagggttccccctttcttctcagctgcactgtcatctgtagaagctccattatcttttagatgtagtgctatcttggtatcatcttctgtagggaggctggtgggaaactgagaagtcactgctcttctggtggtagttaggaccctgaactgggtggttgtcgctcctatggttgtggtggttcgagaagaagtttccactggttctgtattctcacacatcttctcttttgactcttcagggcatccactgtccacccagtcctgccgatgacgatcaaatccactggaacatctttgaagtttactacaccaactgcagttgaagccaatctgagaagatacacaggggccacatctgttaaactggaggcatgtgggtaatggggtcatctccacagccgaaatgttggtaatttttgacatttgtagctctactcggtggtattcataaattgttcttcttcgaacattgggaatttgttggatcctgtggacaacgacaaatgcatcggacagtccgactttcactggatgattggttgaacttatctgtgtgaccaagacaggaatttctttgtatccaaagatgattcgtccatccatgagcagggttgcctggaatgtgaagcttcccaggttataattatcctggagatgtacatggtcccactggaccacaagtgctgtgccattatcaaaatatctgacagttgaatttctggatacactgggatcgaaatttgccattaaaggtgctatgtactgtgtggctgttagcattcgatgtacgacttctccagtgtatatgaaacccccggttgccacagtgatttcacgtaggaagtggccataaaatggaaaatcgaaggacagattcactcttgcagcttgccgatgagtattggacaatattccatgaatcttcactttatctttttccatttggtctatgttcacccataaatcccggctggcagaatcagatggaccatatattcgagatatatagtaattgtggtctgtacggacgcgtgggcggacgcgtggg

SEQ ID NO: 72232 - DNA, 655 bp, Homo sapiens; identical to SEQ ID NO: 66068

SEQ ID NO: 72233 - DNA, 1549 bp, Homo sapiens; identical to SEQ ID NO: 66069

SEQ ID NO: 72234 - DNA, 725 bp, Homo sapiens; identical to SEQ ID NO: 66070
  misc_feature (1)...(725): n = a,t,c or g

SEQ ID NO: 72235 - DNA, 1834 bp, Homo sapiens; identical to SEQ ID NO: 66071

SEQ ID NO: 72236 - DNA, 3263 bp, Homo sapiens; identical to SEQ ID NO: 66072

SEQ ID NO: 72237 - DNA, 738 bp, Homo sapiens; identical to SEQ ID NO: 66073

SEQ ID NO: 72238 - DNA, 1879 bp, Homo sapiens; identical to SEQ ID NO: 66074

SEQ ID NO: 72239 - DNA, 900 bp, Homo sapiens
ctaatacgttgcatgcccgcgtaaacttgggcccccccagggatcctttaaaacggccgccccttttttttttttttttttctcaaatgtcatttattagaaaatacaattcccgagaaaggagatacaagggattctgggaagtgggaagtaaacagtacacagatctctttaaatcaggagcatataggtcataataaaatgagctacaggcacaaagccagtaacacatttatggtccgttcatctggaaaagtttcaccgcccactccccactcctcttccccctcctggaagcagccagctttatccttggcattttaattttagagaaaatttaaacttccatgctgccctgtggcttcggtcaatggagcttctttctccagttatggaatgagtcagcaaaacggggagtttctgatccttggaattagggagggacagtttacagaatgtcctcatttcactcttttcccaatcatgggaaatatccagccaattctggttttaaagattcatatcaaattcaaagtccctccctccttttggcgaggaagacaaccctttagagcgaaacacaaaagagcaaatgtaaaatccatctggggcggggcatggtggctcacgcctgtaatcccagcactttgggaggccaaggcaggcagatcacgaggtcaagagatcgagaccatcctggccaacatggtgaaaccccgtctctactaaaaatacaaaaattagcttggcgtggtagcacatgcctgtaatccccagctactcgggaggctgaggtaggagaatcgcttgaacccgggaggcagattttgcagtgagtcgagatcatgccactacactccagcctggcgacagggcgagactccgtttccaaaaaaaaaa

SEQ ID NO: 72240 - DNA, 1432 bp, Homo sapiens; identical to SEQ ID NO: 66076

SEQ ID NO: 72241 - DNA, 795 bp, Homo sapiens; identical to SEQ ID NO: 66077
  misc_feature (1)...(795): n = a,t,c or g

SEQ ID NO: 72242 - DNA, 805 bp, Homo sapiens; identical to SEQ ID NO: 66078
  misc_feature (1)...(805): n = a,t,c or g

SEQ ID NO: 72243 - DNA, 745 bp, Homo sapiens; identical to SEQ ID NO: 66079

SEQ ID NO: 72244 - DNA, 869 bp, Homo sapiens; identical to SEQ ID NO: 66080
  misc_feature (1)...(869): n = a,t,c or g

SEQ ID NO: 72245 - DNA, 1730 bp, Homo sapiens; identical to SEQ ID NO: 66081

SEQ ID NO: 72246 - DNA, 2299 bp, Homo sapiens
  misc_feature (1)...(2299): n = a,t,c or g
cctaaaagaacaaaaaaaagtgagagaaccattagatactcagtttcctgacagtaacagaagaaaacaggactaagaacattcactaaagctttcagtgtgggcagtctgtcagtaaaaaggtaagtagtagggtcagaggtatggcattccacataccagctctaccaagaatgaaagagcatacggactacagaaacggacgtgtgtccgtgattaaactttttggcatcgctgtattaatcccttttgatgtatataagttcagtatatgacaaatgtttcagttccccccccccaaagaatccaatcacaaccaagacacacacacaaatcacttctcagttacacatctgcatttctttaacaaaacagtaagagatacaatcatagcgaagaggtcacccgcacaatacattatcagcacactgtctagaacacctcatttaaagacactcagtaaaaacgtattcacaggacctgctgtgaatggcaagatatggtaattttataatagaagaactctgctcatgcagtactctccacacaccagacgtcggaaatcacagccacatcatcaccttgctcacacttccctattatactagatatgcaaaaagccaaaaaaagcagcttttaacattatatcattatatcacaattttgaaacatgggaaaaaataaaaaacaaaaaccattgtgtggataaaatggtctccgtgacattgagcagagtgttatctttttttttttttacattattgcacagagatttctcatcaatgttcttcagtttttatgtcttttcctaaatgtgaataagtgctatggataaaatacaaatgtagaaaataacagcagcatgatttgtcaaagttaatccctataatttagtaagaaaaaatggatataaacaaaataagtgctctttctaaactgtactaaattttccaaaaatattggttttaaatggcagtgaaggtcctgaaaagcctattgaaagcgatgctgagtcctggttttcaaaagtgtcctggtttggggtttccttggtgaagagcagaatttcaaggtgaagtaatccgacggactaaatttaaaacaaaacagccctcggcttcccctaattgggcctgtgaagggcaaccggcttccgggganccctggacctgggaggccagccgagtggttggggggtgcctggcccccatctacacgtacacaggctggcagccttcagtctgatccaccagatcagagctttctaaatctgagctctcagcctgtgaagcttctgctcctgaaggctttgggcatcgaaaggggtagccattgtcatcaaagaaccttcggaaggtgaattcgtaaaatgcgtgctcaggatgcttgttattgggcgaggtgagtgtgtcccaggccttggtgctaaccttcgctggcatcgttccaagggctttcttcatctacggggtcgaaattcgaggtgtccatggggtggctgatggtgggaacgtagggggctggctgcttccggatgtcactggagaagtcaatggcgctgaagaaggggtgggccttcaggtcatcggccccattccgccccaggcggtggtctgcggagcagcacagcttggtgatgaggtccctggcctcagggctcagcttcacctgggctggaatgtggagcgtgttctcccagttgatcaccttcagctgggtttctgtgggagtaggtgccaaaaagggcggctgccccaccagcatctcgaagagaatcactccaacactccaccagtcacagagttgagtgtaccctttgcggaggagcacctcgggtgcgatgtagtttggagtccccaccagtgaatgtgccaggcacctctggtgctgcttccgcgccctctgctctagggtcttcagcctctccccacaccgacagttagacacatcatcccagaggtcgctgggctccatgctgtcctgtctgacatggctccctttctggtaatatttggaattgtgagtccacctgaacccagtgcagaggccgaaatctgtgagtttaatgtgaccatccagatctatcaaaatgttatcaggcttgatgtctcggtggatgaagcccatcttgtggacactctcaatggccaaagtcagctctgcgatgtagaaccggcccaggtgctcagggaagacctccatccggatcagcaggctcatcatgtccccaccagggatgcggacgcggggtcgcccgggnttccgnccgtgccagcatttcgggacctcttagcggccg

SEQ ID NO: 72247 - DNA, 891 bp, Homo sapiens; identical to SEQ ID NO: 66083

SEQ ID NO: 72248 - DNA, 778 bp, Homo sapiens; identical to SEQ ID NO: 66084

SEQ ID NO: 72249 - DNA, 1176 bp, Homo sapiens; identical to SEQ ID NO: 66085

SEQ ID NO: 72250 - DNA, 1867 bp, Homo sapiens
ataatagaaacatgtttaattatggagagtaaaacagaaacgagaaaaaacaggtatcatccatgtattttatattcttttctagaacaaccaatctttattagaaagttgtagtcacgtttacaataaatatcaacaatataatgaaaaagtagaacaaattagtttccaaatactgaactcctgtaaccaaaacacatttttggatttgggaaaacacagtaaacacataccaaaaacacagccacaaataccaaaaacaaaaaccagctcaagtataggattgaactggctggaaaacacttattgtgttactgccttaagaaccccacggagcaccttgtagctcattaactgcacattttccttaggggggaaacaaggtcctctctcagtcacatatgcataaggaaatctcaaaacccaaaggccatcaggtggaagggtgatttcttgtttttctgggtagaataccggacatggtggtgggcctggctgaacctgaggcattagtattatctggcaaaggaggcatcaggaaccacaacaaaaagcctcataagttggagcgtaatgagggttttcagcccttctaccttgagaggatgacagaatatataagggcatgtcactatttagggcttttaaagctgattcctttggcccacttcccattactttcattactttgtcaggcccagagcacatgaatctccgacctcgagagtcttcatattcaaagcccacaaaagctcgagctatgtcatctcgccgtcttcctcttcccattacaaccgcacttctctttccaggaatagctttatttggagcaggccaagagtttgtgtctaagtctccttcatcttcagctctagtcctgatgacaatgtcccaaggcataagataatttgttcctggaataaagccctgttggtccaaacctgtatgaaagttataagacttagcagggcctagtttaaccaaagaccagctggagaatttgggtaggagacctttagggcaatttgaatgtagcatgcctgggagatactcaactgtggatgcctgtcgatcaacgaagtttggcctcttctcagttttcacttctacttgaccatgaacttctggattatctcctcctgcttgtggatcagctggataggtacctaagctatctgtggattggcccaaactcaaagctaaactcaggctcgtgctctctccttgggtttgaggttctttttctttaagtttatcagcatccgaatctggaggagcaggagaggattcatttttagcaggagcaggatctggagtacttggttcaaatactgggaaattgatatgatccaattttccacaacacttttcttccagaagctgatagaagtcataattggctgctttgatatcaaagggatcatctcgaggtgcttgtttccttccacagttgcaagcaccagtagatcgagctcggctattgtgatatagcacaggcggatttctatcagcctctggtttttctcctgatttaggtaatgagtgaaatttgtgcacacagtgttgatcagttaaactcctctcctcacagagctgatggccattgctccaaaatttgtagcagtcctcatgtaactgcatggcgtatttgtgaaatgctggacctatagcatgttgactgtacactcgaagagcctgggcaagctgattcttatggacagtcattgtgtaattatgaggcaaatttgactggtaggcactgtgggccatgggtaaagctttttggcatcggttttctgaaaattttgggtcaatatacaaaaatctttccaagactttaatactgcttaaaatcttacatgttagc

SEQ ID NO: 72251 - DNA, 1264 bp, Homo sapiens; identical to SEQ ID NO: 66087

SEQ ID NO: 72252 - DNA, 821 bp, Homo sapiens; identical to SEQ ID NO: 66088

SEQ ID NO: 72253 - DNA, 1453 bp, Homo sapiens; identical to SEQ ID NO: 66089

SEQ ID NO: 72254 - DNA, 2530 bp, Homo sapiens; identical to SEQ ID NO: 66090

SEQ ID NO: 72255 - DNA, 1214 bp, Homo sapiens
ttttattacaaagaactgtatcaaaatatacaagtctgtttaagaacaaccaagaaatgcagctgtttaagggacaaatgagaatcaaccgttagagagcaggcagcctctccccgccgctgtccactgcaggagacggcatcctcagggccacattttccacgggacatccttctgaataatttaaagggtaagtccggcacattacaggtcttcgcgggagggcagctgtgtcgggctttctccttctgtggcttcagcctctgccggcggcacacaggcatcttccgtttcttcgaagccgtcaggacacacacagacgtagctccctggagtattgtagcagttttcgtttttcctcacacaggttttttctgctagtgagcactcgtccacatctgcacactgtccgtgctccctcgcgtagccagagatacactctttacagtttcctgggccttcccctgtgcagcccacacagctggagtcacactcttcgcacgtgtaggagccgttggcgttcttacagaactgcgcagcgctgcagggaggcggctcggccgcacactcgtccacatccacacaggcgccctcgtccagcacccagcccacttcacactcgccgcagtctctgttggtcaggcccgagcacgtcttgcaggactcgtcacaggctgtgcagatgctgtgggtctcgttccggagcgagctgaagtagccgtccatgcagtcagtgcacagcgggccctggtaccccatgtggcaccggcaggacccgtcgccctgtctgctcccatctccgctgcagtggccattcccgctgcagggcctctgggatccgccctggcatgcgagacagtcgggaccgtaggttcctggagagcagcacactttcagtgtcttcacacaaaaccactcgaataagtcaggatattcgctcttcagctgcagccaccaggcctccaggtgctcctcctgcgcctctagcatctgattgcattcgaagtcgctgctctcgcacagcccctccaggatctccagcaggcgaatctcgctggactcgtacttggacagcgtcttttcctcccaagccgtgttcccgccgccaaagttcttctttgcggtgtccaccatcccctggttaaacttgtccaccagcccccggcaccggtggcagggcgtcggcttcttggcggcctccggcgcggacgaaa

SEQ ID NO: 72256 - DNA, 1236 bp, Homo sapiens; identical to SEQ ID NO: 66091

SEQ ID NO: 72257 - DNA, 1330 bp, Homo sapiens
ttttttttttttggctatagagcatttattgcaaacaaaattgaggtaaaagaagctgacccagaacccacgcccgtccaggctggggaagtctctactcgccccacaccaggccccgagcaccgcgggcccgaagcagcccccagaggacagacgggccctgcgcactgaggtagctgcatcttaagcccccatgagtacaactgcccagggctgcccaattcccagaggggaggaggagagagaggcaggcagggggagccccggcttcaggtgggggcacaccccacaccctcaacaaacctcccagcctctcgggctgggcacttcctgcctggccacccagccagccatggggcagcggggtggccaccagaggcgggcgtgctggggtgcgaggtcactgctgctccaggcagtcctcggtcaccccctgggcagccagctcagccagcacgttctgcaggtagttggggtcgggatagccgtggcccgtaatgttgcggtccatctctgtcttgtggtggatctcgttccataccacggtgtccgtctcacccgtggtgcttgacgtgccccactgtgaagatgagccgccttcttccaggcccaccttcaggagctcttaaggactttgcgggccctgggcgttgtctggaaggtagcactgggcggggaaaccctctggcagtgaaacggctttccgggattggggtgctcagggccctggataccatggggaatgctgtaaactatgaggatggtcccgcagtcctcgtggccggggagcgacatctggaaccgtaatacctccatctttccctggggctgggtccccgtcttctctccatagatggttttgcaggagggacactgcagacttccatccttattgccgttgcagtacatggccaggaggcacagcaggtggaaggcatggctgcacttggtgaggtggcccacagctagggacccgattgccttgctgtcagtcacatcgctgtatccagacgctgtggacagcttctccatgcagatgatgcagtcctcatctgggggcactttcagctcttccgtgtagttttttatgacctgctctggctctggctctggcttcggggtcgcttctgcgagcgcctgctggactctgctgggctttggcatctgcatgggcacagtggcagggacgctccctgggctgcttgagggaccgctggggagggaggcactgactgcaccggaggtggaggatcctgggggcaggtgctgcggtcccaggtgggagaggctggagcggtagaggggctggctccccagggaaggaggagct

SEQ ID NO: 72258 - DNA, 1673 bp, Homo sapiens; identical to SEQ ID NO: 66092

SEQ ID NO: 72259 - DNA, 2567 bp, Homo sapiens; identical to SEQ ID NO: 66093

SEQ ID NO: 72260 - DNA, 1893 bp, Homo sapiens
ctgaatccatggaaaaacgctttacaggacttctgcttaccttttctcagaatcaccagccttcttcagcaccacctttttggggaagatttacctagctgccaggaagaagaagaattttcagttcttgccagctgcctgggacttctgccaacgttttaccaaacagaacatccattcatcagtgcctcctgtctggattggccagttccagcatttgatattataactcattggtgttttgagataaaatcatttactgaaagacatgcagaacaaggaaaggccttgcttatccaagagtcaaaatggaaattaccacacctactacagttgcctgagaattataacaccatttttcagtactaccacagaaaaacctgtagtgtctgcaccaaggttcctaaagatcctgctgtttgccttgtgtgtggtacttttgtatgcctgaaaggactttgctgcaagcaacaaagttactgtgaatgtgtactgcactctcagaactgtggtgcaggaacaggtattttccttttgatcaatgcatcggtaattatcatcattcgaggtcaccgcttctgcctctggggttccgtgtatttggatgctcatggagaggaagaccgggatcttaggcgaggcaaacctctctacatttgtaaggaaagatacaaagttcttgagcaacagtggatttctcatacttttgatcacatcaataaaagatggggtccacattacaatgggctgtgactctccacctcagcattgcatcgtatcatcattttcgctacgaatttatttttcaacaataagctttaacttaatttgggggattaacacttttgctgagggagaaaaagaaaacatacattatgaagcctttccaaaattaggtgcttggtaatcacgttaatggtataattttttttttttaatatctggagaacattaataacaagttaaattattctttagtggtcattttttaagtgcacaattaataagaagcacaacttgttcacaaactcattcagaaatgattctcccaacaatgcatatcagctattcattgatacttagagtgggtgtgatttatttgacattttactgcttctttctgtctgtgtgttttaatttgcatctgccaagcataatgcatcttttttcctctgccattcttgtgttgattggagaatttttctgtatgtaattagaaaaaaatgtaaaacatgatttatgtgaaatactgtatagtaaaagttggtctaatagtagaactttaaaattttttcttattgtgaggaatctgttaaaagtttaaagctttgctgaaaactgaattcattctcaggaatttcataaatcttctccccaggtaaataattgaaatagctgtaaaataagtagatagctgctgttaatataatacagtacattttggggggcatatgtgtggttggggggtccttaaaaatcaaaatttgccatttcagttggatgaattactagaggtaataacaaatcttactataaaatcaagaggtttaagaacatacactgggcagatgttgattccgtgcatgcccaccttttattaccaaacaaggttttgtttatatgattgtattagaaatgctcagacttccccagaaatgaaccataaattttggaacttcctttcagctcaagaggttcagctatattgtatttgtgcagtggtaatcactacctatttctggctcgggtttccctaaaaggaaaaaaaaggcggcagtgggtgatgaccctcatggaatgagccacgcttcctgcattcctccttaggaactggctgtggaaaaccaatttatggtttgcaggggtttaaaaatccagtaaaaatgggggatg

SEQ ID NO: 72261 - DNA, 952 bp, Homo sapiens
accaccactccagctttgcacaaggagatttgttctgatttcacagtttcagtcaccacccctgtgcccaagcaagaaggtcacctagacagcgagagcccaaccaatatcccactgacaaagcaaggaggttccagggatgttcagggcccagaccctgtctgcagtcaacccatccagcctttgtcttggcatggaagcagcctggatccccagggcccaggcgacaccctaccacccttgccatgtcacctcccagaccttcagattccaggtacctcacctttgcctgcacatggaagccacctggaccatcggatcccagccaacgccccactgtctttgtcccaggagctcccagacactcaggttccagctaccacacctttgcccctgccacaagtcctcacagacatctgggtccaagccctcccaacttcacccaagcagggaagcctcccagacatccagggtccagcggctgcacctccacttccggagccaagccttacagatacacaggtccaaaaactcacaccttcgttggagcagaagagcctcatagatgcccatgttccagctgccacacctttacctgagagaggaggctctctagacattcagggcctctcacccaccccagttcagaccaccatggttttgtccaaaccaggaggctccttagcctctcacgttgccaggaatctatgggccttcacagggccaggggtcctgatgccccttccacatgtgagccaggacatgaggcttccctgaagcaaggatttcagccagatgccatagaccctcagaacttgacctggaagtccagacactgaacgcaggcctcaaaactgctgcggccttccaactcctggtatctgcatcggcgaatggcccttcttgccttgatccacagggatggggaagggaatgtcattaatgttttgtt

SEQ ID NO: 72262 - DNA, 3036 bp, Homo sapiens; identical to SEQ ID NO: 66097

SEQ ID NO: 72263 - DNA, 1387 bp, Homo sapiens; identical to SEQ ID NO: 66098
  misc_feature (1)...(1387): n = a,t,c or g

SEQ ID NO: 72264 - DNA, 2744 bp, Homo sapiens; identical to SEQ ID NO: 66099

SEQ ID NO: 72265 - DNA, 1145 bp, Homo sapiens; identical to SEQ ID NO: 66100
  misc_feature (1)...(1145): n = a,t,c or g

SEQ ID NO: 72266 - DNA, 569 bp, Homo sapiens; identical to SEQ ID NO: 66104

SEQ ID NO: 72267 - DNA, 2371 bp, Homo sapiens; identical to SEQ ID NO: 66105

SEQ ID NO: 72268 - DNA, 738 bp, Homo sapiens; identical to SEQ ID NO: 66106

SEQ ID NO: 72269 - DNA, 1433 bp, Homo sapiens; identical to SEQ ID NO: 66107

SEQ ID NO: 72270 - DNA, 1062 bp, Homo sapiens; identical to SEQ ID NO: 66108
  misc_feature (1)...(1062): n = a,t,c or g

SEQ ID NO: 72271 - DNA, 914 bp, Homo sapiens; identical to SEQ ID NO: 66109

SEQ ID NO: 72272 - DNA, 757 bp, Homo sapiens; identical to SEQ ID NO: 66110

SEQ ID NO: 72273 - DNA, 758 bp, Homo sapiens
ctgtaggaaaagattaaaaaaaagtgtaagttccttctggggattactggggtagggctgatatttctccggactgcttcaagtgtgaccagggactgcgtggacaccttaaagaaaattttataatgagtctagtaagtttcgggtctagggtgcatttttatgtagctaacaaggtgccagttagcgtatttttgagcttggaactgccctaataaaataagttctctaaaaacagtaatcaggcatattagctttaatgtaggtggcgatgagtttttaggccaaggaaggaataatgttttatgtaccaaagccttttgtccccattttccatcatacgaatagtattccctgttgctaagccgatgatacattacccttttccccataggtgtgagtggcggtctgaaatggagaagttcaatagttctgattgcagatcctatgcagaagagataataacggaaaataatctttgtctcctggattaagctgaggctggcaaagagtgaaatgtcccaagccctctaacaacaaacaacatactttgtgttgtcctggatgctggtctggttgccaaatatgtggaactggccccatatgcgtgtactgttgtccatttcatgagagtaggctcgacggacaccatggggcaaaggatctgatggttgccagcctaagcgttttagacttttgacccagagatttattgttttgggtgtggaaaaaattttccagtgaagggtctcaagata

SEQ ID NO: 72274 - DNA, 1813 bp, Homo sapiens; identical to SEQ ID NO: 66112

SEQ ID NO: 72275 - DNA, 1086 bp, Homo sapiens; identical to SEQ ID NO: 66114

SEQ ID NO: 72276 - DNA, 644 bp, Homo sapiens; identical to SEQ ID NO: 66115

SEQ ID NO: 72277 - DNA, 1281 bp, Homo sapiens; identical to SEQ ID NO: 66116

SEQ ID NO: 72278 - DNA, 1096 bp, Homo sapiens; identical to SEQ ID NO: 66117

SEQ ID NO: 72279 - DNA, 1227 bp, Homo sapiens; identical to SEQ ID NO: 66118

SEQ ID NO: 72280 - DNA, 698 bp, Homo sapiens; identical to SEQ ID NO: 66119

SEQ ID NO: 72281 - DNA, 1294 bp, Homo sapiens
cagagacgctgcaaattgcttgtggacggtgtaggccgctgcaggccaccatgaaccggcttccggatgactacgacccctacgcggttgaagagcctagcgacgaggagccggctttgagcagctctgaggatgaagtggatgtgcttttacatggaactcctgaccaaaaacgaaaactcatcagagaatgtcttaccggagaaagtgaatcatctagtgaagatgaatttgaaaaggagatggaagctgaattaaattctaccatgaaaacaatggaggacaagttatcctctctgggaactggatcttcctcaggaaatggaaaagttgcaacagctccgacaaggtactacgatgatatatattttgattctgattccgaggatgaagacagagcagtacaggtgaccaagaaaaaaaagaagaaacaacacaagattccaacaaatgacgaattactgtatgatcctgaaaaagataacagagatcaggcctgggttgatgcacagagaaggggttaccatggtttgggaccacagagatcacgtgaacaacagcctgttccaaatagtgatgctgtcttgaattgtcctgcctgcatgaccacactttgccttgattgccaaaggcatgaatcatacaaaactcaatatagagcaatgtttgtaatgaattgttctattaacaaagaggaggttctaagatataaagcctcagagaacaggaagaaaaggcgggtccataagaagatgaggtctaaccgggaagatgctgccgagaaggcagagacagatgtggaagaaatctatcacccagtcatgtgcactgaatgttccactgaagtggcagtctacgacaaggatgaagtctttcattttttcaatgttttagcaagccattcctaaacagcccaactggcatttaattacccaatactgtatataaggcaaatatggacagttactttcctcttgcctgttcatatccttcagtgacattgaggaagcagtgtttctctttttaaaggagaatagttgtcaaccttcattcatctcttacatctctcaccctctccttttttttttctttgattttcccccttattgatgggactgatattcattctgtttttgatgaacatttggaaactgtcgggctttttattaaagctctgtaaaattaaaaggttttggaattataagcaatctttgtttctgagggttatttttattttgcatatagctttgatgtaattaaactggaaactctttcctgaaaaaaaaaaaccaaa

SEQ ID NO: 72282 - DNA, 1227 bp, Homo sapiens; identical to SEQ ID NO: 66118

SEQ ID NO: 72283 - DNA, 1334 bp, Homo sapiens
tttcgtggacaggagggctggcaagggagggtccagggttaggggattcggagtggcttcaggcggaccacgtggctaccttttttccagggccagactttggcagcgtgtaaggtctgaggacaggggcaccggaggccgaggatgagaggccagtgcctgtttccaggcagccagggcctcagaaactccggccggagcactcacccgtcggtggaggccgttaccagggccaccttatttgcgagcgggtcccggcgggtcatcccggagctggccatccgcaccgaattccaagcccgggcacagaggcctagcagccccgccttgtgcatggatcagaccagcaaatgccacttcggataaaccctttggactcctaactccaatcaggtgtctgctttgttgaggactcacagacacagtctcctttcttcaagatctttacaatgcaagacctcactaacacacagggatggtctcccagagggtctgtgctgttccttcactcagaacatcaagatgcactgaagtaaggatcctctattctacagttcctgctagctgagctattccatgggggcttcagcaggaaattccaaggttggctttgacaagctaaggccggctggtggagcacatcgagttctggaggttcatgtgtgttttcatgaagatctgtctgcccgtagcagataaagagttgttgccccactcctcctggggtcttctattttcctgggaggaatttctggattaactgaacacacacacacacacacacacccttttgaagcatcaacagtaattctgagttcttagggacaatgcagattaaatccacaataagaaagacaactatggccaggtgtggtggctcacggcctgtaatcccagaactttgggaggctgaggcggatggatcacctgaggtcaggagttagagaccaacctgaccaacatggagaaaccccgtttctactaaaaatgcaaaattagccgggcatggtggcaggcgcctgtaatcccaaatactcgggaggctgaggcaggagaatcacttaaacccgggaggcagaggttgcagtgagccaagatcgcgccattgcactccagcctgggcaagaagagcaaaactccatctcaaaaaaaaaaaaagagtcctatggttccaaaggggaccaaacggccctcattggaaaaaataggggactttattatgcaagggggttccagtcccttggtttggttttgggaaaagaaaaaaaggcctacaatccaaaaaaatagggcccatcacaggcttccccaagggacaaaattaatccattttt

SEQ ID NO: 72284 - DNA, 1772 bp, Homo sapiens; identical to SEQ ID NO: 66123

SEQ ID NO: 72285 - DNA, 1194 bp, Homo sapiens; identical to SEQ ID NO: 66124

SEQ ID NO: 72286 - DNA, 2148 bp, Homo sapiens; identical to SEQ ID NO: 66126

SEQ ID NO: 72287 - DNA, 625 bp, Homo sapiens; identical to SEQ ID NO: 66128

SEQ ID NO: 72288 - DNA, 2434 bp, Homo sapiens; identical to SEQ ID NO: 66129

SEQ ID NO: 72289 - DNA, 762 bp, Homo sapiens
ttttttttttttgctcagcaatctttattcagttcttcttgggggtgggatgcctcccttcccatgctcccacccctcccatcccagaactccgttgggctcagtgtcctctgttgagggaaggtcttggtgcccagatgcctactctgcaggagagggaggaaccttgtccctttgcgggagtcgctggtctcttctgttgtggggaagaaggaaggtgggaggggcactgtccaccagcactcagagctccattatgtccccagctggggttgcagggtaggggggactgggggtgtcccccagcctcagcagacggagggcctcagggatgaggctgccaggatagcgccagagaagcagctcagagcaagggctcctgagtgggggcagggctggggagaaggtcatgggggggctgcagtaggggtggtcattgtgcaggctgagttgagagaagtgggtggccatgttctcctcagacagaaactgcttgcgcagaggctccctggggagagatggcagagaggcaggctgggatactgacacaggaggcagcctgttggggaccagaggtgacagagatcttgttgggagtccctccctgcccccaaactcactgctcctcctccaggcgccgcttggtgctcatgggcacagctcctcggagaggggagctgggaaaaaaagagagcctggtgcaccccaccctcttggccccttcccaaggatctgcccgcctaagcctgcagcatcagccag

SEQ ID NO: 72290 - DNA, 5947 bp, Homo sapiens
acgccagtggacaaaatctcccagatacgcctttccccatgcctatgacccagaatactacttttattccagatcaatcctggcacttcattccccatagacttcagtttgcaccaatcccccatccgaactgtaacaggttttttttttttttgagatggagtctcgctttgtcgcccaggccagactgcggactgcagtggcgcaatctcggctcactgcaagctccgcttcccgggttcacgccattctcctgcctcagcctcccgagtagctgggactacaggcgcccgccaccgcgcccggctaattttttgtatttttagtagagacggggtttcaccgtgttagccaggatggtctcgatctcctgacctcatgatccacccgcctcggcctcccaaagtgctgggattacaggcgtgagccaccgcgcccggccttcctttccttttttttttgagatggagtcttgctctgtcgcccaggctggagtgcagtggtgcgatctcggctcactgcaagctccgcctcccggggttcacgccattctcctgcctcagcctcccgagtagctgggactacaggcgcccaccaccacgcccggctaatttttttgtatttttagtagagacggggtttcaccatgttagccaggatggtctcgatctcctgacctcgtgatccgcccgcctcggcctcccaaagtgctgggattacaggcgtgagccactgtgcctgccccagaatgggtttttaaagccacagttgagaggccacccattgcccggcgcctggacagtgatcatcttgttcatcttgttcagtcctttcttgtgtgattggaattattcatcccctttgaaagatgagaaggttgagatgcaaagagtctacctttccaagttctcactgctggaaagagctagaagcacagttcaaagttctggcttctggactctgcagtccaggtctcccttctcccacttgcctaccctcaatgccacactgtttttgaagtggcccataacttgaaggaaaagtttaaagacagttcaatttaatcatcagaatgcattcttttttttttcggagacggagtcttgctctgtcgcccaggctggagtgcagtggtgcaatctcggctcactgcaagctccgcctcctgggttcaagccattctcctacctcagcctcccgagtagctgggactacaagcgcccgccaccacgcctggctaatgtttttttttgtatttttagtagagacggggtttcaccttgttagccaggatagtctggatctcctgacctcgtgatccgcccccctcggcctcccaaagtgctgggattacaggcatgagccaccacgcccggcccgtggtcagaccttccagagggggttcaggtggaaggcagactcagaattttcgcgcacccatgcctcgcgcttctcctgaatggctgaggagtggagggctgggggtggggcccaatttaacccatgttttaacaaaccctactctaaaacggcctgacatgtcacaaggaccaccgcatcacaggccagttcccctcactggatgcccacactggtgtaaacttaggaagaggctgggcacactggctcactgctgtaatcccagtgctttggaaggctgaggtgggagaatcgcttgaggccaatcacacgactgcactccagcctgggcgacagagtgagaccctgtctctaataaaaaataaaataaggaagaaagaactgttctgtctgtggggctgggccacgcccagtgcctgggtgggcaggagaacactctccccccaagccgactccccccttcagccctccctcgtctcacccactctgctctccccttccccctccccctgcagctggagctgttgtcagaggaggggaggcatttcctgtgtccccctccccctaattcccctacattcctggcaagcccagaggaggcctgagagaaccagagagggatgggcgggaacaggcgagaggccgggagggaagccaggccccaccacacacacaagacttggagagcagggccaggaaggaaatgggggaagggatgaagcgatgccccgagaggggctggaaaggacgcccaccgtcatcagagggtggtctctgctgggcacggccacgccccttccacccctcagcctgcctcctcagggcgtctagcaggctgctgttccgtaggggatgcagaagaaaggccagaggcagtcccgctcagagatcagggccatccccaaagaactgactgcgccctgagagtcaggcgcccaatggggcggtggagggcccagcccagcaaggcccctccgggacaccaggagacaggagggcagagtccaggcgaccacccagcagccaccaagcccccgagcagctggccagagtgacggccacagcctgcccttgtctggagcttactgtctggggagggagatgaaggtggcacttcaacgccagggtccaggaggcggcagcatcccagcaccatgggaaattggatgggggggtgcgcaagcactcgggccctaaccaaaccttagccccaacaccccccaccaccacctggctcacagggcagtgctcacggcctgtgtgcacgtgtgcgcatgggtgctgcctgcccagggactgcaagaaggggggtctgcaggccacggcatccagcctggggcagcctccagcagaaggggccactccagagatcaggtggggagctgggcacccacctgagtggcatcagtgacttcctaaaaaaaaaaaggccccagagagaccccacccttctcaccatgggaagacacaggagttggtgggtctggggaagccctcaccacacaatgaatctgccgggctctacctttagcaatgggcaggacaggcctgctgcgctgaggccacgcacagatggggaggcacaccacgcagcctgtccctgactgtggagggtgaagggagggacagacccaagggacctgggtagatttctccagcaagagtcgtctccagatcacatttaggaatctgcagtttcaccactgccctgatacagactgccgtcctcccccagggctcctgcgtctcacagcaggacagtgaaggtaaggcccagccaagccagagctggctgctgcctctaggcaaggcctccacaccccacccttgcatcactcgtgactctgccctgttcagacagccctgcccatgatgggtggggcacagagaccagtgggagcagcactttgggacccaaggctgggagcaagtgggtccaggggacactgggctcctaagaaccatactgtggccccaccccaagtgcctgcctccagacttgctcacccgagggcgaagcaggcacccagcaagccgaagccatcgggagtgggtgcatgtgtgtgtgcccatggtactgatgtgtgcatccatgtatgcccatgggtgctgatgtgtgcgtgcacgtgtccacgggtgctggtgcatgtgtgtacatctgcccgtgggtcctgacgagtgcgttgagtgcaggtgtgtgcgcccacggtgctgatgtgtgtgtgcacgtatgtccgtcggtcctgagtgcgtgagtgcaggtgtgtgcgtgagtgcaggtgtgtgcgctcacggtgctgacgtgtgtgcacgtgtgcccatgggtcctgatgaatgtgtgagtgcaggtgtgtgcacccacaggactgacgtgtgtgtgcacgtgtgcccatgggtcctgatgaatgtgtgagtgcaggtgtgtgcgcccacagtgctgacgtgtgtgtgcactccattttcacgctgctgaagaagatatacccgaaactgggaacaaaaagaggtttaattggacttacagttccacatggctggggaagcctcagaatcatggcgggtggtgaaaggcactttttacatggcagcggcaagagaaaaaatgaggaggaagcaaaagcagaaacccctaataaacctatcagatcgcatgagacttactcactatcacgagaatagcacagaaaagaccagcccgatgattcaattgcctcccctgggtccctcccacaacacatggaaattcttggagatacaattcaagttgagattggggtggggacacagccaaaccatatcaccgtctctactaaaactacaaaaattagctgggcatggtagcatgtgcctgtaatctcagctattcaggaggctgaggcatgacaatcacttgaacctgggaggagacagggtgagactccatctccaaagaaaaaaagaagttttaagtttgaaaggtttaaacagcctttctttttaaacaaacaactgttagcacagagaggaaagaccccttcctacagccccaaatgagaggaatcccagctccatggaagcaaccgctccagcacccacagcagcctcctgggtgagggccctgctgtgtcggaatctccccaatgccccatccctgtggggaagcagctccagtgctcatcaacacccaaaacaaacgcatcaggggtcaaagggacccaggaattccagaaccaaagagaaaaacctcaacagaggcgttcctgaacatgtcaggaacggagctatgagcacgggctcttcatcggggttcctaagttacgcaaagacagcaatcaggaactcagcaatcaggagccagaggatggccacatactcacagtggaggccactgtacccctcttggtggaacaccccaggttggggtgcacggcctaaagcaggcctagcgctgtccccagccccacacagtgagccctgccattttctgtttacaaataaaaagcttcatgttttctcaccatccatgcacaattctgtctcttgcttatgggatctaaaacactgcaggaggtggctcagggcctctagaggcacagacagggggccctacaggccctcagccctggctccccaatcccagggccacagaagcaggtggcccaggggccaggagagcagcagacacgcatttccggcttgctgaactccctggagggtccaggccagtcggggcagcccttcctttggagataaatatcaaacctcaagtaaacggcctctgagtgcagcaggtgaacttctgagagctgggtggagccacctggggtagccagccacagcctgtgcgctgtccctccaagtacagataaaggcaggtggcgctgcagtgggggtcggggggtggggagcaggaccacttctttttgggaaatgtggctgcgtgaatgggagagtccacaggccctgtgctcaatcacagtaaatgccactcctcacgtcttctccctatcggagcaaccagcccttgctcagtgtgaaccaaagaaaagaagagcttgaaagatcacaaggagattgctcaattctcaacagctctgagaggctgcctgccccaggaccatcctgatttcccttcaggagtgtagggcctgtaagaattcctgcccgggcagggaggctgaggcagtgaccaggagccaaggtgcactggtggggtggaggcaacggggcctgccaaggactctccctcccaaaaagacaggagccaggtccaaggcacatttaaagataaacgctggccgggcgtggtggctcacgcctgtaatcccagcactttgggaggccgaggcgggcggatcacgaggtcaggagatcgagaccatcctggctaacacggtgaaaccccgtctctactaaaaatacaaaaaaattagccgggcgtagtggcgggcgcctgtagtcccagctactcaggaggctgaggcaggagaatggcgtgaacccgggaggcggagcttgcagtgagccgagatcccgccactgcactccagcctgggcgacagagtgagactctgtctcaaaaaaaaaa

SEQ ID NO: 72291 - DNA, 2210 bp, Homo sapiens; identical to SEQ ID NO: 66135

SEQ ID NO: 72292 - DNA, 2041 bp, Homo sapiens; identical to SEQ ID NO: 66136

SEQ ID NO: 72293 - DNA, 514 bp, Homo sapiens; identical to SEQ ID NO: 66137

SEQ ID NO: 72294 - DNA, 1267 bp, Homo sapiens; identical to SEQ ID NO: 66138

SEQ ID NO: 72295 - DNA, 875 bp, Homo sapiens; identical to SEQ ID NO: 66139
  misc_feature (1)...(875): n = a,t,c or g

SEQ ID NO: 72296 - DNA, 1545 bp, Homo sapiens; identical to SEQ ID NO: 66140

SEQ ID NO: 72297 - DNA, 441 bp, Homo sapiens; identical to SEQ ID NO: 66141

SEQ ID NO: 72298 - DNA, 1859 bp, Homo sapiens
acccagtccctgagagagctcatctcagatctggagcatcggctgcaggggtcagtgatggagctgcttcagggtgtggatggcgtcataaaaaggacggagaacgtgaccttgaagaagccagaaacttttccaaaaaatcaaaggagagtgtttcgagctcctgatctgaaaggaatgctagaagtgtttagagagctgacagatgtccgacgctactggggtaaggagaagtcacattatcataagccaccctgcggcttatcattattattatctttatcttttagaattttatgttctctattaggctcatgttttaagatttatgattctccttccaagacacacataacttacccctccttataacttctaaacaaggttcctcccagttttctctcaagtctttatcaagatttctctcatatcacaaataaagttacattatatcccttagctgacctgttaatttttctacagttgatgtgacagtggctccaaacaacatttcatgtgctgtcatttctgaagataagagacaagtgagctctccgaaaccacagataatatatggggcacgagggacaagataccagacatttgtgaatttcaattattgtactggcatcctgggctctcaaagtatcacatcagggaaacattactgggaggtagacgtgtccaagaaaactgcttggatcctgggggtatgtgctggcttccaacctgatgcaatgtgtaatattgaaaaaaatgaaaattatcaacctaaatacggctactgggttatagggttagaggaaggagttaaatgtattgctttccaggatagttccttccatactccttctgttcctttcattgtgcccctctctgtgattatttgtcctgatcgtgttggagttttcctagactatgaggcttgcactgtctcattcttcaatatcacaaaccatggatttctcatctataagttttctcactgttctttttctcagcctgtatttccatatttaaatcctagaaaatgtggagtccccatgactctgtgctcaccaagctcttgaaccttcttacacactcagccccttctgtacagcacctcttgtccaggtgcatctcatacacctgaactcatttgcatcattttaaccatcttttccttgctgtctcccttctttctatttgaacgtccttcactcatcagtaaaatgtaataattgccttgtgccatattgtccccaatattttattgacatttgatagcaatttttttcatcattttccgtactcctaaggaaaactgacctatacctcataaaatgagaccgctatttaggtattacttctgccagatatttatcacccaattgcctctgacactgactaagaagatgaagaaaagcttttcaacagcctttctatatcatcgtgtgataattgttcaccaatgaatgagtccttagccctgtgtcagtttaccctcgatgcccttatttgtgagttaaagagaaaatatcataaatggtatactcttaagtatagaggttttgtatctagaggatctcagttcaactcctgtctctccatataccagcagtgtaactgtgaataacatacttaaatggctgtgcttatttccttttcttttcttttttcttttttttttttttggaaaaaaaagttttgtttttgtcccccaggctggagtgcaatggcacgattctcggttcactgcaacctccacctctcagattcaaggcaattctcctgcctcagcctcccaagtaggctggggatttacaggtgcccaccaccacccctgggctaaaatttgtattttcagtagagacggg

SEQ ID NO: 72299 - DNA, 982 bp, Homo sapiens; identical to SEQ ID NO: 66143

SEQ ID NO: 72300 - DNA, 1773 bp, Homo sapiens; identical to SEQ ID NO: 66145

SEQ ID NO: 72301 - DNA, 1799 bp, Homo sapiens; identical to SEQ ID NO: 66146

SEQ ID NO: 72302 - DNA, 1140 bp, Homo sapiens; identical to SEQ ID NO: 66147

SEQ ID NO: 72303 - DNA, 2948 bp, Homo sapiens; identical to SEQ ID NO: 66148

SEQ ID NO: 72304 - DNA, 3630 bp, Homo sapiens; identical to SEQ ID NO: 66149

SEQ ID NO: 72305 - DNA, 1092 bp, Homo sapiens; identical to SEQ ID NO: 66150
  misc_feature (1)...(1092): n = a,t,c or g

SEQ ID NO: 72306 - DNA, 433 bp, Homo sapiens; identical to SEQ ID NO: 66151

SEQ ID NO: 72307 - DNA, 2389 bp, Homo sapiens
gcccggattcttctggataatgaccattacgccatggaaaaattgaagaaaagagtactggaatacttggctgtcagacagctcaaaaataacctgaagggcccaatcctatgctttgttggccctcctggagttggtaaaacaagtgtgggaagatcagtggccaagactctaggtcgagagttccacaggattgcacttggaggagtatgtgatcagtctgacattcgaggacacaggcgcacctatgttggcagcatgcctggtcgcatcatcaacggcttgaagactgtgggagtgaacaacccagtgttcctattagatgaggttgacaaactgggaaaaagtctacagggtgatccagcagcagctctgcttgaggtgttggatcctgaacaaaaccataacttcacagatcattatctaaatgtggcctttgacctttctcaagttctttttatagctactgccaacaccactgctaccattccagctgccttgttggacagaatggagatcattcaggttccaggttatacacaggaggagaagatagagattgcccataggcacttgatccccaagcagctggaacaacatgggctgactccacagcagattcagataccccaggtcaccactcttgacatcatcaccaggtataccagagaggcaggggttcgttctctggatagaaaacttggggccatttgccgagctgtggccgtgaaggtggcagaaggacagcataaggaagccaagttggaccgttctgatgtgactgagagagaaggttgcagagaacacatcttagaagatgaaaaacctgaatctatcagtgacactactgacttggctctaccacctgaaatgccgattttgattgatttccatgctctgaaagacatccttgggcccccgatgtatgaaatggaggtatctcagcgtttgagtcagccaggagtagcaataggtttggcttggactcccttaggtggagaaatcatgttcgtggaggcgagtcgaatggatggcgagggccagttaactctgaccggccagctcggggacgtgatgaaggagtccgcccacctcgctatcagctggctccgcagcaacgcaaagaagtaccagctgaccaatgcttttggaagttttgatcttcttgacaacacagacatccatctgcacttcccagctggagctgtcacaaaagatggaccatctgctggagttaccatagtaacctgtctcgcctcactttttagtgggcggctggtacgttcagatgtagccatgactggagaaattacactgagaggtcttgttcttccagtgggtggaattaaagacaaagtgctggcggcacacagagcgggactgaagcaagtcattattcctcggagaaatgaaaaagaccttgagggaatcccaggcaacgtacgacaggatttaagttttgtcacagcaagctgcctggatgaggttcttaatgcagcttttgatggtggctttactgtcaagaccagacctggtctgttaaatagcaaactgtaggtccaaatctcaattttttagaattttaagttatgaagtgctcaaaggtactgacacagttgattttattcacaccattaggggtatgcaagatgtccctgttttataaacataatcacaacagtaataaacctcaagtagtggctagtgtttagtatagaaatataagatgttgatttagtaaactgataaaaaccgaattcttgtctttttagtgggatccttactggccctggaaagatatagcatagtggttctcagcacagtctccagaacagaagcatctgtagtacctggtaacttgttagaaatgtacattctcaggctccacagcaggccgcctgaatcaaatcctgggaggtggggacagaaatctgtgttttaagaagccttccaggtaattctgctgcacactcaagttcaggaaccaccggtatagaccattaccttagtggatttacctgtagagtttattggatcctgaaaccaatcaattacttagaactaggcaaagatgaaagtatagccaactattcttggctatatatatatattcaagtgggccgggcgtgatggctcacacctgtaattccagcactttgggaggtcgaggtaggcagatcaccgagcccaagagttcaagacaatcctggccaacggcgaaactctgtctctacaaaaaatatacaggcgtgttagcatgtgcctgtaatcccagcttcttgggaagctgaggcacaagaattgcctgaacccaggaggtggaggttgcagtgagctgggatcgcgccattgcactccagcctggctgacagagcgagactgtctctaa

SEQ ID NO: 72308 - DNA, 2650 bp, Homo sapiens
tgcggtggaattctcagcccatggtgcccctggctgtggagaaccaggctgggggtgagggtgcaggcggggagctgggcatctccctcaacatgtgcctccttggggccctggttctgcttggcctgggggtcctcctcttctcaggtggcctctcagagtctgagactgggcccatggaggaagtggagcggcaggtcctcccagaccccgaggtgctggaagctgtgggggacaggcaggatgggctaagggaacagctgcaggccccagtgcctcctgacagtgtccccagcctgcaaaacatgggtcttctgctggacaagctggccaaggagaaccaggacatccggctgctgcaggcccagctgcaggcccaaaaggaagagcttcagagcctgatgcaccagcccaaagggctagaggaggagaatgcccagctccggggggctctgcagcagggcgaagccttccagcgggctctggagtcagagctgcagcagctgcgggcccggctccaggggctggaggccgactgtgtccggggcccagatggggtgtgcctcagtggggatagaggcccacagggtgacaaggccatcagggagcaaggccccagggagcaggagccagaactcagcttcctgaagcagaaggaacagctggaggctgaggcacaggcattaaggcaagagttagagaggcagcgacggctgctggggtctgtacagcaggatctggagaggagcttgcaggatgccagccgcggggacccagctcatgctggcttggctgagctgggccacagattggcccagaaactgcagggcctggagaactggggccaggaccctggggtctctgccaatgcctcaaaggcctggcaccagaagtcccacttccagaattctagggagtggagtggaaaggaaaagtggtgggatgggcagagagaccggaaggctgagcactggaaacataagaaggaagaatctggccgggaaaggaagaagaactggggaggtcaggaggacagggagccagcaggaaggtggaaggagggcaggccaagggtggaggagtcggggagcaagaaggagggcaagcgacagggcccgaaggaacccccaaggaaaagtggtagcttccactcctctggagaaaagcagaagcaacctcggtggagggaagggactaaggacagccatgaccccctgccatcctgggcagagctgttgaggcccaagtaccgggcaccccagggctgctcaggtgtggacgagtgtgcccggcaggagggcctgactttctttggcacagagctagccccagtgcggcaacaggagctggcctctctgctaagaacatacttggcacggctgccctgggctgggcagctgaccaaggagctacccctctcacctgctttctttggtgaggatggcatcttccgtcatgaccgcctccgcttccgggattttgtggatgccctggaggacagcttggaggaggtggctgtgcaacagacaggtgatgatgatgaagtagatgactttgaggacttcatcttcagccacttctttggagacaaagcactgaagaagaggtcagggaagaaggacaagcactcacagagcccaagagctgcggggcccagggaggggcacagccatagccaccaccaccaccaccggggctgacaccctgccccacagggaatggccttggcctggcccagcccaagatcccagcgttatctaactcctggagggtggactctgtcctggcttgtttggtgtcctcagatatctttcacacagtagagcaaaatcaccagccctgcactgatgtcactttatgtagaaaaaggccttagctggacctgcgttgccgtctatgcaaatgcatgcaaatactccaggccctgggatgtgggcttgtgttttgtcactgtgaagggggagatgggagaggagcctgttttggggtggggtctggggaaggcaatctgattctgaagctaaagagctttcatcctcttgagtgtatgtccccatagtgggccccttgacccacatgctgaccggtgccttgggatttgactagagttgctggctcgaggcccagcacgaggacttaccctggggttttgttaggtttggaagcagctgtccctagggggtgaagtcccccccctttttttttttacccctgcttctcccacgggcttcacctccctatgtgaactgtagactcaaatcccaataaagtgctgttgcagctatgatgctaggtggtttctaagcacaggggacaccccacaccccctgcctgaatggatgggtccatcccaggcactggtacttgcccccttgttctgtatccccctttgcccttgccttgcccttccaacaaaccctaggcccttgagaagctgatacttctccttttgctcacagctgccttggccccacccctgggagatgtagcaaattgagtgtgggttttggagtctgagcctcaggctcaaatccaggccaagtgatcttgggcaagttaatctctgggaactttgggtttcttatcctcaaaaaaggcgatggaagggctggggaagtgattaaataaaagcaacgcaagaaaaaaaaaa

SEQ ID NO: 72309 - DNA, 858 bp, Homo sapiens; identical to SEQ ID NO: 66154

SEQ ID NO: 72310 - DNA, 483 bp, Homo sapiens; identical to SEQ ID NO: 66155
  misc_feature (1)...(483): n = a,t,c or g

SEQ ID NO: 72311 - DNA, 656 bp, Homo sapiens; identical to SEQ ID NO: 66156

SEQ ID NO: 72312 - DNA, 951 bp, Homo sapiens; identical to SEQ ID NO: 66157

SEQ ID NO: 72313 - DNA, 934 bp, Homo sapiens; identical to SEQ ID NO: 66158

SEQ ID NO: 72314 - DNA, 824 bp, Homo sapiens
accaagcttggcacgagggaggcaggagaatcgcttgaacccagggggtttaagttgcattgagccgagatcgtgccactacactccagcctgggtgacagagtgagactccatcttaaaaatataaaaataaagtggtggtcagaggagccccgaatagaccagttgtggagaggcctgggtggggtggctggcagggagggcaggccaagcccagtttctgcccacagtcacctcgaggtgactgtccagggctttgggcaccttcccgggagggggacggccgcccaccctgagtggtgttggaagctgggctctcctggatgccctgacccagctgcctggggagagccctgggcccctcctccctcagcacctcctccctcagcccctcctgcctcggtccctcctcccttagcctgtctggcatagatccatgttccctagcccctggcacaggtgcctctgactggaggaggccccacctgtggcccgggagctgctctgggggttgataaagggcagcattattgggtcctgggaaggagcgggcgtgaggccagctgaggcatggtgacccctgggaaggagcgggcgtgaggccagctgaggcatggtgacccctgggaaggagcgggcgtgaggccagctgaggcatggtgacccctgggaaggagcgggcgtgaggccagctgaggcatggtgacccctgggaaggagcgggcgtgaggccagctgaggcatggtgacccctgggtacgggggacttgggggccgcaccttggtttgcccagggcccctcctgcaccacgggccacatgcgg

SEQ ID NO: 72315 - DNA, 1818 bp, Homo sapiens; identical to SEQ ID NO: 66159

SEQ ID NO: 72316 - DNA, 2170 bp, Homo sapiens; identical to SEQ ID NO: 66160

SEQ ID NO: 72317 - DNA, 1836 bp, Homo sapiens; identical to SEQ ID NO: 66161

SEQ ID NO: 72318 - DNA, 1771 bp, Homo sapiens
taatcacaaaaaaattttattatgtttgaagaaagcttaaaaatttgtgttggtctgcattcaaagccatcctggcctgcgggttggacaagcttgatctaaagcttttcccaagttcctcacagtattagtttcctagggttgctgtacaaaataacagactgaatgatttaaccaagagaaatttattgcctcacagttctggagcctggaagtgcaatatcaaggtggagacagggttggtttcctctggaggccataatgaaagcatctgttccaggtctctgtccttggcttgtagatggccatcttctggtggatccacacagtcttctccatgtgtatccttccttcagtttcccttatagggacaccagtgatgtcagattagggatcgaacccaacaacctcatttgaagttactcacctgtttgaaaaccctatgtccaaatacagttatagtgtaaggaactaggacttagggcttacaaatatggagtggggcatcatccagaccataccatttaaattgcagggtttctctccaatgtgagttcacatacacacattaaggtttgtgggattcagaaaggtattcccagattctctacattcatacggtttctctccagtgagatttctgatgtgtttggtaaggcttgagaattcagcaaagtcatttccacattccctgatgcagggtcttctccactgtgaattcatatgtgttcattaagacctgagatacaaagttgcttccacatttttacattcatagggtttctccccagtgagttttcatgtcttcagagagaacagggacacctttaggttttcccacattccttatgctgacagtctctcatccgcatgccttctttcatgatttcgaaaggaactggaagaactgaaggctttcccgcactccttacattcatagggtttctctccagtgtgagttcgttcatgtaactgaaacgaattggagtaactgaaggatttcccacactgtttacatttgtagggtttttctccagtgtggatccgcatgtgaaggttaacacacgtgggaaacttaaaggctttgccacattccatacacgtgaatggttttttggcgctgtgggtccgcatgtgattattaagactggaggaatgcgtaaatgctttaccacattccaggcactcaaagggcttctctccagtgtgaattctcaaatgtccactaagatttgaagaaatagcaaaggctttcccacatttgacacattcaaaaggcttctctccagtgtgagttcttgtatgttcactaaggcgagaggatctggcaaaggcctttccacattccttacattcatagggcctctctccactgtgagttcgtgcatgcttagtaaggtctgagttctgagtgaaggctttcccacaatccttacatttatagggttttattccagtgtgaattcgaaagtgatcactgaggcatgaggaatttctaaaggattttccacatatcttacattcaaagggatcctttgcagtgtgagtttttaaatgttcagtaagttgagaagatctagtgaaggctatcccacattccttgcattcataaggcttctcacccacatggattttcatatgttgacttaagcaagaggaaacagtgaaggctctcccacaatccttacatttataaggtttctctccagtgtgagtttttctgtgctgagtaagttgacaagacctggtgaaggctttcccacactcctta

SEQ ID NO: 72319 - DNA, 1082 bp, Homo sapiens; identical to SEQ ID NO: 66163

SEQ ID NO: 72320 - DNA, 2401 bp, Homo sapiens; identical to SEQ ID NO: 66164

SEQ ID NO: 72321 - DNA, 1691 bp, Homo sapiens
ccgttttgccggttcgacccacgcgtccgataagtgggagggctcccctcaggcagtttgaaggctcatacaaaagcagttcatacagtagattttacagctgacaaatatcacgtggtctctggggctgatgattatacagttaaattatgggatattccaaactccaaagaaattttgacatttaaagaacactctgattatgtgaggggtggatgtgctagcaaacttaatccggatctctttataacaggatcatatgatcatactgtgaagatgtttgatgcacgaacgagtgagagtgttctctccgttgagcatgggcagccagtggagagtgtcctacttttcccctctggaggtcttctggtgtcagcaggaggtcgttatgttaaagtctgggacatgttaaaaggaggacaattgttagtatctttgaaaaatcatcacaaaaccgtgacatgtttatgtctaagcagctctggacagaggttactctctggctcactggataggaaggtgaaagtatacagcacaacttcctacaaagtagtccacagttttgattatgcagcttcaattttgagtcttgcccttgcacatgaagatgagacaatagttgtaggaatgaccaatggaatactgagtgttaaacatcggaaatctgaagcaaagaaggaatcacttcccagaagaagaaggcctgcatatcgaacctttattaaaggaaaaaattacatgaagcaacgggatgacattttgattaacaggccagcaaagaagcacctagaattgtatgacagggatctgaaacattttcggatctctaaggcactcgatagagttcttgatcccacttgtacaataaagacacccgagattacggtgtccatcataaaggagttaaatcgaagaggagtccttgcaaatgcgcttgcaggtcgggatgagaaggaaatcagtcatgttcttaatttttgataaggaatctttctcagccaagatttgcccctgttttaatcaatgctgctgaaataattattgatatatatctgcctgtaattggtcagtcccctgtagttgataaaaagtttttactacttcaaggacttgtagaaaaagagattgattaccaaagagaattgttagaaaccttggggatgatggatatgctttttgccaccatgagaaggaaggaaggcacttctgtgttggaacacacatctgatggatttccagagaataagaagatagaatcatagtgtctgctaaataagacatataagaactcttgaagttggaatagatttgactgtattaaatgttggcgagagactctcctttgatacattaaaaaaactgtttgcagaagcagttctgtggaagagactggaataattatggccgcaaaccaagtacccgttttaagtaagacatggttttccatgtaatattttgaattacagcatcttcacctagaagatctcaattgtcttagtcacagagtaggtttatctgggatggatattaattttaatacaggagtgttctgtatcaacatttgggttggtattcagatgggaattcaaatatgaatcctctctggagagggtccaactgggaatcctgctaaaggagcaaagccttgtattacctctggaagacaacaaaaacaattggcaacaacaaaa

SEQ ID NO: 72322 - DNA, 1835 bp, Homo sapiens; identical to SEQ ID NO: 66167

SEQ ID NO: 72323 - DNA, 1035 bp, Homo sapiens; identical to SEQ ID NO: 66168
  misc_feature (1)...(1035): n = a,t,c or g

SEQ ID NO: 72324 - DNA, 4945 bp, Homo sapiens; identical to SEQ ID NO: 66169
  misc_feature (1)...(4945): n = a,t,c or g

SEQ ID NO: 72325 - DNA, 2495 bp, Homo sapiens; identical to SEQ ID NO: 66170

SEQ ID NO: 72326 - DNA, 958 bp, Homo sapiens
cccggaatttccgggtcgacgatttcgtcgctgagcttaaactgaagcaagttcggtggacgccggcggcgccctgatctaaagaaacgactcagggactgcggcgcttgcacgtcaacgggaggtgtgagcccaaaggtctggacccagaaatgggacgtcggtcatcagatactgaagaagaaagcagaagcaagagaaaaaagaaacaccgtagacggtcctcctcgagcagttcttcagatagtagaacatacagccgaaagaaaggaggaaggaaatcaagatcaaagtcaagatcttggtccagagatcttcagcctcgttcacattcttatgatagaagacgcaggcatcgatcaagcagtagctcttcttatggctccagaaggaaacgaagtcgaagtcgttcaaggggtcgagggaaatcctatagagttcagaggtctaggtcaaaaagcagaacaagaaggtccaggtcaagacctcgtctccgttctcatagtcgtagcagtgaaaggtccagtcacagaagaacgcgtagtcggtctcgggatagagaacgacgtaagggcagagataaagagaaaagagaaaaggagaaggataaagggaaggacaaggaattacataacatcaaacgtggggaatctggaaacatcaaagctggattagaacatctgccaccagctgaacaggccaaagccagactacagctggttcttgaagctgctgcaaaagctgatgaagcattgaaagccaaagaaagaaatgaggaagaagcaaagagaagaaaggaggaagaccaagccaccctggtagaacaagtaaaaagagtaaaagaaattgaagctattgaaagtgattcttttgttcagcagacattcagatcaagtaaagaagtcaaaaagtcagtggaacctaatggagtgaaacaggcacctttaacatcaggacg

SEQ ID NO: 72327 - DNA, 748 bp, Homo sapiens; identical to SEQ ID NO: 66172

SEQ ID NO: 72328 - DNA, 1938 bp, Homo sapiens; identical to SEQ ID NO: 66173

SEQ ID NO: 72329 - DNA, 2186 bp, Homo sapiens; identical to SEQ ID NO: 66174

SEQ ID NO: 72330 - DNA, 1257 bp, Homo sapiens
  misc_feature (1)...(1257): n = a,t,c or g
ttttttttttttcagacttattaaacatgatttattacttttgggacagggagacggggagaaattgatagaccaataaatattgcacaaggctgctggtggtgggggagatccagaccgaggtgagtttctgtagaaagggtgaaagacctgggcgaggaaggcacctgaggttgccgggagccaggttgggagcgagtcttggtggcgagggtggtttctggttcacctacctagcacaaggtctccaactccttcagcctagacaccctgatcagcagctgaccagttggcctgccatttaagcagcagcaattgatagcaagatcaggtttcctttagaaattcttattggttccttccctgcagcgacaaccggctgcccaaagttgatggaacccagcagctgtcactggacgtttgccaggaggcagggctaacggccttggtgcacatgatgggcagtttgcccggagcgggctgaaaaagacaatgatatatagtctcgggagggcgcagctttaactcttctacctggcggtttacagaagccagagctgagcagctgtgattggcagacaccctcagctcctcagccaaaccacacttggatgtttatggtgagggtgggactaagaaatggaacagaagcagagctaaatcgctttgattggctgttcatcgaaggggcggggaagacttaacaactgctagctgctttgattggctgctttgcttaagcacacagtgcagcaaaaataatcacctgtcagttattggaagttggagtgaaaagtataataaccgtaattgacagcctgtcgtgaaggaggcggggcttagttcctagcctgctgactgggcagggaggtaggttctactcaggagatgttactgctgggcgtggcttgcgggggctcggaagtgatcggagccactgggtctagtttggggaaacccgggggtgggtacaatcccatgctgggggtcagggcctgcagatgcgccagggcccgagttccgttgaaggtcacctcacagcctgacttggctaggagccagttctccacctccgaccggagccacctggaggtctcttcgggcgagccttgagtgccccctggccgccgggccaggaagctgtgagccagcagcgcctccttggtgtgctcgtcctgcgcgcgcagggccagggcgatgagcagctccggaattccnccgcnctgactaaggtctcaaaanncnagggtgatctat

SEQ ID NO: 72331 - DNA, 759 bp, Homo sapiens; identical to SEQ ID NO: 66176

SEQ ID NO: 72332 - DNA, 2183 bp, Homo sapiens; identical to SEQ ID NO: 66177

SEQ ID NO: 72333 - DNA, 2483 bp, Homo sapiens; identical to SEQ ID NO: 66178

SEQ ID NO: 72334 - DNA, 2451 bp, Homo sapiens; identical to SEQ ID NO: 66179

SEQ ID NO: 72335 - DNA, 1124 bp, Homo sapiens; identical to SEQ ID NO: 66180

SEQ ID NO: 72336 - DNA, 1173 bp, Homo sapiens; identical to SEQ ID NO: 66181
  misc_feature (1)...(1173): n = a,t,c or g

SEQ ID NO: 72337 - DNA, 1308 bp, Homo sapiens; identical to SEQ ID NO: 66182

SEQ ID NO: 72338 - DNA, 1204 bp, Homo sapiens; identical to SEQ ID NO: 66183
  misc_feature (1)...(1204): n = a,t,c or g

SEQ ID NO: 72339 - DNA, 988 bp, Homo sapiens; identical to SEQ ID NO: 66184

SEQ ID NO: 72340 - DNA, 1642 bp, Homo sapiens; identical to SEQ ID NO: 66185

SEQ ID NO: 72341 - DNA, 1789 bp, Homo sapiens
ttttttttttttggagcattccaaatttattccttttaaggaaacctatagccactacatatgtccctgacaattagaccagaaaccaaaaaaaggacaaatagaaatactttccattctgtctatatagtagtagttttgggggtatagatagtaaacactagtcaagaatactcgtctaaatatgttggtaaaatgtagtcatcatttggcatgtgttttgctttggtatataatgaagttgagctatcccatctttcttctctatggaatatagtcacacaaacaaaaaagatgaatctcactagaggtgggtctttatcagaaatatgccccaatctagttaggtaatagaaagaaaatcattttctcctcctaggcctaagattcttcatgtaaaaattataagactgaataaagatcacttctaagtttctataattcatgtagatatatcaatttatacatcatgatgtagacagacagcaaggctatactttctggctccatgatgctaggcttggccacatgacttgcttaaagcacgtatgatacatgcatcttttaagagaaaaccgaagtgtatttcatctctttctctctctgctaaaacaatcacaatgtcccaaaagagatcccttccttcgcctttgatcatggtaagaagatgacacaaagcagtgtcacagccaatcaacagctgacatcccccaccaggaaatacatctttgttgttgtcactacagcataaactaatgaaagctaattaaatataagaatttgctaataattgaggatccgtacacaattaaacttaaaaccaaaaaactctaatagaaaactcataatttaaaatgtgacataaggggaaataagttaaaaagcaacttttaaaaattacaaaaatagtatttgtagtaaaataaatggacttaaacatgtaatagaattttccctgtgatttctgacttgaatctttgaatgactattccaagtaagattcaacatttttacagaattgttcttcatcattaagatattccaagattatatttccaccattatataaaggacaatcctccttagcaatccaggtttccaaagtatgatccaagggtaaggcttctcctgaagtaatgtgacacagccttaatttcttagctgtaaatttgttattgtcatttttaagcctggctagagaagcggcaaagtctatggcctttccaatgctccatcggtggcaaaagaacattggtttgctcttctctttgctccctttaggtaagaaaacctgaaagtaaattctttctgtctgtggtaatgacttatcgccatcagcatgcatctttaatttcatcaatgcaacctttgcagctgtttcactatttttggcacctttccatcgtttacttgctgtttctcctgtcttggaatcaataatgtctttaacaagtttctgagtggcagccattcgaggctttgggatttccagtttttcacactcatgatctgactgatgacggtgtctcaggcaaaaattcttctcacaataaggacatataactgccacaagttctctctcagcacagtctttgaaagagcatgggtaagatgtatgttgatctgtcttcagtctctcattgattacagtcacctcaggacaaccatgagactccctgcttctgtgttcaaggcaaaatattcctgaacaatcatcacacacaaatggaagaaaatctcgctgccggcaatgctccacctggcagtgctgcccgatgtccaactccgc

SEQ ID NO: 72342 - DNA, 2352 bp, Homo sapiens; identical to SEQ ID NO: 66186

SEQ ID NO: 72343 - DNA, 5039 bp, Homo sapiens; identical to SEQ ID NO: 66005
  misc_feature (1)...(5039): n = a,t,c or g

SEQ ID NO: 72344 - DNA, 805 bp, Homo sapiens; identical to SEQ ID NO: 66188
  misc_feature (1)...(805): n = a,t,c or g

SEQ ID NO: 72345 - DNA, 1240 bp, Homo sapiens; identical to SEQ ID NO: 66189

SEQ ID NO: 72346 - DNA, 2047 bp, Homo sapiens; identical to SEQ ID NO: 66190

SEQ ID NO: 72347 - DNA, 1707 bp, Homo sapiens; identical to SEQ ID NO: 66191

SEQ ID NO: 72348 - DNA, 1380 bp, Homo sapiens; identical to SEQ ID NO: 66193

SEQ ID NO: 72349 - DNA, 1145 bp, Homo sapiens; identical to SEQ ID NO: 66194

SEQ ID NO: 72350 - DNA, 2096 bp, Homo sapiens; identical to SEQ ID NO: 66195

SEQ ID NO: 72351 - DNA, 1142 bp, Homo sapiens; identical to SEQ ID NO: 66196

SEQ ID NO: 72352 - DNA, 1199 bp, Homo sapiens; identical to SEQ ID NO: 66197

SEQ ID NO: 72353 - DNA, 3596 bp, Homo sapiens; identical to SEQ ID NO: 66198

SEQ ID NO: 72354 - DNA, 2331 bp, Homo sapiens; identical to SEQ ID NO: 66199

SEQ ID NO: 72355 - DNA, 1980 bp, Homo sapiens; identical to SEQ ID NO: 66200

SEQ ID NO: 72356 - DNA, 1824 bp, Homo sapiens; identical to SEQ ID NO: 66201

SEQ ID NO: 72357 - DNA, 1299 bp, Homo sapiens; identical to SEQ ID NO: 66202

SEQ ID NO: 72358 - DNA, 2188 bp, Homo sapiens; identical to SEQ ID NO: 66203

SEQ ID NO: 72359 - DNA, 975 bp, Homo sapiens; identical to SEQ ID NO: 66204

SEQ ID NO: 72360 - DNA, 1334 bp, Homo sapiens; identical to SEQ ID NO: 66205

SEQ ID NO: 72361 - DNA, 3262 bp, Homo sapiens; identical to SEQ ID NO: 66206

SEQ ID NO: 72362 - DNA, 1610 bp, Homo sapiens; identical to SEQ ID NO: 66207

SEQ ID NO: 72363 - DNA, 2841 bp, Homo sapiens
caacgtcccatttgacctaccaagcccattggacaacgggtctcaaaggggcacccagccccacccgccacggatttcacccagttccattgctgcccacgagaccatttcgcggctggtgggcttctcagcgggtcaagtgccagtacctggatctcatcaaaaagggaccccagcaagctgttcaatgaggagcggttgatcgacaagaccaaggtgacatatctgaagtggctgcctgagtcggagagcctgttcctggcatcacacgccagtggccacctgtacctgtacaacgtcagccacccctgcgcctcggccccgccccagtacagcctgctgaagcaggtcatggggcttctctttctatgctgccaagagcaaggcaccccgcaacccgctggccaagtgggcggtgggtgaggggcccctcaacgagttcgccttctcgcccgatggccggcacctggcctgtgtgagccaggatggctgcctgcgcgtcttccacttcgactccatgctcctgcgtgggctcatgaagagctactttgggggcctgctgtgtgtgtgctggagccctgacggccgctacgtggtgacgggtggcgaagatgacctggtcaccgtgtggtccttcaccgagggccgcgtggtggctcgaggccatggccacaagtcctgggtcaacgctgtggcctttgacccctacaccacaagggcagaggaggcggcgacagcagccggtgctgatggggagcggagcggcgaagaggaggaggaggagcccgaggctgcgggcacaggctcggccgggggcgccccgctctctccactgcccaaggctggctccattacttaccgctttggctcggcgggccaggacacgcagttctgcctgtgggacctcactgaagacgtgctctacccgcacccgcccctggcccgcacccgcaccctccctggcacacctggcaccacgccaccggccgccagcagctcgaggggtggcgagcctggcccaggccccctgcctcgctcgctgtcccgctccaacagtctcccgcacccagctggcgggggcaaggcgggcggcccgggtgtggcggcagagcctggcacaccattcagcattggccgcttcgccacgctcacactgcaggagcggcgggaccggggggcagagaaggagcacaagcgctaccacagcctgggcaacatcagccggggtggcagtggcggcagtggcagtggtggggagaagcccagcggccctgttccccgcagccgcctggaccccgccaaggtgctgggcactgcgctgtgcccgcgcatccacgaggtgcccctgctggagccccttgtgtgcaagaagatcgcccaggagcggctcacagtcctcctgttcctggaggactgcatcatcactgcctgccaggagggcctcatctgcacctgggcccggccgggcaaggcgttcacagacgaggagaccgaggcccagacaggggaaggaagttggcccaggtcacccagcaagtcagtggtagagggcatctcctcccaaccaggcaactccccgagtggcacagtggtgtgaagccatggatatcgggcccccccaaccccatgcccccagcctcctagccataaccctccctgctgacctcacagatcaacgtattaacaagactaaccatgatggatggactgctccagtccccccacctgcacaaaatttgggggccccccagactggcccggacacgggcgatgtaatagcccttgtggcctcagccttgtcccccacccactgccaagtacaatgacctcttcctctgaaacatcagtgttaccctcatccctgtccccagcatgtgactggtcactcctggggagacactccccgcccctgccacaagagccccaggtctgcagtgtgcccctcagttgagtgggcagggccgggggtggtccagccctcgcccggcccccaccccagctgcccttgctattgtctgtgcttttgaagagtgttaaattatggaagcccctcaggttcctccctgtcccgcaggacctcttatttatactaaagttccctgttttctcagcgggtctgtccccttcggaggagatgatgtagaggacctgtgtgtgtactctgtggttctaggcagtccgctttccccagaggaggagtgcaggcctgctcccagcccagcgcctcccaccccttttcatagcaggaaaagccggagcccagggagggaacggacctgcgagtcacacaactggtgacccacaccagcggctggagcaggaccctcttggggagaagagcatcctgcccgcagccagggcccctcatcaaagtcctcggtgttttttaaattatcagaactgcccaggaccacgtttcccaggccctgcccagctgggactcctcggtccttgcctcctagtttctcaggcctggccctctcaaggcccaggcaccccaggccggttggaggccccgacttccactctggagaaccgtccaccctggaaaggagagctcagattcctcttggctctcggagccgcagggagtgtgtcttcccgcgccaccctccaccccccgaaatgtttctgtttctaatcccagcctgggcaggaatgtggctccccggccaggggccaaggagctattttggggtctcgtttgcccagggagggcttggctccaccactttcctcccccagcctttgggcagcaggtcacccctgttcaggctctgagggtgccccctcctggtcctgtcctcaccaccccttccccacctcctgggaaaaaaaaaa

SEQ ID NO: 72364 - DNA, 2443 bp, Homo sapiens; identical to SEQ ID NO: 66208

SEQ ID NO: 72365 - DNA, 3639 bp, Homo sapiens; identical to SEQ ID NO: 66209

SEQ ID NO: 72366 - DNA, 1829 bp, Homo sapiens; identical to SEQ ID NO: 66210

SEQ ID NO: 72367 - DNA, 672 bp, Homo sapiens; identical to SEQ ID NO: 66211

SEQ ID NO: 72368 - DNA, 1605 bp, Homo sapiens; identical to SEQ ID NO: 66212

SEQ ID NO: 72369 - DNA, 764 bp, Homo sapiens; identical to SEQ ID NO: 66213

SEQ ID NO: 72370 - DNA, 2281 bp, Homo sapiens
atggctgatcgggggaggccgagaaccgcagggactggccgagaaatctcctttacagacaataggtgaagaacaaacccagaatccctacactgaactgctagtactgaaggctcatcatgatattgtacgatttctggtacagttagatgactacagatttgcatctgctggtgatgatggaattgtagttgtgtggaatgcccagacaggggaaaaacttttagaactgaatggacacactcaaaagataacagctattattacatttccttccttggaatcttgtgaagagaaaaatcaactcatcttgacagcctctgctgatagaacagttattgtgtgggatggtgatactaccagacaagttcagagaatatcatgcttccagtctactgtaaagtgtttaactgttcttcagagactagatgtttggctttctggtgggaatgacctgtgtgtgtggaaccgaaaattagatctcctgtgtaagactagccacctttctgatacaggtattaagtgcctttggttgaaataccctaagaacctgtgttgtggcagcagttggcaaagaactgataattttcaggttggtagcacccacagaaggatcactagaatgggatattcttgaagttaagcgcctccttgatcaccaggataatattctctcattgattaatgtcaatgatttgagttttgtcaccggctcccacgtcggagagctgatcatctgggatgccctggactggaccatgcaggcctatgaacgcaacttctgggacccatctccacaactggacacccaacaagaaataaaactctgtcaaaaatcaaatgacatttctattcatcatttcacatgtgatgaagagaatgtatttgctgcagttggaaggggtttatacgtgtatagccttcaaatgaagcgtgtgattgcctgccagaaaactgcacatgactccaatgtcctgcacattgccagacttccaaacaggcagttaatctcatgctcagaagatggcagtgtacgcatttgggagttaagagaaaaacagcagcttgcagctgagcctgtaccaacaggtttttttaacatgtggggatttggaagagtcagcaaacaagccagccaacctgttaaaaagcagcaagaaaatgctacttcatgttcactggagcttattggagatttgattggacactcatcatctgtggagatgtttctatactttgaagatcatggactagtgacgtgctccgctgatcatctcattattttgtggaaaaatggagagcgagaatctggattgcgcagtttaagattatttcaaaaattagaggagaatggtgacttataccttgctgtctagtttaaggaattaaaaatacacatgcatgaaccttgaacatcaaatatcgggtactactctgaaaaccattaatatattgatcacttaaattggtaattttttttgtcagtccataaaattctacatgtttaaattttttgtggacctaccaaccaggaacatgttgcttctcaggtcctagtatatcctccaaagaatataccacaagtttttccatttgactttgagctgctgttgaagtggtgagtgctgtgttttgagcttattttgaacctagatccttgtgaaaggtacaaatagaggtaatagttaagttatggcatttattagaagttttattatttggcttcctttagaattattgtgaagtttaaaaatagcctttctcctgcaaattttcctagtctttagtaactgttagtgttctatatagcacaaacttgaatctctcagccaaaaaagggaacatatatactgtttaagtatggcaagttttctttggtaccaatttgtttagataattttaaaaatgttttttagttctagctactaaaacctgtatgaactcaaatggataggcatcttgtgagggtgtgtttttcccagtgtgaattggcttgaagagccatgggctaaatgggtactagaacaacaactgcccctcatgtacgccaaggatgagctctagatcatttgagaggcacagtgtttccggagtcagggactggcagctgagcgcaactgccccatctgaccactgactcaaatacgaactgcttgagacagacttcttttatgtagttctttgcagtgtccattgagacactataaccagccttgtaacaatatgttttctccttttggtgctaaaaaataaaaatattagaaagtagtctaaaaaaaaa

SEQ ID NO: 72371 - DNA, 1206 bp, Homo sapiens; identical to SEQ ID NO: 66215

SEQ ID NO: 72372 - DNA, 1159 bp, Homo sapiens; identical to SEQ ID NO: 66216

SEQ ID NO: 72373 - DNA, 622 bp, Homo sapiens; identical to SEQ ID NO: 66217

SEQ ID NO: 72374 - DNA, 3258 bp, Homo sapiens; identical to SEQ ID NO: 66218

SEQ ID NO: 72375 - DNA, 1300 bp, Homo sapiens
ttttttttttttgccattttcaaaaaagatatagtagcttcagttgtacaccaccagttgaaggggttttcatccaaatgagaaactctaccccttgtctctctagtggaacaggcaccagattcccacaagcagcagctcccatgtcctgtagcacgtggcatccgaccctggagtgaagagtaagctggcacagagccccgacgctgggattcagactagatggcgtttcgtggcgtgccattgtgtgtcagcgctttcagactggaggcactagtctggtgaccacagctcctgtgagaagtcacacccacctcaaaaacctcatgaatagcttttcggaaacagtggaagttgtagtctattaaaccttttctttcaaagctttcttcccttagaatgcagaccagtgccaaaaatttagtcacctcctttaaataaaggacagttgtattattcagcttgataattgccatagattctttgtcataagcacttccacttccatcttcctttaacccatatatacaagacacatcaattacaacatcgatcatgtcacagcaaagttcataagattgcatatccacaggggaactgtctgttgcaatgtagattttgctgacaacatcaaagagaaaagctttttcaatacctgaatttgatataaagatatttaataggttttccaaggtcggcagttgtggaatgagtttctgcaccaccttactaaaggcttcaaatattgaatggtcatagatactagtcagataaaagctaagatggagtttttctagcccagcatctgcaaggtcatcattggccctttgatgaatgtccctctgtgtttctattttgtgatcatcagacagaccatcaactttgtgaataaaaacctcaaaattcatgtctgggttaactttgtaggctttagaaacagtaatgtgaagtcttgttaaagcctccatgtagtcatcctgtgcgtcaatgacgtatatcaatgctcctgttcccctgaagatcatctcatagtcaaaggttgggtcaaaaaagtccatttgcccaggaaaatcccatatctggaaattcacaaaggagctattggaaatgtcatccttataaatcttgttggtactttccaaaaagagggtctcgttgggtgacatcttatgaaacaccaccttctggatggaggacttgccgctgcgccggagtcccatgagcagaatcctcggcttggagctgtcagcgccccccggaccacagcctccgcctgcccggacgcgtgggtcgacccggg

SEQ ID NO: 72376 - DNA, 3167 bp, Homo sapiens; identical to SEQ ID NO: 66220
  misc_feature (1)...(3167): n = a,t,c or g

SEQ ID NO: 72377 - DNA, 875 bp, Homo sapiens; identical to SEQ ID NO: 66221
  misc_feature (1)...(875): n = a,t,c or g

SEQ ID NO: 72378 - DNA, 2202 bp, Homo sapiens; identical to SEQ ID NO: 66222

SEQ ID NO: 72379 - DNA, 2725 bp, Homo sapiens; identical to SEQ ID NO: 66223

SEQ ID NO: 72380 - DNA, 385 bp, Homo sapiens; identical to SEQ ID NO: 66224

SEQ ID NO: 72381 - DNA, 2744 bp, Homo sapiens; identical to SEQ ID NO: 66131

SEQ ID NO: 72382 - DNA, 1624 bp, Homo sapiens; identical to SEQ ID NO: 66226
  misc_feature (1)...(1624): n = a,t,c or g

SEQ ID NO: 72383 - DNA, 4747 bp, Homo sapiens; identical to SEQ ID NO: 66227

SEQ ID NO: 72384 - DNA, 2817 bp, Homo sapiens; identical to SEQ ID NO: 66228

SEQ ID NO: 72385 - DNA, 446 bp, Homo sapiens; identical to SEQ ID NO: 66229

SEQ ID NO: 72386 - DNA, 1101 bp, Homo sapiens; identical to SEQ ID NO: 66230

SEQ ID NO: 72387 - DNA, 364 bp, Homo sapiens; identical to SEQ ID NO: 66231

SEQ ID NO: 72388 - DNA, 1695 bp, Homo sapiens; identical to SEQ ID NO: 66232

SEQ ID NO: 72389 - DNA, 2125 bp, Homo sapiens
  misc_feature (1)...(2125): n = a,t,c or g
ttttttttttttggtggttgtctctaatatttatttgtctggttataaaattaatatgtgaggagcattggatttggtgagaacgttttgaaccctagctgtcatgtgccacctgcgggatctagaccagtgacttctcagaactgccatttcctcatctggtagacaggatggtaagccctgtcttgctcactccacgtatggcagtgcagatgaaatgagatcacagaggggaagcaattggcaggctggaaagtgctgacaaatggaaggggttgtgtcaccaccctcagctgaggtagtaccaaggtccaagctcctgcccctccccctccccagcccctaaatacacacacgaatggagggccacttgcagccttggtctgatggaattgggggcaaggccacacatcttcctcaagcttggccagatggggcctcactggggcccttccagaatcgggcatcggctgtggccagctgtgtgaggatctcctccaactcgggtccatcctctgggaaacgctcagagaaggatcggatgaggccagcagctgacgcctcgtattccagaagctgcacgtctgagccttcaaggcgagtgttgggctgaacaatgagcttccgagattccttacgcagcagcaccgtgtccctgagggtgaggaagcactcggggggcgcatcagtgactgttgcatacccctcgtacagggcccgccctccggccacatcccctgtggacttcagcacctgaagtctccgcaggaagcgctctagagcaggcttgcccacagaccggatcttgctgcggtcgaggcggacccgggcatctgggcgcccatcggagcctgtggtgggagtgatggtaacgagtccctcgccagcctccagcaagactctcaggatcacaaaccgggcctgcatatgggcctgtcgccagttgaaggcctcaggtgtgtagaactccagagcgagcagcccggcccgaaccatgttgagccagttcacgtagatcacgtcctccgcatcagccccctcaaagccaaagatctccagcacttgcgggtggagacagaggtagagacccacgctctcagcccggcactcttcgtagctggaggcgatggtgctgaacttgctatcccaggtctccccgctccgataccagctctgaatctgctcgcccgtctctgggttgatcactgtttcctggtcaaagttgaatgctcctttttcgtcctgtacgaagagcttgccactgccatggcccagcagctcgtgcaggcccacctgcacatcgaaggagggccccttccagaggatgtacaggtccttgtcatcctcctccagaaaggtaagcttctcccgctgcgtggcgtaggccacagccagcacattccccagcgacacgttcttaaagccttccgtctgcctcagatcatcgtagttggggatgttgatgccggcagggatgccggagccagcgaaggtgagaacatccagggaggtgaagtcaggggtgaggaacttgtccttctcaaaggttgggggccagggcagctccttcagcagctgctctgcgctcgccaccagccgctcaaacttggcactcatggccttgttcaccacagctacgaaaccttcaaattctcctcgggaaccaaaggggtcgcggtagctctcgatgaacccgatgtaactctccacgatggggcctttgtcctggatccagaagcgggagcccctcttgtgggcctcgatggagccctgggtgaagctctctatatactgggccagcatctgcccctggtggctgttggctgcataggccttggctttctccagctgctccaccaccttctggaggatgggcgcgtagtccccccgggtcacctggaaagggcttccccggaattcatagctcttcagcttggaagtcacctcagagtccagggaaggctctgagccaagcacagaagccagccgcacctcgtagtagggcttcccttctccatcgacctctttaagagccgggtgttgtaggcactgaggttctgtgagtccagaaagtcctggncaatttggcatcttccatggtacaattcccagagaaataggtggt

SEQ ID NO: 72390 - DNA, 679 bp, Homo sapiens; identical to SEQ ID NO: 66234

SEQ ID NO: 72391 - DNA, 2228 bp, Homo sapiens
ggtttgcttcctttcccagcatcaatctccagcaaatgctaaaagaagtccccaaaaggtttggggatgagagaggtgccattgttcattacacgattctcaataaccatgtttaccggagatctttagggaaatacacagacttcaagatgttctctgatgagattttgttatcattgacaagaaaggtccttctcccagatttagaattttatgttaatcttggagattggcccttggagcatcgaaaagtcaatggaacccctagccccatacctatcatttcatggtgtggctctctggattcaagagatgttgtccttccaacgtatgacatcacccactccatgcttgaagccatgcggggtgttacaaatgatctcctctctattcagggaaatacagggccttcctggatcaataaaacagagagagctttcttcagaggtagagacagccgagaggagaggctccagttggtacagctgtccaaagaaaatcctcagctactagatgcaggaattacaggatatttctttttccaagagaaagaaaaggagcttggaaaagccaagttgatgggtttacttgatacttgtacttaaagaaatgtggatgggaccgtggctgcttacagatatccatatctcatgctgggcgacagtctggttttaaagcaggactcgccatattatgaacatttctacatggcactagaaccttggaagcattatgttccaattaaaagaaatctgagtgatttattagagaaagttaaatgggctaaggaaaatgatgaagaagccaagaagattgcaaaagaaggacagttgatggctagggacctactacagccacacaggctttactgctactattaccaagtactgcagaaatatgccgagcgccagtccagcaaacccgaagtacgtgatggaatggaacttgttcctcagccagaagatagcacagccatctgccagtgccacaggaaaaagccttcaagagaagaactttgagtcagcccagaatcacactcctgtgtatcccggctacactttaaggaaagattgaatctaagctgtgaaggacagtatagaagactgcaccaagtggactagttctcccggtggctttatatatgtagatggatatagcagtactggttgagtatccctcatctgaaatgcttaggaccaggagtgtttcaggcttcagattttttaagatttgggaatatttgcatgtacataatgaggtatcttggggatgagatccaagtctaaacacaaaattcatttatattttatatataccttgttcacataccctgaaggtaattttatataatatttttaataatttgtgcatgaaacaaagtttgtatacattgaactgtcagaaagcaaaggtgtcactatcttagcgacccaagtggtggtgtcagcactcaaaaagttttggattttggggtatttcagattttagatttttgtatgaggaatgttcaacctgtatttgaacgaagcattaccaaatatcgattgaatattaatatcttttgcgtaaaaactgctattatcagcatcatagtttctctaaaaagaaaacttggggatcatagccgatagagagacttgctaaaatataaatcagcctctgcaaaactgtttacatatttattggtttacatattttattggtttatttctatcccctgttcactttttctcttccacttccaattatgaagagaaaatatttgttcagggttgtccccccgccccccgtcactgcataatttctcctcttacaagctgcttttggctttcattaataacagcttccttttagaaggtctgataaggatatttaaggaagaagagaatgactctgttattaaaggtggcatggagactgtggagggaatattttttaaagcactactcatatcctttaaactaaattttgccaaagcccgagacaacattaaggagaaattgtaccttaagttagtaattccaaatctatctgagttgtatacccatcaaagacaatacagttattaacatagatgaaggtatgctataggcatcattcattatctctatattgaataggtgaaagataactgtagtcaggtgaaaggcattcattatttttaagctgaaaaggggatccttgaaaacactgaaaacctctacaacaatcttcaggaagcctgcttg

SEQ ID NO: 72392 - DNA, 2017 bp, Homo sapiens; identical to SEQ ID NO: 66237

SEQ ID NO: 72393 - DNA, 1056 bp, Homo sapiens; identical to SEQ ID NO: 66238

SEQ ID NO: 72394 - DNA, 430 bp, Homo sapiens; identical to SEQ ID NO: 66239

SEQ ID NO: 72395 - DNA, 2248 bp, Homo sapiens; identical to SEQ ID NO: 66240

SEQ ID NO: 72396 - DNA, 2352 bp, Homo sapiens; identical to SEQ ID NO: 66186

SEQ ID NO: 72397 - DNA, 2900 bp, Homo sapiens; identical to SEQ ID NO: 66242

SEQ ID NO: 72398 - DNA, 1911 bp, Homo sapiens
cccttctcggctgtgtggcttcgacttcctgattctcccacgacgtccctggccgggagacccgctggactctgcggctggccaaaaggggagggggagccccgcgtcctgggggcccctagcggaaggggcgggggttgcgctgggcatcctgtctggggcatctgtctgggactctgttggtgcctctcacctggcgaggggcctgtggtgggggtaggggggaagtccctggcgccatgcttggccaagccctgctctgctgggctgcgggctggcggcgctcacccagctcctcacctgtcccgcatcttcctgtttttcttccctttctggttgggcagcgagagttgagaggaggcagatggcttccatcccagaaatcgctctcctctttccatccctacagagagggacagagaggcaaagttccttgcatcccccggggcactgtccctgtgagctcccggtgtcctgcacatgtgagcccctgagtcaccgggcctgtgagtgtgggatggggctccgtggccagcctggcctcctggggttcactttgtgctttcctacgccaactcttcctgtgtggctttgctggccttccactgaggaggcacataggtttggaggacagatgagggcccactggagagctgtacccctcagtgagggccgccaccttgatggtttttgatggataatggggttgacctctttgttccttccacatgtttttatgtttgaccatttgctcagctgagcttgtcttaataattggattcatggttaatgagccccacatgggcgagagggtggccttcattctgaacccatttaggcagcacgggcagccctcctcgccatgggcaggatcagagcccccccgcccagtcttggggttgctcctggatgctgtctgggaggcttgctcatggtgacatcctcatctccccgtgcacgttaccgcattcagagcttgggtcacctggacactgaactcaggtgaattttctctgagatcccgggagaaggaggacagttctttggaaggttttccagggccgatcacggaaaggatgagaagggagaggtcctggtgggggacacaattacagtggcagtgtaacacccggaaactttattgcgtgaagtccctctcactccctctacctccttcttttacgtggactctgccaaagaccaggataccagaatgccagtggagtgaccaagtgtagtgggaccttgggaacgcgagtctggagccaggcggctggggtttgcatcctggttctgcccctccttagctggctgacatggcacaagccacttaccctctctgagccttactgtcttcagtggcaaatggatctgtcaacaggccccattgcctggggttgttactgctgagattaagggatgctcgtccataaaaagacttagcgttgtgcctggcacatagtgtatggtggataaatgggacttaggactaaaactcatgccttggtgtgtttttgcagtgatgttttgttctggggtgcatcacaagagacaaggttcttggctgggcatggtggctcaggccaataatcccagcactttgagaggccgaaaggggaggatcgcttgagcccaggagtttaggaccggcctgggcacggtggtgaagcctcatatcaaccaaaaataaaaaaataaaaaataaagccaggtatggtggtgtgtgcctgtggtcccaggtgctttggaggctgaggtgggaggattgctggagtctggagggtcgggctgcagtgagctgtggtcgtgccactgcactccagcctgggtgacaaagtgagactctgtttcaaggaaaagagagagagagagacagacagatccacaagagtcttaagccagaatcttcat

SEQ ID NO: 72399 - DNA, 5433 bp, Homo sapiens; identical to SEQ ID NO: 65857

SEQ ID NO: 72400 - DNA, 895 bp, Homo sapiens; identical to SEQ ID NO: 66245

SEQ ID NO: 72401 - DNA, 2130 bp, Homo sapiens; identical to SEQ ID NO: 66246

SEQ ID NO: 72402 - DNA, 3569 bp, Homo sapiens; identical to SEQ ID NO: 66247

SEQ ID NO: 72403 - DNA, 1052 bp, Homo sapiens; identical to SEQ ID NO: 66248

SEQ ID NO: 72404 - DNA, 2575 bp, Homo sapiens; identical to SEQ ID NO: 66249

SEQ ID NO: 72405 - DNA, 408 bp, Homo sapiens; identical to SEQ ID NO: 66250

SEQ ID NO: 72406 - DNA, 1931 bp, Homo sapiens; identical to SEQ ID NO: 66251

SEQ ID NO: 72407 - DNA, 511 bp, Homo sapiens; identical to SEQ ID NO: 66252

SEQ ID NO: 72408 - DNA, 1227 bp, Homo sapiens; identical to SEQ ID NO: 66118

SEQ ID NO: 72409 - DNA, 1504 bp, Homo sapiens; identical to SEQ ID NO: 66254

SEQ ID NO: 72410 - DNA, 445 bp, Homo sapiens; identical to SEQ ID NO: 66255

SEQ ID NO: 72411 - DNA, 1198 bp, Homo sapiens; identical to SEQ ID NO: 66256

SEQ ID NO: 72412 - DNA, 1031 bp, Homo sapiens; identical to SEQ ID NO: 65214

SEQ ID NO: 72413 - DNA, 2416 bp, Homo sapiens; identical to SEQ ID NO: 65215
  misc_feature (1)...(2416): n = a,t,c or g

SEQ ID NO: 72414 - DNA, 5020 bp, Homo sapiens
aatatcccatggcttaccttttatttttttattataaaaacacatacaagagttttaagaaataacgaatataagacaaatcaaaaccatggtgagttattaaacccattttctatatacaaatactaaaattcccaaagtggaatatcatccaatgtgagacacatcatagcacggtccatatgtacacggcacacagagctctgcctgcgctcatctgtgaattgctcattacatgtcactgataaaaaaatctgcaagggaacttctactcttcagttctcctcttcctgatgcattgtcacatatttttaaggaactttagggatatgaagaaaatgcattaaagtgggtttctgctaagggctctgcatgttttgctctgatcaattacgcactacatcttgagaaaaacttttgcaactcatttccagcaaagatagcagaaaactctaggtttttgccaatttattttttcctagtcactcattggaacacaagtccaacaacaacagctcaggaaccaaatcatgtttttatattggtaagttcattataaaatgccactcaattttaagaagccactaaaaggacactttctgcagcaaaaaaagggctaagttcaagtttttgttgtttgacaaagacacaataatataacccatatgtcacagatcacaacagccttaagtgaaacgtattagatttagggaaaaacgactatgcgactgcttgtttctcctgtctccttgccaaacaataaggagagcctctggtctgttttatctattttatgtctttttgttttgaaacctccctttgtattctgaaagctgatcaaactatttgtgttcaaaatgtgtcaaggcacttctcaagcctcagtggcatcccaggtcagccaagctcctctgtgctcagggcactgacttcctctaggcagctgacaatcgcagacggaacgcttttggaggcctctctccgccaagcttccaggatcttggaaatttctgctggattgctgggactcaagtcacaaagagcatacacggctgctaactgtataccccatggtatatcttcatcgtgagcatgctgtataaacataccaataaccgaactaatatttttcacagcagatggaaatccttctttcaaacccaattggcctaaacgaccaatcagcctcagtattgaggctataataatatcaggagtatacgcaatgtttgcatgtccttttctgtattttatccatttatccatcacaggccacagctccttacttatgatgttatcatgcgtccagatccatttctgatggcagcagagcagatcaatggcaaatatgtattcccaagtgttatcacttaggtcttcaccaaatttttcactaggttgaaattctgtttttggacataactgtatggtcaaaagcagcttagaaaccatgaagccaacatctaccggggcattcttttcccaattaagaaaagctctcaagcagttcagaacctctcctttagcacgttgcctggcaactaactgcattgctttattaatcaccgattgagagagaaatatatcatgccacatgtttgcaataaacaaagttaatttttcagactccggaaaatcttcttttaagtaggctgtagcaaaacaaacgagctctttccaagtctccgagttgccgacaaatacccacatacaccctgcagagggcgtgaatgtaattgtggtccatagatatcttctgaatttttagttctgagagaatagagtgaagcaagcactctgctaaatgcttttttgttgtgctaaattcataaacaacttccttctcttgatctctcattacgggctttttggagatatttcccacatacacatgactacgaatgacaggtaacagatcaaaagaaaactctgcaattttcttcagggcattagctatggctttatcatgggactccacagtttcttttgggcttaaaggcaactgtgaaactgcactgacggctggactagaacaacttctttcctcatttgttgttgcaacttcagctggagggaggttccctgggaggtttttgtggattccttctgcagtgactcccctggtttctggttctggggacccagtgtccaggcgcagtcttttagcacttctcagtgtagacgttgacagtgttcttttcccgcttgaatcctgctgagtccccaaatctcttgacttgtcttggttacagtcaccaccagagctgctcccagttttgacaaaagcagttgctgctgaagtgatcgttttgaatcctatcatagcactggcaggtcccggtaaattcttacagtcagcaggcggacctcgtgtgagttgaatattccctttgaggatgttgagggtccgggccctggcagataactctggatacatggtgtcaaggattttcacagaattctcctgaggccctcccacagcagcgtggccagatgcacagggtgggagtcggccaggcacaggaagtgcgtgcttcggcgtggccgcacagaactgcagaggagacggcactaccctctcactggctgaagctgcagatggagatggagaaggatctggaggagaggcacgtctggggtcctctggccatggagacatggcaggaggcactggggtttcacggaagggagaaacctggccaacaggagaggctggtgaggaaggactagaactcgatatcagtggagacagtggctgtgaagtccttggaggtgtagctatcagaggagcaagcagaggcggcaaaggaggccccacctcttgccgtattttactcagtgtgtcaggagaacaatctgtaggagtggatgtatcagcatttgctaaaatggtctgagtttggcttctttgagtttttgtattagctttttcccctgaaaatgactgagcaacttcactctgatgagtttcaactctgctcgacgctgaagtttttactggtttgtttgactgatctttgtttgaaatctttgatcgattcttatttttgccagatggctctagttttgagttataatatgtgtgatcagacgcaacaatctgagtctcgaagttttgatcatagatttgagaactaatccatatactaggcttaacgggtctatttcgcaaacgactcttatcaaagttggtgctctgaccactgcttgaaacatcctcttggggacatgaaagattattgccacatggagcctcctgaaatgcagggccagtgtgactggcctctggggacttctcagcagaagtcactgggatgcaaccagcttccagctctccttgatcctgagaaatagggatgtctccaggaatgtcacacagtgtgacctggtccacatgtggcaagacagctacaccactgatgattgtccagttgtcccccttttcaatgactagattctgatccttatttataagtacgtttataacttctgaggtcactgttgctatctgacactgaaatgttgtttcggcctcgcagttagaactttgctctatggatggctccatcacagagtcagagcacaaggctgatggctccacaggttctggcaggtcttcttccccaccatcggtttgcctgcctgcatctgaacgggcctctggtctgctctgagggttttcattctgaggcataccgctgatgggagagctgccctcagtgtccaaggcagctgcttgtggggttggttctgaagcatgtgatgaggagccagtcgtttcccgaaatggacttttctcttttaaattctcagtggtcatgttgttatttacatttaagagcaataaactgccagtatctttaccattgcaatcttcagaatttgtttgaagttcttgcctaatcttggtcagaacctcagacagagtttccaaagaacactgagtgagctgacttgtattttttaacgaataatcatcttcctctgattcaatccactcttcacaggttccaagtgtttcttcctcacagggttgctttctgtatttttctcctatttcacttgcctttaattctttgttcatttctttacttagggttcctttactagaacattcagaaacagagtcccctgaactataatcccctaactgacagctctcaagaaacatcacaacctctgatgtggaaagtctatccagctcagaaaaagtacttatgttaaaatcttgcagagctgacgtcaaataacctacctctaaggaaggtctcacctcggctacagcagcatctgtgtctcctaaatttttctgtgagtcatcaggagcatcttgctgttcgctcccctcactgcagctaaatgcctcactctctacctcagtgtcgtctcccccctctcgaatgcctgtgtaacaatgtaaggtaccaggcaggctactttgggaggtatcctgtgtctctccatgttttctgcaaaatgctgaagaaaaagtagtgtctgtggtgccaaaacactcaggcaaagcaccaccgggagttgtagatttcaatttccaaagtccattagcattttgtggtgtgctggtagaatcatttgcaacagccagggcctcaccaccagatctccctgtgtctccacagctggtttcttcaacagaaaaccctcctgacacagtcacttctgtggctggaagcatctcactgccatgtgtcccactggagtccagatctgtggcctgaggctgcctttgcttctgcccatctccctgcactgcagcttctctcacaatgtcttggttttggatgaggatattttcaggagagaaagataatctgctatttgtggaacaatcagaattttctactggtgaagaaccacctggagaattaaaatctaattttctcctagaggcagaaacttctggtgaaatgcttttcacagcagccacctccgtgatgttttgtgttgtatcatctctttccccatcacattttgctatagttgacataccggttttgtt

SEQ ID NO: 72415 - DNA, 1540 bp, Homo sapiens; identical to SEQ ID NO: 65217

SEQ ID NO: 72416 - DNA, 1421 bp, Homo sapiens; identical to SEQ ID NO: 65218

SEQ ID NO: 72417 - DNA, 2351 bp, Homo sapiens; identical to SEQ ID NO: 65219
  misc_feature (1)...(2351): n = a,t,c or g

SEQ ID NO: 72418 - DNA, 1828 bp, Homo sapiens
aaaaactcaagaccaccaaatggcgtctttatttacatattagagcgggtcagccaaggaaaatcctgcacaaatccttgtattacagttgcatctccctcttcctcagacttgccatgcttcctctttcctcttgctacagagcctgttgcacatctcttccctctcccctttgccgagttagtctctgcttatccttctggatctccgtttaagaatcacctccgagaagccttccctggggccttcccgtgtggcttgtggctcaatcatgatgttgataagagaaggtttagttgtgtctgcctaggctctgcctcagggatttttggagttcttctggtgtttgtacaaaataccctttgcctccaaatgcagtcatgacttgctcataatgtgaatttggcagcaaacacattggagggaccactgcagtagcatcttgaaattttaacatttctttccaagtatctgtatcaaaaccttggtaaattccattgttattcactaccaacagtatgattggcaagttgtacctgcagatggtttctacctccatgccagaaaacccaaatgcactgtctccttccacacagatgatccattgcccagggcttctatctttagccaccacggcagctgcaatagcaaatcccaaaccaactcccattgttccgaaagtaccagcatcaagcctgtgacgaggaaggtagttctgaagcacagtccgtccaatgtccatagtatttgctccttcacttaccacgaaacagtctctaggtagttgttcttgaacatggtagaatactgtgtaataattcataggcagggattttttagaagctagttccttggatgcagcttcattgctcttcattttttctctcagagttttccaccacttgctctctggaggatactgccatggtgttttatcaagttcctctaaaagctgcttagtgacagcatgtatgtttcctagcaaagtaacagcgggctttacattattccccaattcttctgcacagatatcaacctaaaaaagagacaaggctggataaacttcacatctggctgatatcttggaggcagtccaaaatgtaaaatccaatttagtctggcaccaaataacacaattacatcagcaaattgcaaagccctggatctggctgcacctacacagtatggatggttgtcagggacaacacccttccccataggggtgggcaaaaatggcagtttatattgctccaccaatttcttgatactctcttctgcatgagcgtaagcagcacctttcccgatgataagaaggggttgtttggcattcctaataacagaagccgccgtgcacacagcagaggtttctgccatgctaataggaggtgacatgcagcgttccatgtactttatagaattcacattcacctgaaggttcacaaaatctgctggtatgtcaacatagcaagcacctggacgaccatagatactgcttctcactgcctacgttcattacaagtagaagaaaagatttgtaaaatctcagtcttatcatattctactcaaagataatttaaaactggaaaatgaacacttttcatttttctggacatccttgtggagaaaaaaataattatgatgaaaatcgaaatgtcctctattgactacatttttaaagattttttgtttaaaagggagagagataagaaagtattcatttagggctttaaaattcatgttctattacactttagcttgggaaattattcacccggctctgcctgccaagtttttgcactgtaatatgtactttcatctgcttcctaat

SEQ ID NO: 72419 - DNA, 832 bp, Homo sapiens; identical to SEQ ID NO: 65221

SEQ ID NO: 72420 - DNA, 5866 bp, Homo sapiens
ttttttttttgctgcaggtatattcatttttattatattaatagacttagttacatataaataaacacaaaaaagcaaatatcaactgaaaggtttggttgggtagtcaactaattttgttcttttctagggcaattcaagaaggtaacatttgaaaggtttctaaatgatgcacactgtaatcattcattcttttttaaaatacaacacaaaccaacagctacaatgctttttatttttaacaaaaaggatgtaaggagggtaagaaaaacagaggacagtaagataggatgtaaagtgtgatgtatctctggacaccatccctctctgcctgccccacacccaaaagttttaaataatttaaaggataccaattacagtaccagaacaccatcaaaataattgtctttatcagggtcaaaaaatacagtgattatgaatgagctgtgaccagttacgaaattttactggaaatgtttaactgtggtcagcagtccaatggtgtgcacagtgccttcaattaatgcacttgagcatacgtaattacatttctggcagggtccacaccccccaagaaaaggtaaagctaagcatttcatttctacattctaaactctggaatcacagagcccagtttaaaagaaaagtcacagtggataagagatgtatataaaaaatacaaggtgtttttttcaaatcaggagttgtgggactaccattcttttttttttttttctttcttttcttacaaaatgcgattttagaaaaggatagagactccagttcatgttatactacagacttagacagtgaataagtatattgcatgttttggtagtcagtcttcaggcttcctttcatttcccctagccccaggtttctttagggtaaagcatgtgagtcctgaataaagatacaaaaatgcatttgcagctcttttcttgaattctgcagacttcaaagcctgcaagtcatatattccatcatcaatgaccacaatttttctttagctttgtacacctattcttgtataacaacagtgcatggcacaaatgtacaagaaaataactggttttagtctctacagtttctatatggagtaaaataagttaaaacttttctaatgagaatagctgacaggcagcatacatctttattttacattttaaagtctctgcaggcatctactttggttagttatcaacaatcataacataagcactgatcagagaactgagcagcattccaataacgttaacagatatattatttctttttgaaatactgggaaagcccagttttaaaatattattaaaatgttctaacatttacatactatgaagagttagatctaataaaataacatttcttcaaaaataatcttgcagtgctcttttaggcatgctctgagacgttatcaccaaacatccataccttgaaaatatgactatcacatatccatacatcccaactcacacacacataattccttatacagaccaaaaaacaaaaaaacccaaacccttatcccacatactgaaaaatcaatggtttttgcaaacgagtcttgatgcgtatagctgactgcatgttcatgtggatggatgattaagcatcaattgcaggttaggttttcaactgctagaaatcccaagcagctttgcaggtccttcagctaaaatgaaacagccttgatttcagcctcatttcacctgcttttggttgtttcagtattggaggccattattgcaaacattcttggaattcttttctttcccccagaaagtaatgtatttgtaggcatcacttttagcccttttcttttcacgtaggttaagtaattaaaaaattccttcttcacgcagttattgtgggagatattggcagctgttaaaatatcagatgtttttttctttccagatctttgtttttgatgatacagtttgacattagttacactaaaaagtagatgctgccagaaagttatcagtgaatgcaagggtcccataaaaggtgcttggttaaatattcttcatcatcttccagtttagtttctttcctaaaggcctgaagtgtctccagaatcccagtgctcacccatatttcccattggtttggcctgtgctagaagttggtatgattgcaccatgcgtagagactctcttatttccagattaagttccatcagtttgtagttggcttctgacatgtccaggttagagcctataactgcaaagcttcctgtctggcccagcgtctgatgatggaaatatatatgtaacagtgtctgtacagggtcatcttcacaactgccaaagatatcactgggccagagagatctgaaagctttgacttgtgctacagctgatataaattctttatttttcaaagtttcaattaaagaatgaatggcagtttctatagtagtttgtgcagctttggaaatgtcaatttcttcgttttcggaagcggactcagcttctttgaggatactttccagttgggcaagttcctctgacatgttgatgacctctgcttcattttttatcgtatttacttggttgataagtttacagtaggcctggaacagaagcagcaattgaaaatgcaatttgtataatcttcggcagagctccaattctgctagtatttccaattcttgtgcatctgtgtttatcctatacatgtcttctttggcaccaaatgtcctcttacaatcatctagccactgctcagcggcttctcttttcacattgtatgtatccaggtgttcttgcaactccaaaacaccaaacttgagtgtttccagcaaaccacatgacatcagtgtttcagcatccacaaagactgttgggcattttgaacacagcatcatcacttccaaggaacttttaaatttggtaccaatgcgttgcagactatctccaagaaagctgactgcctcattagttatttctccaaactttctttgaattgtctgaaacagcctagaaaacacatgaaaagtaaacactgcagaggacccgtcggtgtcagacagcatctgattgacgtggcagcgccaggcttcctcttcatcatcatatgccacgggctgaaaggcggctatgatggcagaaagaaatggtgacggcagaggcgacgtctgtacttctggaaaacccatctggctcttcttcatctggactagacagtccggagaaatccgcttcttcttcttcacatctttcatctagctctttcagagctaaggtaacatcctcttcacagactgactcggggtaactttcaggagctagaggctctggcatttcagtttcttctaaatcaagaattccttgacacacaagagattcctgctgttcttgaattatataggatccttcatcttcaaaggttgtaacatgttcctcctttaatactgaagttgtatcctcaggcagccggctgttagcattatctagagaagcctccaaagttggggtctcatccctgatttgaagcacttcctctgttgtgatgctgccagtggaatcttcagactggagaagtaagtcaggatggtctggtattgtttcatcagtggcagaatcactgtttaacatctgtgtgcgtgagagtatctggcttgctgtaagtgccgcttcttcttccgaggactcatctgtatcctcctgattggtgaggttcaggctgggggtgctactagagcactggtactcctggagggatggagtgtcccctttgtcaatactgtccagtgagcgcctgcgaactccccagttgaaattgtccatactttcaccctctgcatcttccaattcaacatctaaaaagtcaaaatccttaaaaacaccaaactgttgttcactgctattatcttccacagctacttcttcctcttgatttatgtcttctgttgtagaaattaggctagtctgttggtcaccgacttccaaatcctcattagaagaaaatacaactgatgggttctttggggaggccagattctgggaccacagagagaaagcacattcattagcttttctcttgttcttcgctgtgataactgtggccttttccaactaacaggaaccaaggcattagaattagaaccagaagaagttgaggaagtacttctagtgacagcaataacttttggtttcccatttcttccagccgcactgtgctgatcaccatatttgtttccaataattggtgtctcagatatatcaaaatgaaaatctaaggtcttcccaggcaactccttagaaacattattaaaaattttagtgaaggatatttcaggagaacctgtatctcctccataggtcttggggatatcactgggtacgacaagactcgcagagcgtgacaccaccagctttaatatgttaagggcttccttccagtaaggactctgtacatatttgccaataatctttatgatctccagattaaactgcttggctggggctgcagacaggtcaatatgactcaatagactataaataatctgtagtaatgattgctgcatactggacaatcctttctctaacagctctgcaagataagtcacaagattaaatgttgtatctgagaaggagtcatgcaggtatctgcacacgacattgatccagttagaacagtctctggaatacgtgtgtgtactgtacaaactcatcatgtgtgccagattgacaagtgttgggcatttttcttctgcacaaacctttgctattcgactagctgtttctttgcaaaactgagttgggctgtcaaaatgctggattaagtgaggcaataagcaaaggatgttaagaggaaagcctgacaattgggaaggatccaccaatgtatgtttggagacagaaatgagtttactgaggaggtgcacggtcatttcttgtgtagatgctgaggtaaaacccttaaggaagagctgctgaagtcctggaaaattagtccatttcaatttgctttgtacattttcaatcttctctcgactctctgatttatccaaaggcaaatggataagcagtttgttgagaagcctgagagccaggaggtattcatattcataatctgattctaataaagatgctgctatccaaaaaatggtggccatcaagttggtaggctcagtagtggactgcacgtcatacattcctttctctcttagagaggaaaggcttctagtccttgctaaactactgctatggtttatccgtccatccattatatccagtgtgttactccgccgccggtcacctcgtcggtcaccaatcaaacttaatctcaaagagttacttcttgcattactgttatatcccaaataactgctactattaatgggacttgtgcttagattgagttgtccagtgcttttcctgttagctgcatacttgtttcccattataggatcatgatatgaggtttgagaaagggcagaaagaagatcataatgcttcatggtttcagccaaagtatcaattgcagattccaatgtgagaagaagctcaatcacaaatccctgtgcatcttctcctggatcccctacagtttctacaagtctggagagaacatcagaaagtgtagttgcagtgagaggctgctttagggccctgaaaatctgaaaggatctcccagcatagtgtcgagaagaacaggaaagtgctgtttgcagagcaacttcactaagatgatgttccagatgaattccttctgagcttgactgcttaaaaacagaaaccacatgtttcaaaaatgtagttaactgttcagcactctttatgctaggattcttggcagaaacatcctcatggttccaaaggggccctctttttcttgaggtaatgaattccat

SEQ ID NO: 72421 - DNA, 6086 bp, Homo sapiens; identical to SEQ ID NO: 65223

SEQ ID NO: 72422 - DNA, 2698 bp, Homo sapiens
ttttgtttgccatttcctacaggtgaaaccgccatcattaggattcactgtaacgttagtgcatattaaactcactagcatttttattaatggccgttatctacactaagctatactgcaacttggaaaaagaggacctctcagaagactcacaatctagcatgattaagcatgtcgcttggctaatcttcaccaattgcatctttttctgccctgtgggcgtttttttcatttggcaccattgatccactggcaatctcttatcaggccccggaaataatggaagtctgttactctgatattttttccattgcctgcttgcctgaatccagtcctgtatgttttcttcaacccaaagtttaaagaagactggaagttactgaagcgacgtgttaccaagaaaagtggatcagtttcagtttccatcagtagccaaggaggttgtctggaacaggatttctactacgactgtggcatgtactcacatttgcagggcaacctgactgtttgcgactgctgcgaatcgtttcttttaacaaagccagtatcatgcaaacacttgataaaatcacacagctgtcctgcattggcagtggcttcttgccaaagacctgagggctactggtccgactgtggcacacagtcggcccactctgattatgcagatgaagaagattcctttgtctcagacagttctgaccaggtgcaggcctgtggacgagcctgcttctaccagagtagaggattccctttggtgcgctatgcttacaatctaccaagagttaaagactgaactactgtgtgtgtaaccgtttcccccgtcaaccaaaatcagtgtttatagagtgaaccctattctcatctttcatctgggaagcacttctgtaatcactgcctggggtcacttagaagaaggagaggtggcagtttatttctcaaaccagtcattttcaaagaacaggtgcctaaattataaattggtgaaaaatgcaatgtccaagcaatgtatgatctgtttgaaacaaatatatgacttgaaaaggatcttaggtgtagtagagcaatataatgttagttttttctgatccataagaagcaaatttatacctatttgtgtattaagcacaagataaagaacagctgttaatattttttaaaaatctattttaaaatgtgattttctataactgaagaaaatatcttgctaattttacctaatgtttcatccttaatctcaggacaacttactgcagggccaaaaaagggactgtcccagctagaactgtgagagtatacataggcattactttattatgttttcacttgccatccttgacataagagaactataaattttgtttaagcaatttataaatctaaaacctgaagatgtttttaaaacaatattaacagctgttaggttaaaaaaatagctggacatttgttttcagtcattatacattgctttggtccaatcagtaattttttcttaagtgttttgtgattacactactagaaaaaaagtaaaaggctaattgctgtgtgggtttagtcgatttggctaaactactaactaatgtgggggtttaatagtatctgagggatttggtggcttcatgtaatgttctcattaatgaatacttcctaatatcgttggctctactaatattttccaatttgctgggatgtcacctagcaatagtttggattatatagaaagtaaactgtggtcaatacttgcatttaattagacgaaacggggagtaattatgacacgaagtacttatgtttatttcttagtgagctggattatcttgaacctgtgctattaaatggaaatttccatacatcttccccatactattttttataaaagagcctattcaatagctcagaggttgaactctggttaaacaagataatatgttattaataaaaatagaagaagaaagaataaagcttagtcctgtgtctttaaaaattaaaaattttacttgattcccatctatgggctttagacctattactgggtggagtcttaaagttataattgttcaatatgttttttgaacagtgtgctaaatcaatagcaaacccactgccatattagttattctgaatatactaaaaaaatccagctagattgcagtttaataattaaactgtacatactgtgcatataatgaatttttatcttatgtaaattatttttagaacacaagttgggaaatgtggcttctgttcatttcgtttaattaaagctacctcctaaactatagtggctgccagtagcagactgttaaattgtggtttatatactttttgcattgtaaatagtctttgttgtacattgtcagtgtaataaaaacagaatctttgtatatcaaaatcatgtagtttgtataaaatgtgggaaggatttatttacagtgtgttgtaattttgtaaggccaactatttacaagttttaaaaattgctatcatgtatatttacacatctgataaatattaaatcataacttggtaagaaactcctaattaaaaggttttttccaaaattcaggttattgaaaacttttcattttattcatttaaaaactagaataacagatatataaaagtgttaatctttgtgctatatggtatgaaatacaatattgtactcagtgttttgaattattaaagtttctagaaagca

SEQ ID NO: 72423 - DNA, 645 bp, Homo sapiens; identical to SEQ ID NO: 65226

SEQ ID NO: 72424 - DNA, 2149 bp, Homo sapiens; identical to SEQ ID NO: 65227

SEQ ID NO: 72425 - DNA, 2683 bp, Homo sapiens; identical to SEQ ID NO: 65228
  misc_feature (1)...(2683): n = a,t,c or g

SEQ ID NO: 72426 - DNA, 2865 bp, Homo sapiens; identical to SEQ ID NO: 65229

SEQ ID NO: 72427 - DNA, 1716 bp, Homo sapiens
ggcaaggcgaggcgaaagctgcacagggccctacgcggccgcctcagcatgtcggacttcgacgagttcgagcggcagctcaacgagaataaacaagagcgggacaaggagaaccggcatcggaagcgcagccacagccgctctcggagccgggaccgcaaacgccggagccggagccgcgaccggcgcaaccgggaccagcggagcgcctcccgggacaggcgacgacgcagcaaacctttgaccagaggcgctaaagaggagcacggtggactgattcgttccccccgccacgagaagaagaagaaggtccgtaaatactgggacgtgccacccccaggctttgagcacatcaccccaatgcagtacaaggccatgcaagctgcgggtcagattccagccactgctcttctccccaccatgacccctgacggtctggctgtgaccccaacgccggtgcccgtggtcgggagccagatgaccagacaagcccggcgcctctacgtgggcaacatcccctttggcatcactgaggaggccatgatggatttcttcaacgcccagatgcgcctgggggggctgacccaggcccctggcaacccagtgttggctgtgcagattaaccaggacaagaattttgcctttttggagttccgctcagtggacgagactacccaggctatggcctttgatggcatcatcttccagggccagtcactaaagatccgcaggcctcacgactaccagccgcttcctggcatgtcagagaacccctccgtctatgtgcctggggttgtgtccactgtggtccccgactctgcccacaagctgttcatcgggggcttacccaactacctgaacgatgaccaggtcaaagagctgctgacatcctttgggcccctcaaggccttcaacctggtcaaggacagtgccacggggctctccaagggctacgcccttctgtgagtacgtggacatcacgtcacggatcaggccattgcggggctgaacggcatgcagctgggggataagaagctgctggtccagagggcgagtgtgggagccaagaatgcccacgctggtgagccccccgagcaccatcaatcagacgcctgtgaccctgcaagtgccgggcttgatgagctcccaggtgcagatgggcggccacccgactgaggtcctgtgcctcatgaacatggtgctgcctgaggagctgctggacgacgaggagtatgaggagatcgtggaggatgtgcgggacgagtgcagcaagtacgggcttgtcaagtccatcgagatcccccggcctgtggacggcgtcgaggtgcccggctgcggaaagatctttgtggagttcacctctgtgtttgactgccagaaagccatgcagggcctgacgggccgcaagttcgccaacagagtggttgtcacaaaatactgtgaccccgactcttatcaccgccgggacttctggtagaggcggctgggggagggtgggggcagggctggctgggggcttctccccactcccgcccccccccttatccccctctgaagacgatgggcagaggagtgacagccgcagacacacgacagccggcagcaactggaatggcagcaattaagggtggggagcgggggttggggggttggggggttagggcagggaggggactggggaagtgcgcacacagccccacacagacaacacgcacg

SEQ ID NO: 72428 - DNA, 1032 bp, Homo sapiens
cttttccacaaagggattaaattggggaacccccgggttttccccaccccccggttttaaaaaccgggcccaggaatttaattttggggccccataaaaaaaattttaccttgccaacccccgggggaaaaaattggatcctttaaaagggcccccccttttttttttttttgctattaatcctgccacaatatttttaattacgtacaaagatctgacatgtcacccagggacccatttcacccactgctctgtttggccgccagtcttttgtctctctcttcagcaatggtgaggcggataccctttcctcggggaagagaaatccatggtttgttgcccttgccaataacaaaaatgttggaaagtcgagtggcaaagctgttgccattggcatctttcacgtgaaccacgtcaaaagatccagggtgcctctctctgttggtgatcacaccaattcttcctaggttagcacctccagtcaccatacacaggttaccagtgtcgaacttgatgaaatcagtaatcttgccagtctccaaatcaatctgaatggtatcattcaccttgatgaggggatcggggtagcggatggtgcgggcatcatgagtcaccagatgagggattccttttgtgcccacaaagatctttctcactttgcacaacttgtacttggcctcctcaggtgtaatacgatgtacagcaaagcgacccttggtgtcatagatcagacggaaattctctcccgtcttgtcaatgctgatgacatccatgaatccagcagggtaggttatatcagttcggaccttgccatcgattttaatgaaccgctgcatgcaaatcttctttacttcatctgctagtcagggcatacttaagtctgttcctcaggaaaaatgatgaaggggagacactctctcaacttgtggggaccggtggatggacgaggagcaaacacaccggtcaatttatccagcatccaatgctttggagctgccacccgcttcagatgcttcttgggaccacgagcca

SEQ ID NO: 72429 - DNA, 361 bp, Homo sapiens; identical to SEQ ID NO: 65231
  misc_feature (1)...(361): n = a,t,c or g

SEQ ID NO: 72430 - DNA, 3818 bp, Homo sapiens
tttttttcgctatctaaggacataactttattggaaacaaagagtggggtgcagaagatggctaggagtcaggctctgagggaggtggtggcttctcatcatcagggggacaatcgatgaagtcggccagcatggcagctgtgtcatcctgctccttttcctggagagcttcggcctctgtctctgtctccatctcttcttctgcaggtgtctctggtgggggctgcaccttgtcactcccatcctcagtctcctcttccaacagggttgggggagcagagggctcttcttcaacaagctcctggggagggggccctgccgcagggctttccccttccctctccacctctccctgggaggggagcgcttcaggggccagggtgggagctgtgtcagccccacgctcctcctccgtccctggctcctccacttccaaaagcagcccgggttcgggttcgggttctggctgcacctttgggggagactcagggggaggcagagctggaggcagggttgagggtggaggtgcaccttcttctacctcccctcctgctgtgccaaactccaggtcttccacctcttccagttcttcttcctcctcctcatcctcctcttcttcttcttcctctaactcaccttcttcttcctcaaattcttcctcaaactcttcttcctcctcttcttcctcttcaaaatattcctcttcatcctcttcctcttcctcaaagtcttcctcctcttcctcttcctcaaagtcttcctcctcttcctcttcttcttcttcttcttcttcctcttcttcctcttcctcctcctcttcatcactgctgttgatattaataactgtcaaatcctcttccagggctgggggtcctcccccaccaggagtcccttcagggaccaactggggtggagggagcgtcacaggaccaggaacaggcggcggcggaggtgggggtggcgggagaggccctggggctgcaggaagttcttcaggctcctccttcgctggcacaggaggggaggctgttggtggcccagtgggggctatagggggtggtgtggcacctgagggtggtgggggtggcagggggggaagcccctcgggcacgatcaccacgctgtcatcagagtcactttccaaggagatctccacatcagatgcctcctccttgtcatagtggacaaaggctggtctgggcactctccccccaaaagtttcatctgggggtatagtaggtgggggagtcccactaggggcaaggatggggtcctcatttgagcctgcccggtggttctcagggccaggaagaagccggggaggacagacactaggcctggacagaaggcctaggaggttggctgtggtggaggtccagggctccgagggcacagggcctgctgagggcatggggcctgctgaagggcatggggcctgctgagggcatggagcccactgagggcatggggcccggaggatggaacggtggggccctgaagggcgatggggcctcaggagggggactggagcaggtgtggggcaggtggggcccatgggctgcaggggaggaacccgggggtgggtcagagcagcacaggtcaccagtgcttctgagcaagaaagaggagacctcaaggctatcttctcgctggccgagggagaaggcttgcagggcacaggcaagaggaggtgggcagcgaggagatggggccagcagcagcgccagcagcaggcagtagagttcacggcggcagcgggagctcgtgtacggggagctgcctaggacctcaccctgctgtacacccatgaccagggggaggaccaggtcatgcagtctcctgtgagtctcctccttgatgagaggcccacacatgaggatggtccggctgaggcctctgagtgcagccgcacacacgtcgctgttggcattgctatcccctttccggtggcttggcggggccatagcttcccccacatccagctttagcttcttgggggcgctaggcttcccagtctgcaaactcccatcagggctcccccgcgggctacgcagcttaagggcatcagctggcggggagatgtcgctgagcaggtgggtgagcagggcctctccagaggctcctccctgaagcattcccgccgaggccccacaaacctgcacccacagctctaatatcgcatacaccttggtccgaaccgtgctgtaaggcctctcctggcctggagagagggaatctctaccgatgctccaggaattgaggacctggggaagcaggcggccgatcaggatcccaaagcgcaagagccggcttccacacgcgaggatgagtgcagacagcaggtccaaggccttcaaggtggatagagggcagcagcagcagccgcagggaccatctccatgcaagctctggagaaaaaaggggcagagataaagagtggaggaagaaagtgagagccagagagagacagaaacagggaatgaccatttacatatgtacacataggtaagaaacccaacccctgatctcatctctcccaacaaaatcaaacccctatcctctaaaatagaccctggatggaaggtaagaaggatggctgggcctctcagcaatgactcagctgagtccccaaattcaccctcccccaaggaagcatttgctacactctgacactgtgctcctgtgtcacgacacataggaagtgatgttatttggacaaaagtagaagctctctgggacggactccaggatgacactgtttggggagactcaggtccccagtactttcctggttgcctggtatcctgagcaagggctctgaagagatgacaaatcccacttacaatattcttgctactgacgctgagggtccggcagatgaaatccaggatttcctgcacagggacggacacgggagctccaaactcagagctgagcatgagccctaggcagcgggccagtcccgaaaacctctgccgaagctggagaaggacatgggcatcaccatcttctgaggacagcagcatctccaccccagggccttcattctgcacaggagcagtctctgctccctcgtacagggcccccagcagggtgtgcagtgaggccagcagactgtgtagctcctgctcccagctctcggtgtgcttcaggccttgggaaaagccagcccctaaagagggcagccgggaataacactcacaggccaactgttggagctgagggctcaaggcatccaccctagacagaaaaaatgaggccagcttgcctttgagagaaccacaagcccgagggaaataggtcatacaagccttcattccttccaatgctgactgctcacactctggcctgaggcccagcagggaggtgagaaggccagggaggtggttcatggagatgtcccggaacagtgcaggcagctgggctgcatatcggaggaggtccctcaggacagccacggccagctccattgtggcaggcgggtcctgggtctgtaacacctgctgaatgctccgaagccaagacacacagtgctgctggaatagctctgtggggctctcccctaccagcagggacagcagacacaggccctcaaaccgagttttgatggaactgagacgtgcattactgagactcaccaatgccccaagagctgaaaggttctgggccccgcccaccgacccatgcagccgcaataggcacatgagcccgggcaaatgtggggccgagcggtttgggggatgcaccggagcaacggcagaccccgttcgaggttgcagcaaaccagaaacactctccagcagcagcaggcggagccg

SEQ ID NO: 72431 - DNA, 1501 bp, Homo sapiens; identical to SEQ ID NO: 65232

SEQ ID NO: 72432 - DNA, 6298 bp, Homo sapiens; identical to SEQ ID NO: 65233

SEQ ID NO: 72433 - DNA, 4348 bp, Homo sapiens; identical to SEQ ID NO: 65234

SEQ ID NO: 72434 - DNA, 2983 bp, Homo sapiens; identical to SEQ ID NO: 65235
  misc_feature (1)...(2983): n = a,t,c or g

SEQ ID NO: 72435 - DNA, 1321 bp, Homo sapiens; identical to SEQ ID NO: 65236

SEQ ID NO: 72436 - DNA, 777 bp, Homo sapiens; identical to SEQ ID NO: 65237

SEQ ID NO: 72437 - DNA, 408 bp, Homo sapiens; identical to SEQ ID NO: 65238

SEQ ID NO: 72438 - DNA, 3932 bp, Homo sapiens; identical to SEQ ID NO: 65239
  misc_feature (1)...(3932): n = a,t,c or g

SEQ ID NO: 72439 - DNA, 3235 bp, Homo sapiens; identical to SEQ ID NO: 65240

SEQ ID NO: 72440 - DNA, 847 bp, Homo sapiens; identical to SEQ ID NO: 65241
  misc_feature (1)...(847): n = a,t,c or g

SEQ ID NO: 72441 - DNA, 648 bp, Homo sapiens; identical to SEQ ID NO: 65242

SEQ ID NO: 72442 - DNA, 4205 bp, Homo sapiens; identical to SEQ ID NO: 65243
  misc_feature (1)...(4205): n = a,t,c or g

SEQ ID NO: 72443 - DNA, 9831 bp, Homo sapiens; identical to SEQ ID NO: 65244

SEQ ID NO: 72444 - DNA, 2056 bp, Homo sapiens; identical to SEQ ID NO: 65245

SEQ ID NO: 72445 - DNA, 3247 bp, Homo sapiens
ttgacgctctggccatgggttgtgcaaagaaagctttttatttgagaacacctagatacttttggaaatgttcttgttggatcacaaacaacctaattgacagtctatcgccaacatccacaaacacagcaaacagtccagtcctgcagaccacacagggtacatctagagggttctacttgcatcacccacacttccactcctgtgaaacaactgtcttgggcatgagaagggccaggataggccaggtgaatggcaggctgcccaacaaccccaatcccaaaccaacctcccaggccatgggcccaagtccctgcaggaagatgctaataggtacaacaggtagaacatgtagacacaaacatctagtttatttttttctgactgtaaccaaagtcagcaaaagaaacaacaaaacttcaagtgccctaagaaatcctcctggattcaatgacaacacatcaatggccgggcacagggttggattccttttatgaaatcaccttataatctctcatcatcccagggacagtgccttttgggactgcatgaatctttaatagctacaccacattttctcatcctttaagttatgacagacaggttatctctctccaagagcatcaggttaggatgctctttcactcttacaaactgtcaggtgggagggggaatcaccgacatcatttcattaaataactgtgggagtctggggatgctgggctggaaggcatctccaggggagggactgggaggggcgattttgctaaaaggggctgctcactgcttcattttcactggcatgcccgcttttctcactttgggttggggagtttgaaggaccatgtaatcacagagattagagctccctgtgaaattcaatcactgcctttaggatctcccacaaagacctggtcctcccaatagcacatgcgtttcctctgtgagctgtattcgcatccagcgccggagccctcagaaagaatgcgtgtttacactctgtactctccaatgggtaatatttatcatagaaatctaatacatattcttcagtcttgaatccaaacttctggtacagtagcatagcggggttgcttgctgagacgtaaagcgctcacgtccttgcccatgcaggtctgaatcagatgatagatcatgaaagttgcaatccctgctcttctccattcagggtggacgaacagaaatgaaatgtaagcttcattgtatttcacatcaggaaccatgaagccaaaggcaatgatgacttttttataaagaacaacaacactgaagtctgggtactgcagacactcagcacaggtcaatgccaggccaaaaaaactcctgacacatggagttgatcgttgggatgtgatttggccgcacataacagtaatcgagaggtgcgtcgggctccggcgtccagtgagggtcgctcctgatataaggtttcaagatccgagaggtataagggctgacaatactctggtccacagccatatcttctgatcctaccaagcgatacaaaaacttggtggtcctggtgtccgaaaacccttcctggacggcaaaggaagtctggtatcggtcaaggattctgaagtcctgacaggtggttctgtacgtggcttgtccagctggaagtctggaaattcctccttctttggctccataaatcccgtcaactaacaaaagagcagcattaacaacttgatccaagtcaaaaagtggtaatcccctatcccttttcgcttgtctgacaatcagtttgcgtttcagtctccgagcttccggagtcatggcaacagcaccgggacaagcttccagcctcttgagcagcagcttttcctcgtagatgctcacgggagtatacctgggctctttcggctttgtgtccttctccagctgaggcttcctcttttctctagcccttgtttgcaaagatgtgtttgaatctgtgtcttcactgtcaatatccatcctgtcgggtttttcctcctcactctctacctcctgctttatctgttcagggcctctgaccttctttctgaccccaaccactggcccagaagctactgacccagcagggggtgggacgtactccatccctgggtctatgactccatcgccttccatctcatcgtcatcatgaaacaaggcttgtgggggcatcacatctggaatcagatctgcttctgaaagcaagctaggtgtggcagaatgagaggcaggtgtaccaggggcagagaaatccagagaaggagaaggagatgggcttgtcagcggggtgcggtcagaggagctcaaggaggaaaagtcaatcacttcgcctttttccagaatcacatctggcctgcggcctcggcttatgaattttacaggggtagaagatgtgctcctgtcaagaaagccagcggcctccttctgggctcttctaatgtcttttgcttcctgagttcgagaccttttctcttttaattccatggcagattccacaggattccgacttgctcgttttctaagtccctcaacagtaatgatgggatctaaagttggttttgaggcttttattttcaaagtagaggcagacaacttctctccttcaggtttcatcgttgggggcttgttatgaacaagtttccaccatcctggctctccaaattcctgagcacctgaacggaagtacatgggacttcccacgctgaggcaacctgccacggtgctccaccaggtagacgtctttttcctattccctagtaaaaaagtccaatgtttctcaataaaagcacagatatcttctttccacctgaaataaccttgacgtccacttccttccagagacaagttgtacattgccaacatgacgacctgctgccatgtcagcttcagcctttcatactgctccttgccatctgctgagcaatccgaacaagtaaacctaaaaaaattatcacccttaaggtaactgagctgttccctcagctgactggctggtatccatttttggcacttgtcacagaagtaggacagctgctcctccatccaagacacgtctccttcatcactgttgagggaatccccactctggtcgtgcgataagtccactgatgcctgatcctcggattcgacgatcaggagcgtctctccctccacttcaccttcctccagtccttctgaggtcgatgttctcgtggcttcgtcatcatgccgactgatcagactactcaggtggatgctactatccatc

SEQ ID NO: 72446 - DNA, 1194 bp, Homo sapiens; identical to SEQ ID NO: 65246

SEQ ID NO: 72447 - DNA, 2535 bp, Homo sapiens; identical to SEQ ID NO: 65247

SEQ ID NO: 72448 - DNA, 7399 bp, Homo sapiens; identical to SEQ ID NO: 65248

SEQ ID NO: 72449 - DNA, 1380 bp, Homo sapiens; identical to SEQ ID NO: 65249

SEQ ID NO: 72450 - DNA, 3479 bp, Homo sapiens
  misc_feature (1)...(3479): n = a,t,c or g
cccaactgtgtcaaccgagatctgatagacaaggcagcaatggatttttgcatgaacatgaacacaaaagcaaacaggaagaagttggtacgggcactcttcatagttcctagacaaaggttggatttgctaccattttatgcaagattggttgctacattgcatccctgcatgtctgatgtagcagaggatctttgttccatgctgaggggggatttcagatttcatgtacggaaaaaggaccagatcaatattgaaacaaagaataaaactgttcgttttataggagaactaactaagtttaagatgttcaccaaaaatgacacactgcattgtttaaagatgcttctgtcagacttctctcatcaccatattgaaatggcatgcaccctgctggagacatgtggacggtttcttttcagatctccagaatctcacctgaggaccagtgtacttttggagcaaatgatgagaaagaagcaagcaatgcatcttgatgcgagatacgtcacaatggtagagaatgcatattactactgcaacccacctccagctgaaaaaaccgtgaaaaagaaacgtcctcctctccaggaatatgtccggaaacttttgtacaaggatctctctaaggttaccaccgagaaggttttgagacagatgcgaaagctgccctggcaggaccaagaagtgaaagactatgttatttgttgtatgataaacatctggaatgtgaaatataatagtattcattgtgtagccaacctcttagcaggactagtgctctaccaagaggatgttgggatccacgttgtggatggagtgttagcaaggtattcgattaggaatggaggttaatcaacctaaatttaatcagaggcgcatcagcagtgccaagttcttaggagaactttacaattaccgaatggtggaatcagctgttattttcagaactctgtattcttttacctcatttggtgttaatcctgatggctctccaagttccctggacccacctgagcatcttttcagaattagactcgtatgcactattctggacacatgtggccagtactttgacagaggttccagtaaacgaaaacttgattgtttccttgtatattttcagcgttatgtttggtggaagaaaagtttggaggtttggacaaaagaccatccatttcctattgatatagattacatgatcagtgatacactagaactgctaagaccaaagatcaaactctgtaattctctggaagaatccatcaggcaggtacaagacttggaacgagaattcttaataaaactaggcctagtaaatgacaaagactcaaaagattctatgacagaaggagaaaatcttgaagaggatgaagaagaagaagaaggtggggctgaaacagaagaacaatctggaaatgaaagtgaagtaaatgagccagaagaagaggagggttctgataatgatgatgatgagggagaagaagaggaggaagagaatacagattaccttacagattccaataaggaaaatgaaaccgatgaagagaatactgaggtaatgattaaaggcggtggacttaagcatgtaccttgtgtagaagatgaggacttcattcaagctctggataaaatgatgctagaaaatctacagcaacgaagtggtgaatctgttaaagtgcaccaactagatgttgccattcctttgcatctcaaaagccagctgaggaaagggcccccactgggaggtggggaaggagaggctgagtctgcaaacacaatgccgtttgtcatgttaacaagaaaaggcaataaacagcagtttaagatccttaatgtacccatgtcctctcaacttgctgcaaatcactggaaccagcaacaggcagaacaagaagagaggatgagaatgaaaaagctcacactagatatcaatgaacggcaagaacaagaagattatcaagaaatgttgcagtctcttgcacagcgcccagctccagcaaacaccaatcgtgagaggcggcctcgctaccaacatccgaagggagcacctaatgcagatctaatctttaagactggtgggaggagacgttgatccagcagcacgtgtcatttcattaggtcctgtatctgatgttgtggttagtggagtcctccagcaattgaatgagagcagtggacacatctcagcaggtcggtctagagagttgcgaatctaaacctgggacaggctggggccaggaggcagaaacaccagcctctgccaacaccggaacaagccgacgcttccagacaaggcggaaaaggccttttgtaatggaaatctcgcgagggttaatcttctcttgagaatggcagtcaagaaatgagatggttcacttgactactgagcagttacaccaaggagagcgtgaaggagatgattgagccagagaagaaacgggttgtgatggtaatggtgtgggggaaatgaacttgagctttaaacttgatttgagtttcagtgtctctgaattgaacatcccacgttggaagaagatacatttgggggctccaggactacagtagaaaagtatagagcaagcaggaaaatcttctagtaaaacttacatgcaggacaacaaaatgatgaaagatatccaaataccagataatccaccaggaaggcttttgtttaggaatttgtttcaagaggaacaagggatgagggagaaaaatccgttttatccatcagagtcagtgctataaaattgcctattaaggtaaaagaaaaatgtggagactattttactatacagagagcattaattcagatggcttagaaaagtgataccagcccaagaacagggatctaggtgagcccattgtaagtatcattgaaaacaaaacatgcccgtcaacatgtcacagaaaacgaacgaaggacaacaagaagtggatgagaatattttgttgaccttcatgggtttacagcctctgtctctaaacaaagtatggaaacaagtagagcttttattttgcttttgtttttgttttgtttttttttttgttttcccccactaaatagaaatgagggtccttagtctgtttctgacaatctgttaatttcttaggacagctgtctttggtttgctttccagcaggcgtagtatatttagtcggagagcacatctgtatgcgacaacttgattacatctttttttctagctattttgcattttttcttttaccatgtttcagtttctgcatgtagatttaaataaaaaacaaaacttgtaaagttgtaacatttcacatggaaatgctgcccaatcttcaccagcttcagaaatctgacctttgccgatgctgcaataaagtgttgtaatttaaaaaaaaaaacaacccattaccaaacataannttgtgccccccctgggggggggctcattttaatagccgctcctttcccccccctacgttatatatgggtttttata

SEQ ID NO: 72451 - DNA, 2578 bp, Homo sapiens; identical to SEQ ID NO: 65251
  misc_feature (1)...(2578): n = a,t,c or g

SEQ ID NO: 72452 - DNA, 342 bp, Homo sapiens; identical to SEQ ID NO: 65252

SEQ ID NO: 72453 - DNA, 2666 bp, Homo sapiens; identical to SEQ ID NO: 65253

SEQ ID NO: 72454 - DNA, 7502 bp, Homo sapiens
cgagcacagtgtatctggccggagcagtgcttatggcgatgctacagctgaggggcatccggctggaccaggaagtgtcagctcaagcactggagccatcagcaccaccactgggcaccaggagggagatggctccgagggagaaggagaaggagaaactgaaggagatgtccacactagcaacaggctgcacatggtccgtctaatgctgttggagagattactgcagaccctgcctcaattacgaaacgttggcggtgtccgggccatcccatacatgcaggtcattctaatgctcactacagatctggatggagaagatgagaaagacaagggggccctagacaacctgctctcccagcttattgctgagttgggtatggataaaaaggatgtctccaagaagaatgagcgcagcgccctgaatgaagtccatctggtagtaatgagactcctgagtgtcttcatgtcccgcaccaaatctggatccaagtcttccatatgtgagtcatcttccctcatctccagtgccacagcagcagctctactgagctctggggctgtggactactgcctgcacgtgctcaaatcactgctggaatattggaagagccaacagaatgacgaggagcctgtggctaccagccagttgctgaaaccacatactacctcctccccacctgacatgagcccattctttctccgccagtatgtgaagggtcatgctgctgatgtgtttgaggcctatactcagcttctaacagaaatggtactgaggcttccttaccaaatcaaaaagattactgacaccaattctcgaatcccacctcctgtctttgaccactcgtggttttactttctctccgagtacctcatgatccagcagactccatttgtgcgccgtcaagtccgcaaacttctgctcttcatctgtggatccaaagagaagtaccgccagctccgggatttgcacaccctggactcttcacgtgcgtgggatcaagaagctgctagaagagcaggggatattcctccgggcaagtgtggttacagccagccctcagtccgccttgcaatatgacacactcatcagcctgatggagcacctgaaagcctgtgcagagattgccgcccagcgaaccatcaactggcagaaattctgcatcaaagatgactccgtcctgtacttcctcctccaagtcagtttccttgtggatgagggcgtgtccccagtgctgctgcaactgctctcctgtgctctctgcggcagcaaggtgctccgtgcactggcagcctcttcgggatcctccagtgcttcttcctccccagcccctgtggctgccagttctggacaagccacaacacagtccaagtcttccactaaaaagagcaagaaagaagaaaaagaaaaggagaaagatggtgagacctctggcagccaggaggaccagctgtgcacagctctggtgaaccagctgaacaaatttgccgataaggaaaccctgatccagttcctgcgttgtttcctgttagagtccaattcttcctcggtgcgctggcaggcccactgtctgacactgcacatctacagaaattccagcaaatctcaacaggagctcctgctagatctgatgtggtccatctggccagaactcccagcctatggtcgtaaggctgcccagtttgtggacctactaggatatttctccctgaaaactccacaaacagagaagaagttgaaggagtattcacagaaggctgtggagattctgcggactcaaaaccatattcttaccaaccaccccaactcgaacatttataacactttgtctggcttagtggagtttgatggctattacctggagagcgatccctgcctggtgtgtaataacccggaagtaccgttctgttatatcaagctgtcttccattaaagtggacacgcggtacaccaccacccagcaggttgtgaagctcattggcagtcacaccatcagcaaagtgacagtgaaaatcggggatctgaaacggaccaagatggtgcggaccatcaacctgtattataacaaccgaaccgtgcaggccatcgtggagttgaaaaacaagccagctcgctggcacaaagccaagaaggttcagctgacccctggacagacagaggtgaagattgacctgccgttgcccattgtggcctccaatctgatgattgagtttgcagacttctatgaaaactaccaggcctccacagagaccctgcagtgccctcgctgtagtgcctcggtccctgccaacccaggagtctgtggcaactgtggagagaatgtgtaccagtgtcacaaatgcagatccatcaactacgatgaaaaggatcccttcctctgcaatgcctgtggcttctgtaaatatgcccgcttcgacttcatgctctatgccaagccttgctgtgcagtggatcccattgagaatgaagaagaccggaagaaggctgtatccaacatcaatacacttttggacaaagctgatcgagtgtatcatcagctgatgggacaccggccacagctggagaacctgctctgcaaagtgaatgaggcagctccagaaaagccacaggatgactcaggaacagcagggggcatcagctccacttctgccagtgtgaatcgttacatcctgcagttggctcaggagtattgtggagactgcaagaactcttttgatgaactctccaaaatcatccagaaagtctttgcttcgcgcaaagagttgttggaatatgacctacagcagagggaagcagccactaaatcatcccggacctccgtgcagcccacattcactgccagccagtaccgtgccttatccgtcctgggctgtggccacacatcctccaccaagtgctatggctgcgcctcggctgtcacagaacattgtatcacactacttcgggccctggccaccaacccagccttgaggcacatccttgtctcccagggccttatccgggagctctttgattataatcttcgccgaggggctgcggccatgcgggaggaggtccgccagctcatgtgcctcctaactcgagacaacccagaagccacccaacagatgaatgacctgattattggcaaggtctccacagccctgaagggccactgggccaaccccgatctggcaagtagcctgcagtatgaaatgctgctgctgacggattctatctccaaggaggacagctgctgggagctccggttacgctgtgctctcagccttttcctcatggctgtgaacattaagactcctgtggtggttgaaaacattaccctcatgtgcctgaggatcttgcagaagctgataaaaccacctgctcccactagcaagaagaacaaggatgtccccgttgaggccctcaccacggtgaagccatactgcaatgagatccatgcccaggctcaactgtggctcaagagagaccccaaggcatcctatgatgcctggaagaagtgtcttcctatcagagggatagatggcaatgggaaagcccccagcaaatcagagctccgccatctctatttgactgagaagtatgtgtggaggtggaaacagttcctgagtcgtcgggggaagaggacctcccccttggatctcaaactggggcataacaactggctgcgacaagtgcttttcactccagcaacgcaggccgcacggcaggcagcctgtaccattgtggaagctctagccaccattcccagccgcaagcagcaggtcctggacctgcttaccagttacctggatgagctgagcatagctggggagtgtgcagctgagtacctggctctctaccagaagctcatcacttctgcgcactggaaagtctacttggcagctcggggagtcctaccctatgtgggcaacctcatcaccaaggaaatagctcgtctgctggccctggaggaggctaccctgagtaccgatctgcagcagggttatgcccttaaaagtctcacaggccttctctcctcctttgttgaggtggaatccatcaaaagacattttaaaagtcgcttggtgggtactgtgctgaatggatacctgtgcttgcggaagctggtggtgcagaggaccaagctgatcgatgagacgcaggacatgctgctggagatgctggaggacatgaccacaggtacagaatcagaaaccaaggccttcatggctgtgtgcattgagacagccaagcgctacaatctggatgactaccggaccccggtgttcatcttcgagaggctctgcagcatcatttatcctgaggagaatgaagtcactgagttctttgtgaccctggagaaggatccccaacaagaagacttcttacagggcaggatgcctgggaacccgtatagcagcaatgagccaggcatcgggccgctgatgagggatataaagaacaagatttgccaggactgtgacttagtggccctcctggaagatgacagtggcatggagcttctagtgaacaataaaatcattagtttggaccttcctgtggctgaagtttacaagaaagtctggtgtaccacgaatgagggagagcccatgaggattgtttatcgtatgcgggggctgctgggcgatgccacagaggagttcattgagtccctggactctactacagatgaagaagaagatgaagaagaagtgtataaaatggctggtgtgatggcccagtgtgggggcctggaatgcatgcttaacagactcgcagggatcagagatttcaagcagggacgccaccttctaacagtgctactgaaattgttcagttactgcgtgaaggtgaaagtcaaccggcagcaactggtcaaactggaaatgaacaccttgaacgtcatgctggggaccctaaacctggcccttgtagctgaacaagaaagcaaggacagtgggggtgcagctgtggctgagcaggtgcttagcatcatggagatttatacaagctgagcccaatgttgagcccctgagtgaggacaagggcaacctcctcctgacaggtgacaaggatcaactggtgatgctcttggaccagatcaacagcacctttgttcgctccaaccccagtgtgctccagggcctgcttcgcatcatcccgtacctttcctttggagaggtggagaaaatgcagatcttggtggagcgattcaaaccatactgcaactttgataaatatgatgaagatcacagtggtgatgataaagtcttcctgggactgcttctgtaaaatagctgctggcatcaaggaacaacagcaatgggcaccagctggaaggatcttgattctccagaaggggatcacccagaatgcacttgacctacatgaaaaagcacatccctaggcggccaggatttgggatgccgacatcttggaaaagtttttgtcttcgcccagccttgccatttatcctaaggctgcttcggggcctggccatccagcaccctggcacccaggttctgattggaactgattccatcccgaacctgcataagctggagcaggtgtcccagtgatgagggcattgggaccttggcaagagaacctggctggaaagcctgcgggaacaccctgacgtaaacaagaagattgacgccagcccgcagggagacccgggcagagaagaaacgcatggccatggcaatgaggcagaaggccctgggcaccctgggcattgacgacaaatgaaaagggccaggtcgttgaccaaggacagcactccttgaagcagattgggaagagctgatcgaggagccttggcctcacgtgctgcatctgcagggagggatacaagttccagcccacaaaggtcctgggcatttataccttcacgaagcgggtagtccttggaggagtttgggagaataagccccgggaaaccagcagggctaccagcaccgtgtcccacttcaacattgtgcactacgactgcccatctggcttgccgtcagtttggctcgaggccgggaagagtgggagagtgccgccctgcagaatgccaacaccaagtgcaacgggctccttccggtctggggacctcatgtccctgaatcagcttttgccacttgcttggcaagacacaacacttacctccaggaatgtacaggccagcgggagcccacgtatcagctcaacatccacgacatcaaactgctcttcctgcgcttcgccatggagcagtcgttcagcgcagacactggcgggggcggccgggagagcaacatccacctgatcccgtacatcattcacactgggctttacgtcctgaacacaacccgagcaacttcccgagaagagaagaacctccaaggctttctggaacagcccaaggagaagtgggtggagagtgcctttgaagtggacgggccctactatttcacagtcttggcccttcacatcctgccccctgagcagtggagagccacacgtgtggaaatcttgcggaggctgttggtgacctcgcaggctcgggcagtggctccaggtggagccaccaggctgacagataaggcagtgaaggactattccgcttaccgttcttcccttctcttttgggccctcgtcgatctcatttacaacatgtttaagaaggtgcctaccagtaacacagagggaggctggtcctgctctctcgctgagtacatccgccacaacgacatgcccatctacgaagctgccgacaaagccctgaaaaccttccaggaggagttcatgccagtggagaccttctcagagttcctcgatgtggccggtcttttatcagaaatcaccgatccagagagcttcctgaaggacctgttgaactcagtcccctgaccaccacacagcagctgcggcggcgaagacgaagctggcttgccttccaccctctgttctccctccttgtgcattaagttccctccgcgggatgctgcattgttaccccgccctcccctctctcatttttcttggtgtggcttggggtttttaggcttcctgttttatctcgtgtgtgtggtgcaccagctatgaggttgtctgtaacccaagccatcaaagggcctgtacatacctaggagccatgagttgtcccggccagcttcatacttgagtgtgcacatcttgagaaataaacaagtgacttaacacacattgaaaaggaaggtgttgcctgctgcttcaactcgtcctcagtggcgcaggccaaatggtttcccttgaatgcacagccatttccggcgtcagcccgggaagactcatgtcagacccgctgtctccaggcctgttgtcagcgctaagtgcaacctgtctattcttggccagcaagttggggcaccacattggatggctctgatttttcccaaaacaaagcccatgccttgctcttaattttttggccttaagagctggaacccaaagacacgtggagcccagagctttcctagccctcggctgaaggaaggctcgcggagtagggc

SEQ ID NO: 72455 - DNA, 187 bp, Homo sapiens; identical to SEQ ID NO: 65254

SEQ ID NO: 72456 - DNA, 3307 bp, Homo sapiens
cttcctctccacgcggttgagaagaccggtcggcctgggcaacctgcgctgaagatgccgggaaaactccgtagtgacgctggtttggaatcagacaccgcaatgaaaaaaggggagacactgcgaaagcaaaccgaggagaaagagaaaaaagagaagccaaaatctgataagactgaagagatagcagaagaggaagaaactgttttccccaaagctaaacaagttaaaaagaaagcagagccttctgaagttgacatgaattctcctaaatccaaaaaggcaaaaaaagaaagaggagccatctcaaaatgacatttctcctaaaaccaaaagtttgagaaagaaaaaggagcccattgaaaagaaagtggtttcttctaaaaccaaaaaagtgacaaaaaatgaggagccttctgaggaagaaatagatgctcctaagcccaagaagatgaagaaagaaaaggaaatgaatggagaaactagagagaaaagccccaaactgaagaatggatttcctcatcctgaaccggactgtaaccccagtgaagctgccagtgaagaaagtaacagtgagatagagcaggaaatacctgtggaacaaaaagaagggcgctttctctaattttcccatatctgaagaaactattaaacttctcaaaggccgaggagtgaccttcctatttcctatacaagcaaagacattccatcatgtttacagcgggaaggacttaattgcacaggcacggacaggaactgggaagacattctcctttgccatccctttgattgagaaacttcatgggggaactgcaagacaggaagagaggccgtgcccctcaggtactggttcttgcacctacaagagagttggcaaatcaagtaagcaaagacttcagtgacatcacaaaaaagctgtcagtggcttgtttttatggcggaactccctatggaggtcaatttgaacgcatgaggaatgggattgatatcctggttggaacaccaggtcgtatcaaagaccacatacagaatggcaaactagatctcaccaaacttaaccatgttgtcctggatgaagtggaccagatgttggatatgggatttgctgatcaagtggaagagattttaagtgtggcatacaagaaagattctgaagacaatccccaaacattgcttttttctgcaacttgccctcattgggtatttaatgttgccaagaaatacatgaaatctacatatgaacaggtggacctgattggtaaaaagactcagaaaacggcaataactgtggagcatctggctattaagtgccactggactcagagggcagcagttattggggatgtcatccgagtatatagtggtcatcaaggacgcactatcatcttttgtgaaaccaagaaagaagcccaggagctgtcccagaattcagctataaagcaggatgctcagtccttgcatggagacattccacagaagcaaagggaaatcaccctgaaaggttttagaaatggtagttttggagttttggtggcaaccaatgttgctgcacgtgggttagacatccctgaggttgatttggttatacaaagctctccaccaaaggatgtagagtcctacattcatcgatccgggcggacaggcagagctggaaggacgggggtgtgcatctgcttttatcagcacaaggaagaatatcagttagtacaagtggagcaaaaagcgggaattaagttcaaacgaataggtgttccttctgcaacagaaataataaaagcttccagcaaagatgccatcaggcttttggattccgtgcctcccactgccattagtcacttcaaacaatcagctgagaagctgatagaggagaagggagctgtggaagctctggcagcagcactggcccatatttcaggtgccacgtccgtagaccagcgctccttgatcaactcaaatgtgggttttgtgaccatgatcttgcagtgctcaattgaaatgccaaatattagttatgcttggaaagaacttaaagagcagctgggcgaggagattgattccaaagtgaagggaatggtttttctcaaaggaaagctgggtgtttgctttgatgtacctaccgcatcagtaacagaaatacaggagaaatggcatgattcacgacgctggcagctctctgtggccacagagcaaccagaactggaaggaccacgggaaggatatggaggcttcaggggacagcgggaaggcagtcgaggcttcaggggacagcgggacggaaacagaagattcagaggacagcgggaaggcagtagaggcccgagaggacagcgatcaggaggtggcaacaaaagtaacagatcccaaaacaaaggccagaagcggagtttcagtaaagcatttggtcaataattagaaatagaagatttatatagcaaaaagagaatgatgtttggcaatatagaactgaacattatttttcatgcaaagttaaaagcacattgtgcctccttttgaccacttgccaagtccctgtctctttcagacacagacaagcttcatttaaattatttcatctgatcattatcatttataactttattgttacttcatcagtttttccttttgaaaggtgtatgaattcattacatttttattctaatgtattatctgtagattagaagataaaatcaagcatgtatctgcctatactttgtgagttcacctgtctttatactcaaaagtgtcccttaatagtgtccttccctgaaataaatacctaagggagtgtaacagtctctggaggaccactttgagcctttggaagttaaggtttcctcagccacctgccgaacagtttctcatgtggtcctattatttgtctactgagacttaatactgagcaatgttttgaaacaagatttcaaactaatctgggttgtaatacagtttataccagtgtatgctctagacttggaagatgtagtatgtttgatgtggattacctatacttatgttcgttttgatacatttttagcttctcattataaggtgattcatgctttagtgaattcttcatagatagtatatataaaagtacattttaatagaaagccagggttttaaggaatttcacatgtataaggtggctccatagctttatttgtaagtaggctggataaatggtgcttaaatggtaatgtactccacttcttcctattggaagattaacattatttaccaagaaggacttaagggagtaaggggcgcagattagcattgctcaagagtatgtaaaaaaaaaaaaccc

SEQ ID NO: 72457 - DNA, 4461 bp, Homo sapiens; identical to SEQ ID NO: 65257

SEQ ID NO: 72458 - DNA, 6566 bp, Homo sapiens; identical to SEQ ID NO: 65258

SEQ ID NO: 72459 - DNA, 6556 bp, Homo sapiens
caagggtaaaatgatgattattattttttagattttttgattttttttgttttttgtcttttttaaataaaactgtttgtgaaacagctattttatccccatggcagagtgacccctgaaagatgcactaacccctttcttaaggccataacaagatttttttggacttttttttttttttaaaactcagatatttaaaaattatacaatttacaaaacaaaacaacacaacataaagaatcacgtagcatggggctgcctatctgacaggtcctcttttcctttataaaaatgaaagcaaaaagaaaaaggggttaaatgggtgttcctggtcagcttaacccactctgatcacagcgacagtccctccccgtccctgcctacagctcacactgccagctctggcaacacaggcctggacctcctcccatccccacgggtccctgtgggtcagggcacagctgcctggaatgtgctgaggacagggggccccagaggagggtcatcccttgattttgctgctgctgtgtacacttgatggggtccttgaggtcctcaccagccccagtgacccaggacacagctatgacctcaggcatctgccaatttcacccccaaaaagaaaaaattaaaaaaaaaaaaccataaataaatagtgtttctggaaatgaaaaaaaatttatttttgtgtttaaacatcattcccctactcttgaaaacatggaccatccctgtatttccccctcccccaaaaccttcccactttgagacaaattaatgacaaaaggatggttctgctgtggtttgctttttcaatcctgggtctagtgttttctgaactggtgtgagacaggctaaagatcaacgccacacacacaccccgtccttcatgagatgagggtttgttcagttcaatctcacatttaaatttcacttgtcatcggaacaaatttggagatctttaacgagataattttaaaacagaatcaaaagggatagcgcacctttcatttaaacaaagtctttccagactaaaaatagatttatatatatatatttatccctcccttttaattccccccaccctttccccatcatcccacccctcccccctccccccacattgtcactatggagattgtgtccatggaaacagccattccaacgtcttgggtctttctttcctgtggtgtcactggtttgagtgtgatgtgagaacttaaggaagtgctggcatgggcaggcacgcgggcggggcggggcggggcagggcagggtgtggctgcacggtaggacgatttccattccatcacgagtgtccaccaccttctcatctccacagtctcacctgtgcttgctgtcctttccattcccacgagcacactgcccccctcacccccgctccgactgctctgtgctgaggctgcctttcgcggtcttgttctgcaagggggggagagggcacggaaggggaggcttgtgcttagggcacctcaccgagaagttctcctcatgtagcaaacaatctgcatcaatggcacacgggtaatggtatcggaaggagcagcctttgttgtagcagcccaaggtggcgcctgcctcctggcagtgggaacatttcatctctctggctatttccagcgcttcctgcaggccatagagcctgccacaaaccaggtagattccattggcccagagaatacaaccctcatggacccaaaattcattgctgtcaagaggtagttcagggatttgtaactccagctcagggccaccttctgaagtggtgggcacggagggcttcgagtccaaaacagtcttttcactgctgccctcagtggctgcttttttacaagggagccccctggacagggaccgagggcctccaccacagtcttccgagcggtggcgccgcttaaacctggggtgtgcgggccaggcttctctgctccttctggctgctggctgctgctcttcctcctcctcagtgtccgtcttggagccattagaagcacttttgtgccgtaccttaactttgctctgcatttctgtggccctcttaggaggtggattcttcgggagagtggctgcataatcttggggataaaaaggtccaaagaggtcacccatgttccggtaactggcccacttgccacacagacagcaaaccaggtgccccataaccgaagactctgtcacaacaggtccctgcagcataaaggacgaggccgggatgcgccttgctttcagtgctgctaggtggaggggtcagtgacctctgacccttcctgcccctcactaatttggtctgttcttcttcctcagcattgatgattgtacaaacggctccaagttcacacttatttactacatggatgtaagggtaaaaagacttgttcttggcatcagttttatccaagtggctgggtggcatattttaatttgatctcaggttcttggggttcccacaatgggaactgcttgtttggtttttcgcttcctcggctgggccccaggcttccttctctccctcctttgcctctgtttttttggctttggctctccatctgcagaaccttctggtatctgtgggggctgagggggtggaggcggtggctgctgctgtttcttttgcttattcacactaccaatgggtctccccttcttctttcctgatgggaaatatccctttggagggaaaccctcttgcttcggtgaaatcgtcactgtatcgttctccttctcttcagccttggggtttgcctcaggggccaatatgcccactggaggtacattctttgagtctggaaagattaaaggtgctgttccacccagggaaccatctggtctcccttggttactaccaggcttctgtgaggttgtggatgtcatggcaccagggggttcctttccggcagtaactgtttctgcatgtgtctctgtcttcactttgtcatccacgctgccacgccactcttctgaagaccttggaagaggtttctctacgtgcaactcctggtttgctggactgactaggtccgaagccacctcaccttttctcttctctatgtcagcatcctgaacagcaacactcccaccttcaggaggaccactcttcaaagacagtatatcatcaagcgtaaccgtgtctcccccagcctccgcactgttcgaagatgcgctcctcctaatatttggggatgtaatcttctgaactatagcttccaatttcaatccccgtcctttccgtgggggcagtattttggtcttagcagggcttgtgagggtaacagcagggcagtttctactatctggacttggaaggtccttggaggaatctctcttagggatagacttgatatcctgactgtgagaaagatgggcataggaattgaatgctttatcagcgccttcttttgatgagtgaaggaggcgacctttatcttcagtgctactgttctttacatcttgtgactgtctcttactgggaatgggagagataaaagaacgaacacgcctcctcatgattaaggggttttgagaagaatgatcctcctggcctggaagtctcagcataacactaccaggtttggatgactgtgtagcctcagctagtccatgtccatcagtctcatggggcggcccataccttttttgactggacattcctggaggaccgctgcttttggctggagaagtttgccgagaaagatcccaacaggattcttgtaacttctgggagccatgctttaattccatgcccttgttaggcagaccatcactagacattaggcagcgcccagcctcctgggcactggggtcatggtaagtccccactggtgggccatacatcataccatctttgtcatttttcagagggctccgtactctgtcaagaaactgctgctgccttggactcttccgtggcccctcctgcctgtgctgtgctgcagcaattactccctgagcagaaccgctgctccagtctttatactcctctggttgctgttggtacatctgtctcttataatgcagctgagaattcaaacctgcgttagggtccccataagcatgagcccgagtatttgcatgataagcagaggccagggtttctgagttgggagaaaagggagtgtgtaaagaactccggttagccctctctgaaaaggtcatgtgtggattcatgtgatgagggtctccccctgggcctctgctccgcccaggagacattttcaatttttctgcaaagtcatgatattgagaaggggaccgacccctcatgccctcccgaccaccaactctgccagggacccgccgcattggcgtgggtctgctgtcttgcgggccatagtctgaaagggaatcatgggttgctgctccagggctggcattgccgcggtaagactcatgcttgatgctaggaggatggcagtggtctccagatttcttgttgttgaaactagcttgagatttagactgttcaaagtcttcctcttttatctgcccgctctgggatttcagcttggtttccatggacaccaaaccaccaggaagaatgaccgactgacttaaagttggattgagacggtcattcctcccaattctggtgtcggcactcatgtgtcccagtgagtgagcccctgggtccctgacaatctgtcttagtggagaaatatcacagatcactgatcttctttcagagagggaacccccaggctcatgcgctgatgactgaggctctatttcaaactttctgggaattggatagtcagtcaaattgatctgtttcatttcaggagctgtgctgcttgatttcctttcccaggggccccagtggggattttttaatagagacccaatgcttttgttcagaaggcccctgctagctaattcattggtttgactaaccaagacattgggccttgtggttccttctaggctaccagccatcccctgatgctcttgagtaccccctagaatatctcctgtcagggtggtggtggtaaccctgaagcacttcctgcaggaggcttgggaatttttcatttctaccctttcgttccccatggccagtgaaatctcccttttcttgccctgtaggatactgaggaaagccactgacatttcgtggcacggctgacccgaaactatctttgtaactatagcgcagacttccaggagatttgctaggctcagttctgctcgtaaaaccagggcccgctgcagagtggccactctggccatttccttctccattatggttggagttgttatcgccattcttgtttcctttgctccctcctcctcctgggaggctctggctggggaagtgatgcatgactggtttcctttgccccaccattgctaggtggcctttgagtggctgcaggatcatcctcttgggagcctttatcttgtccaccaggcttttctacccgacctgtcatggcttcccgggagacaatcaccccaacagtcttctcattaacctttggggttcccgtcggatgacaatggcatgtccttagcgcctggtgaggtggcctcttctcttgcggcaggactagcattgagtctggggggttcattctgagcaccctgtgcccggggaggagccagctttctcagaggctccacccttgtaggtggtgtcagagctggtgctctgggccacttagttgccgcactctctcgccttgatcctctgaactgctggagcagcctcccatctaatgactctgccataggggacttcagctgttcttcaggttgtgaggagccttcagaatttgtgcagctatctgctttcttggaagatgagggcctcttggaggtcttcttctgaggagtcagggcatcagaaagtaacatgtgctggacagtgttaggaagattggccacttgagtactcagagcactcaaactactcaacccaggatctgtcagtcgcttttctggtaccccttctagtccaaaccctttgaagcctgcagcatgagaattaggactgggcatcattgatggggttggactgagttgaggcattaactgtaaaattctgtttctggaacccataggcacactgccttgcccacactggagattctccccagtctgcatgagaggagatggggtagaactacagcttggagactgaaccacagaggcagctggagaagggttagaaatggggctgaagttctggtgaaactgcatgggggacctcacaggaacctcaggctggttgtactgccccacttggctttgcaggggcagcttggtggcagcgttagtatactgcatcacatgctgagaagggtgttgttgttgctgcggttgctgctgctgctgcccctgttgggtcccttgtggaatctttgcctgttcaaaattcttcatagattgaggctgatagctgtaattggattgtgttccataagcctgtgcattagaacccacattgtgtccttcatactgagatccagcattcacattgtaactgccatcatagctctgtccagactggctaaaacgctgtggtgaagggaaggaggag

SEQ ID NO: 72460 - DNA, 1120 bp, Homo sapiens
tttcgtcgctgctggcggtcgggcgctcgggcggtcctggccggcgagacgagttgcatgtgttggttcagctggcgatagcggcgggagcggagccggcggggcctgtgcgaccgcctgggtttgtgaaatggctgctgacatttctgaatccagcggggctgactgcaaaggagacccaaggaacagtgccaagttagatgccgattacccacttcgagtcctttattgtggagtctgttcattaccaacagagtactgtgaatatatgcctgatgttgctaaatgtagacaatggttagagaagaattttccaaatgaatttgcaaaacttactgtagaaaattcacccaaacaagaagctggaattagtgagggtcaaggaacagcaggggaagaagaggagaagaaaaaacagaagagaggtggaaggggtcaaataaaacaaaaaaagaagaccgtaccacaaaaggttactatagccaaaattcccagagcaaagaagaaatatgtgacaagagtatgtggccttgcaacttttgaaattgatcttaaagaagcacaaagattttttgctcaaaaattctcctgtggtgcctcagtaacaggggaggatgaaattatcattcagggagattttacagatgacataattgatgtcattcaggaaaaatggccagaggtagatgatgacagcatcgaagatcttggagaagtaaagaagtgaatttgaaaatttgtctgtatttaatggcctgaactgagagttgatatggccaaagggagagaggccttttaaaatatatatatatatacacatatatatgtatatatacacatatatgtatgtatacacatatacacatgtatatatacatgtgtgtatgtatacatgtatatacatatatacatacacatatatgtatacatatatacacatatatgtatacatatatacacatatatgtatacatatatatatattctacagtaaaactgtagggctgtcctcgtccttggcattttcactgttctgtacaaggctgcttgtttttttattgccaaagtcaaataaacgggagactgtcatgctcatgcatgaatagaatttagtcaaata

SEQ ID NO: 72461 - DNA, 326 bp, Homo sapiens; identical to SEQ ID NO: 65261

SEQ ID NO: 72462 - DNA, 399 bp, Homo sapiens; identical to SEQ ID NO: 65262

SEQ ID NO: 72463 - DNA, 631 bp, Homo sapiens; identical to SEQ ID NO: 65263

SEQ ID NO: 72464 - DNA, 405 bp, Homo sapiens; identical to SEQ ID NO: 65264

SEQ ID NO: 72465 - DNA, 4357 bp, Homo sapiens
aggaaggaagcaaagggacaaaaccacctccagcagtttctacaaccaaaattccacctataacaaatatttttcccctgccagagagattctgtgaagcattagactccaaggggataaagtggcctcagacacaaaggggaatgatggttgaacgaccatgccctaagggaacaagaggaactgcctcatatctctgcatgatttccactggaacatggaaccctaagggccccgatcttagcaactgtacctcacactgggtgaatcagctggctcagaagatcagaagcggagaaaatgctgctagtcttgccaatgaactggctaaacataccaaagggccagtgtttgctggggatgtaagttcttcagtgagattgatggagcagttggtggacatccttgatgcacagctgcaggaactgaaacctagtgaaaaagattcagctggacggagttataacaagctccaaaaacgagagaagacatgcagggcttaccttaaggcaattgttgacacagtggacaaccttctgagacctgaagctttggaatcatggaaacatatgaattcttctgaacaagcacatactgcaacaatgttactcgatacattggaagaaggagcttttgtcctagctgacaatcttttagaaccaacaagggtctcaatgcccacagaaaatattgtcctggaagttgccgtactcagtacagaaggacagatccaagactttaaatttcctctgggcatcaaaggagcaggcagctcaatccaactgtccgcaaataccgtcaaacagaacagcaggaatgggcttgcaaagttggtgttcatcatttaccggagcctgggacagttccttagtacagaaaatgcaaccattaaactgggtgctgattttattggtcgtaatagcaccattgcagtgaactctcacgtcatttcagtttcaatcaataaagagtccagccgagtatacctgactgatcctgtgctttttaccctgccacacattgatcctgacaattatttcaatgcaaactgctccttctggaactactcagagagaactatgatgggatattggtctacccagggctgcaagctggttgacactaataaaactcgaacaacgtgtgcatgcagccacctaaccaattttgcaattctcatggcccacagggaaattgcatataaagatggcgttcatgaattacttcttacagtcatcacctgggtgggaattgtcatttcccttgtttgcctggctatctgcatcttcaccttctgctttttccgtggcctacagagtgaccgaaatactattcacaagaacctttgtatcaaccttttcattgctgaatttattttcctaataggcattgataagacaaaatatgcgattgcatgcccaatatttgcaggacttctacactttttctttttggcagcttttgcttggatgtgcctagaaggtgtgcagctctacctaatgttagttgaagtttttgaaagtgaatattcaaggaaaaaatattactatgttgctggttacttgtttcctgccacagtggttggagtttcagctgctattgactataagagctatggaacagaaaaagcttgctggcttcatgttgataactactttatatggagcttcattggacctgttaccttcattattctgctaaatattatcttcttggtgatcacattgtgcaaaatggtgaagcattcaaacactttgaaaccagattctagcaggttggaaaacattaagtcttgggtgcttggcgctttcgctcttctgtgtcttcttggcctcacctggtcctttgggttgctttttattaatgaggagactattgtgatggcatatctcttcactatatttaatgctttccagggagtgttcattttcatctttcactgtgctctccaaaagaaagtacgaaaagaatatggcaagtgcttcagacactcatactgctgtggaggcctcccaactgagagtccccacagttcagtgaaggcatcaaccaccagaaccagtgctcgctattcctctggcacacagagtcgtataagaagaatgtggaatgatactgtgagaaaacaatcagaatcttcttttatctcaggtgacatcaatagcacttcaacacttaatcaaggaatgactggcaattacctactaacaaaccctcttcttcgaccccacggcactaacaacccctataacacattgctcgctgaaacagttgtatgtaatgccccttcagctcctgtatttaactcaccaggacattcactgaacaatgccagggatacaagtgccatggatactctaccgctaaatggtaattttaacaacagctactcgctgcacaagggtgactataatgacagcgtgcaagttgtggactgtggactaagtctgaatgatactgcttttgagaaaatgatcatttcagaattagtgcacaacaacttacggggcagcagcaagactcacaacctcgagctcacgctaccagtcaaacctgtgattggaggtagcagcagtgaagatgatgctattgtggcagatgcttcatctttaatgcacagcgacaacccagggctggagctccatcacaaagaactcgaggcaccacttattcctcagcggactcactcccttctgtaccaaccccagaagaaagtgaagtccgagggaactgacagctatgtctcccaactgacagcagaggctgaagatcacctacagtcccccaacagagactctctttatacaagcatgcccaatcttaggagactctccctatccggagagcagccctgacatggaagaagacctctctccctccaggaggagtgagaatgaggacatttactataaaagcatgccaaatcttggagctggccatcagcttcagatgtgctaccagatcagcaggggcaatagtgatggttatataatccccattaacaaagaagggtgtattccagaaggagatgttagagaaggacaaatgcagctggttacaagtctttaatcatacagctaaggaattccaagggccacatgcgagtattaataaataaagacaccattggcctgacgcagctccctcaaactctgcttgaagagatgactcttgacctgtggttctctggtgtaaaaaagatgactgaaccttgcagttctgtgaatttttataaaacatacaaaaactttgtatatacacagagtatactaaagtgaattatttgttacaaagaaaagagatgccagccaggtattttaagattctgctgctgtttagagaaattgtgaaacaagcaaaacaaaactttccagccattttactgcagcagtctgtgaactaaatttgtaaatatggctgcaccatttttgtaggcctgcattgtattatatacaagacgtaggctttaaaatcctgtgggacaaatttactgtaccttactattcctgacaagacttggaaaagcaggagagatattctgcatcagtttgcagttcactgcaaatcttttacattaaggcaaagattgaaaacatgcttaaccactagcaatcaagccacaggccttatttcatatgtttcctcaactgtacaatgaactattctcatgaaaaatggctaaagaaattatattttgttctattgctagggtaaaataaatacatttgtgtccaactgaaatataattgtcattaaaataattttaaagagtgaagaaaatattgtgaaaagctcttggttgcacatggtatgaaaagatttttcttacactttgtcatggtaagttctactcattttcacttcttttccactgtatacagtgttctgctttgacaaagttagtctttattacttacatttaaatttcttattgccaaaagaacgtgttttatggggagaaacaaactctttgaagccagttatgtcatgccttgcacaaaagtgatgaaatctagaaaagattgtgtgtcacccctgtttattcttgaacagagggcaaaagagggcactgggcacttctcacaaactttctagtgaacaaaaggtgcctattctttttttaaaaaaataaaataaaacataaatattactcttccatattccttctgcctatatttagtaattaatttattttatgataaagttctaatgaaatgtaaattgtttcagcaaaattctgcttttttttcatccctttgtgtaaacctgttaataatgagcccatcactaatatccagtgtaaagtttaacacggtttgccagtaaataaatgtgaattttttcaagtaaaaaaaaa

SEQ ID NO: 72466 - DNA, 460 bp, Homo sapiens; identical to SEQ ID NO: 65265

SEQ ID NO: 72467 - DNA, 5255 bp, Homo sapiens
cagaaaaatcaccaaagtcacctaattcagtgaaagcagaaaaagcatccagttatcagatgaagtcagaaaaagtaccaagttcaccagcagaagcagaaaagggacccagtttactgttgaaagacatgagacagaagacagaattacaacagattggaaaaaaaattccaagctcctttacttctgtggacaaagtgaatattgaagctgtagggggagaaaaatgtgctctgcaaaactcaccacgatctcagaagcaacagacatgtacagataatactggtgattctgatgatagtgcttcaggaattgaagacgtatcggacgatttaagtaaaatgaagaatgatgaatctaataaagaaaattcttcagagatggactacttagaaaatgccactgtgatagatgaatctgcattgacacctgagcagaggctggggttgaaacaagcagaagaacgcttagaaagagatcacatctttcgacttgaaaaacgatcaccagaatataccaattgtcggtatctatgcaaactttgcttaattcacattgaaaatatccagggggctcataaacatataaaggagaaacgacataagaaaaatattttggaaaaacaagaagaaagtgagcttcgttctctgccacctccttcccctgcccacttggctgctttaagtgttgcagtcattgaattagcaaaagaacatggaataacagatgatgacctcagagtccgtcaggaaattgtggaggaaatgtcaaaggttataacgacatttttaccagaatgttcacttaggttgtatggctcatctctgactagatttgctctgaaaagtagtgatgttaatatagatataaaatttcctcccaagatgaatcatccagatcttctgataaaagtacttgggattttaaagaaaaatgtattatatgtagatgtggaatctgattttcacgctaaagttcctgttgtggtgtgcagagatcgaaaaagtggtttactttgtagagtgagtgcaggaaacgatatggcatgtctcactactgatttacttactgcccttggcaaaatagaacctgtctttattcccttggtgttagcctttcgctactgggctaagttgtgctatattgactcccaaactgatggtggaatcccttcttactgttttgctttaatggtgatgttttttctacaacagagaaaaccccctcttcttccttgcttacttggaagttggattgaaggctttgacccaaaaagaatggatgactttcagctgaagggcatagtagaagagaagtttgtgaagtgggaatgtaattcaagtagtgcaactgagaaaaactcaattgctgaggaaaacaaagctaaggcagaccaaccaaaagatgataccaagaagacagaaacagacaaccaaagtaatgccatgaaggaaaaacatggcaaatctcctttagcattggaaacaccaaatcgggtatccttgggacagttatggttagagctgcttaaattctacacactggattttgctttggaggaatatgtcatatgtgtacggatacaagatattttaacaagagaaaataaaaactggcctaaaaggcgaatagccattgaagatccattttcagtcaagaggaatgttgcacggagcttaaacagccagctggtttacgaatatgttgtggagagatttagggtagcttatcggtattttgcctgtcctcagacgaagggtggaaataagtctacagtggatttcaagaaaagagagaaggggaaaataagcaataagaaaccagtcaagtcgaacaatatggcaaccaatggttgtattctgcttggggaaaccacagaaaaaataaatgcagaaagagagcaacctgttcaatgtgatgaaatggactgtacatcacagagatgtattattgacaacaacaatttgttggtaaatgaactagattttgctgaccacggacaggactcttcatctctttctaccagcaaaagcagtgaaatagagccaaaattagataagaaacaagatgatttagcgccttcagaaacttgtttaaaaaaagagctcagccaatgtaattgcattgatttgtctaagtcgcctgacccagataaatctactggaacagactgcaggtcaaatttagaaacagagagttcacatcagagtgtgtgcaccgacacatctgctacctcttgcaactgcaaagctacagaagatgcttctgaccttaatgatgatgataacctccccacccaggaattatattatgtgtttgataagtttattttaacctctggcttgcagaggttcaaaataaacttatcaaacacataatatgcagcatctgcaaaaaggatggccattcaaagaatgattgcccagaggattttaggaaaattgatttaaaacctctaccaccaatgacaaaccgatttcgggaaatacttgatttagtatgtaaaacatgttttgatgagttatcaccaccttgttctgaacaacacaacagggagcaaattttaattggcttggaaaagtttattcaaaaagaatatgatgaaaaggcaaggttgtgcttatttggctcttctaagaatggatttggatttcgtgatagtgatctggatatttgtatgaccctggaaggccatgaaaatgcagagaaattaaattgtaaggaaataattgaaaatttggcaaaaattcttaagagacatccaggtttaagaaacattttgcctataactactgccaaagtgcctatagtaaaatttgaacacaggcgaagtgggttagaaggcgatatcagtttatataatacgttggctcaacataacacaagaatgctagctacttatgcagctattgatcctagagtgcagtatttgggatatactatgaaagtgtttgctaagcgatgtgacattggggatgcttccagggggaagtttatcttcatatgcatatatccttatgggtgctgtactttctgcagcagaggaaagccacctgttatcccagttctacaagagatctttggatgggaaaacagattccacagagaatggttgatggatggaatgctttcttctttgataaaacagaagaactgaaaaagcgtttaccttcacttggaaagaacacagaatcattaggggagctttggctgggactgcttcgtttctatactgaagagtttgatttcaaggaatatgtaattagcattcggcagaaaaagctgttgacaacttttgagaagcagtggacttccaagtgcattgcaattgaagacccttttgacttgaatcataaccttggtgctggagtttccagaaaaatgaccaatttcatcatgaaagcatttatcaatggaaggaaactttttggtacccctttttatccactcattggcagagaagctgagtacttctttgattccagagtattaacagatggagaactggctcccaatgatagatgttgccgtgtgtgtggaaaaataggccactacatgaaagactgccctaaaaggaaaagcagtttactgtttagactaaagaagaaagacagtgaagaagagaaggaagggaatgaagaagagaaagattcccgagatgttcttgacccccgagacctccacgatactcgagactttagagacccgagagacctcagatgttttatatgtggagatgctggacatgtacgaagggagtgcccagaggtcaagctggcccgtcagaggaatagcagtgtggcagcagcccagctggtccgcaaccttgtaaatgctcaacaggtggctggttcagctcagcaacagggtgatcagtccataaggactagacagtcatcagaatgttctgaatcaccatcttattctcctcagcctcagccatttccacagaactcttcccagtcagctgctattactcagccttcatctcagccaggatcccaacctaagcttggcccacctcagcagggagcccaacctccccatcaggtccagatgccactgtataactttccccagtcaccaccagctcagtattctcccatgcacaatatgggattgttgccaatgcaccctctccagatccctgccccgtcctggcccatccatggcccagtgatccactctgcaccaggcagtgcccccagcaatattggcctaaatgatcccagcatcatctttgcacagcctgctgccagacctgtggcaatccctaacacgtctcacgatggacactggccccgtactgtggctccaaattccctggtaaacagtggtgcagtggggaattcagagccaggctttcgaggactgactcctccaattccttgggaacatgcaccgcgtccccatttcccccttgtcccagcttcgtggccttatggtttgcatcaaaacttcatgcatcagggaaatgcccgattccagcccaacaaacctttctatactcaagacagatgtgccacccgtcggtgtagagagcgttgtccccacccaccaagaggaaacgtgtcggagtaatgcgagtccattttctttcagctggtctaccgatgcacagcaaccagccaatcctgctgtctcaagggtatccgtacctcaatgtcagttacattcagcagaaaaagtgacatttaatggaaagcaaaacaaatcaggtcctgatttaaaattttaacacgtttagatagcttatttaaattctaagactgtttttacagactgtattatttgtatataaatatgaactatagtttttactagtatcaccaaattgagtgataccaaatttcatctattttattacccctaattttaagggaattttatgttttgtttaaacccctgatgaaatgtataaagagagaaatttaaaaaaattacattctttattttcctattagctgtattccatacctttggttgcttcagactttatatatattgttcttaagaattaggaaagaatttccatgtgttttaaatttgtcacttcctattctttacagaaccttgtagtgccaaaaactttttaaaaggtaaaaaaataaaataaaattacaacatgaagattcaaaaaatttttttcttttacatacttgtatattgaatatattcaaacttgaatggaaagttgcttttttgtctgtatttgaagtacttctattttaagttaataaatctttttgacaaga

SEQ ID NO: 72468 - DNA, 2440 bp, Homo sapiens; identical to SEQ ID NO: 65267

SEQ ID NO: 72469 - DNA, 2529 bp, Homo sapiens; identical to SEQ ID NO: 65268

SEQ ID NO: 72470 - DNA, 4333 bp, Homo sapiens
aaaaatttacttttccaatcccccttaaaattgggccccccaaggattcttttaaaaggcccccccttttttttttttttgtacacaaatgtttatttctcaattaaacattccctttaaacacaaggaatgagttctaaatcttcataaagatgaattaaaaatgaaatccctccagtatagtgtatataatcactgtgttcttggtcactactggcatttactgtttaacatcaaaaacaaagacaggttatttaaaaatcatgctactggatttctagctcttcctctatgaccagttctacactgatctgcaatgtttaaaagtttacatcaccaaatcaaagcaagtttaaggtgtgaagtagctgtgcattaaacacaaaataaacaataaaattataagatatagtcaagttcataacgaatataggtgttcttatcatcgttgtagattcttgggtaatgtgctatgagagcgtcctgggaaccaatgtagatggagttgtaaattttccaatatacatctctgactttccgggctgggtgaaacagaccctgtaaacaatattgcaacattctacatggtccaatagcaactctcaggccctctagggctcccataactgcctgaattacatgaggagatgtctcaaacacattgggccatacatagttcaacaagtgattcagcgaatcttcacaaccaaatccataaaccccaagtgacatgtgctgtaccactgcactagccgtctgtctgtgtacaaggtctctatccattaaagcatcttcaagtaacggtgttacggcataaatgtagtcttttcccatttcaccaatatattcaaacaagaaggaaagcgattttaacactccattttgaacattcagttcaggaactctgtattcattcattaaggcagggagtactgtaaagggtgaacatgtttctgcaacaatagctattgctacagtggtacaaactctgttctgcctttcttgaactttgaggttgttcagaagtgtagccaatacatcatgagggccaatggcctttgcaatataaccaaatgtgttgactgtggctctacgaatagcctttttgtgggcttttaagagctctaaaagctcaaagcaaatcctcatccactctcttgcagatacatattcagctcccctgtcagcaatacgaccaacaagatcaatacaattctcttgtactttttcatgtctgttctttaagatgggggtgagtctaggcagcagatctttaattggtggagtcatcttatgcatacctatgacatttacaatggccttcagtgctccaagaatgctgcccaatacttcagggtactcttcacccaaatactcatacaatacaacacccaagtgtcccatcaatttttcctcttgacaagtcttcatgacaacagcagttcgagaaatcaagtcagctgcctgttgcctaactttagcagatttgttatttaaacgccacaaaactgtaccacagatctgaggcaagtatggtttgactcgtttgccaagagcattaaccactgtgccaaagccgttcaacattactgagtcctctgtagtctgttcttggaaagcataaagaataccatcaatcagttgttcttcaagtttatgatcaatatctgctgctcccaaattgcccataattttctcaattgtctccatcaccatttttctgtactgttcggcttcatctttcagatcatccacaatcctggatataatttctgctgcacctactttgtttgccaactccacagtagtatcaactaactgtcggtaatttcttctatccaaagccatcctgtgctgccagaagtgtttaaaaaagggaggaagaatctctgttttaatgtagtttgcttctacaccatctgtcccacaacactgttttaccaccttcagcacaatttttttcatttcctcatcaggagactggaattctcgaataaggattaacatcacttctctagtatagtagttggcatattctgcatccataagaggaataagatacccaatagccttcaagaaagcagccaaaccctttcctctgtgttggcggatacccttccataaaggctttaacacagaatcaaaagattcgataccataaggagttgctgcttcagccaaggcagcaatggccaaagcactgatggtccgaactttctgctgctcatccacaagaccatgttcaatgatttcaactaaacttctaagatgtggcaagatggcacagcccataagaatagctatctgttgtacaatcttaataccagtgtgtctcgcttgccaggacttcttgcttttgcacacagcttttaagaagggcaataaagaaggaatgcccagggcagaggctacaacagcaaaagctctagctgttgtgttacggacatactcatccatgttatctatatcaggtctcatggtagagatcatagtagccagaccagcagcctttgccaaattagaaatgatctctcggccttccactctagcatagtaatcttcatcaatcaatagcggttcaatgaccacgaggatcttatgcacatatggacgaactaagtcatcaagtttgtacagtatcctatcaataactttcacaagtaaatgacgctcttgatgctcaagtgtaggagacatcagcagaggaagaatctgattaaacaaaggaccagctccaaattcacgagctttatcagtaatctgacgcaatgcagcctttctcattggtggtgttccattcttaatttttaaaagcaacttcattatttttctctctttttgctcttctggtactaagtgttgattcatcaacatcaaccaatagtttatcaaagtattgaatatcatcaggttttaaaaatggaagatttccagatggctggtcattaacacttttcatagttcgatcttcagtttgcatgtggaaaccagtcataccacccaaaggtgttggagtagctgtcagctttcgagctggagttcgaataggaacataaccagctggaggaggaagtaccttatatccttctgggaacatagcatctaattcctcatcagaaagtgggcgatttctctcatcaatttctctttcccaccgccaagcctgaagctgttcaggagtcatactcattatgtgacctggagtaggggtagccatgttcatggctggtgtgccaattggtgtctttccaggggtcagaactggagtgcttccacccatctgactagctggtgtttcatcccaccgtgattttcttttactggctccaggagtcggtgtttcaccaatagaatctccacctcgatctgttcgaggagtctcagcccatccacttccatgcccaggagtatctctcctctgttttgggggtttcaatccccatctgtttttaacgaagcaactggaagttgcgcctcccatggccctggtgtcggcatggccctggtgtatcacctcgtcccaggagtagcaagctccccgctggttgtgtggctaggttgtaggatcccatatttttgagcctggggttgctcccaggagtctcgcttccctttgcacgacctggtgtctcatcccatcttaaggaaggagtatgcccaggggtctctgcctgatcccaacttgatagttttttgggagtggcaccaggagtctgatcagctgtttgatcccaacgccgttttcgttttgatggaggctgggacgctgctgctccattgacgacttttagttctccagctttagctttttctgctagctgttgcctaatttctcgttcttctttagtcaagtgttgttctcgcattacatccatgtaagtcctagcattcattttaggatcaggggttttccctccatctgcaaaaggatcaagacgctctggggaaattatcatggtccgcctatgctttttgtattcatcttcccggtctgcaatctttggaggtctgtgctcagcaaatggatcatactgttctgttgactgtggtatatcattaagcaatgccacaggggcatgatatcctggcttcttctgaccaagcaaactcgtagatgatgaatagtcatcgtcatcatcttcaagttcagttgcagcaattgatgtcacgtatccagcaaatctgctgtcacttccaccataaatttcctggtcataataacctgtagaatcgaggcccactccttgagcttcatcaagagctgccttcttgccttgaatttctcgaatctgtgcttcaatatcttcgtgagtcttggcgatcttcgccattt

SEQ ID NO: 72471 - DNA, 835 bp, Homo sapiens; identical to SEQ ID NO: 65271
  misc_feature (1)...(835): n = a,t,c or g

SEQ ID NO: 72472 - DNA, 1700 bp, Homo sapiens
ggcacgaggagctggcacaggctgcactgcgcaggcacaagggcatgctgggtaagcgatacattgaactcttccggagcactgcagccgaagtgcagcaggtcttgaaccgctatgcatccggcccactccttcctacactgactgccccactgctgcccatccccttcccactggcacctgggactgggagggactgtgtacgcctccgaggcctgccctacacggccaccattgaagacatcctgagctttctgggggaggcagcagctgacattcggccccacggtgtacacatggtgctcaaccagcagggccggccatcgggcgatgccttcattcagatgacatcagcagagcgagccctagctgctgctcagcgttgccataagaaggtgatgaaggagcgctacgtggaggtggtcccctgttccacagaggagatgagccgagtgctgatggggggcaccttgggccgcagtggcatgtcccctccaccctgcaagctgccctgcctctcaccacctacctacaccaccttccaagccaccccaacgctcattcccacggagacggcagctctatacccctcttcagcactgctcccagctgccagggtgcctgctgcccccacccctgttgcctactatccagggccagccactcaactctacctgaactacacagcctactacccaagtgttgtcccagtcaggagccttggtccgcatgcagggtgtcccatacacggctggtatgaaggatctgctcagcgtcttccaggcctaccagctacccgctgatgactacaccagtctgatgcctgttggtgacccacctcgcactgtgttacaagcccccaaggaatgggtgtgtttgtaggagagaaagccaggaggtaagagccagctgatatcctcggcgaacatgtctctcctgagtccagaagaccagcaccctcaacctggtagcttctttctggcttgtcaaagctctcagaaggtacctagaggagcccaagccccagctccatcctccacttattctgcctgtttcccccaaagacaatggctggaccctgcatgcagggctgggggtggaatggggctaaccagctcctgatggcctgagccaggcatcttgactggcacctggagagcccttaagtctgtcctggctgtggcccatgccgacagatatcgtggggctgacaggtccacggcaggcttgctttcttttataaaatggaagctctggtaccttcaatgtatgactcctgggagaatcaagggtccatctgagcctctgagtaaagatcccaatgttctacctctccctgtccctcttgtaggggatagggaggcagagagagccagcccctaccctcagagtatctggacctcagagaccatgttgtgccaggggtggtcccacctaaagatgctagcccctctccaggtgggcataaggagtaacagatggcaaaaccacaaactattttgatggactgtgctgcagtatcaccagaagacattagggggcagtaggcccccacacaaaaccttcaggcttgaattttaaaggggaggactttctgccaacttttcttgtatgccttgggaaagccagttgccctgaacccagcagacaccatggaatgtcctttgcacgcattaaatggtacagaactgaagcctcgg

SEQ ID NO: 72473 - DNA, 1549 bp, Homo sapiens
aggacgaggatgtttctggaagaaaaaatcccctcgatttctgatttaaagctagcaattcgaagagctactctgaaaagatcatttactcctgtatttttgggaagcgccttgaagaacaaaggagttcagcctcttttagatgctgttttagaatacctcccaaatccatctgaagtccagaactatgctattctcaataaagaggatgactcaaaagagaaaaccaaaatcctaatgaactccagtagagacaattcccacccatttgtaggcctggcttttaaactggaggtaggtcgatttggacaattaacttatgttcgcagttatcagggagagctaaagaagggtgacaccatctataacacaaggacaagaaagaaagtacggttgcaacggctggctcgcatgcatgccgacatgatggaggatgttgaggaagtatatgccggagacatctgtgcattgtttggcattgactgtgctagtggagacacattcacagacaaagccaacagcggcctttctatggagtcaattcatgttcctgatcctgtcatttcaatagcaatgaagccttctaacaagaacgatctggaaaaattttcaaaaggtattggcaggtttacaagagaagatcccacatttaaagtatactttgacactgagaacaaagagacagttatatctggaatgggagaattacacctggaaatctatgctcagaggctggaaagagagtatggctgtccttgtatcacaggaaagccaaaagttgcctttcgagagaccattactgcccctgtcccgtttgactttacacataaaaaacaatcaggtggtgcaggccagtatggaaaagtaataggtgtcctggagcctctggacccagagggactacactaaattggaattttcagatgaaacattcggatcaaatatttccaaagcagtttgtgcctgctgtagaaaaggggtttttagatgcctgcgagaagggccctctttctggtcacaagctctctgggctccggtttgtcctgcaagatggagcacaccacatggttgattctaatgaaatctctttcatccgagcaggagaaggtgctcttaaacaagccttggcaaatgcaacattatgtattctttgaacctattatggctgtggaagttgtagctccaaatgaatttcaggggacaagtaattggcaggaattaaccgacgccatggggtaatcactgggcaagatggagttgaggactattttacactgtatgcagatgtaagtagtcttggtcattggcagtcctgcttttattaaccatagaaggaaatccaggttagcttttgtttttgcaaatggacacatttccttgctgaatttgtggctttatacatgtggcattttctgtaatttgctattaaagcaactcttaagtgcagaagttaaaaataagatttattttatcttgaccttttgtgaatgtgtcattttcttagatgtatattatctctctttcttgaataagcacagatggacaaatt

SEQ ID NO: 72474 - DNA, 2580 bp, Homo sapiens; identical to SEQ ID NO: 65274

SEQ ID NO: 72475 - DNA, 2825 bp, Homo sapiens; identical to SEQ ID NO: 65275

SEQ ID NO: 72476 - DNA, 1504 bp, Homo sapiens; identical to SEQ ID NO: 65276

SEQ ID NO: 72477 - DNA, 1333 bp, Homo sapiens; identical to SEQ ID NO: 65277

SEQ ID NO: 72478 - DNA, 1067 bp, Homo sapiens
gttccgggaggcgcgtggggcttgaggccgagaacggcccttgctgccaccaacatggagactttgtaccgtgtcccgttcttagtgctcgaatgtcccaacctgaagctgaagaagccgccctggttgcacatgccgtcggccatgactgtgtatgctctggtggtggtgtcttacttcctcatcaccggaggaataatttatgatgttattgttgaacctccaagtgtcggttctatgactgatgaacatgggcatcagaggccagtagctttcttggcctacagagtaaatggacaatatattatggaaggacttgcatccagcttcctatttacaatgggaggtttaggtttcataatcctggaccgatcgaatgcaccaaatatcccaaaactcaatagattccttcttctgttcattggattcgtctgtgtcctattgagttttttcatggctagagtattcatgagaatgaaactgccgggctatctgatgggttagagtgcctttgagaagaaatcagtggatactggatttgctcctgtcaatgaagttttaaaggctgtaccaatcctctaatatgaaatgtggaaaagaatgaagagcagcagtaaaagaaatatctagtgaaaaaacaggaagcgtattgaagcttggactagaatttcttcttggtattaaagagacaagtttatcacagaattttttttcctgctggcctattgctataccaatgatgttgagtggcattttctttttagtttttcattaaaatatattccatatctacaactataatatcaaataaagtgattattttttacaaccctcttaacattttttggagatgacatttctgattttcagaaattaacataaaatccagaagcaagattccgtaagctgagaactctggacagttgatcagctttacctatggtgctttgcctttaactagagtgtgtgatggtagattatttcagatatgtatgtaaaactgtttcctgaacaataagatgtatgaacggagcagaaataaatactttttctaattaaaaaaaaaa

SEQ ID NO: 72479 - DNA, 1748 bp, Homo sapiens; identical to SEQ ID NO: 65278
  misc_feature (1)...(1748): n = a,t,c or g

SEQ ID NO: 72480 - DNA, 3032 bp, Homo sapiens
ggcacgaggattcgaggagtagtgctattttttattggagtatttcttgcattagtgttaaatttacttcagattcagagaaatgtgacgctctttccacctgatgtgattgcaagcatcttttcttctgcatggtgggtacccccatgctgtggcacggcttctgctgtgattgggttattatacccctgcattgacagacatctaggagaaccacataaatttaaaagagagtggtccagtgtaatgcggtgtgtagcagtctttgttggtataaatcatgccagtgctaaagtggatttcgataacaacatacagttgtctctcacactggctgcactatccattggactgtggtggacttttgatagatctagaagtggttttggccttggagtaggaattgccttcttggcaactgtggtcactcaactgctagtatataatggtgtttaccaatatacatctccagatttcctctatgttcgttcttggttaccatgtatattttttgctggaggcataacaatgggaaacattggtcggacaactggcaatgtacgaatgtaaagttatcgcagaaaaaatcccatcaggaatgaagaaggcaaaaaatatcttttgtacagaaaagcaagatgaaaaggatgtgaaatggtagatataccaacaaaacttcagactgtaaaattgccaggatgcagttttccccttgattggccgtgtgtgtatatatggaataaatatatatatacacacacacatattactgcaatcctgtgattgcttcatctgtaaatcagttgtaaacctttacatatttgacttaaataactgtaagatatatatgtactacattaaaaagtgttgattaatagatgaaatttttaaattaattttttaaaacatgccatacattgtatcacaatgttaatgtgccaagatattgttcctgtcatgcagagtataagaatgctttgaacaatttgtagacttagtgaaataaaataagaggaaagccaaaaacaaacaaacaaaaagcatatggggagctggtattttctctttagcttactgttgtgcctttttatttttctaatcacagcagtatgagttatgagtgccctaatttgtggttagtttctaatttaatgttgtttcatagagtttggagtgttttgatacagggtgaaaatgaacttctggtttcaaacctgcgttactggagacagcccaaagagtaattttctgttttgacaggttttactggaagtatatgtgatgagcagaagaggttatcagcattaaattgttttggttctaaatttggaacagtatatataattaaaagtaaggaacattagaggatttaattagaataaatacatgttttggaaatacagtgacctcttgcagtgtcacaaaagtgcaaagtgatattagctgtcatctgcaatacagaatctcattgcttttgcacatggagcatataggaaactccaaacagatcacaatgagggtttctaaatctgttggggttctgtcttcttattggggttctgtgaaggcaaaccactgtaggctttagctggggttcagtcatatggacttcgttgggtggggatggcctagggtttttcatcttacatgcagtcttggggggtgggatgaatacataatttcttatgtattcgtgtatccattagtgaatagttcaagtctgtttaagagtgtattgagatggcattctctgcatgttaaagatcttaatggcaaccagcacctcttaagtatggtttaaacatattcttagctaattttttccattagtttttgaaattggtggcagttgtctgatccacaagggcaagatcttctgagtactctggggtgtgagtatgtgtgcacacgtgtgtgttggagtgagtgagagaatgtgtctgtgcatgtggccatgctttcctagaatgtcaagtagatatttttacactttgagttttaaagcaattactatcagactgagatcttgtatgccaaactttaatctgcttttatgttttcaggctgaaggtgtgaaaatcctaagaggatttcatattgaatatgtgtacacaatcttaactatcgtggtggaaaacatactactataatttattattatatcttccagataatgttattcatttagaacaaataaggtatattttttagaatcaactttgtaagcactataaaatctttaataagttataaggtctatgatgtgtttactttaaaaattgctgttaaaagcaacacgtattaaatatgtaattatcatctgggttaagagtctgtttttcttctttgtggtaagtcttagaatatggtactgtggattaatctaatgaaattaacatatgtggttgaagttaccaagaaacgatgaaaagaaactaaatatagttgacccttgaacaacaggagttaggggcaccactccccaacatagttgaaaatccatgtataacttttgactcctccaaaacttaactactaatagcctactcttgatgggaagccttaccaataagaaacagttgatgaacacatattgtgtatggtatatgtattatatactgttttcttacaatagtgtaagctaaggaaaagaaaatgtgtttactcttcattcagtggaagtggaccatcctaaaagtcttcactcatgctatcttcatgctgagtagtaggctgaggaggaggaggagggttggtcttgctgttgcgggggtggaagaagatgtgcattattagtgggcccacacagctgaaaaccatgctgttcaagggtcaactgtgtgtggtatcggtgagactgaatgattatcgttggtgttcttaaattattttcaggtcctctagaaaatatgataattatagcaaaaaatatgattgttttgaaattttgataaatatataaatgtatagaacctattgttttcaatgatagaaaatgggaaacattttttaacattgctagattggcagtg

SEQ ID NO: 72481 - DNA, 1217 bp, Homo sapiens
ttttttttttttctaaatgaagtgcttttaattttcagaccaaacatttttaatataaaaacattttgataatatacaaacagcaatcacaacagcatccacatggcagcaaggggaccagggcacagagagggggagcgggctggggagggacagttttcagggtcccagttgcttccctggcttgaaatcaccctggtcctagcagaggacaggttaaggctgccagaggcagagggtccctgaccctggcccggagacagactgcccaggcaggccctctgataccatcttccaaccatggcagcctccaggaaaagccagatccatttaggagataacaggaaggtggctgtgattgacaggaaaggcaacatggttcctcagcatcctgctgatcacacctctgggaggggctgctggattgaagaggacctaagaatcttcctgggagcaggacagaaatgggatctaagtctacctactaactaacattcccgcctgtgacaccagaaagctggagtgggtctgctcagatgtacaggaagagaaaggaatgacaaagcctttggctcagcaggactggagccttgacaggcactgaccaagaaagcctctaggtgggccagggaggtctgtgggaaagctttggatcaatggtactcaagggtgcacagtggcacagtggccttagttagaatttatgaagacgaaaagaacacaagtcagaatttagaactgaagtacctgcttcttataggcctgtagaggaaaagcgagatcatccttctggccaggactaggggagacccaaggcctgttctttcctaggggctgagtttgacagacctggattgcagctgatggctccmacagtcctctagatgggccctgcaggactcgctgggaggcctggttgcccctccccggcgtgctgggacactctgggttcctgcagttagatgcagtccatggagttctcagggaggaggccagggatgcagccagggagccccaagcccttgataggagtgcagttgagtgggaggccgcagcccagggaggggtcctgggtctctatggcctccagcctgtccatgttgttgtcccagttgatatggaagcgggtcacccgggggttcgaggccaagatgttccgctggagctgggagaaatctggcttcatgggcgggttctcacgcagctcagctcgtgcc

SEQ ID NO: 72482 - DNA, 1273 bp, Homo sapiens; identical to SEQ ID NO: 65281

SEQ ID NO: 72483 - DNA, 346 bp, Homo sapiens; identical to SEQ ID NO: 65282

SEQ ID NO: 72484 - DNA, 1118 bp, Homo sapiens; identical to SEQ ID NO: 65283

SEQ ID NO: 72485 - DNA, 1769 bp, Homo sapiens; identical to SEQ ID NO: 65284

SEQ ID NO: 72486 - DNA, 2773 bp, Homo sapiens; identical to SEQ ID NO: 65285
  misc_feature (1)...(2773): n = a,t,c or g

SEQ ID NO: 72487 - DNA, 2108 bp, Homo sapiens; identical to SEQ ID NO: 65286

SEQ ID NO: 72488 - DNA, 1137 bp, Homo sapiens
ttttttaaactagtacacacttaggtgcaaacctcggtttattacgttctttggttaaatattgtttctacatcctttcagagcattaggagaacaaagataatatttgatagaaagactgaaaacacaatcctttgcttttcagagaaaagactgaatttacactggtactgttagaaattcttataattaggctagacgtctattttagagaaagttagggcttttgctgttgcttgtatgttttgaaaaatacattcccctggggctagccaacatcactgtcctgagacccagaccttcagggagtctcttgataaaggctgctccgcacatgggtcaggaaaagtcggggtcagctccatcatgtccgaggactgcatgggttcagtgttgcccatcactgcggcaacggcttctgcccaccatctctttctggaatacagacagattttgggtgaaacctgtctctgttcttgacggacaggttctgctccactccttccattaggtttctgaagcactgggcaaggacctcctgcttggggaggggctggctgtttatcaaacttgctctcagttcactgaaatacttctcattgagcaggatgagccccaggagaggcctggatactgaccactggttccgacagtcttcaaagacaatggtgttcatgaggacagacatcatctgctgcaggacatctgggttttgctgcataaaatgtaatagtctctgaccagcctgggtagcctctctgccatcgaagtggccttcttgcccctcttttgctatgtgcttgaagaggtaggtgacgatgtagtctaaactggtacagcagctggaggagacaactgtatcaagagtagtgagtccctctgagatagatgtgagaacatacatgagtacaggaggctctaagttgatgatgaagctcatatggtcctgagtgagacattccaggagtggataataagactggctcagtttccggtattgtagcaagtcactgtgggacactgacagcagcattttgacaaaagcctggagtacattgtcaaaatggttgtccccatacaacttgaagacgccaaagctgacataatttccacacaaggcagacttgagctcgtgcc

SEQ ID NO: 72489 - DNA, 2457 bp, Homo sapiens; identical to SEQ ID NO: 65288

SEQ ID NO: 72490 - DNA, 3398 bp, Homo sapiens
tttttttttttcaggttcaaaaacagtttgaggttttttattatccaagtccctttgaaaagataattaattgtacaagtgtcatcgcatgaaaaacagactcgggcagcccctgctggccctagcctgagaaatgtacatatttacacgggccctcagaaaggaggacccaggactgcacagccggcggctggaaggcaggtgcagtgttccgtcgccgattcacacagtggcaggcaagtgacaagctgttttgaaggcactcggtggcgcggacaattgacagaggcccttcaggcctctgcattccgggcctgggcccaagccagacctggggtacgtgggcaaatcccagagggaaagtagatcccagcacacgtgcccaagggaggtgccgggggatggggggggggtcacctgaagctggcagcagggacctcggctgccccacttgggctgggccctccaagtattgctatgaggagtggtccaggctgcctccttgggggcaggacagaagcttgtggaccacttggagggaccccctacctgcctctagacacgggtagaccacagggatgggtggtacacccaacactgttccccatcgggctcctgagtacgaggtcatctgcctggccgtgacacccgtgcccgccaagggcctcgcctggcacagcggccagcccaccagcctatcagtccaccttctccactttgccgatgatcttctcctcaaagacgggcaggacggcctcgtcctctcgaacctcctcaaacaccaccccacagtcaaactcgtcgctcactttcttgaagtagtatctgtagctgccctttttggtcagcagctccttgaactggcccagggtgacagcgcggcccctcaccagggtgcggtaggggatgggttccccgcagaagtagtacgccacaacgatgctgtcacacggctgggcactcccgccgcccaccttcctctgcgatcttgtctctgtctcggagagctccatgtccgacacggctggtaccacgtgcagcaccggcgcgcacgctggcctgacgcaggcgcgtccccgccgcataacctcctgcacatacctctgcttggagggtgctcggctggctctcttttcttcctcctccagacgtcggcgcgcctcctccagctgggttagggggttgggagctgggtggggtggcatggtggggtcttggatgaagaggtgggagggctgcacggaggtccggagctgagggccggcccaggggtgctcaagggacaagggtctggagttctcatggggctgtggcttcctcgtccccgaagacccgtggccggtcctgcggtgcctgctgatctccttttccccctcaatgatccactgcatgattttctggttcttctccgcatcctccgaggcacctggcacctcggtgctggcgctcttccccgactcagccttcttggcatttcttttgcacgccacgcccaccttcccactgtgggcgaggccatcactggcgttgggggcagcgccaacactctctgagtagcctcgggaccttgccccatggctgtgtggttccaggccccaggcgaagctgctctgggccctgcgggtggcctcggcctccacctgctccttgggccgggctgtgctgtggtggacgtggtggtggacgtgtcggtggtggtgcaggccggccgcgtccagcttcgcccctgacttgggtacgtgcttcccgtgccccgaggcggcaccccccagtgccactggcatcttggccacgtgcccactgtccggggagcgatggccaggcccaggcgactggcggccaggtgtcctcagcacacgctgtacgtgctcgtccaggatgctctcagggttctcctcgtgtgcatcccggagcccggcacagcccatgtccacacagcggggcgggaagtggtgccaagcgggggcgggaggcagcttgtgacacggccctgggggccctgacgatggatcgccgtcctcaccttcctcctccatgcgcacgcgcttcagccgctcctccagcttctcctcggcctcccgcgtgcgctgcacagcctccaggcggtggatgagctcctccgcgaacttttgaggctccacgcggacctccttcggcacccggtacgtgcggggaatgtgaggtaggggcacccgcccattgacctgcacgctctcctgcatctccctgcggtgctgcttacggatcctgtatggggggatcccatccacgctgctgtccgtgagggacagggtgtctgcatcgctggacaggctctgctgctcgctgtcgttggcactggtggctggggccagggcatagccggcattgacataataggggttgactggctcccgccaggatccatacctgaactctctgccttcgctgtaccgtctactggaggagaccctcggggcagctgtctccaggagcagcttctgagggagtcttccggggggagcagcgtctctgccatcgtcctcgtccatgtcctggtcacacttccattcctcatcttcatttaaggtcggcaggtatccagatatgcccttccctgtccctgacccagagctctggtcactacagactttggggctctccgagcctgtcctcgtatattccaaataaatatcagacttaaggaaggagggataggtgttttcctccatagtggcctggatttcggtctgggcctggtcaaacatggcaggatcgatcagctgcttcatgatgcagccctttatgaagctcttggtggctggcttggtctgccgggacacgatgccattgttatcaagaatgtactttcggtagatggctctcgccagcttcagcctcttctcctcgttcgagtcacagggctccagcttcctgaagccagtgcaggcaaaccagaagtccagcaagtcggcacagccctcctgcttcaggaaagtcctgaacaggcttatcccatcttggtcatccagcagggaatgcagtgactcagcccacttcaagtatggtggggtgggggaggcactgccctcaggctcataccccaggtccagatccgagcgcctcggagtggccgtcgaagtctcacctttaatgccaacacctttcccggagcagaaactgtagctggcgggcctcgggtctgtggacaccagttctccctcctcaccaggcactgggggtcggggagcatcttcggtgaaacttgctccgaggtccaaggggaaaccctgctcttggatattcattttgggactctgcgtcaaggaacaatgagcgctgcaccctaatacatcagtacttacagctccaaagtgaatcaatctgtcccgcgcgcggtggtggcgggaccccgggcc

SEQ ID NO: 72491 - DNA, 1372 bp, Homo sapiens; identical to SEQ ID NO: 65290

SEQ ID NO: 72492 - DNA, 6305 bp, Homo sapiens
aaatttaaccttgccaaccccggggtatataaacttgatccttttaaaccggccccccctttttttttttttgtttttttaaaaagtatttattttttactagtgaggatggaactaggggaagaagtttacagaaaagatgtccatatacaaagaaagaaatagcaaaatatttttggtcataatttagaaagaaactaatctataaaatggagacaattctccccaattcatctctctcatagaagagcataagcacgggctctcagttccttgatatcctcaagaggccacggatacgtctgacaagagcctgtatgaaactatatcgagatcgaacttttgaatataatccttcaatgtccagaagtttcttttgtagtgattctccaaaagcgttgattgcatcagcctgaagctggtctaaatcatgttggctcactatagccagcccacttctaaaatctagattggtttctgaggcgaaggaatcttgcagtcttctgcttttaaacaaggttctcgaggcaaataaggaatcttgagaatccgtgggcatgcaatgtaacaagtagtactccagatggcgccaaagaataaataggcaggtctctatgataaaagaacaaagggaaagcagtttagctcgattgttgatcaccttcaccaagcgccgtcttgctagaacatatttctgagcagtggagattttatcaacaccagcaggcatcacagactgacacaactcttttatctcatctgggggaagctgctctacattttgtagcttgctgacactctgtcgatgactgtcataatagctgaagaaatcattagcactctgtttcagcaggtagatgataatgcctaaaccaggcaggcgccagtatggaaccactggagcttgggtatcttgccgcggtccatctctattaactgtttctgaaaggctaggagtgaagagacacacagcatgctggaaggtaggggaactctgtaacatgagtgactggcaatattccattacattggcacaaatctgctgcatagccagttcaatctcatctttcttgcttactttatctccctccacattatcgtcttgaaatttaaactgacgcagtctgtcagagccaccaaagcgacttagtagtcctaagcactggcgctggaatcttccaatatgtccctgtagctccattagagacccttcatttacatcaacgtcaagttcacttaatattccaggaagtgctgctttacttataattcctgtcagcagagccaattcctgcaaagacccagcactaacatcctgacagcgcagaattgcttgtatggtatcagaatgtgaaataagaaactgcaatacctgccctgctgcctgcaagtgctgggccatactagatgtgaggatgacctggcacagctggagagctgggaggagaatctggcggtagcgatccactggggtagggatgaacattggagggtctctcatgccaaacatgctctgcgggtccgtttctgggcgcatgtcatagacttggcattgagctagtctcacaatcacccctgatcttagcagctctaatgcaccctgctgtatctttgccactcttgtgagaaatgccattttagattcataagtataaagtgcttttaaaaggggaggctgtggggtgagtaagctctgcaaagtacggtcatcttctaccaagctgtctacgaggaccttcaagtagccactgttagaaagatacaaaagccactgctgctgtttatccacggagacaattctatcaagtagagccagggccagcatccttccaatctcatgaccatcacaagcatctcgacagaccacttccatgagggcggcgccataactttcaataatggctatgttttctcgctgtaatttgctaaatacatcttcaggggctgtcagcctttcccacatggttttcttggctgcttctaaggtgtctggttcatcaggtctctgggcaatctgtaagtaataaagcagagagccatacaagtgagtcctcactcgttggaatccaccacctgtcttcaaaatgaagtctaacagtttcttcaatatgatgtaaagtgaagaatctccaatagaagcaaaacccactaatgggttctcttcaggaggaggtgaggtgaagcaactatcaagcataaaagcgtaatgggcctctgctggtcccaagactgatgtttgcttctgttcagtgaggacggcctggcttaggtgagcagtcagtgtgaacactgccccggcgaccacaggcattaactcttgcgcagcttcatcatccagtatcttatcatgcacatcttgtaaaatatcacgaataatcagttgtcgatcctctgcctgaatgaggtcctggggacaagctgtcagtataatttctactagttgcctccacgactccagagcatgacgttttgcatgaagacactgcagcaatttatttcttcctaccacatactgaagtacagtgctgatttcctccattagtagaggtctctgtcctatggctgccataccctgaagggcatttacttcagctacaagaaccctatgaagaagcttgacattgcagactgtctgtccccgtaaattcttgtgttcacagttagcaataacttgttcaatctgggcccgatcaaaaaaatccaactgcaaaggctcagggatctcctgactgaagtcaatcgagtcaagaatatttagaatttttcgacgtacttttgtagcagtgtcaaagtgaaggaacccagaaacagacctgttttcatcttctattcctccttcaccatctgagtatggtttcactggcatgtcatccagtaagaggtgtaggagcctctgggtatgtgaccgctgacgattcagagaggttacccttagctctattgaggcagttttcataagccatgacatctggttcagcatagatatttcatattctttgttagaaaatggtagatactgcaactgggaaaataagaaatcctggctggttctcaagtacctcatagtaggaccagatgtatcagagcatgcacataactgatatatgacctggtaacatagctcagccagctgaggagattctcgcaccgccactgggcctgttctcccttccgttcctttctccaagatgtttagaatggcgtgaaggcatgtccgagggcaacctaacactcctggatcttgtaggtttgtagtactgacaggttttttcaattcaaagcccaacaggtagagagcaagattgggtggattgcattccagagaggtaatgagaagattcaagatgtggattcttgtttcatgacgaattgcaactaatttcttttcaagttctgatccctcttccagacgtacaaattcttctgcatcttcacaatccaaacactccacaaatccagccattagtttctgacttatactctggtcatgtgtgaaatctccaaccaactttatctgaatattagagttgcaagagatacaacagaggatcttggcactttcaaaagccaattctggattagtattgccatgatataggtatctggcaatgtttaccacattatctgccttcttagttctgggattaattccctgcaaaagctgttctaaaggacagactattagagccagttgactctctcttagaaggtccataaaaagattttccttttgcagagtaagattgagaagtgcaaggcaatgctgtactgctttctccaggtgttttttcccaggaaagggggcataggtgtcaagctgcttaactccttcttccagtaaactgagagcaagctccaacattggtgactcattcagcagatgatacatcagactaaatccaggtggcttataggctatgatttcttctccttgtagttccacaaactggtctacaaaatcttcaagctgaggctcataatctctgagcaatttataaaacacctccaaaaccacctcagcaacttcccacttttcagctgctctccggtaagctcttgtacggaatcgtagaaacacagagtctctaaggaactgcaaataagggtcaaagccagggggccgcagtccagcacccaaattagaaggaaatgagctctccaccagagtactaataagctggcaaaaggcccgagtcaatgggtattcttcacaccgggattctatttcatttagttcaacctcaataccaatagcttgcctttggcttggaatcctcacggtctgcagtatctgagtgtattccaatgactgccagagggaagcagcaatttcaggagattttccaaaagctgcgagtgtcttcagtagctcagcttttaggacagggggaatactgcattggaggagtcccagaatcaccacaacaggggtccactgagggtgttcacagagggccaagcgagcattttcactccaagtaatgatggtagacgtgagctgcaaaaaagcaatcaatccatcttgctccttctgggtgatgccacgggaaggaaggtgacggtactggacactatctgcacttggaagatccttccgaaggtgttcgtggtaaagcatcaaggagtgaaagaaatgttcctaaggaaacaggactgccacctgctccctgaatattttcaacatgactactaccattgactttgagcaggctgaaacagtagtgggcacactgaggcccattggccaatccctggagcatcttcaaataaggaatataaatagttggaggcaacaggtcacccatttgcctaacaaactttgacaagacaacctggcgttgagggggccgctgatgagccacccctagataagagcccatgatagtcggagtctgaagaggctctgtgggacaccaatattctagagcaagctccagatgaaaagggttctttttatatagctcgccaatcaaaagcattaagtgttccaggtcccttctaagtgaaatggggggttcattacccatctgcatactcatgtgaatcattcgagcatcttcatctgcccgattcctcagctgtttcaccttcattggcataagtgcaaggaaatctgtgatgagattatggactctgcgaatataaaattcttcctgataaaagtattctgataccactacagattccatgaggaacaggaaaacgttgtcagcaattgcgagttctgccattgcttcatctgcctctgtgaattctgccagagctgtcacatcaggtagctgggatattcccctcaatgccagcgcccaggcaagtctaacagtggcttggagcccaggcagtttccaaagctgtgagtcctgaagacgagagtgaattgttgcaatgtactgtttttctgtcaacagtggaagttgatgaatcatatcatctcgttcctctgtgctttgctctataaaactgatatcaaaacagtatagaagcgccataagaagagccagattcactgcatccagtgagccattagcctcaactgtcactctttccaaatgtccaatgaggaggagagtgtcttctttgcctaaaggtgactggcaagcccaggcaaaaaggctttctgcaagagactgcctgcactccttaatgagatcagaaacctctttgcgatgtttttcactgcccaaacctctctctcgctgtagtttctcaaactcattattcacatcaatctgtgacaccagcgtaagaactttataagtcaatccttgctccatcagctcatctgtaaagcgtgttgtcatggaagccagctctggactgagttctagggtccatgtctttccccgtctagactgtatcaaggctttcaaggaattcgcaatgcatcgctttccatcccagtacagaagaacagctactaatcctctggtaaggccaggaaaatgtggctgttgatgctctccagcaagaagaagctcaacagctgccaattctccaatatcaaaaaggtcactgagaataaaggcttctttaatgagctgttcaggaagaagtcgagttccctgttgaccctgaatggcgactccctctgtactggctttctgaaccttctcatgctgttgaacattttttggcggatttttgaacaatgagatgaagtcaggtttgtgtttcttcaaaatcttatcaagaaggtgaacagcttcaggttgtcttctccaaagagcatttcccactttatgccaaatgtctttgtaaggaccccatagactagcagccgaatttaccgccaaaggcgtcgccat

SEQ ID NO: 72493 - DNA, 2290 bp, Homo sapiens; identical to SEQ ID NO: 65293
  misc_feature (1)...(2290): n = a,t,c or g

SEQ ID NO: 72494 - DNA, 5221 bp, Homo sapiens
ttttttttttttaaaagaatattgatttattacccaacaaagcagggatttccccagtttttttcaattacacacacacaagcacacacaatagcagaatgaaattacatttttcacatctaaaggtttatacctcaaagaaaataggcatgtgtccaaaagacaattagaaagcaagaaatctttccttttactttgaatatgggaaaatcttttaacagagactctttccgggcaaaccaatgaagatttagggcataggaaaatgcttgtcaccttaaggtttttaaatataactgtattcacccaaatcaaggtttttactaggaagtttttacggtttttatggtattaaaaatccaccttttgggccggggttgcaggggcccacgccattaatcccggcactttgggaggccgaggcgggtggatcacaaggtcaggagttcgagaccagcctggccaatatgctgaaaccccatctctactaaaagtataaaaaattagctgggtgtggtgggacgcgcctgttgtcccagttacttgggaggctgaggcaggagaatcgcttgaacccgggaggcggaggttgcagtaagccgagatcacgccactgcactccagcctgggcaacagagtgagactccatctcaaaaaaacaaacaaacaaacaaacaaaaaaacttttgttttaagtggctggagacctatgtggctagacttactactgtttaaatatgctaaaatggatacataatttattcttcacagctcaaaattcaatgtaaagccaaatattaattttgtccagtagagaaattaaatgtttacaaaaccaaagtatggaacagttgttggcctatgtaaattgaaatgtaattgaccattttattttcaaacatgcttaatcttcacgtgtctttttcacattgatactcattttgcagaaataagatgactggtactaatttagacaataaacaaactacaccaagcacattttagtaaagatattttggtggaacgcaaagtaattaacgatgaaaacatttggtaatatccatttactaatatgttaccaggttcttcaatgtttacatgacttgctcatattagtagaaatgtcattttaaaatattttcacacttcatgcactggagttagtttaagaagggaaggctcttttaaaatgtttataaagaagaaaatacctttttaaagagaaaatgtctaagtgagaggacataaacttatggctcattattttttgacctagttaagaatataaatttcaatggctacttaagaatatacaaaacccaaactgaaagcaattcttcaatttattcaggcaagcaagtcaaaaaaataattttgtcattactggcacagatccaatccactgttcaaagacatgactttggactgtctattttcctataagatttattttttaaaagaagataatttgtttggttctactaattagtataacttagagataaacaaatgattttcccatttaattcttttgcggtgaaagaaaacagtttaaactagattttctaagataatgggtacatcaacattgtaagaaaggccctataggcttaagttctaaaaacattacggttttaaagaaatcaatgcttttccatcactctttacataacactgagaaatttcaaatataaattgtagaaaccagtatatgaaattttaagaaaaatcttactaaaaataattataaaatgcttttagaaatgtaagatgtaaaatataattgactttaaataaaataaaaaaaagcaacccctgcccccacactttaaaaggttattctttaaaaacccttgtcacctaattttattctcagtcaatcttttggttgtattttgcatcatctagtggccaccttgcagcatttcaaagcagttctgctaccatttttgaaccccagtgcttttttccccttgaaataccaataaaattatagcatcaagtttcataaaactttcttttaaaggcccataaaattccatttcctactggagataaggtaatcttttttaataggaagaaatgactagatctgtcataaattattactatacattagacattttcatatcaattttttaaaattaaatataacattgggagaaactaggacttaggctctagagtcatctttaggctctaaaagtaattaaagttactctgcaattaaagctcagggctaccatataagtaacttcttgtgattaacccttcttccactgtacctttgatttgtaatattaagtacattttaacatgagaactgaatgactcatggtcagagtgccaagaactcaagttcaaccaagactgaagaagacttaacttttactaccagctgctattttggaaaggtcattatagtttccattatcaacctatttgtatttaaaagcaggtttccaaaaataactgcttttcgttttagtgaatctccttttattcagttgagccatacttataaacagaatttaacaaaaaaaattcccaagttccctctctttacttttattaagaaggttgagtgaatgtaatacggcgccgccgcctttggaaagcctttaaattccatgtgtttggttccagcatatgagggccattgtagacaaacaaaactgtcatcttttcagaataaggaagattttgcaggagctttggtgttatgaaaaagtattgagatgtattttctttacaggcagtatttacaaccatttcaaacactctccgttcattgattgggtccattccctgattgatttcatcaactactctgaatggacatctatttagctcctgaagtgccatcaagtataacatggtagaaacacttctttcacctccactttgatgatgaggagttaattcatgcagttgagtactacttcgaaatttgactctaattcgaattccatatttatcataatcttcctcattttctgtatggagatcaacttcaccagcacactgcatggaactaaaaaaattgctgaatttttcattaattttttctaccagctcttttaaaggattaagccacctttcttttacctgtgaaatgttttccctgtattgatctagttcaactttctttccctttagttcctcagttaactgttctatttcttcttctctttttgtatattcctgaacaattgtaggattcagtcccgtgaagcaggaagctcttgatctttcttcagttaataaagcatcaatttcatccaatgtgtttggaaggtcttggaaaaccatggggagtgaggagttgtgtccatttggaatggtgggtacttgtgtctggtattcttgaggaagagtctgctctgcacccaggttatcatacttgcctagctcttttcataagttccttgcatttctgcaataatctctgtctattttcatccaattcaatgaaatgttgctctgtaagacggagttgtgaagatgcggccatataatctgattctaatttgttcttctcagagatcactgtagtattttggagaattaaatctactttttgtatatgcaaagaagtacaaatctttattaggtttgttaattcggtaacaagtttcgctttttgaacatttatttctttgattttggtacttgcttttcgctcttcctcttcaagattgcaagtatcctgttccatcagctttaaacttcctagtttggaactgattttttgttccagttgtcttttcttggtttttctctcaagaagctccttcttcttttgtctaagttcattgtctttgtgctccagatgtttgcttgtttcacgtaaggcaatcaaccctgaatccactgcttgcaattttctatgaatttcctttagctgttcttctaagtgtcttctctgctctaggtccacagtgacagtgagaaactgcgctacttttagagatgtgttactagaaataactttgtttgaataaaaagaagttttcaccacatacttttcttctgctgtataaatctgttttaatcgggtttcttgtattacccgttcaattctttctctggtcttttcagttcctacaggaacttcatgaatatgatactgacagcaaaggtaactcattacaggatcaggtgcatcaaataattctctcaaataagagaaaaatccgtattgtttaagttcattcaaagatcttgaaggtgctttgtctgcatatgaactcttgggagcaataacagcatttactcttaattttttattgtcacgaacctctttgaggaaaacctccatatcttcttgactttcaaatacaaaggctcttaagtcatttgatggaatatgattttcaatatatttggcatttttattatctttcatattgatcgtgagcattatgggctcacagactctttgtttaaatttgtctctgttatttcttagccataaaacagcatcatacgtgtcacggaatctctgtcttagcttatcttccttctgattcataagattgtcaaaacgtacaatatgatcgtccacactctttttctccttctctagagtttccctctctcttcgcttatcaattatttcgccttcacataatgccttttcatcctgaatccgtctcagatcatttgtaatggcatcaatctggggctgaagattctcgcagttttccgtggtctttagttcattttgcaaatcctctatcattttgcgggtattacctattctcctctgtcggtcaagctcttcattttgctttactattaaagcctgctgaagttcctcaatatgtttatctttcctttctataacatcttgcttctgtttgcatttttgagatgcctccttaatatctgttgccttttctttgattcgagcctccaaattgtgacgctcgttttccatttcttcaattcgacatgttataggaatctgcccttctttaagttttctgacctcttccttcactcggtcacgaactagttttacttcttcatattcctgacgaacattttcatattccacccatggcctttttgcttcaagcatctcaattaaatctaaatgtcgcttccgttcatagaacctctccacatcttgtttatatctttcattcctctgaaccattttctgtagatactcagttttctctttgcatgaggtctcgagctgtttttctttctc

SEQ ID NO: 72495 - DNA, 309 bp, Homo sapiens; identical to SEQ ID NO: 65295

SEQ ID NO: 72496 - DNA, 3542 bp, Homo sapiens; identical to SEQ ID NO: 65297

SEQ ID NO: 72497 - DNA, 1750 bp, Homo sapiens
  misc_feature (1)...(1750): n = a,t,c or g
aaagatcgaaccccaattctattctattctgacataatgctcataatgctcctaaaggaaaaaagtaaaattgtttattttcctcccaagcaaaacaaaatgaacaagttcaatcaaaaacatcccaatggaaaaaaatcacactaagaataaaacacttacagaacggcaagaaaactgggttaacatataaatttgtgtctgttgaaaccagagtacatgctagaaaacattaacacagatacgacagagtgtggtttttttttagaaatgggtaatttctctctccagtatcctttcacttgtatgagatatttctcctctcctgttttcacaaaccaagaaatccccaggtaggccaatcccagaggtgccatttagcagtatgcagcagcccagtttcagcataacaaaacatgccttggtagtggctctctcatgcaaataaaagaaagcttaagaaattcttgttgtaggtggattaggcaaggctgccattcagctggtataagctaaaagtaaaaaatcaaaacgctcaagaaaacggacacaattttggaatgattaaagatgtctttataaagtttttttcaagacttcattctaaatacacagaataaaaaatggtgtcagctcacttgtaagacaccaaccagattttccttatactgtctcaaaatttaaagatcaatttccccagagggtgtgcaatgcatcataaaatggcccttttttgaggatgggagaggaagggttgggcaggatggaatattaaattgtaacatgataaacatgcaagactgttatccaatctagataatttatatacattttgatgacttaggaaaacaaagcaatcatttgtgacaagcctaaaaagcttgacatatttaacatacttaggaactttttttgtgcggtgggaattctctaattgtatcatgtgggccttttgaaagtaacaaacagaaggccagtctgttgcaagtttgctgctgaacatcacattccaccctaagaaaacacaaggtggattgcatcgagggtggataccttaccttagcacagaaggaaaaagtatgtcagtgcaaagtatggactaaactgctttcaggaaaaaagttgtaaaaattgatacaggttggaaaagggaattttccttcccggcttggagtcctcccaatttaaggcagaacccatccactccaatttctgcagtttaaaactttctctacttatttagttttctcctctgagttcaaccgctgctggattcgtttggcataactttgtgccatggagttaatgatagataggatgaagtaacacaccatgacaacgaccaacttttcaaacatccaggacaaccagttttctccctgtggtgtgcccatttcgcttttgtggtgaagcttctgccgttgagcctccaggtactcctgaaatggcttctgcagagatggacctatgccggggacagcaccaatgaaagccaccatttgctccactatgtgcttgctgaatgttattataacaaaaattttctggatatgcatttttattattgcttttccaattaggttgcaccaagaggtccaaccaatcaacaancaagngttttgaccccatgaaatgtgtccacacgttattccagccagatcaaataaaggatttggcaattgaagcacaggccaaaattccaaaaaatccaactttctgtactagtttttgaactgccagtttggcccgg

SEQ ID NO: 72498 - DNA, 2487 bp, Homo sapiens; identical to SEQ ID NO: 65298
  misc_feature (1)...(2487): n = a,t,c or g

SEQ ID NO: 72499 - DNA, 1333 bp, Homo sapiens
aagcttggcacgagggtcttgtcagcagcccggccattggagcatatctttctgccagttacggagacagcctcgttgtgctggtggccacagtggtggctcttctggacatctgcttcatcttagtggctgttccagaatctctgcctgagaaaatgagaccggtttcctggggagctcagatttcttggaaacaagcagacccttttgcgtcgttgaagaaagttggaaaagattctactgtcttactaaatctgcatcaccgtgtgtctttcataccttcctgaagctgggacagtattcaagttttttttctctatctcagggcaggtcatagggtttgggatctgttaaaattgcagcattcatagctatggtaggaattctgtctattgtggctcagacggcctttcttagcatcttgatgagatcattaggaaataagaatactgtcctccttggcttgggcttccagatgctccagttagcctggtacggttttggatcacaggcctggatgatgtgggcagcagggaccgtggctgccatgtccagcatcacgtttccggcaatcagtgccctcgtctctcggaatgcagagtcagatcagcaaggagttgcccaggggatcataactggaataagaggactatgcaatggcctggggccagcactgtatggcttcatattctacatgttccatgtggaactgactgagttgggcccgaaattgaattctaacaacgttcccctgcagggagctgtcatcccaggcccgccgtttttatttggggcatgtatagtccttatgtcttttctggctgccttattcattcctgaatacagtaaagccagtggagttcaaaaacacagtaacagcagcagcggcagcctgaccaacaccccagaacggggcagtgatgaggacattgagccactactgcaagacagcagcatctgggagctctcttcatttgaggagcctgggaatcagtgcactgagctgtaaactcggcagaaagtgggattctgcatacgccatctctgagagccatggagggagccacacccctggtgacttcatggtgctggatgggagacgctagcggcatccttcagggccaagtttgataaataccaccgccatcattctgctcatcctcctcctgtttttttttttctcttacattcttttttttttcccggttaatccttaaaaccagaaaaaaattggaaaaacttctttgcaaaaagggggcaactcccagggggaacctcaaataaaaaaagcattcttttgtgaaaaaaggagggcttccttgaaaggacaaaa

SEQ ID NO: 72500 - DNA, 2127 bp, Homo sapiens; identical to SEQ ID NO: 65300

SEQ ID NO: 72501 - DNA, 1859 bp, Homo sapiens
aagtctcatggtgattgatcttcgtctgcgtggggtgtatggttgttaatctttctctctggcagttagggcacacacgaattcctagcatccccactccagcgaaacacttgtgcacagattacaaacaccaatatgattttattcaaacacaggcaagaacaatgaccttcagagctgggtaaaaataataagttaaaagcatggttagaattttagacaatcagataaaaagtttgaaggaagtgatttccccttcctctcctaattgattaattcaacacagcataaaaataatttgtatctataaaatatccttgttcccacacaaatgaactggaggtggccctaggatttccttgactatggcacaatgcacacaatctacatgtccctcctccccaacttttaaggcaaaaatggtcctgcatcttcagggcagagggtgggctcatgccagcagtcagctgtgtcaaggacactggggggcgtttctccaccgaaagatgcctgcttgggtcccacttgggcgcggattccattttatttctagcctttgcctcaccacagaaaaaaggagctgaaattctggcaagtggacactggactggtttggggcactcctccagtctgggctgaccgggtctcttgaggcatccgtggcctaggcaagtggtggtttcaggactgtgacagccctgaaggagccagacctggtgcctcctgcaagctggacaaagctgacggagggtgggcaggtgtctccttccccccagcccctcaggctgcgtcagtctttctgggagtactgagaagaaaatatccgtgcaatcctgagagtttcttcctcaggcaggttgagggggagcgagttaggtctggggcgacaaggcctttgggagagagctcccctggtggcttcgctcttgtcctgatctgttgtggctgctggtggcaaagttgctgagagtgaaagcatccgcagggaagcctccaactgctggggaggcaaaaaaaagttgggcaccacaatgggccctgggagcaggaggctctgctttgtggacgtctctgatccagttgtcacctgcctctgcctgatgtcagaggagtcgatgggtggtcccttatggttttcccttctgctctgggaggctagatttagcggcaacttcttgaagctatcagcagagtcaccgagctcactggtggcagcttcattctcagctggggcctctgacttgggctccttgttctgatctgtctgtggtgagctccatccaacaaacgtgctgctctgttgagctcctgagagtgttgggcatgggatgggctgagggttggctgaggcagactcgccaccaaccctggccttagaggcctcacactcacaagcaacaagactttggctaggagaaccctgcctaggcaggtgggggttgacagccctttctgggctggagagaaagctacttttgaccataagctcctctctgcagaaaggccctggagaaggacaagaggggccttccctctgcacctcgtcaggctgagggctgatgacctcacttgtgtctgatatgacactagaccaagggctagttttgtctgtcaccgtggtgatctcatttaaggtcctgggctcaatgatgtcttcttcatagtcctcatcactgtaggctggcgcctgcctcagtgtcttcactgctctgcatccttgtaatgggtactgcatgcctcagggactcatggagcattcttcctccatttgaagtctcttcgagaggagggggtgatggggaatctgtgcctttatctggagctcttaccaatggctcatctggcattgtgcatcgttc

SEQ ID NO: 72502 - DNA, 2578 bp, Homo sapiens; identical to SEQ ID NO: 65301

SEQ ID NO: 72503 - DNA, 1380 bp, Homo sapiens; identical to SEQ ID NO: 65302

SEQ ID NO: 72504 - DNA, 715 bp, Homo sapiens; identical to SEQ ID NO: 65303

SEQ ID NO: 72505 - DNA, 6388 bp, Homo sapiens; identical to SEQ ID NO: 65304

SEQ ID NO: 72506 - DNA, 1862 bp, Homo sapiens; identical to SEQ ID NO: 65305

SEQ ID NO: 72507 - DNA, 1832 bp, Homo sapiens
attcatacaggagagaacccctatgaatgccatgaatgtgggaaagccttcagtcggaaataccagcttatttcacaccagagaactcatgcaggagagaagccttatgaatgcaccgactgtggaaaggcttttggtttaaagtcacagcttattatacaccagagaactcatacaggggagaaaccatttgaatgtagtgagtgtcagaaagcctttaatacaaagtcaaacctgattgtacatcagagaactcatacaggagagaaaccctatagttgtaatgaatgtggaaaagcctttacgttcaaatcacagctcattgtacataaaggagtgcacactggagtaaaaccctatggatgcagtcaatgtgcaaaaacctttagtttgaagtcccagctcattgtacatcagagaagtcacacaggagtaaaaccatatggatgcagtgagtgtgggaaagccttcaggagcaagtcataccttattatacatatgagaactcatacaggagagaaaccacatgagtgcagggaatgcgggaaatcctttagtttcaattcacaactcattgtgcatcagagaattcacacaggagaaaatccctatgaatgcagtgaatgtgggaaagcctttaataggaaagaccagctcatttcacatcagcgaactcatgcaggggaaaagccttatgggtgcagtgaatgtgggaaagcttttagcagcaagtcatacctaattatacacatgagaactcattcaggtgaaaaaccatatgaatgtaatgaatgtgggaaagccttcatttggaaatcactactcattgtacatgagcgaactcatgcaggggtcaacccttattaaatgcagtcaatgtgagaaatccttcagtggggaaattacgccttctttgttacaccagagaatgcacacaacagagaaaccatatgaatgcagtgagtgtggaaaagccttcattaggaattctcaactcattgtacatcaaagaactcattcaggagagaaaccctatgggtgcaatgaatgtgggaaaaccttctctcaaaaatcaattctcagtgcacatcagagaacacatacaggagagaagccttgtaagtgcactgaatgtgggaaagccttttgttggaagtcacagctcattatgcatcagagaactcatgtagatgacaaacattgataattttacgaaactctgaaaagtggattcacaagagatagaaacaatcatatataaagagaaactctgtaagtggaatcatcttgtcatcttccagaaaactcatactgaatagaaactttatgaatgcacagcatatggaaaggcatccacagaaagctgttctttacatgcaaaaagatagtagacaatacacaggaaaactgaatttagtaaccactctgaaaatttttagcagcaagtcatacctttttttaaaaaagttcatacaggtgaggaaccatgttaaacgttgtaaagtcattttactaacataagattcacaaagaggaaacttcatgaaccagatgaatatagaatagacttctttgaaattcatagtttacagaattttaatgagagaaattattgagctaatgaatggcagaattaacaaaattacaaacattttatgtatcggaagcatataccttggagggaccatgctatgagggaaagtgtaaatctagaaatgagaaacccctagggaaaaaatatatataggagtgaacatcttatgaatgtaccaaataaaccacagctggactgttaacctcaccttagaagcttcattctaaaaaaaaaaaaa

SEQ ID NO: 72508 - DNA, 2072 bp, Homo sapiens; identical to SEQ ID NO: 65306

SEQ ID NO: 72509 - DNA, 2199 bp, Homo sapiens; identical to SEQ ID NO: 65307
  misc_feature (1)...(2199): n = a,t,c or g

SEQ ID NO: 72510 - DNA, 6926 bp, Homo sapiens; identical to SEQ ID NO: 65308

SEQ ID NO: 72511 - DNA, 3786 bp, Homo sapiens; identical to SEQ ID NO: 65309

SEQ ID NO: 72512 - DNA, 2783 bp, Homo sapiens
atctcagagtggcggaattcgccgggaccagccgctcggggccgggctgatacagccgcttcaccgtgcccctgcccgcgaccatggcctcctccgaggtggcgcggcacctgctctttcagtctcacatggcaacgaaaacaacttgtatgtcttcacaaggatcagatgatgaacagataaaaagagaaaacattcgttcgttgactatgtctggccatgttggttttgagagtttgcctgatcagctggtgaacagatccattcagcaagggttctgctttaatattctctgtgtgggggaaactggaattggaaaatcaacactgattgacacattgtttaatactaattttgaagactatgaatcctcacatttttgcccaaatgttaaacttaaagctcagacatatgaactccaggaaagtaatgttcaattgaaattgaccattgtgaatacagtgggatttggtgaccaaataaataaagaagagagctaccaaccaatagttgactacatagatgctcagtttgaggcctatctccaagaagaactgaagattaagcgttctctctttacctaccatgattctcgcatccatgtgtgtctctactttatttcaccgacaggccactctctgaagacacttgatctcttaaccatgaagaaccttgacagcaaggtttacattataccagtgattgccaaagcagatacggtttctaaaactgaattacagaagtttaagatcaagctcatgagtgaattggtcagcaatggcgtccagatataccagttcccaacggatgatgacactattgctaaggtcaacgctgcaatgaatggacagttgccgtttgctgttgtgggaagtatggatgaggtaaaagtcggaaacaagatggtcaaagctcgccagtacccttggggtgttgtacaagtggaaaatgaaaaccactgtgactttgtaaagctgcgggaaatgctcatttgtacaaatatggaggacctgcgagagcagacccataccaggcactatgagctttacaggcgctgcaaactggaggaaatgggctttacagatgtgggcccagaaaacaagccagtcagtgttcaagagacctatgaagccaaaagacatgagttccatggtgaacgtcagaggaaggaagaagaaatgaaacagatgtttgtgcagcgagtaaaggagaaagaagccatattgaaagaagctgagagagagctacaggccaaatttgagcaccttaagagacttcaccaagaagagagaatgaagcttgaagaaaagagaagacttttggaagaagaaataattgctttctctaaaaagaaagctacctccgagatatttcacagccagtcctttctggcaacaggcagcaacctgaggaaggacaaggaccgtaagaactcccaattttttgtaaaacagaaggttccagagcacagaaggtcatcatcacaagcaaactttattaaaaaaaaactagaagtgtgctttgattttgctgttatttgttttatcacttctatatttggtgaacagccacagttactgatatttatggaaaagtactttcaagtacaaggtcaatacataagccagagtgaatgatactacaagttgagcatctctaattcaaaaatctgaaatccagaagcttcaaaatctgaatctttttgagcactgacttgaccccacaagtggaaaattccccacccgacacctttgctttctgatggttcagtttaaacagattttgtttcttgcacaaaatttttgtataaattactttcaggctatatgtataaggtggatgtgaaacatgaattatgtaattagagtcgggtcccgttgtgtatatgcagatattccaaacctgaaatccaaaacacttctggtccctagcattttggataagggatactcagcttgtacctatatattcatatatattcactgttgttagaaatgtttaagttgctgttctgtgatgaatctaaatcttttctcttgctaccaagctattgtcactgcagtgcattataccaaagagcgaagtcagtgccactgaaaatacagaacccattaatatcgtggctatctgattacatttatattccaagatgaaccttttttatatatgctaaaaattttggggaatatgttttgggatgtattatggagctaaaactctaacctcttaatagttttatagaacttaaaaattttttatacaattacccaattggtgatatgatcttaagcttttgtgtcagattatttaatatgatgacttcatgctttattatgccttattatggctgacgtattactgtggtgaaacaaaatatctttaaaagttaaaacatccagatatataagctattttttcctaaggataaagtacctttgagcatgagtgtatcacagctttcattaggaaaacttttcattacatacttgtttaaactctgtcttccagggtaaaaataataaggttgaatcattttattaaaaatactttttaagaaaataactatgaacatctgaatattaaagatataaaaatgcacataattcatatttcaggtggtatttgcattcagtgccttactggtattctcagaacattttaatgatttctaacatttcttaacagtcatagatatatacattttcattttttgtacttgaatattctaaataaaactgacatttactcttgacaaataaaacatatatttactaaaaaaaaaa

SEQ ID NO: 72513 - DNA, 838 bp, Homo sapiens; identical to SEQ ID NO: 65311
  misc_feature (1)...(838): n = a,t,c or g

SEQ ID NO: 72514 - DNA, 1345 bp, Homo sapiens; identical to SEQ ID NO: 65312

SEQ ID NO: 72515 - DNA, 790 bp, Homo sapiens; identical to SEQ ID NO: 65313

SEQ ID NO: 72516 - DNA, 6730 bp, Homo sapiens; identical to SEQ ID NO: 65314

SEQ ID NO: 72517 - DNA, 1902 bp, Homo sapiens; identical to SEQ ID NO: 65315

SEQ ID NO: 72518 - DNA, 2416 bp, Homo sapiens; identical to SEQ ID NO: 65316

SEQ ID NO: 72519 - DNA, 4730 bp, Homo sapiens; identical to SEQ ID NO: 65317

SEQ ID NO: 72520 - DNA, 5113 bp, Homo sapiens; identical to SEQ ID NO: 65318

SEQ ID NO: 72521 - DNA, 5195 bp, Homo sapiens
gcctcgcgggcctcggcccggtgcgagcggctccgcgatgtggctgagcccggaggaggtgctggtggccaatgcgctgtgggtgacggagcgggccaaccccttcttcgtgctgcggcgacgccggggccacggcaggggcggcggccttacgggtcttctcgtgggcaccctggacgtggtgctggactccagtgcccgcgtggccccttaccgcatcctgcaccagacccaggactcccaggtctactggacagtggcgtgtggttcttcccgcaaagagatcacaaaacactgggaatggctggaaaataacttgctccagacactgtccatcttcgacagtgaggaagatatcaccaccttcgtcaagggcaagatacacggaatcatcgcagaagagaacaagaacctgcagccccagggagacgaggaccccgggaagttcaaggaggctgagctgaagatgcggaagcagtttgggatgcctgagggcgagaagctggtgaattactactcctgcagctactggaagggccgcgtgccccggcagggctggctgtacctgacggtcaaccacctgtgcttctactccttcctgctggggaaggaagtgagcctcgtggtgcagtgggtggacataacgcgtctggagaagaacgccaccctgctcttccccgagagcatccgtgtggacacccgcgaccaggagctcttcttctccatgttcctcaacatcggcgagaccttcaagctcatggagcagttggccaacctggccatgcggcagctgctggacagcgagggcttcctggaggacaaggccctgcctaggcccatccggccacacaggaacatctcagccctgaagcgagacctggacgcccgagccaagaatgagtgctaccgagccacgttccggctgcccagggatgagcggctagacggccacacaagctgcaccctgtggacgccgttcaacaagctgcacatccctggccagatgttcatctccaacaactacatctgcttcgccagcaaggaggaggacgcttgccacctcatcatacccctgagggaggtgaccattgtcgaaaaagctgacagctccagcgtgctgcccagccccctgtccatcagcaccaaaagcaaaatgacattcctgtttgccaacctgaaagaccgtgatttcttggtgcagaggatctctgacttcctccagaaaacaccatccaagcagccaggcagtatcgggagcaggaaagccagtgttgtggaccctagcacagagtcttccccagctcctcaggaggggtcggagcagcccgccagcccagcctctcccctcagcagccgccagagcttctgtgcgcaggaggcgccaaccgcatcccagggcctgctgaagctcttccagaaaaactcgcccatggaggaccttggagccaagggggccaaggagaagatgaaagaggagtcatggcacatccacttcttcgagtacgggcgtggcgtgtgcatgtaccgcacagccaagacgcgggcactggtcctgaagggtatccctgagagcctccggggagagctgtggctcctcttctccggggcctggaatgagatggtgactcaccccgggtactatgctgagctggtggagaagtccaccgggaagtacagcctggccacagaggagatcgagcgagacctgcaccgctccatgcccgagcaccctgccttccagaacgagctggggattgctgccctccggcgggtgctgactgcctatgccttccgaaaccccaccatcggctactgccaggcaatgaacatcgtgacctcggtgctcctgctctatggcagtgaggaggaggccttctggctcctggtggccctgtgcgagcgcatgctgcccgactactacaacaccagggtggtgggagccctggtggaccaaggcatcttcgaagagctcacgagagacttcctgccgcagctctcggagaagatgcaggacctgggggtgatctccagcatctcgctgtcctggttcctgaccctcttcctcagcgtcatgcccttcgagagcgccgtggtcatcgtcgactgctttttctatgagggcatcaaggtgatcctgcaggtggccctggccgtcctggacgccaacatggagcacctgctgggctgcagcgacgagggcgaggccatgaccatgctgggcagatacctggataatgtggtcaacaagcagagtgtctctcctcctatcccgcacctccgtgccttgctgagcagcagcgatgacccccctgcagaggtggacatctttgagctcctgaaagtgtcctatgagaaattcagcagcctgagggccgaagacattgagcagatgcggtttaaacagaggctgaaagtgatccagtccttggaggacacggccaagaggagtgtggtccgagctatacctgtggacattggtttctccattgaagagctggaggacctttacatggtgtttaaggccaagcacctggctagccagtactgggggtgcagccgcacaatggccggccgtcgggaccccagcctgccctacctggagcagtaccggattgatgccagccagttccgggaactctttgccagcctgacaccctgggcctgtggctcccacacacctctgctggcagggcgcatgttcaggctcctggacgaaaacaaggactcgctgatcaacttcaaggagttcgtgacagggatgagcgggatgtaccacggggacctgacagagaagctcaaggtgctctacaagctacaccttcccccagctctgagcccagagggaagccgagttcagccctggaggcgacccatttattttcacagagggacagctcctcagaagcatctcctctggcctcagatctggatcttttcctgccctgggaggctcaagaagcactaccacaggaagagcaagaaggaagtggaagtgaggagagaggagaggagaaggggaccagctctccggactatcggcactaccttcgaatgtgggccaaggagaaagaggctcagaaggagacgattaaggatcttcccaagatgaaccaggagcagttcattgagctgtgcaagacgctttacaacatgttcagtgaagaccccatggagcaggacctgtaccacgccatcgccaccgtggccagcctcctgctccgcatcggagaggtggggaagaagttctcagcccgcacaggcaggaagcccagggactgtgccactgaggaggacgagccaccagcacccgaactgcatcaggacgcagccagggagcttcagcccccagctgcaggagacccccaagccaaagcaggcggagacacacacctcggaaaagccccacaggagagccaggtggtggtggaggggggcagcggcgagggacagggctcaccctcccagctgctgtctgacgatgaaaccaaagacgacatgtccatgtcctcctactcggtggtcagcacgggctccctgcaatgtgaagaccttgcagacgacacggtgctggtgggcggggaggcctgcagccccacagcgcgcatcggcggcaccgtcgacaccgactggtgcatctcctttgagcagatcctggcctccatcctgacggagtccgtgctggtgaacttctttgagaagagagtggacattggactcaagatcaaggaccaaaagaaagtggagagacagttcagcaccgccagtgaccatgagcagcctggagtttccggctgatgcctgcagctgtgaggcctggcccaaggtgtcatcagtggggctggcctcatctcctcctgcctttcctcccttatcagtttctctttaaaggtgtgcccctcctgctctcccaggagcagtgagttgtgagtggaaagaaggctggtgcagacccagctgccttagacagattccctgggcctgcatctcctggcgccggctgcttctgggcccaggaagaggctgtggctcccaccttccttacacctggtgggagcccgcctcgcaccagctgcacctgcctagcattagaggctctcagatctgcccttgcttgcctcatacctctgtgctccacactgcggccaggccagctgagtccctccatccgtggatgctttcctgcagctatgtggtatgggggtcattcctgcctcttggcaccaggttggggggcatgtgcttgttgggcaccaaagtgatggaaccctcaggtgctctccgggagcctgaacctcctgactgaggaacatgggcagaacatgtttattgcacagagtgggcgctgcgcacaggcgtggctgtacacgtgctctcagctcatcatcctttccagtaactttaaaaaaacatccctcaggtcctgatatatttccttggattcatttcacttggctagaaattacactgtgctcaatgccttaataaatccctgaaagaaataaaaaccactgtgtgcaatgccttgctgtggcccccaaccactgcttaggcctcccaacttctccccaggccaagtatggggccctggctgtgttctggaagttcaagacacttagtcctccacagtgggtggaagagtgcaaggtctgccaggtcagatggagacggcagaaccttgctggtgcaagctgggcaggtcctgaccaacctgcatcaggggatgcccctgagcttccacaggtctttcatggggcaggggttgtgggtcctggtgaaggaagtgcatccctcaggcccctgggctgtagcaaagctgtctgccccctgggggttcaaagaacccagactgtggagccaaaggtgaccgcagggggccccagggctggagccacaaggataccctcactttgcatgaggagctgaaactgaccagtgtccagtgttagcccccacatggggctgctcttgcttctactaaaagatacagcagttacccccttatccacaggggatacagtggatatctaaaaccagacccccagtggatgtctaaaaccacagataataacaaaccttatacatactgttttttcctatgcatacatacctgtgattaagtttatgaattaggcaccttaagagattgacaacaataactaataataaaatgtaacggttatactgtaaaaaaaaaa

SEQ ID NO: 72522 - DNA, 2892 bp, Homo sapiens; identical to SEQ ID NO: 65320

SEQ ID NO: 72523 - DNA, 1068 bp, Homo sapiens; identical to SEQ ID NO: 65321

SEQ ID NO: 72524 - DNA, 2388 bp, Homo sapiens
  misc_feature (1)...(2388): n = a,t,c or g
cgactttttttttttcacacttgaatgctgttactatttattgacatcaaaacgaaacaagctgagactaaaagttgctatttaacaggaatagacactggtgcagtttccttcctggagagggtatgcactcagatcatgagacctaagatcaaacacactggattgtcaaagagtcaaacaaggactacaattttaacctccttaatagaaaagatgctgatgacaaaacacgaagtttaaaaatattctttacgctaagctcatataagcaaacaaaaaactaaaactaatcctaaaactttaggacactggatacagaagtaacataactatttaaatttttgtatcaacgaaagtgtgttctatccttcactgtacctgtactacaaggacatgcttgttgcttctacactacccaatgtcaacacttatcatcaacaatacaatagaattagatcggaacaaggcttcaaagcgactctgctccacccaaattcagaaaattcaattcaggatgaacaacagcttttgattttagaaccagctcttacttttctctcgtgtcatatgtgatgaagtcctcacttgacaattccccctgcaaattgcaatgcatgtccttgccgtcacctttttctgacactttaaaattaatttgtagaaattgcaaaagcaatgaaattgtacttccaattctgaacctctgatcagattcctgctttgacacaagacttactcctctgcagtgtaccccaccagcacagcggctccctttctctctattctttgccctgaaggcacctctggattgcttaacgtgtgctctttggctgcctagacagtcaggacacctaaggccatctggacttatcactcctctcctccttcttttctatggctaataccactttcctgcttcctttctgctgctgaatctccagacttggtgctgtcatcagggggacagagtcgatttcggcttcgagctcctggttggtaaagctgcatcgctggacgatccttgtttcttattcgatctctcttgaccacttcttctttcttttcagttttttctgagctgcctattgattctgtactttcagccttctttcctttatcccgaagtgtgtctttctcttttttcatttcttcttcttttctcttaaaagtcttctctttctcatagcgctccttctgcctacggcgctcttcttcttgccgcttcagcctctctctttctcgaagtatgcgctcctgatctcgttcatattcccgttccctctccctatagtctctgccgctctcatcttcaggtctctttggtttttcatctttaagttcgctatcagaacgcttgggcaatgtacaactttgcccactggctctttcatcactgagattctctttgtccaatttcttggctttttctcttttgtccaattctttttcatctcctttttctggcttcttgagcagcttaatctttggttcatcctttaatttgtccctttctggaattctgtctatcttctttagcttttctatatctttcctttttcgtttctcttcttctttccatttcctcctctcttcttctctttgtctttttctttctatttctctcctcctcctttcttctctcttttcttctctcattctctgcttgtttttcaggaagctcaaaagtggggttgtctttttagctattaattctctattttttgcttctatttcctctagcagtgtctctggagtagatgtcattttctcattatctgtggcataactttccaaaaactttctatattctggatcatcatcgatagtcccgactttggtatctcttttcttagtcttcttttttgcagctttttgaaaaggtgcaaattctactatagcgggatattcctgacctttattgtcaaggaatacataaccatcaaagcgatccctgaacaaaataatgtcctcttggtttttaaagttgatgtatgctctggcatacatatgaggatacaaactcgtatcattagaaaaaaactcaaaataatcatgctcaggcataggttgaagatgttcctgaagctgctccttggtcaaagtgggaggtaatcttcgaattaccaccttgctcagcgcttctttcttctccttgttgcgatcctgcttatcttcccccttggagctgtcccccgaggtcccaccaccgctgcccgtggccccggcgggggttaacagggttactcgcttctccttaggcctgtgctccttctcttccttcatggctacgtcccccgctgaagcggcttggccggaacggggttaccccgggcacaaacgacgaaatcgtcgacccggtnnaacggcccagtactnnngaggtca

SEQ ID NO: 72525 - DNA, 3239 bp, Homo sapiens; identical to SEQ ID NO: 65323

SEQ ID NO: 72526 - DNA, 1539 bp, Homo sapiens
ttttttttttttgaaaataccacattaaagatatatttatatacagaaaatggcagcaatgccaataaaattttataatttaaaaaagttacttgttaaaggcagatttcataagttgtgtttacaatcatccatttaatcatctccaaaaaaaggatgaatttattattttaaactaacattctgtaagttaaagagaataatcaagttgtctcatggactggaaggtgacttattaattccctttcatttccaaacctcatcaagcagtcactacatttatgaggcaagtcagctgaatgcttgaaatctagatgaattttaagatcttcaatttgtcctgttgaatattcccaatattgacataaataaatcccttcagataaatgtgaatttaaatgcttggcaatattctagcatacttgaaaagcctttcccacagtcatcacaaacatgaggaaaaatttttgtatgttcaatagcaacatgcctgttaacatttgtgtgaagtctactccgaaaaccacatacttgacatacaaagaagtttttacatttgtcaaaggtaattttgcttaagaggctatactgtccatgttcaccattgttatacttatcacttaactctattaatttacatgcatgctcatttaccacatggctatgcaagtcttctggatcattagtttcatgttcacagaactgacacaagtactgttcatcacagctgtgctcctggaaatgtaggtagagttcactgcttgaggagaactgtacatcacactgttcacaccaatagaggtgatcactaaaatgggtgtctgcaatgtgctggctgaggttctcaaaaattactgtcttataatcacagtatttacaaatgtagggatcctcttcatgcagtttggcatgttctatcagaagcatattggtagagaaactttccttgcatactcgacacacatttgaatcagtacgtttatgcttcaggatcatatgctgctttaagtcagaaaaatatttgctgttaaactcacaaagttcacatttatagaggccactgctattagctctcagtaaaggccatttctgctgggcagtcacattcaaagcttggctcttgtcaagaattttacaaagtttagctggcggttcttcatcagtttggtcttggagactctcagaggaattgttttctgtctctatatcataatcctcagaaatcgcatgcacttctacagcaattggaacatcttcagcagtgtgaacttctataggactctcctcttgggtttgctggttgactgattcaggtgagtcacactcttcatcacaaattacaatatcagcagatttttctgtagaaaaggcagtgtggtctagaattctaagtacaggactgggaaccaggtagttctgatttctgtttctggccttgattccatctgcaaattttggcaagtcatttgacaacaaagatgatgattctgataccgagacgtcaaatgacttgccaaaatattttaaatctggctgtct

SEQ ID NO: 72527 - DNA, 4936 bp, Homo sapiens; identical to SEQ ID NO: 65324

SEQ ID NO: 72528 - DNA, 2290 bp, Homo sapiens; identical to SEQ ID NO: 65325

SEQ ID NO: 72529 - DNA, 3109 bp, Homo sapiens; identical to SEQ ID NO: 65326

SEQ ID NO: 72530 - DNA, 2899 bp, Homo sapiens; identical to SEQ ID NO: 65327

SEQ ID NO: 72531 - DNA, 2461 bp, Homo sapiens; identical to SEQ ID NO: 65328

SEQ ID NO: 72532 - DNA, 5925 bp, Homo sapiens; identical to SEQ ID NO: 65329

SEQ ID NO: 72533 - DNA, 1620 bp, Homo sapiens; identical to SEQ ID NO: 65330

SEQ ID NO: 72534 - DNA, 4487 bp, Homo sapiens; identical to SEQ ID NO: 65331

SEQ ID NO: 72535 - DNA, 1969 bp, Homo sapiens; identical to SEQ ID NO: 65332

SEQ ID NO: 72536 - DNA, 2263 bp, Homo sapiens; identical to SEQ ID NO: 65333

SEQ ID NO: 72537 - DNA, 1878 bp, Homo sapiens; identical to SEQ ID NO: 65334

SEQ ID NO: 72538 - DNA, 6436 bp, Homo sapiens; identical to SEQ ID NO: 65335

SEQ ID NO: 72539 - DNA, 1709 bp, Homo sapiens; identical to SEQ ID NO: 65336

SEQ ID NO: 72540 - DNA, 1320 bp, Homo sapiens; identical to SEQ ID NO: 65337

SEQ ID NO: 72541 - DNA, 954 bp, Homo sapiens; identical to SEQ ID NO: 65338

SEQ ID NO: 72542 - DNA, 4009 bp, Homo sapiens; identical to SEQ ID NO: 65339

SEQ ID NO: 72543 - DNA, 2368 bp, Homo sapiens; identical to SEQ ID NO: 65340

SEQ ID NO: 72544 - DNA, 3790 bp, Homo sapiens; identical to SEQ ID NO: 65341

SEQ ID NO: 72545 - DNA, 2343 bp, Homo sapiens; identical to SEQ ID NO: 65342

SEQ ID NO: 72546 - DNA, 981 bp, Homo sapiens; identical to SEQ ID NO: 65343

SEQ ID NO: 72547 - DNA, 4362 bp, Homo sapiens; identical to SEQ ID NO: 65344

SEQ ID NO: 72548 - DNA, 1128 bp, Homo sapiens; identical to SEQ ID NO: 65345
  misc_feature (1)...(1128): n = a,t,c or g

SEQ ID NO: 72549 - DNA, 1203 bp, Homo sapiens; identical to SEQ ID NO: 65346

SEQ ID NO: 72550 - DNA, 1266 bp, Homo sapiens; identical to SEQ ID NO: 65347

SEQ ID NO: 72551 - DNA, 3899 bp, Homo sapiens; identical to SEQ ID NO: 65348

SEQ ID NO: 72552 - DNA, 1146 bp, Homo sapiens
  misc_feature (1)...(1146): n = a,t,c or g
gggcgccggggccgcggccgggccggctccagggccggccgccgcggtggggcgcaggccgcttgtgcgagtgaatcgaggcggcgggcccatccggaaccggccggccatcgcccgcggcgcggccggcggcaggcggcaggaaccgaccggcgccctacagcaggccaaaacaacttcccgacaagtggcagcacgatcttttcgacagtggcttcggcggtggtgccggcgtggagacaggtgggaaactgctggtgtccaatctggattttggagtctcagacgccgatattcaggaactctttgctgaatttggaacgctgaagaaggcggctgtgcactatgatcgctctggtcgcagcttaggaacagcagacgtgcactttgagcggaaggcagatgccctgaaggccatgaagcagtacaacggcgtccctctggatggccgccccatgaacattcagcttgtcacgtcacagattgacgcacagcggaggcctgcacagagcgtaaacagaggtggcatgactagaaaccgtggcgctggaggttttggtggtggtggaggcacccggagaggcacccgcggaggcgcccgtggaagaggcagaggtgccggcaggaattcaaagcagcagctttcggcagaggagctggatgcccagctggacgcctataatgcgagaatggacaccagttaaacagaccagcaaatccgcgtgcggaacaggacccaggcgtctcctcttgctccctggttggggggcggtggctggggctgtgcggccaatgatggatttgtttcttttatgtttaaaataggatttaaaaactcatgtaaagggttatttttttcctttttttttttttaaaacccaaaacagacctttttttccccgagttatttttgggaaaaaatttactggttgctgttgggaaaaaggggcctttcccccttttcctataaaaaaaaaaaaatgtgtgtagaaaaaaaaaaaccaaaaaaacanggggggggcccccttttaaaaaacccctcgggggcccccatttaccccggggttggcaaaggttatttttcttttttttaggggggaatataaccccctctgggtccttttggaaaaccccttttttttggcg

SEQ ID NO: 72553 - DNA, 455 bp, Homo sapiens; identical to SEQ ID NO: 65350
  misc_feature (1)...(455): n = a,t,c or g

SEQ ID NO: 72554 - DNA, 761 bp, Homo sapiens
tttttattttatttttatattatttatttattcttcgttagtttgtttttggagcgtgggttttgttttgttttttgatttttttctttttttcgacccacggatttattcttattgcccaggcttgagtgcaatggcgtgttctcagcttactcaacctccgcctcttgggtttgggtaattgttgtgcctcggcctccctctgcctcttgggcttgggcgattgttccacctcatccgccctccgcctcttgggtttcggtgattgttccacctcatccaccctccacctcttgggtttgggtggtttttccgcctcggcctcctgagtagctaagggaggagtcttgagattatcatccactgagggtggaagaggagagggtggaagagggacaaagagacagtccttcagattatcatccactgagggtgggaagaggagagggtggaaggggagtgagcagacactcgggaggtgtcttgaggctcagggagttatcagttatagaatgttgttgagttggaggaggtggctggtggcccatcctgttttttaaagtttcagctgtgaggtagggccagtagggcaatcctgaagaatgacgatgctccgctgccgccattctgacccagttgcaaagagcctttcttgcagaaggggggattttgcatttgtggtagtcctctgctcgccgccgcaactcttgcgcacgttgaaacattttcctatggattacaatcactttcatcagataaag

SEQ ID NO: 72555 - DNA, 1773 bp, Homo sapiens
  misc_feature (1)...(1773): n = a,t,c or g
tcgcgtacgtacgttgggatgctctacagcggccgcgccatccccatcaagcaggggatcctgctaaagcggagcggcaagtccctgaacaaggagtggaggaagaagtatgtgaccgctctgtgacaacgggctgctcacctatcaccccagcctgcatgattacatgcagaacatccacggcaaggagattgacctgctgcggacaacggtgaaagtgccagggaagcgcctgccccgagccacacctgccacagccccgggcaccagcccacgtgccaacggcgtgtccgtggagcggagtaacacacagctgggtgggggcaacagaggcagaggagtcgtttgaatttgtgggtgggtgtccctcactggggcagacgtgggcactttcgagggtttcaacgggcggagggagcgggagctgtgggttcagagtgtgcaggcccagatccttgccagcctgcaaggcttgcgcagtgccaaggacaagacttcgacttggggaaccagaacgcagctctggctgtgcaggccgtccgcaccgtccgcggcaacagcttttgtatcgactgcgatgcacccaatccagactgggccagcctgaacctgggtgccctgatgtgcattgagtgctcaggcatccaccgacacctgggggctcacctgtcccgggtgcgctcccttgacctcgatgactggccgngtgagctgctggctgtcatgactgccatgggcaatgccctcgccaacagcgtctgggagggggccttgggtggctactccaagccagggcctgatgcctgcagagaggagaaggaacgctggatacgggccaagtatgaacagaagctcttcctggccccactgccaagctcagatgtgccactggggcagcagctgctccgggccgtggtggaagatgacctgcggctgttggtgatgctcctggcacatggctccaaagaggaggtgaatgagacctatggggacggggacgggcggacggctctacatctctccagtgccatggccaacgttgtcttcacgcagctgctcatctggtacggggtggacgtgaggagccgggacgcccggggcctgactccactggcatatgctcgccgggccggcagccaggagtgtgcagacatcttgatccagcatggctgccctggggagggctgtggcttagcgcctacccccaacagagagcctgccaatggcaccaacccctctgctgagctgcaccgtagtcctagcctcctataaggcccaggaagagggcagaggggccagaaggactccatggcccaaagaccctcctccctgcaggcactgtgggaacagacacagagatggagaagcagggacatgctgagaggacgaagccaaggaaattagggaggagagtcaaagggatcaaggagagttggggatttgagctgcagcagagagggatgagggatttagccctctgccctaaggtgccattgaaaagggacaggacccttcggaggtgcctgtgaggagaggggagcaggacctctccctcctccagatccctgcctcctagtgccagcccctcacacgccttcatcctgaaacaggaagaggacggcaccaagttgggggtgctggatgaaagagacgaggggtgatctgtgagtcccatgtaaactttgtacattggaatatttatgtttgtgtacatatttgatgtgtgtgtgtatgatgagccaataaaccagactgtgtgcgtgaaaaaaaaaa

SEQ ID NO: 72556 - DNA, 2239 bp, Homo sapiens; identical to SEQ ID NO: 65353

SEQ ID NO: 72557 - DNA, 2063 bp, Homo sapiens
tttttttttttttccaatttaaaatggtagaatttattttaatataatgatatatatgtgtccacatatactattttaaaaataagcatgtaaattataatcattataaaacataagttaggccctaatttaatattatcaaggtaaaatgagcacatataggaagtcagtctaactttgttcgcacttgtcttttaaagttagaatacattaaaagatttagcaccgttgtattttatcttatttcagttttcatgttatcatcaactataaataccccttaggaaatgtaccaccttataacttacattggaatagcccaatatttcttaggtaggttattaaacgtaccatttaaatcaccctaaaccaaataatcctaaaaaaatactgggtttaaattaaaaccctgaggaattaaaatttggttttacacaatagttttgggttaagtggcaatttccatggtacatacctacctttggtttaagggatgtacttggtaaggccatagtaaaaataaaatctacgtaagtaacaatctaatactatatttaatttgttgctacaaagttgttttgtttctctaaaaagtagtttttgcatatcattctggacctcttcacccatctgctggcttatttgctttatatacaacagttaaaatttgtgcactaagctgagctgccttcacaattgtggttcagacaaaatgcacccaaagaactacatgttaagagagttcatgtccatgctcaaccatggcttgcacaaattgcttgaagacacgatccatgtaagtggactgtcttggccagattccctccagaaaaccaatatggcctccataagaagtaaggaccaaagcaacattaggattttgcttagcagtttctattggaatagcatgactgggtgagaaaacatcatccacagaatttagacacaatactggaattcctactgacttcagtctaggactcggactggcatcagtataataatcatcaattgtttggtatccaaacatgactgaagtgaatcgcttatcaaactctctgatggatttagccttcatgacatgatccatatcaacttgttttacaaacatatgtcggtgcttattaactgaagactgaaggcaggttgtcaaatagtaattaaaaagtagccagttcagtggtttttccaatgactctgagcaagcgaaggtgttccaaccaacggaaaaagttgcagctgccatcaaaggcgttttggacccaattttgcccaagtaatttagaagcagcattcctcccattgaaacccctgctgccaggaaaggagcagaagggtacaggctgtgtacatggtgaataactgtctccaagtcttcagtgttagcacaacaataagtccttggcgtcaagagattctcccccgccactcctctgttgttaaaaaccacacatctgtatcctaattcttcactaagatggatcatatgaaggatatatgactccttgcttgttcccgtgaggccaggcaacaataagatagtaggtctggtgctggcatccatataacacgtactgttatcattatcaaaccagtccagtgaaatctgtcctccatctgcagttttaataagttcattcctgtactgcaccgggggcttcgaagtgatgaaaaggtctaagcagggtctgtcctcgaccctcccagcaccagaccgtcgggtagtacgtttctgtaaccacgggacagtggtcttgaaggaagcggctgaaactctcacccccggtcactaactggggtttcttggcaatgctgctcaggtagtagaaggcataagcgacgctgaagcccaggataagggataagcccacccccgagccgaagaaccccacccggacttggtgttccaggtagagggagagctcccgggacaacatccgcaggtccatggccaggcgctgcatggcccccgagcgcggcgcgcgggtcctgcggcgggaggagagccggctggcgagcgggcgagagcgggcgagagcggacgcggcgccgctgcctactcc

SEQ ID NO: 72558 - DNA, 5017 bp, Homo sapiens; identical to SEQ ID NO: 65356

SEQ ID NO: 72559 - DNA, 4236 bp, Homo sapiens
ctttgctaaaggacagatcaccatgtgggatttggccagtggaaaacttctaagatcaataacagatgctcatcctccaggaacagcaatattgcatatcaagtttacagatgatccaactcttgcaatttgcaacgacagcggaggctctgtttttgaattgacatttaagagagtgatgggagtgagaacctgtgaatctagatgtctgttcagtggttccaagggtgaagtctgctgtattgagcctctgcattctaagcctgagttgaaagatcatcccatcacacagttttcattattggccatggcatccttgacaaaaatactggtcattggattgaaaccatccttgaaagtatggatgacttttccctatggccggatggatccttccagtgtgccactgctggcctggcactttgtagcagtacaaaattatgtgaatcccatgcttgccttctgcagaggagatgttgttcattttctattggtaaagagagatgaatctggagcaatacatgttactaagcaaaagcatcttcacctatactatgacctcatcaactttacctggataaattcacgcacagttgtgctcttagacagcgtagagaagttgcatgtgattgatcggcaaacacaagaggaattggagacagtggagatctcagaagttcagctggtctacaatagcagccatttcaaatcactagccactggaggaaatgttagccaggcactggctttggttggagagaaggcttgttatcaatccatcagtagctatggtggtcagatcttttatttggggacaaaatctgtttatgtgatgatgctgaggagctggagagagagagtggatcatctcctgaaacaagattgtcttacagaagcgttggctcttgcgtggtctttccatgaaggaaaagcaaaagcagtagtgggattatcaggggatgccagtaagcgaaaggctattgttgcagaccggatggtagaaatcctattccattatgcagatcgagctctgaaaaagtgcccagaccaaggaaaaatccaagtgatggagcagcattttcaggatatggtgcctgtcatagttgattactgccttctgctgcagcgaaaggatcttttatttagtcagatgtatgataaattaagtggagaattcagtggccataggggtatttttgggagtgccttgagccatatattttaagtggataaattggtgggaatcacaccccaagtaatgaaagacttgattgttcatttccaagataaaaaattaatggaaaatgtggaagcgctcattgtacatatggatatcaccagcctagatattcagcaggtagttctcatgtgttgggaaaatcgtttatatgatgctatgatctatgtctacaacagaggcatgaatgaatttattagtccaatggagaaacttttcagagtcattgctcctcctctgaatgcaggaaaaacactaacagatgaacaagttgttatgggcaataagctccttgtatatattagctgttgtctagcaggtcgtgcctatccccttggtgacatccctgaagatctggttcccttggttaaaaaccaggtttttgaatttctaattcgcctgcattcagcagaggcttctcctgaggaaagaaatccaacccttacaattccgggacctttggctacattttgacacaagagaatttctcaatgtattggcactgacttttgaagattttaaaaatgacaagcaagctgtggaatatcaacagcgaattgtggatattttgttgaaagttatggtggagaattcagactttaccccctcacaagtaggatgtctctttaccttccttgctcggcagcttgcaaagcctgacaacaccttgtttgtaaacagaacactttttgatcaggtccttgaattcctttgtagtcctgacgatgactcccgacactctgaaagacagcaggtccttttagaattgctgcaggctggaggcatagttcaatttgaagagagtcgactcatccggatggcagaaaaagctgagttctatcaaatttgtgaatttatgtatgaaagagaacaccaatatgacaaaattattgattgctacttacgtgaccctctgcgagaggaagaagtctttaattacattcacaatatcttatccattcccggacacagtgcagaggagaagcagtctgtatggcagaaagcaatggatcatattgaggaactcgtgtccctgaagccttgtaaagctgcggagctggttgccacccacttttctggacatattgaaacggtcattaaaaaacttcagaaccaggttttgcttttcaaatttttgaggagtcttcttgacccaagggaaggtattcatgtaaatcaagaattactgcaaatatctccttgtatcacagagcagttcattgagctgttgtgtcagttcaacccaacccaagttatagagactctgcaagtccttgagtgctaccgtctggaagaaactattcagattactcagaagtatcaacttcatgaagtcaccgcttatctattggaaaagaaaggagatattcatggtgccttcctaataatgttagagagactacaaagcaaacttcaagaggtaacacatcaaggtgaaaataccaaagaggatccctcattgaaggatgttgaagatactatggtggagaccattgctctttgccagagaaattcacataatttgaaccagcagcaacgtgaggccctttggtttccgttattggaggcaatgatggcccctcagaagctgtccagttcagccattcctcatctacactctgaagctctgaagtctttgaccatgcaagttttaaatagcatggcagcatttattgcccttccatcaatcttgcaaagaatcttacaggatccagtttatggaaaaggaaaacttggagaaatccagggacttatcttgggaatgttagatacctttaactatgaacaaaccctgctggaaacaacaaccagccttctaaaccaagatctccattggtcattgtgtaacctgagagcttcggtcaccagaggactgaatcccaaacaagattactgctctatatgtttgcagcagtacaagagacgccaagaaatggctgatgaaataattgtctttagctgtggccatttgtatcactcattctgcctacaaaacaaagaatgcactgtggaatttgagggccaaacaagatggacatgctacaaatgcagttcaagtaacaaagtaggaaaactcagtgaaaattcatctgaaattaaaaagggaaggataaccccatcacaggtaaaaatgtctccatcgtatcatcagtccaaaggggatcccactgctaaaaagggaacctcagaacctgttctggatccacagcaaatccaagcatttgatcagctttgccgtctctaccgaggaagctccaggctggctctcctcacggaactctcccagaatcgcagcagcgagagctataggccattcagtggctcgcagagtgctcctgctttcaacagcatcttccagaatgagaacttccagctgcagctcattcctccacctgtgactgaggattgatgactccatggagcctggcccaggagaaccagagatgatcccgaggcagctggggagaggccccgcctctggtgggcttggcctccaccacctcccacgcttctgagaagaggttccaaattgggcttctgtgcccagagcgtccacagcaccattcccagtgtagactcccagtcttctccacattgctgtcatggcgtcagttcaccagactcattgattttgttttgcttgttaagcaaaggaatgtcacatacctctgtccagctttttaggaaatacatttcgcctattgcgactttttccatttaccctgaagcctagaaagtaggtggaactcacacaaatggcattccagagtctgccatactccgtctcctccagctgctggataatacagaggaacttcaacttctacagggaacagtggttggccaggctgcagtataactgaagcatgccttggagagagcagacactgtgggggccagggccatctccctttaatgtgttcatgttaaaacctatttgagtgtaagacttgccctttctaacaataaatgctccgtgtttaagttcaaaaaaaaaa

SEQ ID NO: 72560 - DNA, 939 bp, Homo sapiens; identical to SEQ ID NO: 65360

SEQ ID NO: 72561 - DNA, 1520 bp, Homo sapiens
tttttttttctttgaaaaaagatgtttattaaacaactttaattgtcataaaatgactaaaatgggttttaaaaattaaggctcttctctttctgtggattgccagaacaatgtaaaaataatatcaatcacccctgctaaacgttttgttcctaaagttaaatttcatagattcctaaacattttatgattaagataaaaaattggactataaatgacaattcatggccatctgtgctgaacacacattgatcaggtgtacaatattctaattgagtagttaagcaaaaaatattccagttaaagcataaattttaatttcagcattttaaagtcattgtttccccacatggtcatgattttcctaaaattgaaatagtctaatacaggagcgctaaccttgggactctatatactcccaggaggatgactgacttggctggcaattagtttgattatatttttttaaatgctctaaggtaaattatcaaatgattcagaattacatggcatgcagtatccaaaattatggctctgatgcattgagatttacattaagaataagaagtgtcattcacaattccattgtacaccccacccctcccacgaaaaagaaaaaagtcactacctattcaagttctagatctggtgcagcattaaggattaaaacttaccactttaccaggccttccccatgtgcaaataaatccctcctgacaagcagtgactatacagtcttcaagaaatattagtacagtcagtctctcatgtgctatctttttacatatcagcggctctaacaagggaacatcttccattcgaggacacaggggcgttcccagagttttagcagggtccgttttggttttggtaactagattcagtttgtcactgctcttgctagaaatgtgtcccatgctatgatttcgcttgtgatctttctcgtggtgcctctccttccggtcatgtagtgaaagtgttgcaaatttgctgaccccagaagcaatggccccgtccatgacactgcttttgctgccagcatttgagactgctgaatgtggaaggctgttggaccgtggcagaggaggcggcacagagttcccgggtgttgtaacactgttcccattgcttccagcaggaggactcgtggcattcatgacatttgtgtgtgtccttgctcttgagaggggttggtgagggaaaaggatatcttctgtaaggtcccataaacagagctgtgtgtcctggcccacggaaccaaaccgatacgtgacacttacggggcggctgtctgtagagttccgtctggagagcctgcactgtgtactatctgctcgatctctgccaaaatgaagaaggtcttggaagtcctcatcgctgccactaaactccatagggtcaccttcttctacactagtggtataagggtcaaacgctacaacactgacccaggactctgtgcccgtgcgtactggctattactcggcagtctacaaaggaccagactgtcaccaagtcgt

SEQ ID NO: 72562 - DNA, 3999 bp, Homo sapiens
tttttttgagctgtagcacttttattgttccttgtctctctacccctgcccagggtaagggcaaacgccttccaagctgtccaagggcacccgcctggcctggttaggttctcctagttgcctgcagaggaatgactccacatggggctggggagagaagggggtaccaccttcctctcccctggcagagcctggacaccagtacacaaagagctgggcccccaggttctgccctaccctttctgggccttggttagggctgtcttggcggcaagaaggtgggggtcagctaggggtggggcacagcgtggcacctgaagggaatgctgggatttgggatagaaggtgggatgtctcttatggggaagaggaaagaaagaggcttctgccgaggctgacatggaacttgctgagatgggcagaggcaagctgggcagagggcaggaaggaggagggacaggctggaggaaggcagtgttggtgaagtggggaggaaaggaactggtagaaacagggctgttcaagagagacaaacatggtccagtggcaggagagaggagaagcctggcaagaaggggcgtagaaaggtgggaacagctgaccaggagcagctgatctgagccaagcagttccagggctttccagccctgggtgtgctctacccctcccctcccccatccccacctcctacgtatcccaggacccgttgccaccccaagtcctggaaagcctcccataggtgtggcttaacccatcagctcccaggcgccctcaccctcctgccgctgcccagttggctttactcaccctctaccagcagccgtgtgtgggtgctgtcctggccggcctgagcagcagtaagtgccttggtccttaaggtcaaacgtcatggatgaccaggctgtgggtggggccgtggctgcgcatttaatacttatttcccgggcacagttcggccccctcccgcagccagcacacgtggcccccccgagcgggacacagtcaccttccagcaccgcccggcggcccaccagaacggtcttctcgcgaggggggtggcggcacatctggagaggcaatgcctccacttccagtagagccagggactgggcgggccccgcctggaagcggacttcaccggcgtcctcggcgcgcagctcgctaagcaccagaatgtgtttcttcccttcctgtcggatgcggacgcgggctccgggtctcagcgggcggcctccgagctcccagcgccccgtggtctcgacctccgacacgggtgcactcgaacgtagcgccgtcgccttcgcgggcgctcaccgaccgcagctcggagagtaccgccacagtacgctctggggcggagcccggggcgtgagcggggcggggcagagggcagttaccggtcacgccccctccacgccccctttctagaagcacgcgcggtcatcagggtccggggaagacagctccgcaagtctcgcgcccaaagcagtgcccagcctccacatcaccccgtacccaccgcgcacggtcaggcggaccggtccggcgcgggccgtccccaccgcgcagctgtaggtcccggcgtccgaggggccgcagcgtcgcagctggagaaggcggcgcgtgccgagggcctggagccggagccgcgggctaggcgtaagcgcgttcccgtcgcctcacgctgagcctggccagggtgcgatcgtggtggctctcgcagccgtaggtgccctggtcggccagtatgacaccatggatgaagaggcggtggatgtgcccatcctgggccatggacaggcgagagtcgtggggcaggggctgcccacctcgcacccagcgcacggcccccgctgcacccactcggcctgtctccacttcgagacacacgtcctggccttcctctgcccgcacatcctgcaaccgccgtaggaacagcagctctgtctctggggccctggagtgacgacggccccattgcgcagccaggtgacatcggcatctggtggggagacttcacaccggaacgtggcatcatcgccctcgtggacagtgagtggtgtcaggtccgagaccagcttcaccagcagtggctcttccacgctgacaaggaagatgcggctgtcctggggcgcatcgcacaggtactccccagcgtccccgctccgtgccccctgcacccgcagcacctgcctggccccggcctgctccagctgcacccgcccctggcttgccagtcgctccccgtccttgtaccagcgtacagggccccctggcccggagaggtgcaccaccagctctaggtccccgcctggggtgctccgaaccctcgtctgggctgcctcgggagctaccacccgcacagggggctcagccacctggacggtgaagctgaggcttggggctccgggggctgctccagactggcaggtgtagagccctgcatgggctgggcctgcagcctggatgcagaggactcggcgggggccctcggcatggagctctaggccctcgccctcctgcacgggcctcccattgtggctccagaccacgggggcgccagcccgggacagttcacagctcagcaccactggctccccaggggccacacagagcgggcttggagttgtctctagagcaaggaactgcactggaggctctgtgacagtgacagtgaagaaggccgagtcatctccagcatcacatacaaactcgcccccgtcctcgggctgagcagcaggtagcaccaggcggcagcgtggcccatccctctccagcaccagggcctcgctctcctccacttccagcccatccttgtaccagcgcacaggggcatcctcccgagacagttcacacatcagcaccacacactccaaggtcacggcgatcaaggtcacctcatcgcgagggtatatgatccgcactgggggttctgtgacggtgacagtgaaggaggccgactcatcgtcaatttcacacaagtactcgccggagtcctcgagctggacagcgggcagcaccaggcggcggacagtgtcttccttctgcaggagcagcgcggggctctccaccacctcctctccatccttggtccagcgcacctctgcccagggccggcatagctcacaggtcagcaccacacgctccaggcgcacggctgccacatacaccttgccgctgggatacacgatccacgaggagacgtctgtgatggtgacagtgaagtaggcacactcatctccagcgacgcactgaaactcgcccccgtctgagggctgggtggcgggcagcaccaggcggcgatggggcccctcattctccagcaccacgaagtcactctcctccacctcctgcccgtccttgtaccaacgcacaggggcgtcctcttcggttccacctcacaggccagcatgacacactcggaagttatggcatgcacgaacacatgttctcgggggtccacgatgtgcacgggaggatcttggacagtgacgccgaagaaggccgagaccccttctgtcctgcactcaaactcgccactgtcctggactttggcctcaggcaggatcagacggtgtttgcgcccatccatcttcaccaccagcaactcgctctcctccaccttctgcccatccttgtaccaggttgccgggaagtccacccttgagagctcacaagtcagcaccacccgctctgaggttgtgaaggtcaacgacaccttgtcctgggggctcaggatgtgcaccgggctctcttggattgtgagggcagctgagtcctgcacgccggggcagctgaagccgaccagggcaccgctgtcctggtgcttgacggcatgcaggatgagtctgtgctgcagacccttctgctctatacggtaccgcagggccccaggttccacctggccctccggctcgttactcttgagctcttccccattaaggaaccaggtaccctggatgatggtggagagatcgagggagaagacggcatcttccc

SEQ ID NO: 72563 - DNA, 2493 bp, Homo sapiens
atggccgagagtggtgaaagcggcggtcctccgggctcccaggatagcgccgccggagccgaaggtgctggcgcccccgcggccgctgcctccgcggagcccaaaatcatgaaagtcaccgtgaagaccccgaaggaaaaggaggaattcgccgtgcccgagaatagctccgtccagcagtttaaggaagaaatctctaaacgttttaaatcacatactgaccaacttgtgttgatatttgctggaaaaattttgaaagatcaagataccttgagtcagcatggaattcatgatggacttactgttcaccttgtcattaaaacacaaaacaggcctcaggatcattcagctcagcaaacaaatacagctggaagcaatgttactacatcatcaactcctaatagtaactctacatctggttctgctactagcaacccttttggtttaggtggccttgggggacttgcaggtctgagtagcttgggtttgaatactaccaacttctctgaactacagagtcagatgcagcgacaacttttgtctaaccctgaaatgatggtccagatcatggaaaatccctttgttcagagcatgctctcaaatcctgacctgatgagacagttaattatggccaatccacaaatgcagcagttgatacagagaaatccagaaattagtcatatgttgaataatccagatataatgagacaaacgttggaacttgccaggaatccagcaatgatgcaggagatgatgaggaaccaggaccgagctttgagcaacctagaaagcatcccagggggatataatgctttaaggcgcatgtacacagatattcaggaaccaatgctgagtgctgcacaagagcagtttggtggtaatccatttgcttccttggtgagcaatacatcctctggtgaaggtagtcaaccttcccgtacagaaaatagagatccactacccaatccatgggctccacagacttcccagagttcatcagcttccagcggcactgccagcactgtgggtggcactactggtagtactgccagtggcacttctgggcagagtactactgcgccaaatttggtgcctggagtaggagctagtatgttcaacacaccaggaatgcagagcttgttgcaacaaataactgaaaacccacaacttatgcaaaacatgttgtctgccccctacatgagaagcatgatgcagtcactaagccagaatcctgaccttgctgcacagatgatgctgaataatcccctatttgctggaaatcctcagcttcaagaacaaatgagacaacagctcccaactttcctccaacaaatgcagaatcctgatacactatcagcaatgtcaaaccctagagcaatgcaggccttgttacagattcagcagggtttacagacattagcaacggaagccccgggcctcatcccagggtttactcctggcttgggggcattaggaagcactggaggctcttcgggaactaatggatctaacgccacacctagtgaaaacacaagtcccacagcaggaaccactgaacctggacatcagcagtttattcagcagatgctgcaggctcttgctggagtaaatcctcagctacagaatccagaagtcagatttcagcaacaactggaacaactcagtgcaatgggatttttgaaccgtgaagcaaacttgcaagctctaatagcaacaggaggtgatatcaatgcagctattgaaaggttactgggctcccagccatcatagcagcatttctgtatcttgaaaaaatgtaatttatttttgataacggctcttaaactttaaaatacctgctttatttcattttgactcttggaattctgtgctgttataaacaaacccaatatgatgcattttaaggtggagtacagtaagatgtgtgggtttttctgtatttttcttttctggaacagtgggaattaaggctactgcatgcatcacttctgcatttattgtaattttttaaaaacatcaccttttatagttgggtgaccagattttgtcctgcatctgtccagtttatttgctttttaaacattagcctatggtagtaatttatgtagaataaaagcattaaaaagaagcaaatcatttgcactctataatttgtggtacagtattgcttattgtgactttggcatgcatttttgcaaacaatgctgtaagatttatactactgataattttgttttatttgtatacaatatagagtatgcacatttgggactgcatttctggaaacatactgcaataggctctctgagcaaaacacccggtaactaaaaaaagtgaagataagaaataccccttaaagctgagtaattcctaattggtatggaatctaacagcatctttgacaaacatctcccagcaaaagtgccggttagtcaggtttgttgaaaatacagtagaaaagctgattctggttatctctttaaggacaattaa

SEQ ID NO: 72564 - DNA, 373 bp, Homo sapiens; identical to SEQ ID NO: 65363

SEQ ID NO: 72565 - DNA, 6076 bp, Homo sapiens; identical to SEQ ID NO: 65364

SEQ ID NO: 72566 - DNA, 1492 bp, Homo sapiens
ccttgcttcgcctgccgttttttttggaaagaggttttagtgcggccgcagggagcaccacctcagcctcaggcgctagtgaggacacaggccgtcctccggcggggagcacggtggggtcagggtgctgtgtggtcccgcaaagaggcagctgagcttgggcctcaggtcgttccacaccttgctcatctccttgtgcccttggatctgagagttgacgaaggcgcggaggatgtgggaggtgaggggcaggtagacgtggatgagctgcgtctcctggtgcaggcagtacagggagaagtagttccgcagctccatcgtctgaatcgcgttctcctgctccacgatgcgggactccagctgctccacggactccgggctcgcgggttctgcgccggtggcgctcatcatctgcctcttcatcaggctgtactttgtgcaagggcccgctggtgctttgtgcaacacgcccttctcatggccgcttcgcacaggtccttaataggactggcagcagatccaagaagaggttcagcttctccaccaacgtcgttctcctccctgcttaccctgttgtgcagccttgtcggcgaagcagcgcaaatttccacagacaggcctttcagagcctgcttcagggaccccccacgtgcttgctattcagagcggcccaggagggcagcggggtcgtgtcagaccctattgcacttagctccttcccgaatatgagaagatctgccgcattgtcgatggcccgcgacgcgatccgctcggccctgtcgcgaagcttgtgaaagctattgtagatgttccggatcagcttcccggcttgatggcaaactgagcctggatgtcagctgggaggaagtccttggccctggtagccagcttacagttcaggaattcgtccccgacgcactgtgctgactcctttaacttgttcctgcaacatcccgaacccgctgaaaggaacaaggaaaaagcttgaaggaaccacatccctcggaagaacagggggtgtcgcgcccacccaggttgacgaagcgcttcagggctctcctcctggcctcgatgaactccctgtcagctcccagcattctcttgggtggcagggcaggcaccatacggtaggggaacttgtgcaggagcatctcctggaagaccacgaagtcattgtaccgtctgtataccgaggacttgaagcgctggctggaaacctcatactccacatgcttcaggaagaggcccttcttctccggaatgagctccacctgcacggtgtccctggccagcagctcctgcagggtgtgggacagcagcagcgggttcccctgcggcatctgcattcgactgggggctgggacctgctgcacgatggcctggggctcgatggcctggggtgtcggcagatctgacgccgggggatccgcctcctcgtcagcctccgcctcagctgccgccccgactgcagccgcgggcagcgggtccatcg

SEQ ID NO: 72567 - DNA, 4696 bp, Homo sapiens; identical to SEQ ID NO: 65366

SEQ ID NO: 72568 - DNA, 2915 bp, Homo sapiens; identical to SEQ ID NO: 65367

SEQ ID NO: 72569 - DNA, 2429 bp, Homo sapiens; identical to SEQ ID NO: 65368

SEQ ID NO: 72570 - DNA, 3973 bp, Homo sapiens; identical to SEQ ID NO: 65369

SEQ ID NO: 72571 - DNA, 1459 bp, Homo sapiens; identical to SEQ ID NO: 65370

SEQ ID NO: 72572 - DNA, 2304 bp, Homo sapiens
  misc_feature (1)...(2304): n = a,t,c or g
gggcgtcgcgccctggggccggggccgggcggcaccgcggtgcgcaagcgcaaccgtcggtgggtcggggatcggtcgcctgagaggtatcacctcttctgggctcaagatggacaacaagaagcgcctggcctacgccatcatccagttcctgcatgaccagctccggcacgggggcctctcgtccgatgctcaggagagcttggaagtcgccatccagtgcctggagactgcgtttggggtgacggtagaagacagtgaccttgcgctccctcagactctgccggagatatttgaagcggctgccacgggcaaggagatgccgcaggacctgaggagccccgcgcgaaccccgccttccgaggaggactcagcagaggcagagcgcctcaaaaccgaaggaaacgagcagatgaaagtggaaaactttgaagctgccgtgcatttctacggaaaagccatcgagctcaacccagccaacggccgtctatttctgcaacagagccgcagcctacagcaaactcggcaactacgcaggcgcggtgcaggactgtgagcgggccatctgcattgacccggcctacagcaaggcctacggcaggatgggcctggcgctctccagcctcaacaagcacgtggaggccgtggcttactacaagaaggctctggagctggaccccgacaacgagacatacaagtccaacctcaagatagcggagctgaagctgcgggaggcccccagccccacgggaggcgtgggcagcttcgacatcgccggcctgctgaacaaccctggcttcatgagcatggcttcgaacctaatgaacaatccccagattcagcagctcatgtccggcatgatttcgggtggcaacaaccccttgggaactcccggcaccagcccctcgcagaacgacctggccagcctcatccaggcgggccagcagtttgcccagcagatgcagcagcagaacccagagttgatagagcagctcaggagccagatccggagtcggacgcccagcgccagcaacgacgaccagcaggagtgacgctgcctgctcccggtgtgaccgcgtccttccctggccgacccgaaggaagccttctggttgtctgccacttcctcctgttggactgcctgagagaggggaagagagagacctcggacctgcatgtcaagatggattttccccttttatctctgccctcctccactccctttttgtaactcccttacagcccccagacccttcttgaaacgagagccagcaagctgagcacagaccagcagcgacctcccttccagcccccagaaagctcggtcacttgagtgttttctagaatcctggggtgctcccgggccgctctcagagaagtggcaggtttcacgttcagccgtgtggcggatcgtgtggcttccaaagccttttacagcccccgccccccatcccgtggtctgtctgcaggaactctcccgtctgtgagaagcctctttccgagtcgacctcccggccaccccggccctgtgcctgctcggaagagctcactgccagctgcggcctgggcaccgcgggccatgtgtgtttgcatgaggaactctttagtggcagacacctaagagacggctgcggtcaccccacgcctccgcggctcaggagccgtcctgggtgcataggaccagtttctgtgacttttctccagttgggcatgttgacagacatgtttcccctcctcccaccctcattttctggtcctcgcgactgagagccaggggcgacatcatgaccttctgtcccggccgccttagccccgggcacagggaaggcagctgggccgtttctgtctgtgtcccatcctgctgtccttctgtcctggatgtttcatgggcccggggcccccccagggaagcttacccctcctgtgctgggtggaggcccacgggacacctccaggtgccacccaccttggcccttaaaacagcccacccaggaaagcaagccgggagagcccggacagcaggcagccttgtctgggttccttgaggcctgggggtggcagacgaagcccacggcgccgtggtcccagcagcagggttgtcagtcggagcatcctgggggctccctggctcctggcccntctgtgaggtaggcgcagtaccgtgtatcgtaggtagcagtaggaacgggggccgcccgcggccctgcagccgctcatggcggtgaggtgtgtgccaagcccacccggggtgcagggcgtgacgtgtaagagaacacctaggcgttgtgacctctgaaaaaaaaa

SEQ ID NO: 72573 - DNA, 1838 bp, Homo sapiens; identical to SEQ ID NO: 65371

SEQ ID NO: 72574 - DNA, 3184 bp, Homo sapiens
gcttttatatttgagcttgtttttcaagtgataggagagttgatgcagttctaacgtaagtgtaattaaagtaggctttttgaaaaaatagtctgtggaattcttattactgtttttcccccctactttcagcttcatttacctcttaattctcctttgcctggaagtgaattgaccaaggaaccttttcgttgggatcagagactctttgcattagtgttgcggttgcctggcaccatgtcagtagaatcagaacagttgacaggtgtgcctttagatgactctgcaatcacaccaatgtgtgaagtgacaggcggccgttcatattctgtgtgttctccaagaatgcttaatcagtgtctggagtccttggtgcagaaagtacaaagtggggtggtaataaactttgaaaaagcaggaccagatccttcccctgtagaagatgggcagccagatatatcaaggccttttggatctcagccttggcatagctgtcacaaactcatatatgtcagaccaaatcctaaaactggggttcctataggtcattggcctgttccagagtctttttggccagatcaaaattcgccaacactaccacctcgtacatctcatcctgtagtgaagttttcctgtacagactgtgaaccaatggttattgataaacttccttttgacaaatatgagttggaaccttcaccactgactcaatttatcctggaaaggaaatctcctcaaacatgttggcaggtgtacgtgagcaatagtgcaaaatacagtgaacttggtcatccttttggttacttgaaagccagtacagcactgaactgtgtcaacttatttgtgatgccttacaattatccagtccttcttcccctcttagatgacttgtttaaagtgcataaagcaaaaccaacattgaagtggagacagtcatttgaaagttatttgaagacaatgcctccctactatcttgggcccttgaagaaagctgttaggatgatgggagcacctaacctaatagcagacagtatggaatatggacttagttacagtgtcatttcatacctcaaaaaacgtgagtcaacaggccaaaatagaatctgatcgagtcattggatctgtaggcaaaaaagtagtacaggagactggaataaaagtccggagccgatcacatggtttatcaatggcatataggaaagattttcaacaactcctccagggaatttcagaggatgtccctcacagactgctagaccttaatatgaaggaatacactgggttccaagttgctttgctgaataaggatttgaagccacagacatttagaaatgcttatgacataccaagacgaaatcttttggatcacttaacaagaatgagatctaatcttttgaagagcactcgcagatttctgaaaggacaggacgaagatcaagtgcacagtgttcctatagcacaaatggggaactaccaggaatacctcaagcaagtaccttctccactaagagaacttgatcctgatcagccacgaaggttgcatacatttggcaacccctttaagctggataagaagggtatgatgatagatgaagcagatgaatttgtggctggacctcaaaataaacataaacgacccggagaaccaaatatgcaagggatccctaaaagacgtcggtgtatgtctccactactaagaggcagacagcagaatcctgttgtaaacaatcatattgggggaaaaggaccacctgcacctacaactcaagcacagccagatcttattaaacctcttcctcttcataaaatttcagaaaccactaatgattcgataatacatgatgtggttgaaaatcatgttgcagaccaactttcatcagacattacaccaaatgctatggatacggaattttcagcatcttctccagccagtttactggaacggccaaccaatcatatggaggctcttggtcatgaccatttaggaaccaatgacctcactgttggtggatttttagaaaatcatgaggagccaagagataaagaacaatgtgctgaagagaacataccagcatcttcactcaacaaaggaaagaaattgatgcattgcagaagccatgaagaggtcaatactgaactaaaagcacaaataatgaaagagatccgaaagccaggaagaaaatatgaaagaatcttcactttactgaagcatgtgcaaggcagtttacaaacaagactaatatttttacaaaatgtcattaaagaagcatcaaggtttaaaaaacgaatgctaatagaacaactggagaacttcttggatgaaattcatcgaagagccaatcagatcaaccatattaatagcaattaaaagaaaatagaatgtggccacttatttcactatcttcttcaaatacaaagtaaatacaagactgttgtgatcttgcattcattttctgacatgcattgttggctatttgaaatactaaaagcaaatctacagatcctttttccatcattttacagtgaccttttcttcattttggtttatttttgtaatgtgaaaagtatcactctaaaaaacatttttaatttaacaaactaaaaatattcctccaaatctcttgcttgtcattgactcttgcgtgtcaatttccctcaggttctattttcttaaaccaacctttaaaattgtcacctctgttaaggttgaactttgccaaaaaaaaaagaagttactttgtaatttttggggaaaaaagcacatacattaaaactaggtaatgttttgtatatacagttattttggatatattattgtaagttgtacaaatgtattttcgaagaatatttaagtrcaaggcacttttgttattccatcaataaatgctctattttactcttgtgtggtttaggaaataatcacatttaaagctaatcatttaaaaacatcctaagataatggaattttaaaggccttgctttttagcattggaaaaatacaccacttgaagttcatgtttgttaagcctaactgtaattacatgttacataatctgcattgcctttttactatatgttcgtagtttttgttggccatgccaacatactcccatttctgcctagattatgggaatgactttgtatggggcagatagacagatactttaaaagctatttaaaaagc

SEQ ID NO: 72575 - DNA, 2513 bp, Homo sapiens; identical to SEQ ID NO: 65373

SEQ ID NO: 72576 - DNA, 2867 bp, Homo sapiens; identical to SEQ ID NO: 65374

SEQ ID NO: 72577 - DNA, 1091 bp, Homo sapiens; identical to SEQ ID NO: 65375

SEQ ID NO: 72578 - DNA, 1129 bp, Homo sapiens; identical to SEQ ID NO: 65376

SEQ ID NO: 72579 - DNA, 884 bp, Homo sapiens; identical to SEQ ID NO: 65377

SEQ ID NO: 72580 - DNA, 6527 bp, Homo sapiens; identical to SEQ ID NO: 65378

SEQ ID NO: 72581 - DNA, 4380 bp, Homo sapiens; identical to SEQ ID NO: 65379

SEQ ID NO: 72582 - DNA, 1224 bp, Homo sapiens; identical to SEQ ID NO: 65380

SEQ ID NO: 72583 - DNA, 2647 bp, Homo sapiens; identical to SEQ ID NO: 65381

SEQ ID NO: 72584 - DNA, 2354 bp, Homo sapiens; identical to SEQ ID NO: 65382

SEQ ID NO: 72585 - DNA, 1030 bp, Homo sapiens; identical to SEQ ID NO: 65383

SEQ ID NO: 72586 - DNA, 8053 bp, Homo sapiens
gctttcctttctaaagtagaagaggatgattatccctctgaagaactactagaggatgaaaacgctataaatgcaaaacggtctaaagaaaaaaaccctgggaatcagggcaggcagtttgatgttaatctgcaagtccctgacagagcagttttagggaccattcatccagatccagaaattgaagaaagcaagcaagaaactagtatgattttggatagtgaaaaaacaagtgagactgctgccaaaggggtcaacacaggaggcagggaaccaaatacaatggtggaaaaagaacgccctctggcagataagaaagcacagagaccatttgaacgaagtgacttttctgacagcataaaaattcagactccagaattaggtgaagtgtttcagaataaagattctgattatctgaagaacgacaaccctgaggaacatctgaagacctcagggcttgcaggggagcctgagggagaactctcaaaagaggaccatgagaacacagagaagtacatgggcacagaaagccaggggtctgctgctgcagaacctgaagatgactcgttccactggactccacatacaagtgtagagccagggcatagtgacaagagggaggacttacttatcataagcagcttctttaaagaacaacagtctttgcagcggttccagaagtactttaatgtccatgagctggaagccttgctacaagaaatgtcatcaaaactgaagtcagcgcagcaggagagcctgccctataatatggaaaaagtcctagataaggtcttccgtgcttctgagtcacaaattctgagcatagcagaaaaaatgcttgatactcgtgtggctgaaaatagagatctgggaatgaacgaaaataacatatttgaagaggctgcagtgcttgatgacattcaagacctcatctattttgtcaggtacaagcactccacagcagaggagacagccacactggtgatggcaccacctctagaggaaggcttgggtggagcaatggaagagatgcaaccactgcatgaagataatttctcacgagagaagacagcagaacttaatgtgcaggttcctgaagaacccacccacttggaccaacgtgtgattggggacactcatgcctcagaagtgtcacagaagccaaatactgagaaagacctggacccagggccagttacaacagaagacactcctatggatgctattgatgcaaacaagcaaccagagacagccgccgaagagccggcaagtgtcacacctttggaaaacgcaatccttctaatatattcattcatgttttatttaactaagtcgctagttgctacattgcctgatgatgttcagcctgggcctgatttttatggactgccatggaaacctgtatttatcactgccttcttgggaattgcttcgtttgccattttcttatggagaactgtccttgttgtgaaggatagagtatatcaagtcacggaacagcaaatttctgagaagttgaagactatcatgaaagaaaatacagaacttgtacaaaaattgtcaaattatgaacagaagatcaaggaatcaaagaaacatgttcaggaaaccaggaaacaaaatatgattctctctgatgaagcaattaaatataaggataaaatcaagacacttgaaaaaaatcaggaaattctggatgacacagctaaaaatcttcgtgttatgctagaatctgagagagaacagaatgtcaagaatcaggacttgatatcagaaaacaagaaatctatagagaagttaaaggatgttatttcaatgaatgcctcagaattttcagaggttcagattgcacttaatgaagctaagcttagtgaagagaaggtgaagtctgaatgccatcgggttcaagaagaaaatgctaggcttaagaagaaaaaagagcagttgcagcaggaaatcgaagactggagtaaattacatgctgagctcagtgagcaaatcaaatcatttgagaagtctcagaaagatttggaagtagctcttactcacaaggatgataatattaatgctttgactaactgcattacacagttgaatctgttagagtgtgaatctgaatctgagggtcaaaataaaggtggaaatgattcagatgaattagcaaatggagaagtgggaggtgaccggaatgagaagatgaaaaatcaaattaagcagatgatggatgtctctcggacacagactgcaatatcggtagttgaagaggatctaaagcttttacagcttaagctcaagagcctccgtgtccactaaatgtaaacctggaagaccaggtaaagaaattggaagatgaccgcaactcactacaagctgccaaagctggactggaagatgaatgcaaaaccttgaggcagaaagtggagattctgaatgagctctatcagcagaaggagatggctttgcaaaagaaactgagtcaagaagagtatgaacggcaagaaagagagcacaggctgtcagctgcagatgaaaaggcagtttcggctgcagaggaagtaaaaacttacaagcggagaattgaagaaatggaggatgaattacagaagacagagcggtcatttaaaaaccagatcgctacccatgagaagaaagctcatgaaaactggctcaaagctcgtgctgcagaaagagctatagctgaagagaaaagggaagctgccaatttaagacacaaattattagatttaacacaaaagatggcaatgctgcaagaagaacctgtgattgtaaaaccaatgccaggaaaaccaaatacacaaaaccctccacggagaggtcctctgagccagaatgggtcttttggcccatcccctgtgagtggtggagaatgctcccctccattgacagtggagccacccgtgagacctctctctgctactctcaatcgaagagatatgcctagaagtgaatttggatcattggacgggcctctacctcatcctcgatggtcagctgaggcatctgggaaaccctctccttctgatccaggatctggtacagctaccatgatgaacagcagctcaagaggctcttcccctaccagggtactcgatgaaggcaaggttaatatggctccaaaagggccccctcctttcccaggagtccctctcatgagcacccccatgggaggccctgtaccaccacccattcgatatggaccaccacctcagctctgcggaccttttgggcctcggccacttcctccaccctttggccctggtatgcgtccaccactaggcttaagagaatttgcaccaggcgttccaccaggaagacgggacctgcctctccaccctcggggatttttacctggacacgcaccatttagacctttaggttcacttggcccaagagagtactttattcctggtacccgattaccacccccaacccatggtccccaggaatacccaccaccacctgctgtaagagacttactgccgtcaggctctagagatgagcctccacctgcctctcagagcactagccaggactgttcacaggctttaaaacagagcccataaaactatgacctctgaggtttcattggaaagaaagtgtactgtgcattatccattacagtaaaggatttcattggcttcaaaatccaaaagtttattttaaaaggtttgttgttagaactaagctgccttggcagtgtgcatttttgagccaaacaattcaaaaatgtcatttcttccctaaataaaaatcaccttttaagctagagcgtccttacaactttgaaatgtgcaataaagaatacctgtgttttagctaatgtagcatatgtaattgcaaaatgatttagaatgtcatgaaaaatatgaacatttcctgtggaaatgctttaagaacatgtatttccattatcctatttttagtgtacaccagctgaatacggagcaatggtgtttataagcgtttttttaaactatctggtcacaaagactgttacgctaaaaatgtttactaaaagatcactaaactatctcccctcttgctgaagttctttgtagtaatagctcataaaaatttgtttattaatatttcccaagtgtctgttgactcattggactgttatgaggcttgtgccatttggggaacatgtaaactcaggctcccagaactgaagatggtggctggtggcacacttccggctgctcctccgtcacctgtgaactctacaagtgacgtctttttatttcaaagaagttttatttccccacttgtaatagcattccacatgcctttcctttacgatcctcattgtcctatttgagaatggttttcctgagagtgagtttaccattagtagccaagagttgtttgaccctgatgttcccattgtttttacccattccctgtagaaaaagggtgccacaacagaaaaatgaaaatgatgtgtcatggccgtaaaagtatagaaatctttaaaaattttaaaatgtacagtcccttatctatctttcccattccttgccactgatttttgaggaatataataaaaagattggaagagtataatgccatgagaaagaatgatttaggactgtgagggttataacatgccctaggtcagcaaccaagggttgaaatcagttctgttttagggggaaatggggggggcgacagatattattccaaaattaatattaattaatatttaaacgttggtgtttttatttaaaaatcagtaactaaccatctggaattgcaccatacttaaagtcttatccattactacactgtctttaaaacaatgtttctttaaatactctacaacgtttctaagaacgaacttcagacattttaattacagtaataatagcactccttttaaggagtttcagatccacactaaaactaaaatcataaaaggctgatacttttgtttgctgctaggctatattcttccattctttgaagtcctatgatgtaatatttttgaaacctagtgtatgtcttgtcactgttgtgatatttaatcgattaagaataccttgtaaaaaggagcaaaagcttcaatgtgaaacaattttctctctttatactaaacaactgaagatagatagtttagaaagataaggacctttgaaagaagacaactctgtcaaagttcataaggaatataaaaattcttcaggaaaagagaattcaatctatatgtcctcccgtttaatatcaagaatagaagaaattaagaggaaaactccacagaagagcataggccacttttagccatgtaaaaataagattaagtcacaaatacaacttttgaatttacctgtcaatatctctttaggacacaaaacaatgctgaagttaatataatttctaattttaaatgtcatttaagtgtagattatgccatctaggaaggtaagtaggaaaggtaaattaaatctatttttaaaattcaaaatattagagtatttttcccctctaaagccttttttggtgattattctgtatctgacataattgagaaactggtaagctgtaaagattccagtgtagcttctctgagaagttgtgagccagtccataactgcttcctcacatccatctgatttgcacccatttcctgcagcaaaccccccaaagcagggtgccccaatatgccagatgggccataggggagtatcatcccctcagcccaaatcaccttttcccatcctcctaaagtttccatcctattttgggaagtcatctccaactaattgtgtctggatttagttgctaaaattgtcttatttatttatgaagcagcaatattcagcctgaaagcatttctgccatagttgttgtagttatatcgccaatggctgatttttttcattggaaagtaaatttaagtaattcgtgggatgtggtatattctgtgtcaacttcaagataatcactcattttctcgttatattcaggtctgaattaaagttaagttaatcacccagtgttcaatttaagcttctttaatgttgatgaaaggtatttgtagttcatataaactatacttatgtgaaggatagcagatgcttcatataaattatcattttgatatacatatcttatggtttatgagaaaagagaaaaaataatacatcggttttgctacactttaatgggttttttttttaagggattttttttcaggtcttgtcagcaacatcaaacaaaaggtactgagtactccacagggtacagagtgctgccaagcaccttagaaaaattacatgacacggagaaaatgcgcctcttgctccttgaagagcttacagtctagggatttgacaactcacagtcttaggaactgggcaaagtaaggcaaattcttcatcccctagagctattgtggactgaatcattttagaatttggaattaatccaatcaagatgagagacaagactaaatttggctgagaattcattcaggctcgcatagtttttattaacatccgtctagtaaacagaatggacctaacagacaactgaaagtaaagactagatctcttgaagtgcaagggctacaacaacttaattgtggttacttattttaaaaagcaaacatactgaatggtatgactagggtgattacactagtttaaaaataggccaggtactgacactgcattcccctcatgcattgctcatttaaaatagtgaatattaaaatatgtgggctttacatctaacccacagaaagcccaccgcaaatgttctgtgtatcaaatatccacctcatgtgtactatgaaagttttatttatgccccattaagtcaaaagtaaattatagtaagctaatgacctgcatattttcatatggatgaatgtcagtatatctaaataggaaataaatggcgatcctatctacctatataaaaaaaatagaatatctttccagattttgcatactcctcactgtaagaagaggtatgcaggttttaaggtttcacaatcagttgtcagaaaaacagcagttatgcctgcagtatctcgttagcatctgactcaattatttttagattacattgtttagaagacattgtaaacccatctaaaactttgtaattattttgagatggttccaatgttaaccctagaatcatcatcagaaagagtaacaatgtgatgtagaagaacagctaatcgacatgactaaaaatatgctcattttcagaaaaacaatctggtcatctggaaacaatcacagctacaacctagggaacactcccatgtgggatactgatctggccaaggcacactttctaagcaggaaaactatcagatcagggtgaatttaggccacttcagaggtgctgcctataaacatccagacagaccttcttaggcagcagaactggtcccattcctctcaaagcagtttgacactaccctacccacatcaacccaaagcttgacgttaagtcaaaagagcatattggagcaaaagtgaacagatgtgtaaactctagcacattcttattgctgtattaagtctgaagatgagcacatcctacccacaacagtattgttccaggaagcagggtaggagtagtggtaaattagaaaatagactattaattgcacaattaatagaaaagtaaaaacatgtttcaaaatctacaataaacctgtatcccaaggagtcctatacgtcagtgtgatgtgctggactctgaattctgtggtacagctttgcattggactccgtccggcctactggtctgggtacggcttgcttcctgcctgttgaagggtgaatatgctacacagagctatgatggtttctactgagtggtaaaattcacagaagttccaggttcatcatgtcaggatcattccttgtgcaaagtttgatgtagatgaagataaagtggtttcttggtcaataattgcaatttctttcttttaaagtcagtgggtttcttgtatagttctattacaattggcccaggtttaatttcatccatctccatgaaagcaaaacac

SEQ ID NO: 72587 - DNA, 4779 bp, Homo sapiens
aggagcagtccgaggggaacgtgggttgaacgttgcaactagggtggagatcaagctggaacaggagttccgatcgacccggtaccaagaaggggagtgcccgcggcagggttcattgaaaaaatccttagtgatattgacatgtctcaagtgacataaattagccaatgactcggaatgatggattctccgaagattggaaatggtttgccagtgattggaccagggactgatatagggatatcttcactccacatggtggggtatttgggaaaaaattttgattcagctaaagttccatcagatgagtattgccctgcttgtaaagagaagggaaagttaaaagccttaaagacttaccgaattagttttcaagaatctatctttttgtgtgaggatctgcagtgcatctatcctttgggctctaaatcacttaataacctaatttctcctgatttggaagaatgtcacactccacataagcctcagaaaaggaagagcttagaaagcagctataaggattcacttcttttagcaaattccaaaaagactagaaattatattgctattgacggtggaaaagttttgaacagcaaacataatggagaagtatatgacgaaacctcgtcaaacttacctgatagtagtggtcaacagaatccaattaggacagctgattccttggagcggaatgagattttggaagctgatactgttgacatggctactacaaaagatcctgctacagttgatgtctctggaactggcagaccttcccctcaaaatgaaggatgtacatctaaactggaaatgccactggagagcaaatgtacatcatttccccaggctttatgtgtccagtggaaaaatgcttatgctctctgttggttagactgtatcctgtcagctttggtgcactcggaagagttaaagaacaccgtgactggactgtgctcgaaggaggaatctatattctggcggttgcttacaaaatataatcaagcaaatacacttctatataccagtcaattgagtggtgttaaagatggagattgtaaaaaacttacctcagaaatatttgcagagatagagacctgtctgaatgaagttagagatgaaatttttattagccttcagccccagcttagatgcacattaggtgatatggaaagccctgtgtttgcatttcccctgctcttaaaactagaaacccacattgaaaagctcttcctatattctttttcttgggactttgaatgttcgcagtgtggacaccaatatcaaaacaggcatatgaagagtctggtcacctttacaaatgtcatccctgagtggcacccacttaatgctgcccattttggcccatgtaacaattgcaacagtaaatcacaaataagaaaaatggtattagaaaaagtatctcccatattcatgttgcactttgtagaaggcttaccacagaatgacttgcagcactatgcatttcattttgaaggctgtctttatcagataacttctgtaattcagtatcgagcaaataatcattttataacatggattttagatgctgatggaagttggctggaatgtgatgacttaaaaggcccatgttctgaaaggcacaagaaatttgaagttcctgcttcagagatacatattgttatttgggaaagaaaaatatcccaagtgacagataaagaagctgcctgccttccacttaaaaagactaatgaccaacacgctctcagtaatgagaaaccagtatctttaacatcgtgttctgtgggtgatgctgcctcagctgaaacagcctcagtaactcaccctaaagatatatcagttgcccctcgtactctttcacaggacacagctgtaactcatggagatcatttactttcaggtccaaaaggtttggttgacaatattttacctctgacacttgaagaaactatccagaaaacagcctcagtttcacagttaaattctgaagctttcctgtttagaaaataaacctgtagcagaaaatacaggaattctcaaaaccaatactttgctatcacaagaatcactaatggcttcttcagtatcagctccatgtaatgaaaagcttattcaagaccaatttgtggacataagttttccatcccaagttgtaaatacaaacatgcagtcagtacagctgaatacagaagatactgtaaatactaaatctgtgaataatactgatgctactggtcttatacagggagtgaagtcagtagaaattgagaaggacgctcagttaaaacaattccttacaccaaaaactgaacaattaaaaccagaacgtgtcacatctcaggtatctaatttgaagaaaaaagaaactacagcagattctcaaaccacaacatctaagtcattacagaatcagtctctgaaagaaaatcagaagaagccatttgtgggaagttgggttaaaggcttaataagcaggggtgcttcttttatgccactctgtgtttcagctcataatagaaacactataactgatttacaaccttcagttaaaggggtaaataattttggtggctttaaaactaaaggtataaaccagaaggccagccacgtatccaagaaagctcgtaagagtgcaagtaagcctcctcccatcagtaagccaccagcaggccctccatcgtctaatggcacagctgcccacccacatgctcatgctgcttcagaagttttggaaaagtctggaagcacctcatgtggagctcaactcaaccacagttcttatgggaatggtatttcttcagcaaaccatgaagacttggtggaaggtcagattcataaacttcgtctaaaacttcgtaaaaagctaaaggcagaaaagaagaaattagctgctcttatgtcttccccgcaaagcagaacagttcgaagtgaaaatctagaacaggtgccccaggatgggtctccaaatgattgtgaatcaatagaggacttgttaaatgagctaccatatccaattgatattgccaatgagtctgcatgcaccactgttcctggtgtttccctgtacagtagtcaaactcatgaagaaattttagcggaattattgtctcctacacctgtttcaacagagctgtcagaaaatggggaaggtgactttaggtatttgggaatgggagatagtcatatcccaccaccagtaccaagtgaattcaatgatgtttcccagaacacacatctgagacaggaccataattattgtagccccaccaagaaaaatccatgtgaagttcagccagactctctgacaaataatgcctgcgttagaacattaaacttggagagtccgatgaagactgatattttcgatgagtttttttcctcctcagcattaaatgctttagcaaatgacacattagacctacctcatttcgatgaatatctgtttgagaattattgaattaatgcttgttaacttttttcatataatatttattattattagaagaacttacaatgtgttcaggtagtgtttatacactggacttgtgtaattacttgtgtaataaccatgaacaaaatgcaaggtttaacctttggttctgcccatgaagcatgtaatctttcttacacattaaaatcactgaatgtgttctcctttttggtttcattttgttcttgtgagagtatgaggatttcaaaatgttaaagatgaaaagtggcgtctagtttctgacagtttgtacagttggatgcattacatttttagatttgaagttttggttatgttagtgttatgagtgatctttgtggggttttcttcccctggaaacctgttgctcgtggcgctttgcccacggtgcccgagttcttgtcctgtgtccagatatgcagacaaatgaagggtgaagaagatgaagaggagctttatttagtgttagaacagctcagaggagacccacagtgggtagctcccctctgtaggcaggcaggtcataccctcagtgttcagtgctcagcagagaggaggcccttggagagggtagttcctccctgcaggcaggtcatttggtcatttggtggtctctgcagatctctgaagttctcagcagagaaggtggctcctctctgcagctggttgttccctcatctgctcaactctggctgagcccagggctttcatgggcctcagaggggttattgttggaggactgggtagactccaaactgcaacaacagctgggtgtggtggctcacgcctgtaatcccagcactttgggaggccaaggctggcagatcacttgaggtcaggagttcaagaccagcctggccaacatggtgaaaccccatctctactaaaaatacaaaaattagctgggcgtggtggcacatgcctgtagtcccagctatttgggaggctgaggctgcagtgagccgagattgcgccactgcactccagcctgggcgacacagtgagactccatttcaaaaaaaaaaatattttctaggccaggtacagtagctcacacctgtaatccagcactttggaaggccaaagagggaagatcacttgagcccagcagtttgagaccaccctgggcaacatggcaagactctgggcgtggtggtgctcacctgagatgtcagctactcagaaggctggggtgggaggattgcttgagcccagcagtttgaggccacagtgagccatgatcgtgccactgcactccaggctaggtgacagggcaagaccctgtctccagaaaaaataaagaaattttt

SEQ ID NO: 72588 - DNA, 1528 bp, Homo sapiens
cagagggtttgataaagtgctctggacccctcgggtgctgtcaaatggcgtccagttctcgcgcatcagtccagatggtgaagaaggctaccccggagagttaaaagtctgggtgacatacaccctggatggcggagagctcatagtcaactacagagcacaagccagtcaggccacaccagtcaacctgaccaaccattcttacttcaacctggcaggccaggcttccccaaatataaatgaccatgaagtcaccatagaagcggatacttatttgcctgtggatgaaaccctgattcctacaggagaagttgccccagtgcaaggcactgcattcgacctgagaaagccagtggagcttggaaaacacctgcaggacttccatctcaatggttttgaccacaatttctgtctgaagggatctaaagaaaagcatttttgtgcaagggtgcatcatgctgcaagcgggcgggtactagaagtatacaccacccagcccggggtccagttttacacgggcaacttcctggatggcacattaaagggcaagaatggagctgtctatcccaagcactccggtttctgcctggagactcagaactggcctgatgcagtcaatcagccccgcttccctcctgtgctgctgaggcctggtgaggagtatgaccacaccacctggttcaagttttctgtggcttaaggaagtgtgaagatatgatccagtccagggctaggctcagccacctgtctcctgtccagaaaaaaggtgaagattaagaagctttcagaatgattctatggattaaaatcatacaaatggtggctgttctgagaatcagtctgggtattgatttccttttccagtgactggctccaggccatgtctaatgaccagctcgattccctgtgcagttcagagagcaagtgaacccaaccaacaatgtcgtcatctaagccctgaccctagccagggactcccatgctgctgttggctccatctctccacactgcctctttcttttcaactttttgcccttcctttctttaaagctattctcacattgcttttatttcctcctccttcacctccaaccactgtcagcagcactctggagttttcaaatgtcacattagcctcaccctgcatgctaggagatggacctgtctctatacagcagtagatgattgataagtgaggaaactgaggcttacagaggttgaagaccaacaagctaataaataaaaagttgaggccgggcacggtggctcacgcctgtaatcccagcactttggaaggccgaggcaggcggatcacgaggtcaggagatcgagaccatcctggctaacacggtgaaaccccgtctctacataaaaaattagctgggtgtggtagcacgcacctgtagtcccagctacttgggaggctgaagcaggagaatcgcttgaacctgggaggtggaggttgcagtgagccgagatcatgccactgcactgggcaacagagcaaaactcgatctcaaaaaaaaaa

SEQ ID NO: 72589 - DNA, 1404 bp, Homo sapiens
ggaattccctgtacagagatgggcaattttgacaatgctaatgtcactggagaaatagaatttgccattcattattgcttcaaaacccattctttagaaatatgcatcaaggcctgtaagaaccttgcctatggagaagaaaagaagaaaaagtgcaatccgtatgtgaagacctacctgttgcccgacagatcctcccagggaaagcgcaagactggagtccaaaggaacaccgtggacccgacctttcaggagaccttgaagtatcaggtggcccctgcccagctggtgacccggcagctgcaggtctcggtgtggcatctgggcacgctggcccggagagtgtttcttggagaagtgatcattcctctggccacgtgggactttgaagacagcacaacacagtccttccgctggcatccgctccgggccaaggcggataaatacgaagacagcgttcctcagagtaatggagagctcacagtccgggctaagctggttctcccttcacggcccagaaaactccaagaggctcaagaagggacagatcagccatcacttcatggtcaactttgtttggtagtgctaggagccaagaatttacctgtgcggccagatggcaccttgaactcatttgttaagggctgtctcactctgccagaccaacaaaaactgagactgaagtcgccagtcctgaggaagcaggcttgcccccagtggaaacactcatttgtcttcagtggcgtaaccccagctcagctgaggcagtcgagcttggagttaactgtctgggatcaggccctctttggaatgaacgaccgcttgcttggaggaacccagacttggttcaaagggagacacagctgttggcggggatgcatgctcacaatcgaagctccagtggcagaaagtcctttccagccccaatctatggacagacatgactcttgtcctgcactgacatgaaggcctcaaggttccaggttgcagcaggcgtgaggcactgtgcgtctgcagaggggctacgaaccaggtgcagggtcccagctggagacccctttgaccttgagcagtctccatctgcggccctgtcccatggcttaaccgcctattggtatctgtgtatatttacgttaaacacaattatgttacctaagcctctggtgggttatctcctctttgagatgtagaaaatggccagattttaataaacgttgttacccatgtcctccagtgcttatcaaatgaggtaaaaggccggctggtgggcatggtgactcccccctgtgatcccagcaactttgggaggctgcagtggatggcttgagctcagaagtgtgagatcagcccaggcaacatagataccctgtctacaaaaaaaccaaaaaattatccaggggtggg

SEQ ID NO: 72590 - DNA, 1816 bp, Homo sapiens
ttttttttttttcaaacgcatgatgagctttgttttgtgagtaaaacataatacgcaaaagaagtatgcttgtaggggggtcttgggtcgtcatttcttttctgtttctggtttgtttttggagagagtctggctttgtcgcccaggctggagtgcagtggcgcgatcacggatggctgcagctcctggggcttcgcttcctgattcggttgtcctattttcagttcactcctcaggcgcggaggaaatggtggaaggcccagctctgggtgatcctgggcgctgcccccgttacccgttaccaggaagaatggtgagcctggcaggtcacagcacgagcgtgcacaggcccagcagggccatcagcagcagcgggagctggggcacgggcgtggtgccagaggcatacagacaggtggtgtaagcgtcaatgtccacctggcgcatggcacacacgtgctgcatgctgcaggcctcgtcgcagaccccagcagagtagctgactgagttatagacgtagtagcgctgcagtgtgctctggtcgccagcgatgcggtccagcactgtgtgcatggagtgggcgctggcgtccggcaccccataggcctcggtcagctggtactcgagctcccagcgcggcgtcccctgagcattcgcctggctcaggttcatgaagtaggtcaccatgtccttcaggctcagtgtggctcggtcatattcgaacacccggatggctggattgttggccccattgaccactccaggtaatgtggttttccatggggtgactccaggtgtgatgaacatggcgcttatggggacacctgcatcatcatagagcatccgaaagctgtcggtgtggtggtgcccgaagaactgccctgctatgacgcgatgatgcttccggaccaccttcaggtatttttcattgaagccctcccggaaccatgccttgttttgcgtcttctcaaagaaccccgggggcacgtggccgacaatgtacaccatgtccccagctttggatgcatcggtcagcacatcttccagccactggaactgctggccagggtccgccatgtctgctgtcagcgcattgctggtatagtacagattggtgttgaggaccacaattcgcccagccccgctgggacccggcagcttctcacagtagaaggcaccttttttgaagagagcgatggactcattactaagccagggtttccatagttctgctatctgattgtagatgttgttacttccagctgggaactggtttttggggtgaaaatcatgatttcccaaagcagcatagactttagtatctggaaagacctctctgatgagcttggtcaggcgttccacaatttccagtacagctgcctctcccagtttctcatcgggcacatgaggcgtgtcatcaccagtccagagaatgaagtctggctctggctcaatctccttcatggcatagatggaggagttgatgagggcccagggagaatcacagaggtagtcaccccaggggcctgcgtcgggcactggctgggatccagctgatgggcacacctggaaggggtctttggataccttgtagtcagggtcaaggtgcaggtcagcgatgtgccagaacttccctggttcagccctggcacctccccagttagccaggaaaatcagccaggcgagcagcctcatcctcggggctcacttccccagagccgtgggattctccaggcactgttgttgttctcaccacaggcttcctaagtagttttctgtggccacgtgccggagcaggactccttgtcctgttacg

SEQ ID NO: 72591 - DNA, 466 bp, Homo sapiens; identical to SEQ ID NO: 65388

SEQ ID NO: 72592 - DNA, 3344 bp, Homo sapiens; identical to SEQ ID NO: 65389

SEQ ID NO: 72593 - DNA, 2891 bp, Homo sapiens; identical to SEQ ID NO: 65390

SEQ ID NO: 72594 - DNA, 1062 bp, Homo sapiens; identical to SEQ ID NO: 65391

SEQ ID NO: 72595 - DNA, 1873 bp, Homo sapiens; identical to SEQ ID NO: 65392

SEQ ID NO: 72596 - DNA, 2515 bp, Homo sapiens
ttttgaccgcgctggaggaactctgcacgagatgaaatcctgctttcttttcctcagaactactatattcagtggctaaatggctccctgattcatggtttgtggaatcttgcttcccttttttccaacctttgtttatttgtattgatgccctttgcctttttctttctggaatcagaaggctttgctggcctgaaaaagggaatccgagcccgcattttagagactttgggcatgcttcttcttcttgcgttactcattcttgggatagtgtgggtagcttcagcactcattgacaacgatgccgcaagcatggaatctttatatgatctctgggagttctatctaccctatttatattcctgtatatcattgatgggatgtttgttacttctcttgtgtacaccagttggccttttctcgtatgttcacagtgatgggtcagttgctagtgaagccaacaattcttgaagacctggatgaacaaatttatatcattaccttagaggaagaagcactccagagaccgactaaatgggctgtcttcatccggtggaatacaacataatggagttggaacaagaacttgaaaatgtaaagactcttaagacaaaattagagaggcgaaaaaaggcttcagcatgggaaagaaatttggtgtatcccgctgttatggttctccttcttattgagacatccatctcggtcctcttggtggcttgtaatattctttgcctattggttgatgaaacagcaatgccaaaaggaacaagggggcctggaataggaaatgcctctctttctacgtttggttttgtgggagctgcgcttgaaatcattttgattttctatcttatggtgtcctctgttgtcggcttctatagccttcgattttttggaaactttactcccaagaaagatgacacaactatgacaaagatcattggaaattgtgtgtccatcttggttttgagctctgctctgcctgtgatgtcgagaacactgggaatcactagatttgatctacttggcgactttggaaggtttaattggctgggaaatttctatattgtattatcctacaatttgctttttgctattgtgacaacattgtgtctggtccgaaaattcacctctgcagttcgagaagaacttttcaaggccctagggcttcataaacttcacttaccaaatacttcaagggattcagaaacagccaagccttctgtaaatgggcatcagaaagcactgtgagacgcacagacggcgtcttctgccaccaagagacccgagaactccagattcacgacattcctgtcccatgtagaagcatttccattcaaccgtggcccctcttcagaacctagacctatcagtgccatttttttttcataatctacgaagaacttggctatggctgatcttttttaaatttaactttctgatggaccctgtagtttccagctaagtgcatattccttacagacatatagaacagcgcattcttctgtagacatttgctcatgttggtaaatacaatcacccatatgaaaaaattgttttcacctgatatgaaaatgttagaaaaggcaaactccgggacttctaaagatttacttaaatcccattatgtactttattcagaatgtagaagctgacttgaaaggcatccttggtactaagtgaagcttattcagaaaatgcatttttcaaatgcaatgggcaactgcttgtagatatcatttttgcagtgtatgttggagctgtaatggttgcaattatgtttcttatttccttaaaagcaaaaagcgtagtttctgatttatgttatagaatgatactgattagactttgagccaaggggaaaatactaaattcttttaaacctggagccttagagagccacaggaatatcttctgttgtacagtctaataagctgtggtaggaagtatcatgtaatcacagtttaatgacagtttatgtatatatataattcagtattccctctgataacatagttgccagtgtttaatacacttgtaacttggatttttaccttataggctatatgtatactcagttttttaaagcatttttttcagagatcacttaattccccatgcttctgcaatgcatataaaaactataaatgccgagtggtagaaactcctctttcttcatagtcctcaggctttggttacatttgcatatgccatttgaagcctccagcttttaccagtttaacatccaaagttcacagcatcagcattcatggtgtaagaacagttttgcagtataacacgatctgataatcattcagttattaaattgtaaataattattgggatggtttcttggctttaagtccactgaataaaaactatgaaattgcactctgtgtcaaccatccactagggtaggataccgaaatctgtggcatgcaaaaatagggagatggggcccatttggcacacaatttcgtagttatgcagtctgccattttaatttgttcac

SEQ ID NO: 72597 - DNA, 1087 bp, Homo sapiens; identical to SEQ ID NO: 65395
  misc_feature (1)...(1087): n = a,t,c or g

SEQ ID NO: 72598 - DNA, 654 bp, Homo sapiens; identical to SEQ ID NO: 65397

SEQ ID NO: 72599 - DNA, 2028 bp, Homo sapiens; identical to SEQ ID NO: 65399
  misc_feature (1)...(2028): n = a,t,c or g

SEQ ID NO: 72600 - DNA, 1151 bp, Homo sapiens; identical to SEQ ID NO: 65400

SEQ ID NO: 72601 - DNA, 2249 bp, Homo sapiens; identical to SEQ ID NO: 65401

SEQ ID NO: 72602 - DNA, 2128 bp, Homo sapiens; identical to SEQ ID NO: 65402

SEQ ID NO: 72603 - DNA, 1521 bp, Homo sapiens; identical to SEQ ID NO: 65403

SEQ ID NO: 72604 - DNA, 1929 bp, Homo sapiens; identical to SEQ ID NO: 65404

SEQ ID NO: 72605 - DNA, 858 bp, Homo sapiens; identical to SEQ ID NO: 65405

SEQ ID NO: 72606 - DNA, 2613 bp, Homo sapiens; identical to SEQ ID NO: 65407

SEQ ID NO: 72607 - DNA, 5264 bp, Homo sapiens; identical to SEQ ID NO: 65408

SEQ ID NO: 72608 - DNA, 3376 bp, Homo sapiens; identical to SEQ ID NO: 65410

SEQ ID NO: 72609 - DNA, 1824 bp, Homo sapiens; identical to SEQ ID NO: 65411

SEQ ID NO: 72610 - DNA, 1992 bp, Homo sapiens; identical to SEQ ID NO: 65412
  misc_feature (1)...(1992): n = a,t,c or g

SEQ ID NO: 72611 - DNA, 1960 bp, Homo sapiens; identical to SEQ ID NO: 65413

SEQ ID NO: 72612 - DNA, 1031 bp, Homo sapiens
ttttttttttttacagataaaaacactttatttaaaagtataaaaccaggcttactccttcaaactgctcccacccctaattatctccacaaagagctatataaattgggcaggggtatgtgtacagtcatctcagctctaacaaccccagttcttctttcaattctcctttctcccttcatacaattgagatgtttgtcctttgcactttccccaagatagcaaaggtgatacaaatgtggaaggaggggaagtgtagaaaataaactgtcatcatcctctattcccatctccagggaacagacagattatatgaactctgaccaaatgatttgcttgtctgaagaaacaaataataggtacagttactctctgtatcctaaagaaagacacgagggtccagagtccttcttcagtatatagcctcgtccatattgtcatcactgtcaccaccaaagtcctctccattgtcaaaatatgacatgatgtaatcagtttcctcttcatgttcttcttcatcatactcttcttcttcctcctcttccttctcttcttcttcttctttctcctcatcctcctctgaagttacttcttcttccttcttctccagggtctctagtttctgtattgtttcctccttatcttctgtggtcttagggggcctcttggggagcagaattgtaatccgttccttctgtagcttccgcactcggatctttagctcccggggtagacgccgccaatcagggttccaatcgatggcattgtcaatcggacctgacatctgatatttgtctgaataacgctccacatctctcttggggacagctggccggatgaagtaggggagctgcctcatggctcctcgtagctcttgcttcagtgccaggacatattccccttcctcgcctgagggcaaaggtactgggcgcaactccaagggctgctgcccctccccaaagcggagcccaagccgcgaccaacttgaaatgtactgggcttcctcaagtcgacacggcaccacactggac

SEQ ID NO: 72613 - DNA, 754 bp, Homo sapiens; identical to SEQ ID NO: 65414

SEQ ID NO: 72614 - DNA, 1815 bp, Homo sapiens; identical to SEQ ID NO: 65415

SEQ ID NO: 72615 - DNA, 1811 bp, Homo sapiens; identical to SEQ ID NO: 65416

SEQ ID NO: 72616 - DNA, 1522 bp, Homo sapiens; identical to SEQ ID NO: 65417

SEQ ID NO: 72617 - DNA, 961 bp, Homo sapiens; identical to SEQ ID NO: 65418

SEQ ID NO: 72618 - DNA, 1944 bp, Homo sapiens; identical to SEQ ID NO: 65419

SEQ ID NO: 72619 - DNA, 3671 bp, Homo sapiens; identical to SEQ ID NO: 65421

SEQ ID NO: 72620 - DNA, 1306 bp, Homo sapiens; identical to SEQ ID NO: 65422

SEQ ID NO: 72621 - DNA, 5940 bp, Homo sapiens; identical to SEQ ID NO: 65423

SEQ ID NO: 72622 - DNA, 499 bp, Homo sapiens; identical to SEQ ID NO: 65424

SEQ ID NO: 72623 - DNA, 4655 bp, Homo sapiens; identical to SEQ ID NO: 65425

SEQ ID NO: 72624 - DNA, 4455 bp, Homo sapiens
agatggctgccgacagtgagcccgaatccgaggtatttgagatcacggacttcaccactgcctcggaatgggaaaggtttatttccaaagttgaagaagtcttgaatgactggaaactgattggaaactctttgggaaagccactcgaaaagggtatatttacttctggcacatgggaagagaaatcagatgaaatttcctttgctgacttcaagttctcagtcactcatcattatcttgtacaagagtccactgataaagaaggaaaggatgagttattagaggatgttgttccacaatctatgcaagatttgctgggtatgaataatgactttcctccaagagcacattgcctggtaagatggtatgggctacgtgagttcgtggtgattgcccctgctgcacacagtgacgctgttctcagcgaatctaagtgcaaccttcttctgagttctgtttctattgccttgggaaacactggctgtcaggtgccactctttgtgcaaattcaccacaaatggcgaagaatgtatgtaggagaatgtcaaggtcctggtgtacgaactgatttcgaaatggttcatcttagaaaagtgccaaatcagtacactcacttatcaggtctgctggatatcttcaaatcaaagattggatgtcctttaactccattgcctccagttagtattgctattcgatttacctatgtacttcaagattggcagcagtatttttggcctcagcaacctccagacatagatgcccttgtaggaggagaagttggaggcttggagtttggcaagttaccatttggtgcctgcgaagatcctattagtgaactccatttagctactacatggcactcatctgaccgaagggatcattgtggataatgatgtttattctgatttggatcctattcaagctccacattggtctgttagagttcgaaaagctgagaatcctcagtgtttgctaggtgattttgtcactgaattttttaaaatttgccgtcgaaaggagtcaactgatgagattcttggacgatctgcatttgaggaagaaggcaaagaaactgctgatataactcatgctttgtcaaaattgacagagccggcatcagttccaattcataaattatcagtttcaaatatggtacacactgcaaagaagaaaatccgaaaacacagaggtgtagaggagtcaccgctaaataatgatgttcttaatactattctcctgttcttattccctgatgctgtttctgagaaaccattagatggaactacttcaacagataataataatcctccatcagagagtgaagactataatctctacaatcagttcaagtctgcaccatctgacagtttaacatacaaactggctttgtgtctctgtatgatcaatttttaccatggagggttgaaaggagtggcacacctctggcaggaatttgttcttgaaatgcgtttccgatgggaaaacaactttctgattccaggattagcaagtggacccccagatctgaggtgttgtttactgcatcagaaactacagatgttaaattgttgtattgaaagaaagaaggcacgtgatgaggggaaaaagacaagtgcttcagatgtcactaatatatatccaggggatgctggaaaagcaggagaccagttggtgccagataatctaaaagaaacagataaggaaaagggagaggtaggaaaatcttgggattcctggagtgacagcgaagaagaattttttgaatgcctaagtgatactgaagaacttaaaggaaatggacaagagagtggcaagaaaggaggacctaaggagatggcaaatttaaggccggaaggacggctctatcagcatgggaaacttacactgctgcataatggagaacctctctacattccagtaacccaggaaccagcacctatgacagaagatctgctagaagagcagtctgaagttttagctaaattaggtacatcggcagagggggctcaccttcgagcacgcatgcagagtgcctgtctgctctcagatatggagtcttttaaggcagctaatccaggttgctccctggaagattttgtgaggtggtattcaccccgggattatattgaagaggaggtgattgatgaaaagggcaatgtggtgctgaaaggagaactgagtgcccggatgaagattccaagcaatatgtgggtagaagcctgggaaacagctaagccaattcctgctagaaggcaaaggagactcttcgatgatacacgggaagcagaaaaggtgctgcactatctggcaatccagaaacctgcagaccttgctcggcacctgttaccttgtgtgattcatgcagctgtactcaaggtaaaggaagaagaaagtctcgaaaacatttcttcagttaagaagatcataaagcagataatatcccattccagtaaagttttgcacttccccaatccagaagacaagaaattggaagaaatcattcaccagattactaatgtggaagctctcattgccagagctcggtcactaaaagccaagtttggaactgagaaatgtgaacaggaggaggaaaaggaagatcttgaaaggtttgtgagttgcctgctggagcagcctgaagtgttagtcaccggtgcaggaagaggacatgctggcaggatcattcacaagctgtttgtgaatgcccagagggctgcagctatgactccaccagaggaggaattgaagagaatgggctccccagaggaaagaaggcagaactccgtgtcagacttcccaccccctgctggccgggaattcattttgcgcaccactgtgccgcgccctgctccctactccaaagctctgcctcagcggatgtacagtgttctcaccaaagaggactttagacttgcaggtgccttttcatcagatacttccttcttctgattcttctagcattactcgttggtggcttcagagacagtgctgcctcctcctgagggagggaaggtaccagggagaacctgggaggtcctggagagggccctgtccagttgggtgatcaggaatcaaaccagcatcggaaagacttcccagcaccaagcttgagctgtgtcgtttcgtggagggggcagcgaggatgggcttgagctgttgagagatttctgccctagagatggcctttgtatatgggggggtggtggggggacacaaacacatcagacactccgtcctcacactggcaggacggtgttcatcgcattctcttctgtgaccagcctctaggctagcggctgcattcgtggtctgtgcaaacacttcgtggttctatatatcagcagcaagtgtgcaaaataaaggacctgttaactcagatttctggatattttggtggtagcttctagtcccagaatctgtgtttttaaaatactacatgacattctgtctattcaatcacctggtggtcatctttcttgtactaattaactgttgatgagcattttggatattctaggagaaagcctataatttcacatagtttctctttttcatgtaactgtaacctaaatgtattacttctgataaaactatatatcaaatgtcactgcaaattagttttatatctgtcatgtgagatttgtcttacttatttttcttttggttgccatggaagttatggccctgaaaatcgtctccctccccttctcttgctgtacagcatgcgttctctttttgtggttgctggctgggtactgtatttaatgaagtagagaatagcacttgcaaaaatacagtcttggtacctagagactgtcatgcagatagtataatttggtatatgtgctaatgcattgagtagaggattattttaacacactattttgcttttgtattttagttaaaataatcgatggggatgtgtagcccccccgtgtgaggatgacatcaccacatttctagtttcatggagctcaagatgtcttgtgtctgtgtggctagatggcctctgcttggtaatcttatttttaggcctaaaattcccacttaaatccaaagtaaaaatggttatactgaagcataaaccttgcctgtgtaattttaaaaaattaatagagctgtgcaaaccctgttatttttgtaaaaaaaaaaaaaatacatatctatatataatatgtgtgtgtgtgtgacatatgcacacgtctctgtgtatgtgaagtaggggaggccctgggggatgacctcccagcctttatgaatcttttctctatgctgctggacttcattcttactggtcacgcgatgcaggcggcctgaggccagtgctgtaccaagtagaagacggttcctaaggacagagtttgtctgttttctaacaaagaaaaattctacaaaggagtggttaaagttacaaaggcattgtgaatctaataaaaggaaaggtgtcgcttaaaa

SEQ ID NO: 72625 - DNA, 2004 bp, Homo sapiens; identical to SEQ ID NO: 65426

SEQ ID NO: 72626 - DNA, 4490 bp, Homo sapiens; identical to SEQ ID NO: 65427

SEQ ID NO: 72627 - DNA, 2333 bp, Homo sapiens; identical to SEQ ID NO: 65428

SEQ ID NO: 72628 - DNA, 2313 bp, Homo sapiens
cctcctgcagttgctcccactgtctcccaaatctggcgaacttttaggcaatggtaatggcaagtagccatggaattaattctgtgtggtaagaggcacacagacagatgatgagcagctcttctccttaaagaagtctgtgtctaattcctacgcgtggccgttgtcagagtatagctctttcccgttacctttactagccagaaacagcttgcttgctttctgaagaaagagaaatgacgcaccacagggtacatcagatgaatcagaaattacattgtttggacttcaaaacagtgtttactgactctgggcttaaacttctagtccactcctagaacagaaaccctcaaagttcaagagtgtttttttttgtacaattgtttatacaaattcaacaaaggtaaaatcgcatcagggaaggtctaggaaacaccaccttacaacaatggcacttataaatgcagaactttacaactaggaaatagccatgttacaaacctaaatgagaactcaactcacacttcagaggagagaagcaaaagcaaaagaaaggctatgtgggagcatttattctacgtcttgactcactgtataaattagatctatgtaagtacaagagctcatgctggagcagaacctcctgagtgcaaaggctgaagtcgaaattttaaaatttgagaaaagtgaattctctacagaggaaacttggcagagtatcttactttgactataatttacatttatccacaacatgctcatgtaactcttgaggtacaaagcagactctcaacttccagttaaacatgcttttaagtggaaggtcttagcctactttgttagatctgggcacatttgtagatgggttgtgtcgatgaagtacacgttaaattctctcctaccttaaggaaatcaggaaaattggcaatctcaaaacaataaaaacactggtatgcattcaaaccttgcataaataacttttaaacaatttgtacaaaaatagttctgcataatgtaagatgtaacaaaaccaaccaaacaaaaaaaagtgtcaagacggcagcagatgtggtgtgtggtccactttatgtcaacacccaaaacctcggtgttgcaaggaatgaagtgtccaaaacaccactaccactaacagaaactcctaagctcatgcttcagtatgagaatttctccgaagtccaccctcctctccgacaggaatgtcttcttgtaaaggccgccttagaaatggtccagaaagcagtgcagttacgattcagaaagaccaaaggaaagtgtcggctcactcatcccccaaacgggtggttgaacagcttctcccttggaaagacttgcaaaatggaattgcgttgtggtctgttgtcccacgttccaaatggaaaataaaagccctcatttttgtaaagtctctcccctcccagagcccgccccgtatttacatacttatccttggactaactcagtttttgcaggagtttttcttctaacttgcccaaactggacactcacagacatctcggctatgaactgctcacagccttccttggtgacttgcttgcagtacctcaggtcaatatgacagatgtttccacagcgtttgaagaaggacaggcactgatcagtgaccttattgcagtcagacaggttgatctcggttaaggagtctcgggtggtggtgccaacagcagtgagcaggttgatagactggtcggtgacgtggttacagtaactgaggtggagcttggagagcaggggcatgtggcggatgatgagccgcagggaggcatctgtgatgtccaggcctgccaggcgcagctccacgatgttccggagcttgctccgattgtccatctgacctggcctgttgtctgtgggcggggacaggagatcccgcatctgggcatcctttagtccctccacccactggacatccagggtccggagcagcggacaactggagctgcaaagggccgagaccgcgatccatgagcagcctgacagcaccaagtcccggagcccaggcagccggttgatgagccagctcagctgcttcttggagatattggtccagctgaggtcgagggagacgggctgtcgccggatgatgccactcagcatcaggggtgtgatagacttgcagtggttcaggtcaatgcgggtccacaaccgcttatcgcagcaccagcggttccaggtcctgcagacccgcatgcacacacacaggtcttggtggctgaggtagctgaagacggccatccacacctccctgtgcatgacgtgggctgccccatcgtc

SEQ ID NO: 72629 - DNA, 1319 bp, Homo sapiens
gggcgttcccgactccggcaagagggtggcgcctggactctcgccctcagagggaggcccgtcccacggtctgtggctacggatcccaggaccctcttcgcgggcgattcgcgtagcctcaggtaactgcatcctgcccagcatgacggccccctgcccgccgccaccttcagacccccagtttgtcctccgaggcacccagtcaccggtgcatgcgctgcacttctgcgaaggagcccaggctcaggggcgcccgctcctcttctcagggtctcagagtggcctggtacacatctggagcctgcagacgcggagagcggttaccaccctggatggccacggcggccagtgtgtgacctggctgcagacgctgccccaggggcgccagctcctcagtcagggccgggacctgaagctgtgcctgtgggacctcgcggagggcaggagcgctgtcgtggactccgtgtgcttggagagtgtgggcttctgccggagcagcatcctggccgggggccagccacgctggacgcttgccgtgccagggaggggcagcgacggaggttcagattctggagatgccctccaagacgtcagtgtgcgccctgaagccgaaggcagatgccaagctgggcatgcccatgtgcctgcggctgtggcaggccgactgcagctcccgcccactccttctggccggctatgaggatggatcggtggtcctgtgggacgtctctgagcagaaggtgtgcagccgcatcgcctgccatgaggagcccgtcatggaccttgactttgactcccagaaggccaggggcatctcaagctccgcggggaaggcgctggctgtctggagcctggacgggcagcaggccctgcaggtgcgtgggactcatgaactcaccaatcccgggatcgccgaggtcacgatccggccagatcgcaagatcctggccaccgcaggctgggaccaccgcatccgcgtgttccactggcggacgatgcagccactggccgtgctggccttccacagcgccgctgtccagtgcgtggccttcaccgccgatggcttgctggccgcgggctccaaggatcagcggatcagcctctggtcactctacccacgcgcatgactcacccactcccttcccgggagacgaggagggcgggcagggaggtgggcatcaggccccagccttggcctgaaacctcaagggcctctgaggaccagcaagtcatggcccaaggaccatggagtccccgctgtcttcatgagatcagactgcacaaatgtccagtgtctgaaccgcatggaagggcaggat

SEQ ID NO: 72630 - DNA, 2304 bp, Homo sapiens
ttttttttttttttaatggggtttttcttttaataagggtttttactcaaaagtgtagctttgaaaatctctagcttgttgtgaaaaccaggaaagccaaggagctgcctcacactgcacaccaccacgtgtaagctgtgggccgctgtggtgtttgcaaactctccattaccaaggctggaatcaaatgcaccactttaaaatcagagccaacattttaaatttaggaggatgatgcatgtcctacttttgattcaaggagaaaggacaagttcttaggtacaggtaaaacaaaacacaaaagtaaacaaatctttagaaatcactatatatatgtgtgtttatatatatatttttatataattaggattatcatcatttcaaactattaaaaataaggttgccaccttaccttttcttttggtaatggggtgttattttttttaagagaaaaaaccaaacattttgcccagactctagagtttcccaacttcaattctgttttctgctgtgcaacttccccaccttcacgctgtatccccaagtcccgccaccaattctggctggcaggaggcagagcaagctttcattctggtcatcaagatgacaggcccacaaaagtacagctgagacgggaactgaattcttccccaggaagaaaatacctatacccacaataggtctgcaaaatctcccacaggcacctcttctccctttcttgtggttgtttgttaattggtttgttttgcctaaaagcaagatggcaatcttaatcaaaaagggaagctagatttttaaaataacttaaaaaaaccatttttatataaagcagcaaaaacatatcttcctctctgcagaaagaaaaatgttaacaaggaaacacagcgatgtgaacggactgtccgtcaactcctgctccactggatcccccatccagcttcacctcgagctactccttaactccagcagtgctgtctgaagaagatcctttggcgtcttcaactgctcttttactttcttgattgagactttcattttcggacctggtcccattagggatagagttttcaccgtttacaagcccgttttctgtggcctttgctttgctgattgcctctctgatgttcaaggcatcctgcactccagcctcctcctcgaggtttctcaagaccagggggagcctcgagtcccccacgctgctctccaacagcccaaggttactctcttcatatttgggaagcggagccttttcctccatctgttggcgatagtattcccggttgacagctgcactctttactgctttttccaaaatctctttctcacctaagcgcaatttgatggccatttttgcacgaacagaaagatcgtggtttttcaagacggatttatcttcctcaatagttgttttatatgtttttaaaagaagtgaggctctatcttcaagaaatgtccaaagtttgacctcgttgtcccagctaacaggaaattccgagttccccaaggtgaagattctatcaatagcgctgtctcccagcaagtgttctttcagttcttcttcagtcatacagaatactcggagaaaagccaaaagctgagcagagatgggcggctcggtaaaatgcaatgcaaaaacactggaagtggggatgccggcacgagccaagacctcggccttcatggcgtagagtctgtcacttttactcactccaagctttattttcactctgtcgtgtgagttattgtcaaagaaaaaaccactgtggatcacaaactctgcgttggatcgagtgccataaaaaatgtaaatctgctctccagcccgaaaatcctgcagagccacacactcacagcggtcatcttccaggttgtaaccagtagtgatcaggccgttggtgtggttacacatatcccataaaggaatcagagccagggtcacgcgggaaccatcctctgtgggaatttggttttgcctcgtcataacagaagagactgcccacctgtagtcctcgtaagtgaaagaatccttcaagggtagtttgttggcatgaggatgggtctggatgactttatagaagtaggcgtactgtcgagctgtgtttttatactggctgaagacatcatgtatagcttgtgtggactgaagataccgaacttcatcttcttcaaagtagagaggagtgtcatattccctggggagggtttgaatatagggctgccagaaggagttagggctggctcgctcccccagcaaatgaaaggccagtgcgatgtttcccatggcttgaaggattcggtcttgag

SEQ ID NO: 72631 - DNA, 5048 bp, Homo sapiens
ttttttttttttaagatggagtctcactctgttgcccaggctggagtggagtgattggagtgatgcggtctcggctcactgcaacgtccgcctctcaggttcaagcaattctcctgtctcagtctcctgagaagctgcgattacaggcgcctgccaccacgctcggctattttttcgtatttttagtagagatggggtttcaccatgttggccagcctggtctcaaactcctgacctcaagtcatctgcccaccttggcctccccaagcgctgggattacaggcgtgagccaccgcgcctggcctgattcatatatattactaactgaaatgcagtatcactgcacttccccaattagtaaattcaatacatcctgtatgtaaaaaaacccaccaatccccacaaaaaaccaatcaaacaaaaaccccaaaaaaatcaccaaaccatactgtcaagcgaaatagttttaattagtaggctgatcataaataaatctacataaaagatttaacagaattacaaagagttttgtgttcctttgtggactcaattcataatatgcattagtcaacctcattctctaactgtgacaaaaagagttgtcatccaacaatgcagcacagtttaagcaattcatatgctatagttacatttttacattttctttacaaatgtaacatttatgtacattatatatagatttttttctatagttcatgtactgaaactctattgtttttacagagaaaatgttgaattcatttaatgaataagaaacattccttgttaaaaagtaattcatataaacaaataacacggtaccaatgccttttggcatctcttgccagagttcaagtccagaaatgttatattaattataagaaaaaagaatttatctaattttacattatgacatatcattccacatagctacataaatttgccagcttgcaatgaacagagcactgtactgccatactactggaaatgtgtagaaaccaattcaaaatatacttggtgaaacagcatcatcgttaccattaatttgagttgaaaaagatctgtcaagttctttcttcccctttactttttaccaaagcctcagacagagtgctgtgcgttgcatcttgtattaacaaatgccttcatttcaaatttctcacgcgcttctctgacagattatgctttacctaggttatagatctttttcttattcaattttattctacttcacttacaaatctgctgctgaacatgaagcaaaaattcatagtaagaaaatgcagcctctgtccggtcttcaatcaaatgctgaaaaaattctgctttggcaggactctcatcttttactatgtgaaggattggacttaatggtctgctgtctctaagccaagttatgaaggatctggctctttctgatgaaagtgtatctagctctggaagatgtgtcattttctgtggtattgatgcaaaattagtatatccaagcacatcctctatgaagttattgtcacagcctttcccaacccaaatgtaaaaaacagagccacagtccataaggaaagcaccttctcttgtcagcttctctgcagacaatttttgaagaggtggctgtggtacaatcctgtcattaacatgtactgcaccctcatctgtcaatctgtctatcctgtataagttgggatgaatcattttcattagatgaacaagtggctgagactttatctgacacatggcatatacacgatcatccagccgtgtgcttgtacccgttctaaatgctttctgtttgagaagggccaaaacatagagaggaaacaacttgagggagctgggcgccatcaatgcagagtgctgtaaatttgagacagttgagccatatgcagacaatgagtccactacagcattcactaaggcatctcttgcatctgacagacttgatgaaacggaccgatccacagccatgtttgccagaaggcagatggcagcttgtacatccactcccgcatatacatctgatagtgaacttaccactggcaaacaaagtgtatgtactctaattctccgctcacctttgcttgatgtatataatagggctgtttgaaaacatactaaggaagtatctgttaaactttcttcaattgacaactgcaccgcaaatccagcatcaggattgatgttggcaagggataacaaatcagtagaacggacaaagaagttaccgtgaaaagtgtgcattgaaagacctttagtacaccttattctcataacagcttcaaacccaatttttcttgtgagataccgttttaggtctttttgtaacttttctgcttgtgaaggattgtgagtatagtggaatgatggataataatagatgcaccctgcagaatacttggacatgcaagctagagaagcaagatcagaatactgtgaacttaaaaggaacaaatccactgcagtttgctgtcccgagcaatctaatgcaagtttcttataaaaatcagttgcagggccaagatgttgtaccacctttgtacttgatctctgattaggatcttctctggattgcagaagtcctgcacccaaggaaggtaactgtgtctgaaatacagacacacggccacctgttggagacattaatttaaaggcagcctgaagtgcaggaccaagggcactgtgtgtttctcttgtattggtgaacatgtttggtaatgcattcagtaagtcttttataagctctttactttcatatagattcacaagtaaactatccggtgtaggtagaaaaacatcatctatatcagacacaatcaacatttgaggctgtgataatccttcctgggtaaattgtagaaatgaataggtgcttatcaaaggtcatgaatcctattcttggttcgtgaattctccaggaagcttgtctagatttttctaggagtgactggcaccaaaaattgtcaaatatccagcttccactgcattatgagacacatctaaaacaaacaagtaaactgcaggttgaggaggacgcagcatgtaatctgaagaagcaatgaactccacagttggaattctgaacttctggtcgtttatgaggctctccataagatcgggtaagggggttatacataaattcttcaggaacatcgtttactctatagcacaaattgcatttccatctacgttgatcaatgaaggatacaaacggggttaatatacgttcgacaggatcggcacctcacaatggtatttgatgttatcactggtaattgcgttaggtctctgaagggatgtaacaacaatcctaaaggaagcttagctttattcagtaaagcctgtgtctgtggaatatttgtcaaagtacaccgaaatgaatctgggctacagtttaattttttgaggtctgcattcaagttaggtacaggagcccaaacaggagtcataggtaaaatattcctctcctgagtaaggtttacaggtctcaggctttctggttgtggagaactctgaagactcaatcctcctatactggaggatagctggttcacaccaggatactgttgaggatactgctggaatccagaatataccgggttactggggctgtactccagaaataagtggtgctgtagcattctgataaccaggctgaagtgttggatagccatagccaaaggcttagccatttttgaaggctgagggacgacaggagctggagctgaagctggagctggagcagaagcaggatcaggttcaggggcgggatcaggagcaggactgcttgctgatgaagaaagcatatctgggtaactgcctccttccagggcatcataactgttgggcattggagaagcactgcttgtggtagaagagctgtcaacacctgcttcctcatcctcctcctcctcttcctcatcatcggaagttgatgacaagggagttggtgcggagctagcttggttattaacatattcaccatactgcacgcctttttgttgtaatagctctgatggctgtgtaactgaggtcacaggctcaactgggtgatttgcagtgggaggtgttcttgttgatgaggatcctgaggatcctgataaaacagtggataccactgggctggacttgggaggctgaacattttgcataacaggacaggataaagaatctgcaacagtaatggttgggttgttgttcgctacagccagggatcctgtgtggtttcggatgagattgtcttgagtcgatggaaggcctggagatgaccacgttagagtactgtatcctgaaagactttgctgctggtggtgctgttgtgatggtagaggtggaagtggcgatggatggctgatagctgtattttgaccagagaatgaattatctttaactggcctaacagtcggagcattctgtgaggtaaacatttgcccatatgtatcaccagcaggcagagagggatatgaaacactaggatacgcggcattagaaacagttgacatagcataatgaccacaagtagagggaaatccctgagacgcaacagaagagctggcagagtacatggctggactattgtagtgattcacaaaagaggagtatggttgggaggcactcgtatgcaaatgggatgctgacgatgcagcaccttggaaagatcctagagtggatcccacaatatgaggggcaggaggacccctgctgtacaactgctgtgctcctggttgctggttcactgtgttaggagtcacattttgtgttggtactgtatagagagcagagtagtaatcaccacactgggtatccaatggcaatgaggtcattttcccaggtccttgagagtaatgtcctgagggagcaatatagttttgatgatgcaatccatatccagatggaacctgcatttgattctgggctggaccgttctgctggtgcggcgccgggcccgcacccgggcccgcgggcgctgcggctcctgagacggccgatccgccgaacttgggcgggatccgggcgctggcggccgggtgagaggacccggcgggggccgacat

SEQ ID NO: 72632 - DNA, 606 bp, Homo sapiens; identical to SEQ ID NO: 65431

SEQ ID NO: 72633 - DNA, 559 bp, Homo sapiens; identical to SEQ ID NO: 65432

SEQ ID NO: 72634 - DNA, 986 bp, Homo sapiens; identical to SEQ ID NO: 65433
  misc_feature (1)...(986): n = a,t,c or g

SEQ ID NO: 72635 - DNA, 792 bp, Homo sapiens; identical to SEQ ID NO: 65435

SEQ ID NO: 72636 - DNA, 4490 bp, Homo sapiens; identical to SEQ ID NO: 65427

SEQ ID NO: 72637 - DNA, 823 bp, Homo sapiens; identical to SEQ ID NO: 65436

SEQ ID NO: 72638 - DNA, 1533 bp, Homo sapiens; identical to SEQ ID NO: 65437
  misc_feature (1)...(1533): n = a,t,c or g

SEQ ID NO: 72639 - DNA, 607 bp, Homo sapiens; identical to SEQ ID NO: 65438

SEQ ID NO: 72640 - DNA, 907 bp, Homo sapiens; identical to SEQ ID NO: 65439

SEQ ID NO: 72641 - DNA, 780 bp, Homo sapiens; identical to SEQ ID NO: 65440

SEQ ID NO: 72642 - DNA, 2796 bp, Homo sapiens; identical to SEQ ID NO: 65441

SEQ ID NO: 72643 - DNA, 4197 bp, Homo sapiens; identical to SEQ ID NO: 65442

SEQ ID NO: 72644 - DNA, 1239 bp, Homo sapiens; identical to SEQ ID NO: 65443
  misc_feature (1)...(1239): n = a,t,c or g

SEQ ID NO: 72645 - DNA, 1587 bp, Homo sapiens; identical to SEQ ID NO: 65444

SEQ ID NO: 72646 - DNA, 4367 bp, Homo sapiens
ttttttttttttgtgcaagatttaataaaaaacaaacaaaaataggaaatggttgctttcaaaaatttccccaggttgtgaaaaggtttgccaacgactctcagggggtgtggttctaagctgcatcaagtgaaacaaatacaaaatgctgtccctcctccctgggctcggaaggcagtgcactttctccctcttaacagcccagactagcgggtgaggagtcagtgctgtgaccccagggccaagctggagtgtccgcatagctttttctctgaccagtggggattccatctaccttgaggcgtgctggcctgggccccgtttccacaccagcacatggtgagacagggtagcttatcaacaggctgctgggccttaatactgacagtgagtgttgggccgggtcacagccaggggaaaggacttaacacagattgccctcccaagcccccactggctgggcctaattttaggattaccacgggaaaaaaagctttgatgaaagacaacaggaagtcaacacagcagagagtggtgtggacaacccagaagccagcctcacgcattccatgcccacagttaacgatgacaacaacagcaataataataataataataaaacaaaggtacaggtgaaaagcagcgcttggggtgtgctgctgcaagctggggaaggcgcgtgctcaacttggatgggacacacctagtctttcttcaagtccctggattcaaagagcttcaaccgttcttgcaccgtcaggccttccttcagactcttggacctgatgtttctgagttgccgggtgacacaggatctgtctttcttcaagaagtcagggttgcttttagatttcattatatcatatccggacaccgtggcactgtcaggggacttctcccccagtgcttccgttgcagccttgagctgctccttcaacctgctgatgtcacagtcagccttagccttcgcgatgctgagctctgtgtagatgtctttgtacttgtcacttgcatacttcttgtcccgcagtgccgtctgcagctcatccttgagggagctaatctcctgtttcaggtactgtatttccgattcctttacccgcaataagacctctagttcataggcatccttgccctgtgcaaggggtgacccagtggcctccccaccgccgtccccaatcaagcaacgtccgcaaccgtgtgatctctgcagccaggcggttgttcagctcctggttgtgggcattgagctcctggttctcacgctggcactgccgcagggcctgccgctcggcctccagcgcctgggccagatgggcattctccaggcacttctgcgagtactgctccgagaggacctccaagttccacgctgcaccgactgcagctccctccaggtactggcgccgcagggcctcaaacatccgaagttgacgctgctgatctgggaccgctggctcttctcccagtcccgctccatttcctcccggtgggcgttcttcatggcttcgatggctgagatggtggccgctgtctcctcggctaggaggcggtctttctcttctcgaagtttctctagctcccgctggtgctgcctctggagatcttcaatcttccttctggtgcgtttcttccattgctgcaaaccctcgctcgcacgtggccttaaggctctccaagtccctctggtacttctcacgcagtgtggccgcgtcgccctccaggtccttgtgtcccagctcctcccgcatgacatccatctgggcctccagctcctggatgcgctccctcagccccgtcatggagtcagcctctccctgggtggcctgccagttgggggcaggggctggcagggccttggggtgtggcccctggtggaggcagagggtgtcctgaaggcacctcaggctctgcgagtagtgctcctgcagggtcctcagctcctcctcgtggatcgtctgcagctcccggaccttgagctggaacctgtcctccagggtctgtatctgctcaccatgatgcctctccatgtcctgcctgtctctgaccgaggcatccagctggctcaggacccggctgcgctcagcctgcagtgtgctctcggtcctggtcagctgctccaccacacaccgaatctcctcctcatacctgccccgcagggtgaacatgctcatgctgtgcttgctctctgcatcctccagacactgctgctgatggtctagctgggcggccttggccttgagctctgcattctccctttcaacaatggcgatcacatccaggtactcgctcttctgcttgcggagaagctcctcatactcctccctcagggcccgggctgcctgtgcctgctctgagcaggagggctcccgggtttgccaggactccttgcagagctggagctccttctcatattctagccggattctgcaggacgcatagcaaacctgggcctgaataatggcatcctgaaccaacaatgaagaatactgaccgaggcctcccaaacaagtgttatacgagagactctgggacacctggagaagcttctggcaatctctcagcgattccacaggtggcagagatggtaaggcagccgctatctcctctaagaggctggccttctccttcagctgctgggcaagctcctcctgaatagcaacaaaggccccagggctctggtcagacacatcgaagggctcctgagagctgtctgagtctcggcccaggacttctcctaaggggctcaggtcccaggacagctgaacaccatcttcatggcccgctggaagcctgagggcttccaagacctgctgcatcactctttcaaagtctggggtttggtaggctcccaggatttccctcagcaggcatttgtgctgccgcagggccgtctgggtgccccgcagggtctcctggatgctctgtagcctgcggtggaacgactccctcactgactgtgtggcaaagctgagctctgccctgacccatgtggcattggccaggatgggggccaggccctgtgggatgctttgctgcccgtctcctgaggcaccgactgcctctcctcccagtgtccccaagtgcttcctcagagactcaacctggctccagaactcaccatccactaggaccttcctggcccaggtgtctacgggggccccagcagattccatcggtggctgtcctgaccaagaaatctcatggagcattcgggagacatctgatgttgtgttcttcagggaatctgctatctggctgatcagcgaggcctccagagcaatctggtcagaaagaagcctcacctgctcctgctctgtcaactcagactgggagcactgctgcagggaggcaggcttcccattctcctcggtgccacctgtctccagctgtgcacgggccccgccatgggctggggccggccagtgctgcagggcttggatggcgctgacgagtgcactctccacactggccagggaggctgcgcgtgcgtcctgctcatcctcctggctggccctaggcagagatctcagttgttctcggcaattttccaggcacatcagggcctgactattcttgacctggaagtccccaagctctccaacatgcccttcaaccctcctggccctctcctgcctctcctgctccagctgggaggccagtgcgccaacctggagcaggctggcgcggagctgctcacgcagctgggcctcggtgcccgcccactggtggtgcagtgcgagcagtgcctcacggctctgaccctgctggctctccagcctcacggtcacgtctttgagcttttcctctgtgacgtagagcttggtctccagggagtggatgatggagaggtacgtgtcagagtcgccagttgcaggcagtacactgggtgcaggctctgaggacatgctttcttccgagggtgaccggtcctggctggtgtcggaagatgtgctgctggtccaggtcttctcagacccttcggggtgaatgtatctttggcactggattgtggagaaccggattctttgccttttaacaccaggtgccccttggtcgagtttggctgtgccctgctgatggccctccctgtcaagcacttccactgactttgggggcaccatgctgtcttccctactggggctgccatcaccgtactcttcccccggaggagcccccaggtcctcgtcctcatcctcgagccttgtgtgtgggaggcctagaggtgccctagtggcttggactggttggcctgggagcaaagtgccatccctttctgtctcttcaggggtactccgtggctcttccatgtcctttggagattcacttgcaaatttccttaaaatctcttcttttgcctggagctt

SEQ ID NO: 72647 - DNA, 1919 bp, Homo sapiens
atggagccaggcagcgtggagaacctgtccatcgtgtaccggagccgcgacttcctggtggtcaacaagcactgggacgttcgcattgacagcaaggcgtggcgggagactctgaccctgcagaagcagctgcggtaccgctttcccgagctggccgaccctgacacctgctacgggttcaggttctgccaccagctggatttctccaccagcggggcgctgtgcgtggccctaaacaaggcagccgccggcagcgcgtacaggtgcttcaaggagcggcgcgtgaccaaggcttacctggcattgctgcgggggcacatccaggagagccgggtaaccatcagccatgccattggcaggaacagcacggagggccgggcccacaccatgtgcatcgagggctcgcagggttgtgagaacccaaagccaagcctcacagatctcgtggttctggaacacgggctgtacgcaggcgatcctgtctccaaagtgctgctgaagccgctcacgggccggacacaccagctgcgcgtcgcactgcagtgccctgggccaccccgtggtgggcgacctgacctacggagaagtctcgggccgggaggaccggccgttcagaatgatgctgcacgctttctacctgcgcatccccacggacaccgagtgtgtggaggtctgcacgcctgaccccttcctgccctccctggatgcctgctggagcccccacacactgctgcagtcgctggaccagctcgtgcaggccttacgggccacccccgaccctgaccccgaggataggggccccaggccaggcagcccctccgcactcctgcctgggcccggccggcctcctccacccccaaccaagccccctgagactgaggcacagcggggcccctgcctgcagtggctgtcggagtggacgctggaaccggacagctgagagccgtggggctggggcagggggtgtcagctgcacagcggagactctagggagatgggcgagcgagcgtctgctcactggctctggggcctcgaggtgccaggcagcatcaggcccactgggttgccccggccaggcctgcgaggaagggctgaggtggggccggcagggggcgccaggcagccgtgatcacaggtgacgaccgcaccgcggccgtgggactgatgcgggatcccgagggccttcctgcccacatgccccgggagaaaccgaggcccctccctcctcctggaacagcttccggctctcaagcgtcaccccaggggcgtcagttttacggactcaaggtcacctcaggaagaggcagggccaggttttgggataggctttgcctccaggatgggctgctcctgggcctggtgagctactgcccccaacctaccctctagaggggctgggaagggccgttctgggctcacctggcctgggagacccatctggtccctgcgtcctctgcccctcactgctctgtgcagatcctgtcgccctcagctgcctcctcccgagacctaatggtccctgctgggctcgagtctgcaggcccggctgcgtgtgccttggcctcactgtaccagtggttccctctctgcccggattctgagctcagtgtggtgtttggtgcacaggggttggtcaggggccatggccaaggccctgccacgcacgcccatccctcagatccactgtgagcaccaacctgctgcagtctcttgggcccctgctggcagctctgccacgtcaccgcctgcctggctcccacacagccatgcattgtcactctgcctccgggaccccagcttgggagctgtgggtctgccaggtcccacctcctctgtcccccatgccacaacctgggctcctggctacagcagggctccagggactccaaataaatgttcagtgactggcaaaaaaaaaa

SEQ ID NO: 72648 - DNA, 601 bp, Homo sapiens; identical to SEQ ID NO: 65447

SEQ ID NO: 72649 - DNA, 3479 bp, Homo sapiens; identical to SEQ ID NO: 65448

SEQ ID NO: 72650 - DNA, 740 bp, Homo sapiens
tttttttttttttaattaacaaaccttttttttttttttattggagataggaaacagtgaagtcccacataccataccctacaagacacaaggtgcgcagacgagccttggctatgtaccggcgctgcaggaagaggctgtccgccgggcctgggctgctccagctacgcggggaggcggccccattgcaaagtgcagtttctccgcggaggtgggcggtgggtcagtgggcagagggccatggtttccatgttaagggaagcggacgtgcatcttggtctcaatgtcgatcccctgccagatcttcaggaagtcctcgaaggtgatcccctcgtacacctgatcaggctccatctgccccatgcacacgctggccgcctccatcatggccccgtcggcgatggagcgagcggactccttctcgatgtgagggtttcccgacagcagctcctcgaccacatttcgatattcttccagagtgatgcggccgtcgctgtccgagtcgtacatgtggaacagaaatctcagcttctccttccgggacagctccacctgttcctcgtccatggtggtgtcgatgggccggaagtaggacatgatggtcaggaagtcctcgaaattgatctcatcagccaggccactgggtcccttgcgcaggttcctgttgtcgaaaagccacgaaaaattttgaattcgagggggtttacccccaagtgcggggaattgtttaagttcttcct

SEQ ID NO: 72651 - DNA, 1116 bp, Homo sapiens; identical to SEQ ID NO: 65449

SEQ ID NO: 72652 - DNA, 2990 bp, Homo sapiens; identical to SEQ ID NO: 65450

SEQ ID NO: 72653 - DNA, 5906 bp, Homo sapiens; identical to SEQ ID NO: 65452

SEQ ID NO: 72654 - DNA, 967 bp, Homo sapiens; identical to SEQ ID NO: 65453

SEQ ID NO: 72655 - DNA, 1211 bp, Homo sapiens; identical to SEQ ID NO: 65455

SEQ ID NO: 72656 - DNA, 3029 bp, Homo sapiens; identical to SEQ ID NO: 65456

SEQ ID NO: 72657 - DNA, 2007 bp, Homo sapiens; identical to SEQ ID NO: 65457

SEQ ID NO: 72658 - DNA, 1085 bp, Homo sapiens; identical to SEQ ID NO: 65458

SEQ ID NO: 72659 - DNA, 2611 bp, Homo sapiens; identical to SEQ ID NO: 65459
  misc_feature (1)...(2611): n = a,t,c or g

SEQ ID NO: 72660 - DNA, 5891 bp, Homo sapiens; identical to SEQ ID NO: 65460
  misc_feature (1)...(5891): n = a,t,c or g

SEQ ID NO: 72661 - DNA, 2174 bp, Homo sapiens; identical to SEQ ID NO: 65461

SEQ ID NO: 72662 - DNA, 1435 bp, Homo sapiens; identical to SEQ ID NO: 65462

SEQ ID NO: 72663 - DNA, 1581 bp, Homo sapiens
tttttttttacaagaaaaattgttagttttattggtattacagtgtacttttaatacaagctaaatacaaacacaattcttacatattcagccacttattctgcaaaacaacatgccaagatcaacccttgaaaagtttataaaaaacccaaaaccccagaaaatatccttccctcaactctaaggactcccatatacaaatgcaaaaattgcctatttgtcaataatcacattaaggtgttgaggttattgactgaggcaggtaaaaaaccaatttctgatttttaaattaaattagctccagataaaagcatgttattttccacatacgctatctttgtattctgcacagagttccaaggcaaagattgctcctggctttatggaattacccagagatggatgacttgtggtgggctgacttatcacagggtccttttactccttccttcccggatagatcctttagcttctttgggaggtggcatatggaattgggtttcccacggaattggattataaaaggctggttctggataggaatttccactgtaaaaacctgtaagttttccattggcataaccatagctctttgcagctggacgaggtttatgtttcgcattttccaaccattcttgaaactttttttctgctatttcctttttctcctgtatttcagcttgctgttgtttttctttttccttttctttcttcttcctctcacattcttcagcattttttttctttaaccattcttgatatttttcttttgctttttcttgcaagtattctttctccagttcctttgctgctttttcctccatttctttattaattttttgttctctttcttttcttttttgctcattctttttctgaacccattccttgtgcttttcttcagcaattatctttcttttttcacgttcttccatttcttttcttttttctagttgttgatttaattcctctagagctttcagttgcagccggtcacgttcttctttttctttgccaataaaccacacctcccatggtgtcaggcggctttctggtaagcgcacctgtttctgttcttcttggttattttctgattcaacctgagtgctggcgcacccctgtaactccattcctctcaggctcgccactttggcctctgaatcatgggcatcttcatccacgtcttcctcatcatccacgtcttcctcatcctccccgtcaccgtcgtcctcgtcaaactggaagctctggtggccaaggggagacaacagcgacctggtggaattgctgcagctcagcggcagcggcggcgacggcgagcgcaccacctccagcccctgcccacgtgcgcccgtcatagggactgagcaggagtccgaggagggccgagacctgggtctgcagtcagcagagaaaccggcgtaggaagagggaaaagtaggcccccagcgccccgccggccacatctggccccgccaagttcaaactggcggaacccgcggcggggacgcgcttttccaagcgggccctgggcgccgccaggccggccaatcccgggcagcacagaccccgcgttgccat

SEQ ID NO: 72664 - DNA, 6646 bp, Homo sapiens; identical to SEQ ID NO: 65464

SEQ ID NO: 72665 - DNA, 2192 bp, Homo sapiens; identical to SEQ ID NO: 65465
  misc_feature (1)...(2192): n = a,t,c or g

SEQ ID NO: 72666 - DNA, 1504 bp, Homo sapiens; identical to SEQ ID NO: 65466

SEQ ID NO: 72667 - DNA, 1309 bp, Homo sapiens
  misc_feature (1)...(1309): n = a,t,c or g
ttttttagcttgttatgcttttttttttttcccaaagcactttaatgcattcaccaacccacagtccctgcccgctggctgggcaagagaggccagcccccatctggaggctcctatggcttcccacacctagtgtgtccaggaaggctgagcccgcacacattcccatcaataggtgaggggcgtgagaatgaagaggcggtcttcctctttgcggatccagcgcatcagcttatggatggcactgacggctgacgccttggtccccagggggctcgtaacacatgtagagctcaaaggcgcctgtcacccaggccagggaggttctcgttgcgggcccgtgtagtaaattggtcttgagtggggcgagaggcattgtgggcacgactgtgcaagtactggtagaggcccagcagccgctcctgctcctcttcactggtgtatggggcctcaatctcagggctggtgaagagtcccgagctctttgacttatagaggaagtgacgcaggtcagggatgcccacttgggcaacgctgtagtagggtgtgcgcagtgcctctcgcagggccaggtgggctccgcgcttgcgaaggcgctcctggaagcggcggcggcagtcagagactgcaaagaagtcctcacggtcagtggagacaagcagcaggcagaggtcagtgtcaggctctaggtaagagatgtgtgcgtggaagaagccggctgcgttgaatttgggcaggcacacgggcgtccaggcctcgccctcgcgaaaggacgaggaggaactaatgaggttgaagagcaggtgcaggtcgatggggtgcagaaattggtcctttcggcgcacgagtgccacgagctggttgcgggccagcaggatggagaagaccaggctgcgcgcacgcgcctgctgcaggctggcgctcacagtgtcgcgcacggccgccgccaggggcaggcaccgtgccgcccccatcaggaagctggggtctcgtgccatgagctgcagcaggttgtcggtgatgcgctctgagcccgagagtaggcgccgcaaatcatagttctgcttctgctggaagatgtggctcagctgcgcaccggtaagaaggcttaggatctggtagtagatgtagagcagctcctgcgccagctcttgtgccgactgccgcgtacgagccaccgccactagcaccagcgggctccggcgcacgaatactaccttgtagccatctggctccattccctgaattcctccgcnctgtctaagggtcatctatggggnntctatnnggggggggngggggggggggg

SEQ ID NO: 72668 - DNA, 1445 bp, Homo sapiens; identical to SEQ ID NO: 65468

SEQ ID NO: 72669 - DNA, 1610 bp, Homo sapiens; identical to SEQ ID NO: 65469

SEQ ID NO: 72670 - DNA, 803 bp, Homo sapiens; identical to SEQ ID NO: 65470
  misc_feature (1)...(803): n = a,t,c or g

SEQ ID NO: 72671 - DNA, 1302 bp, Homo sapiens
gagtacattagtccagtgcggtggaattcgcgcggcgtcaagtgcgtgctggtcggcgacggcgcggtgggcaagacgagcctggtggtgagctacaccaccaacggctaccccaccgagtacatccctactgccttcgacaacttctccgcggtggtgtctgtggatgggcggcccgtgagactccaactctgtgacactgccggacaggatgaatttgacaagctgaggcctctctgctacaccaacacagacatcttcctgctctgcttcagtgtcgtgagcccctcatccttccagaacgtcagtgagaaatgggtgccggagattcgatgccactgtcccaaagcccccatcatcctagttggaacgcagtcggatctcagagaagatgtcaaagtcctcattgagttggacaaatgcaaagaaaagccagtgcctgaagaggcggctaagctgtgcgccgaggaaatcaaagccgcctcctacatcgagtgttcagccttgactcaaaaaaagccctcaaagaggtctttgatgcagccatcgtcgctggcattcaatactcggacactcagcaacagccaaagaagtctaaaagcaggactccagataaaatgaaaaacctctccaagtcctggtggaagaagtactgctgtttcgtatgatgctggcaagacacccagaaaggctattttcagatgaaatcgatattagaagctatattagctgaaacaactccttttactgcgtagaacctatatcgagagtgtgtgtatatgtattataggaggagccctcaattttatgtattctttctgcctttaattttcttgtttgtttgagcttagggatgagatacttatgcaagatatttttgaagtaaattaaacatttttcacatctctggaaatttagagttctagacctctggttaatttatatctaatatgaagaagacacctctaatctggatgttaagaatgaagttctgctacattataatgtacagaagagcaaaagggaggaacactatggttaaccctctcttgattaagggctacttaatgcacagtgcattatgtacacaggtcaaccatggtaacaatagttcttagctttgaaactccatgcaaaccatgccttttttttaaggagcaaaaatctgagaaaaaaagtgagagacctctgcctacaaaacttcaaaccagtcacttttgtcaattgcttaattacccagttacttatgatttaaaaacaaccaacagaaaacatcccacagactgtatggcactctgtagt

SEQ ID NO: 72672 - DNA, 3466 bp, Homo sapiens; identical to SEQ ID NO: 65471

SEQ ID NO: 72673 - DNA, 1900 bp, Homo sapiens; identical to SEQ ID NO: 65472

SEQ ID NO: 72674 - DNA, 1610 bp, Homo sapiens
ccactatccatgtggtggaattcttctggcgccaggggccgaccccacgtctacctgcagcgcatccagctcaacaaccccacggagcgcgtggccgcgctgcagactgtggggcccactgccggcccagcccccaaggccttcaccagtaccctggagaaggtcggagaccatcagttcctcctctactcaggccggtccccgcctacgcccactgggttggtgcacctggtggtggtggccgccaagaagctggtgaaccgcctccaagtggctcccaagacgcagctggatgagacggtgctgtgggtggtgcacgtctctggccccattaacccccaggtgctcaaaagcaaagcagccaaggagctcaaggcgctgcaggacttggcacggaaggaaatgctggagctcttggacatgccagcggcggagctgcttcaagaccaccagctcctctgggctcagctcttcagcccaggagtggaaatgaagaagatcactgacacccacacgccgtctggcctcaccgtgaacctgacgctctattacatgctctcctgctcgccagccccactgctcagcccctccctgagccacagggagcgagaccagatggagtcgacgctcaactatgaagatcactgcttcagcgggcacgccaccatgcacgccgagaacctgtggccggggcggctgtcctccgtccagcagatcctgcagctctctgacctgtggaggctgaccctccagaagcgtggctgcaaggggctggtgaaggtgggtgccccaggcatcctgcaggggatggtgctcagctttggggggctgcagttcacagagaaccacctccagttccaggccgaccccgacgtgctgcacaacagctatgcattgcatggcatccgctacaagaacgaccatatcaacctggccgtgctggcggatgccgagggcaagccctacctacacgtgtccgtggagtcccgtggccagcctgtcaagatctatgcctgcaaggcaggctgcctggacgagccagtggagctgacctcggcgcccacgggccacaccttctcggtcatggtgacacagcccatcacgccactgctctacatctccaccgacctcacacacctgcaggacctgcggcacacgctgcacctcaaggccatcctggcccatgatgagcacatggcccagcaggaccccgggctgcccttcctcttctggttcagcgtggcctccctaatcaccctcttccacctcttcctcttcaagctcatctacaacgagtactgtgggcctggagccaagcccctcttcaggagtaaggaagatcccagtgtctgagtgaactaacagtcctgctttcagccaccatttgcacaagacacccagcactgaaagtcccgctgccaggagcaagggatcctttggaagcacccgccctttgtgccttgttgggggaaaccggtgacgcagaagtgagtgtggatacaccagagtttgcattggaaggaatgagtgtcacgtggggagggaaggggccagtggaccttttgtaagctttccactcaataaaatgaacctgtatggcaaaaaaaaaa

SEQ ID NO: 72675 - DNA, 767 bp, Homo sapiens; identical to SEQ ID NO: 65474

SEQ ID NO: 72676 - DNA, 2350 bp, Homo sapiens
ttttttttttttcaaatgcagcatattttaatttgtttcaaataaagcaatatatgtatatatattttttcagaaaaacaccagatgttaaattctacaaaagcgcatgtgtcctcagcagatcatgtttgtctgattattaagaattcttttttgtaacattaactctctaaagacaatcaatggactgacatcactgctacaacacaggttgctaactgagcctctgatcttcagccacatcttgattttcctaataatgagtaaatactgcctggctaaaatgctgcaaagtcttgatgagagaaagcatcaacagatcaagcaaagccatgaaaattatgaagcaagctagagctgattattagaattagtaaaaatgattaagagaggatgacacaaccatacgggatttgtatattctgattgacactcttttggcagcgaattgggtcagcacctcgggcagggaaccaaaactgagtgaaaactgctctttttcctcctagctcaggccaccaacgtcacagccgggactgagagaactgctgcatctgtggaaacttctattctcgtggggcagagattgcactgtgaaaccctaccgacactaccccggaagggcctggcctccgaggtgtctgcagcgtgctgccttcgccggggcttttcagaatgggccggggcctcgggggtcttcatccccaaggaagcctcttgatttttggcaccgcctttgtttttgggccggaagccgttgtgcggctgtcttctgtgttcgtggcggctgttgccctttcccagtggctcggcttcattcccactgccctgcgacttggcaggcccatttagcctgttgttatgatactgtggattaaatctccgtctttggttagaagatccattctgcttgttggccggcatggtctggtgagaggggtcggcggtgctggggagactgctcaccattttggggtttgccgctttgccttcagagggcttattgtgagtggatgattttcgggaaaagttactctgtttcccagaggttgctgcgtgcgcattcagcagaggcagcagggagctgcagggagttcttgaggaatagttgttctttggatgtgtaatttctccgcagagcatgatttgggccttcagctgttcgatgtcacaggaaaaccgggcagctttcccgagctcctcgtcatatttacgctcgctgacaaagtgcttaatttctgccctgagttcggccagctgcatctctgccatctgactggcaaggtcagtgagtctctttagttcttctgctttcttctgacgagcagtcaggatttccatggcttcttctttaactttatccatttctgccattaatgaaacttctttgtcaatgatgcagttgtgtaattcagcaaaggcagctttgatcttcttcacggaactatccacttcttccttaatcatgacgcgatatctagttagagaaacggtgcagcgttgcaaatccttcactgatttctcaatatttgggcctcttttctttgccaactcatctggctttatttcaagatgagctgcaggggtattggacttaacaggagatgtttttgccttaggcttgcttgggttacaaggctgctcagctgaccactgtaggccatctgacctctctgttgttccatgtataggtttggggttcccatctaaggatagtttctgttgcagtagtctgttgccttctgtgacccccacgaagtgcctttgaaggttcctcaagtatcgagatctttttctcacgagggataagggctggtttttccgttagcagaatctgtggacgagctgtccttctcgcagccattcatggggccgttttgaatctgtggtggctgcggctgcaggggccctgcctcaggcctctccaccttgtctttagcatgctttgttgccttgatgctgcttggacttgcttctttttcttttattgttcttcttttttcctgtcatattccattcttttagaacttgaattgcactgccatccacaaaggcttgcacggctttatccacattaaaatcaaactgttggagcaccaggactatttcattattgcttttgttgggaacaactgatctaactgcatagatcttttccttgacattcacatgagtattgagttcagccatcttgcttctagtggaataggccctgggaatccacagcaatgttcctgaaagcagcctggtttctgaagagctctgaaaaatcaggcgcggaaaaagtgctggagctcgggtcagcccttggaaacccgaccaacccggggtgttccgccgcctcctctgc

SEQ ID NO: 72677 - DNA, 3775 bp, Homo sapiens; identical to SEQ ID NO: 65476

SEQ ID NO: 72678 - DNA, 4460 bp, Homo sapiens; identical to SEQ ID NO: 65477

SEQ ID NO: 72679 - DNA, 1157 bp, Homo sapiens; identical to SEQ ID NO: 65478

SEQ ID NO: 72680 - DNA, 2708 bp, Homo sapiens; identical to SEQ ID NO: 65479

SEQ ID NO: 72681 - DNA, 1754 bp, Homo sapiens; identical to SEQ ID NO: 65480

SEQ ID NO: 72682 - DNA, 2018 bp, Homo sapiens; identical to SEQ ID NO: 65481

SEQ ID NO: 72683 - DNA, 1490 bp, Homo sapiens
ttttttttttttaaggatgagaagagattttagttattcagtgttttcatgagtttcaacatagggatatagatacaatcagcttcttacatagtttactatctggggagagaacatgaaagacactgtttaacagtgcaaataattccagggaataaatatacatgaatgtgttttttcaaaaataccaggttctttatacaaatgtataacctaaatactgatccccatagtgggggtgggttgtaactgaaaggggctttgaggaaaagggctttggaataaaactaggtcatccaccctagcccaaagatccctttcccagccaggcacaaaagggaatttgttaagggaggaacagaggtttaactgttcaggtatctttcctaattctggtaaatttttccccaagttttgaaaaatacccatggaagaatccttaggaatgcccagtaacccagggaatggggatatttggcatatccacaacatcctacaggctataatacactccgaatgccttctcaatgtggggaagtatgagaagttagataattctcctagtgtctggcttcctttttctttgccgttccctctcatacgttcaatcaccctgtgttacaggacacacagtaagtagtgggaaggtgttaagactttgacagcaaagcaaggtcagaggtagaggggaatgtttaaccaatcawtgttcaaatataagctactcaatgaagagttttaggtttaaagagcgagratattcaccattactgagaaatctsragtttctcattcaatttcgcattgcactttgctaccacaaactaaatgggtgtacatttttgagtgctgatttattactcaaaggtttgaatttggagactgaaacaaaccatgctttatctgtgtactttgagaaaatccatccacaagaaaggagccaagcgtcagtttccaatggggggaacattctcatggaggtactgtaaggctaagtctgtccacttcatttcttgttctttgacagattctgtggtgccaccattgtcttgttcaggttcaggaagctcattcagtggtattgcgacatcctcataaggcagcttgtcttctcgccaagcatcatcaatcaaatccaagatccttccacctctctgaacctcactgtccattttcctgcagctttgatcttgtcaaatcgtacgacaggccgtccctcagctgcggcttcctgcctycaggcaggatgtaccaaacgtggaagcggagacggggaggtctgggggtgccacgcaagtccctttcctcccgacacgagtgcagtaaagaaaaacggttatgagcgtaaagtgacagcctcggccgatgggaatagggggraagtccgacactgagcaacgaacgcattcccgcgcctccaaaacctaggccgggggcgctggaaacccttaccggcacccggccaccgcggcagacgcttgctcctgcca

SEQ ID NO: 72684 - DNA, 2177 bp, Homo sapiens; identical to SEQ ID NO: 65483

SEQ ID NO: 72685 - DNA, 489 bp, Homo sapiens; identical to SEQ ID NO: 65484

SEQ ID NO: 72686 - DNA, 933 bp, Homo sapiens; identical to SEQ ID NO: 65485

SEQ ID NO: 72687 - DNA, 1779 bp, Homo sapiens; identical to SEQ ID NO: 65486

SEQ ID NO: 72688 - DNA, 819 bp, Homo sapiens; identical to SEQ ID NO: 65487

SEQ ID NO: 72689 - DNA, 1843 bp, Homo sapiens; identical to SEQ ID NO: 65488

SEQ ID NO: 72690 - DNA, 4917 bp, Homo sapiens; identical to SEQ ID NO: 65489

SEQ ID NO: 72691 - DNA, 2401 bp, Homo sapiens; identical to SEQ ID NO: 65490

SEQ ID NO: 72692 - DNA, 1033 bp, Homo sapiens
ttttttttttttagtgcaagaaatgctgcatcattgaagcacttgagaattaccatgaaatctaacaaaaaatgtcatcaactcaggagtaataataaaaaagagaaacaaccagagaggcacacagattgttgtttttttaaaaggatttttatactatattaaaaaaccacaaaataaaaaagggatcaatcaacatatatcttagaagtccttccaagagtcttggtatgcaacagccatggaggctgtgacctttttccttcttttctcagcctgcagttcatttaaggatcaccggagatgactcgtgctctagttcttaaaatcaaacttgttctgccaaatccaagaccctgaatttgtccaaattgtagaaacatgcttttaccacccgtccaccaaaatacctcccattcaagtcaacaaccgctttaattgctgattcaactctctcaaattctaaaaatatccgtactgcttcatcatcaggggcaccaggaatttcaaatatcacacattttccaactttgccatatttttcacattcttccttggtttcaacttccaagtcttcatccacctctcccgcaccaaccatgttccttagtaagaccactttagtaggacacttaagtatttcagtcagcggatttgaatctgacttcttggatgcatctttctctgtggcgtcgcccacgatgatcttgccgccacgcttgctggtcttctccactgacaaggcagtgctcaggccctgctcatgcttccccagaccctggccctcccggaagccgtacttctgcatgatcttgtgcgccaccgtgccccccaagttagcgaggaaggagttgcgctgggccgggttggagatctcggtctgtcttgttcctcgtacactgggggaggaatggcagttttggaagactgtgatcgaggtcttgagtcctcttcataaggaaaatctcggggtaactgtcttttactgccagagaagtgggtgaggcaatggcagctccgcccatacttgttt

SEQ ID NO: 72693 - DNA, 1471 bp, Homo sapiens
  misc_feature (1)...(1471): n = a,t,c or g
ccttttttttttttttaggttttagcagcacttttacttccacatccaaactccctgggtcctcacaacagccctgtgaggtaggtagggtaggaaggtttcagagatccccatttatagatgaggatgctgaggcacagagaggtgaagtgacttgtccaaggtcatacaaccagcagtgtagagggctcaaagccagcattcctccacttgaactcctgcgctccggccctctggcagttcccacatcctctctattctctctgtgtcccccaccctctcaactctcctgggtctgcagggaccctaaaggcagcctggcagctgagatttttcaggaatggcaactggggtaggcctggtcaactccagataggaactgaccctgaagagcatgaggccagctttgcttctccccatttcccagttggatggaaggcctagtaggtcccagggcaaggatggagctaggcatgattcatgaacgaatggtgataaaggtaggtgtaagcatatgtgtgtcctgcactaaagacaaaggctcccctaacccaaggccccaaggcagtgtttcaagtgctcacccccatgcctctctcatcccacagagccacagtgagtgtcctcagcagcaaaaggagccatagaaatagctgcctctggcaatgagctgctccagtggacagctcccaccaagccttcagaccccatcacgcagacacagtgcctccacggcttgactggggccctgggccacacccccaataacaaacagccggggcccagcctgcagactagagcaggagcagcgggcagtgggcatggcaggcaatgcctcccagcgccgccgtgcaaggctaaagctctccacagagcccaaaggacatggctggtttccaaggcccccaatggccacaatgtggcccccaagggacccaaccacaaagtctgccctcttatccctcatgcgcaggctgcggggcaatttggtccaggacccatgctccaggtcaaacatctccacagtgttgacaaagtgtgggcgagagtagaagttgtggggcccaggctgctgcaggccacccaggctaaagacgctgccttcagccatggcgcagccagcaaaggcccgacggctgggtaggcttggatgccgggtccatgtacgggcctccagatcaaaggcttcaaaagcagtcaccgggagcttgccctggcggccccccaggacatagatcttgttcccgtgcaggaaggtggaggccccatagcagggtgtgggcatggagggtagcgaaagccagcagtcccgacggggctcatacacacgtacctgggcctggggggccgtgtcagggcccattccccccagagcatacaccataccatccgccggtgctacgatgctgccagggtacggggtccgccgttccgctggcacgaggcctcgaactgagtannnnnttccatg

SEQ ID NO: 72694 - DNA, 949 bp, Homo sapiens; identical to SEQ ID NO: 65494

SEQ ID NO: 72695 - DNA, 1459 bp, Homo sapiens; identical to SEQ ID NO: 65495

SEQ ID NO: 72696 - DNA, 2416 bp, Homo sapiens; identical to SEQ ID NO: 65215
  misc_feature (1)...(2416): n = a,t,c or g

SEQ ID NO: 72697 - DNA, 1190 bp, Homo sapiens; identical to SEQ ID NO: 65497

SEQ ID NO: 72698 - DNA, 449 bp, Homo sapiens; identical to SEQ ID NO: 65498

SEQ ID NO: 72699 - DNA, 4197 bp, Homo sapiens; identical to SEQ ID NO: 65499

SEQ ID NO: 72700 - DNA, 2353 bp, Homo sapiens
ttttttttttttgggagaagtgggggcctttattaaggtctggcagatgtggtggaggtggaagtacaaacccaggcctgggcctaggaaagggcagaagaaaggcaaagggtcccttggagcaggaacccatccctctctgcttatacccagcacccctcatcccaggttcctttcttcaacctccgcctgcctctgggaacacagagcaccaagaactgacaaaccgggaccctccagggccacagcgtggggcagagtccaggcttctgtctccccgcagtgggagatctggggagctcagtgaacctcctcaccctcccttgccagtatgaaagtttgggaagcgccttttcttgtcccccagaacagaacaaactctttgttctctgtggtttgggggaaaaagtgtggggggcttggacctaggaagaagctgagctgaattcctccagggccccaggtgaaaccccccaggggagtttctgagactctagacttgccatttctccacttttccttcccaatgactccggtgagcagctcagagtctgggctagggcaactggtaggacagtggggatctgccccagagacatctgtgggtttcagatgaaggtttccccaacaccagattcatttatatgtacacagggcagcacccacctgcggcagggggaacagccgctgggggctagtaagagtagccacccttggggccaaatggctgggcggggccagccagctctgggaggtaggcggggctctcatccaagtgggacaaagggactgtgtcctcctcactgacaggccggtcaaactcagccttgagagctggacgctgattgtccgggaaggccaaagagaagagggcctcgggctcacacacaaacttgtacacgtaacgctcaccagccaccttctgcatgatgcctttctcataatagtatcggagcgagcggctcagcttgtcgtaattcatggctggccggttcttctggatgccccagagcctggcgacctcctcaggctcaatgagcttgaactccattccccggcccgtccaggcaatgaaatgggcatttgttgggtcatccagcaaggccaccagaaattgccacagctgcagggcaccccggcgctggtagggcggcccctctcgaaatgcaccgaccccttcctgcttgatgtctccttcaaatttctcagggacaacgcagacatcatctgggaatggtcgcagaggtttctcatagccatagcccatggccccgtcacctggagagggcccagagaagccctctgtgtggaggtacattgatgcgcacccggtgacatctgagtcgtaggcgaagtccgtctgttcctgtttgatcaccacccccgcccctgggtacctgtgcccattgaccccaccctggtccacggctggctggcccgcctgttcatacaggggatcatggtattcttgcttaaagctctgctggggatagggtgggcagggctccgacagctggtgttggtagggggcctgggaggggttcccggccccctccctgagatgtgaaggagtggcaaatgtccaggggctgctggaagacggagctatgttccccgaggtacccatggccagggtggggctgggaggtgccagaggatctcaggaaattccgttgctctgcccggggaaagggctgtaggggcgactgtccaagggcaccaggggcaggggacttgattggcgatttgtctgggggggtcataggcactggagtaaaggcactgctcgccatggtggtaggggagtggcggcttcctgctgcaggacagggccgggtctgtgcggggactctggggctccttcttgatcctggtggtggggctgtggaaagctaggttttctgaatggaaatcaggaacaaactgctcatcactgtctggtacctgagcttcagcgagccacgtctcctggaagtgacttagatcctggaagagatcttcagagtcgaggggcggcagggagcccgggtccatgagcttccccagcgggccgatcagcgcttcgcgcaagtctcccatttccgggcgatttgctgctgaaggtgtagggcacttgctggtccaagtatccggctttcatcctccgctccatccggccgctccctcgcgccgcacggccggggccccaagcgggggccgagacctgaggccggggcgtctgggctggagccgcggggggtaccgagcatgccctggagcccgcaccgagggccgcggggctaggccggagtaaggcggccccggccccgggtccccagcgcaccgacttgtttttcgggcgcagcagacagtt

SEQ ID NO: 72701 - DNA, 2658 bp, Homo sapiens
atggaccgcggcacgctccctctggctgttgccctgctgctggccagctgcagcctcagccccacaagtcttgcagaaacagtccattgtgacctttcagcctgtgggccccgagaggggcgaggtgacatataccactatgccaggtctcgaagggctgcgtggctcaggcccctgaatgccatcctggaagtccatgtcctcttcctggagttcccaacgggcccgtcacagctggagctgactctccaggcatccaagcaaaatggcacctggccccgagaggtgcttctggtcctcagtgtaaacagcagtgtcttcctgcatctccaggccctgggaatcccactgcacttggcctacaattccagcctggtcaccttccaagagcccccgggggtcaacaccacagagctgccatccttccccaagacccagatccttgagtgggcagctgagaggggccccatcacctctgctgctgagctgaatgacccccagagcatcctcctcctgactgggccaagcccaggggtcactgtccttctgcatgctggaagccagccagggacatgggccgcacgctcgagtggcgcgcgttacttccagcctttggtccggggctgccacttggaaggcgtggccggccacaaggaggcgcacatcctgagggtcctgccgggccactcggccgggccccggacggtgacggtgaaggtggaactgagctgcgcacccggggatctcgatgccgtcctcatcctgcagggtcccccctacgtgtcctggctcatcgacgccaaccacaacatgcagatctggaccactggagaatactccttcaagatctttccagagaaaaacattcgtggcttcaagctcccagacacacctcaaggcctcctgggggaggcccggatgctcaatgccagcattgtggcatccttcgtggagctaccgctggccagcattgtctcacttcatgcctccagctgcggtggtaggctgcagacctcacccgcaccgatccagaccactcctcccaaggacacttgtagcccggagctgctcatgtccttgatccagacaaagtgtgccgacgacgccatgaccctggtactaaagaaagagcttgttgcgcatttgaagtgcaccatcacgggcctgaccttctgggaccccagctgtgaggcagaggacaggggtgacaagtttgtcttgcgcagtgcttactccagctgtggcatgcaggtgtcagcaagtatgatcagcaatgaggcggtggtcaatatcctgtcgagctcatcaccacagcggaaaaaggtgcactgcctcaacatggacagcctctctttccagctgggcctctacctcagcccacacttcctccaggcctccaacaccatcgagccggggcagcagagctttgtgcaggtcagagtgtccccatccgtctccgagttcctgctccagttagacagctgccacctggacttggggcctgagggaggcaccgtggaactcatccagggccgggcggccaagggcaactgtgtgagcctgctgtccccaagccccgagggtgacccgcgcttcagcttcctcctccacttctacacagtacccatacccaaaaccggcaccctcagctgcacggtagccctgcgtcccaagaccgggtctcaagaccaggaagtccataggactgtcttcatgcgcttgaacatcatcagccctgacctgtctggttgcacaagcaaaggcctcgtcctgcccgccgtgctgggcatcacctttggtgccttcctcatcggggccctgctcactgctgcactctggtacatctactcgcacacgcgttcccccagcaagcgggagcccgtggtggcggtggctgccccggcctcctcggagagcagcagcaccaaccacagcatcgggagcacccagagcaccccctgctccaccagcagcatggcatagccccggccccccgcgctcgcccagcaggagagactgagcagccgccagctgggagcactggtgtgaactcaccctgggagccagtcctccactcgacccagaatggagcctgctctccgcgcctacccttcccgcctccctctcagaggcctgctgccagtgcagccactggcttggaacaccttggggtccctccaccccacagaaccttcaacccagtgggtctgggatatggctgcccaggagacagaccacttgccacgctgttgtaaaaacccaagtccctgtcatttgaacctggatccagcactggtgaactgagctgggcaggaagggagaacttgaaacagattcaggccagcccagccaggccaacagcacctccccgctgggaagagaagagggcccagcccagagccacctggatctatccctgcggcctccacacctgaacttgcctaactaactggcaggggagacaggagcctagcggagcccagcctgggagcccagagggtggcaagaacagtgggcgttgggagcctagctcctgccacatggagccccctctgccggtcgggcagccagcagagggggagtagccaagctgcttgtcctgggcctgcccctgtgtattcaccaccaataaatcagaccatgaaaccaaaaaaaaaa

SEQ ID NO: 72702 - DNA, 843 bp, Homo sapiens; identical to SEQ ID NO: 65502
  misc_feature (1)...(843): n = a,t,c or g

SEQ ID NO: 72703 - DNA, 3965 bp, Homo sapiens; identical to SEQ ID NO: 65503
  misc_feature (1)...(3965): n = a,t,c or g

SEQ ID NO: 72704 - DNA, 1539 bp, Homo sapiens; identical to SEQ ID NO: 65504

SEQ ID NO: 72705 - DNA, 2972 bp, Homo sapiens
ctctgctgaagtttctgatcaaaaggcaaagagaggcattgctcacattttctatgtatactttgcaacatatcttttaaactgacccaaactggaagaacaaacatatatacccgttactgaataccagaaatattgaattaaatgtcaaactcagtctgatttgctttaaacaagtgataccatatactatctttagaaatttcaagaaaacatgaacttatcttgaccattttccagaaagtagtctataccaacaagatttgtacagatgtttctgtttggagacaggcagaaccaatttagggcttaccaaattgtgttcataacaaactgaaaaaaatctctagtacacagtacacaactaaaaaatataatagaaatataaagatatctaggggaagaaataaagcttttcactttctccatcagaaccaaggttcttcatgggagtaagactatagaaaaggcaaaatcacaggttactgacagccctcagttattaagagacacatgacaacatgaatcattatagaaatcagcagcaatgaattctatgattatacaaagcaaaaaagtcaaaaaattctggacacagatttgactgtaggcctgaaaaaagaacctcatccagatatttggtgcacagaaagcacatgccccatgtgcattcaacttttgtgcttttcttttgtgcacaaaacctgatacaacagaggatcttaggccggaccatagtaaattaaaaattctgaaaaagtatccaaaaattaaagcatcaattcctagttgtgattcaaagttgatttttttttctcttctaggagcaagcaaataaaaatatagccatatacatgtaattttacatgtatttatagttatatgctgagcaaggagatctagcaagagatagctagtgttagatgttcagctttgctattgcaatattttgtcatttttgtacacaaggccaaggtcttgggccacagacaaggctatagatcctacgttccagcttagagcattcagcttttttttttctttttttctcccacatggaatgtcacacaggccttgcttcagtcactgttaatactagaacaaaataggctttcctgcagttttttcttggacgtaagaagtaaaacgttttagaaatttaggatactctcgctttgccactgcccttaacactgagggtgggtgcccatcctccagggttcacattagctacatatgtaatcttgcatagaatgttgtccctgctaatttcctggtttcccctctggggggcttaccaaggtttgacaaatcatagcaacatttattttggcacggacacatcggttgtttagaggagcactgtcatgatccacagaaaaattacaaactatccaagtttcagggtcattttcagtcaaggctggtatctttcgaatgacagaaagatataatacgtctcgctgagaagcaggccacaccctcttgtgtgtttgataaatgatgattgcattatcagctaatgtttccaccacatgaaagttttctatagttgtttcccagtcattgcgaacgtcaacattccagaaataattgcagacttcatgtcctgtgacgcctttaactgcatgggtagcttttaaaggatccagaacaatcccattttcttctacttctcttctgtataccttcatttctccttcttctacaaccaactgccaattggcatctccgcctacatcctgtaatgagtaagtcatgtggttctgcaccatctcttcaacctgggagctgaatctgtgaacatcatcagaggccctggctagatcaatggaagacatggaggaagagcgactatagggcttttggacaaatctatgtgtccccacagaagaaaaggcatctccagagggcaaggatgtaggccaatgtaatctcaccttttcactctgtgactgttcttctattttatcttgtctgtcaagagcagcttcaacagcatcaaagaactcttcttcattaatcagactgttagggccttcttcataatctggtcctccaaagtgggattttttcttaagttctgtcattgcatttttatatgcttcctctgttcttcttttcttctcagtttccttatccagtctcttctgccagctgtcctcacgtttaaccattagttcaatacaatgagaaagtgttgcaaggattccagcagtagttgctttaaaagttatcgcttcccctttaaagtctataccattaattccttttggtgtcacatgtggaaataacttttctttattgccgttggtactatgcaagaagtcaccatcagaacgcgttgtaggaaagtcatcttcatcatcttctaccactttatccctttgaagttcatccttagagacagcatcagcacaggcatcaaagtacttctgtagcgtgtcaacttgtctacataagatgtctctaaatgtttccatttcagccaacttctcacgtaaactgtggcctttcttgaatgaagaggtggatgttgcagagtagccacttgctccagacaccagggacaccattgagccatgtcgacgcaagctggattcagatccatatccagattcagtcttgtgctgttcaatggcatctatccattgctgtctatgatctggatcctgagcacgaagataccaaacactatcatttacactaatatcaaatcgacattcatcaaaatcgtgaggtgtgatgacagccttgctaagacagatggatcctctgcagccatactctgtttcatcttcagatttgtagtaactcagagcattatttttcaaaactacccaacgatcctgccacccatgaatgtagtttgtccacttactgaggaccccgcagcgctccacaggcggcccagactccgtctctggatcctcctccgagcccgacgagttccagctctgattatccgacat

SEQ ID NO: 72706 - DNA, 2408 bp, Homo sapiens
  misc_feature (1)...(2408): n = a,t,c or g
ttttttttttttcgagataaacctttttatttatttatgcttctccattttgtttaaaacaacaacaacaaccaccttaatgtaactgacagcccttccccctcaccctgcctcgggctgggggtagttaatggggaaatggcccccagggtggggctgaccagaagagcccctcaaggagctcatggagcccaaatcccctgccctggggaggggacctgtagtgtgtgacgggagcctctcccgagcctctgcttgtaccatcaaagatgcccttggccaacaagggtcaggaagcatgggggagggatttcggcctcctctgtccctacccagcccaatctcacgagcagggctggggggtttaaaaagggtggagcgggtggggttggctcacacgaaggagtactggttgttaaatggcccctggggtggcccccttcctctccatcacccccctagtggtgactgctgcagctgcaccaattgggggcacccccgcgtccccaccaggacccaggcgcccttgggcctcttgagcctggggcctatggccctctcccaattcacccaccgggaccagctaaaccacggggaccagcctcttccgggacccctccacccgcccgctttctctttctcttgcctctctttggctgctgcggctgcctnttgcccgccacttcctggcgcccctcgacgcctctttcttccccaggctgtgggggatctgtccatgaagggggttcagggggctggggtgggtcatgggaggtggtcggttacacagtcactcgctccgaagggcatgagggtgcaggaggcattcggggtggcatccatctccctcgcacacccccgcatggctcccagcctgctcccggcctcacttcttgggtgcacgggcacctcctcccctgcagacctgctctgctcaccctgctgtcgctgggaggatgggacatagctgacaaggacaacatcactggagcctcccgactccaaagggatggggtgcacccggaagtgctcgagcatatcgaaaatggactggaaccacaggtgctggacccggcactgaccctcctcgttcagcgacaaacgcaggtgcttggccttgccctggaagttgaaggtgaggacgtattcaccccgccttgtctcactctggcgcaccaggaagacaccgtgggagccagtgccgccagtcagcaccaactgtgcagccttgagccgagagagcatcccgtggaaccaaggataccctgagaggggctggtccccctcaccgccctctggctcccccctggaacaggaaggaccctgtggctgtttccggagtgtccaagggagggtagggggctgagaggggatgaactgtccctgctgggggtccctcttcaatggggatgcgggggggcaactctgggggaagcagttccatcgagtcaaaatgggaggcggcaatggaggcagagctgggggagatggatgccgaggggcggtctgagaggcccccatatgccccctgcgacaggcggtcattgctctcgctgggtccaagcagcaggtcctggctgggtagactctccgagtgattcaggcaggacagctccaggctgtctgtgttctcccttgtaaggaatgaggtcccaggggccagagggagggtcatggggcggggactggtagcagggcagggtcctgggctcaggcattcttggatgtcagacacccaggccttcacatgctgggcatccactgtctccatgatatactcggatggaccttccaccttaaccacaaacgtgttctcccggtcaggcatctccagggctgtggttgtccggacgtctgtgatagaagagcaggggatgctgagtcggggccgagaggccttgggtggtacaaagaactccaggcgacttcctcctcctccttctccttcacttcgaagcagcaggcgacacttctgccactgaggctgccctcctccccctgaaggaggcccagccacccctcctccccggcccactccggctgggtcaggggctgcctcctcagcccccatgaaactcagcagctcttccctctgcaccatccctgctccatccttcaaggcgccccctccccgactgagtctcagcctctcaaaacggtgagtccatctttccccaggggacgttccatcactgaccagtcccctaccaacggtcccagccccgccagaggagttggagttgctgtttccacctaagactggggggcctgacgaggtctccaggggcccagcggaggagggagggtcaacggtcccccgccactgcaggatgccacggactgagcctcggacagagcgacccactgaacgcagggaaaagcgcttcttgagcttcggcttggaggag

SEQ ID NO: 72707 - DNA, 2204 bp, Homo sapiens; identical to SEQ ID NO: 65506

SEQ ID NO: 72708 - DNA, 823 bp, Homo sapiens; identical to SEQ ID NO: 65507

SEQ ID NO: 72709 - DNA, 4033 bp, Homo sapiens; identical to SEQ ID NO: 65508

SEQ ID NO: 72710 - DNA, 1203 bp, Homo sapiens; identical to SEQ ID NO: 65510

SEQ ID NO: 72711 - DNA, 4826 bp, Homo sapiens; identical to SEQ ID NO: 65511

SEQ ID NO: 72712 - DNA, 818 bp, Homo sapiens; identical to SEQ ID NO: 65512

SEQ ID NO: 72713 - DNA, 4364 bp, Homo sapiens; identical to SEQ ID NO: 65513

SEQ ID NO: 72714 - DNA, 541 bp, Homo sapiens; identical to SEQ ID NO: 65514

SEQ ID NO: 72715 - DNA, 798 bp, Homo sapiens; identical to SEQ ID NO: 65515

SEQ ID NO: 72716 - DNA, 1708 bp, Homo sapiens; identical to SEQ ID NO: 65516

SEQ ID NO: 72717 - DNA, 828 bp, Homo sapiens; identical to SEQ ID NO: 65517

SEQ ID NO: 72718 - DNA, 4530 bp, Homo sapiens; identical to SEQ ID NO: 65518

SEQ ID NO: 72719 - DNA, 2343 bp, Homo sapiens; identical to SEQ ID NO: 65519
  misc_feature (1)...(2343): n = a,t,c or g

SEQ ID NO: 72720 - DNA, 1325 bp, Homo sapiens; identical to SEQ ID NO: 65520

SEQ ID NO: 72721 - DNA, 1458 bp, Homo sapiens
ttttttttttttcaggcttaaataacaaaatatatttcagatatgcacagttttaactgaggactacacaagccttcctcgggctgcaggcccgccgccctcccagtgggattcacagcccctgcggagtttgtcctcacgcacaccacacacgatcgggtataaaacacattctataaacacgttctgatgcaaactgtgtgtccataaatatatatttatgcaagttcctcccacccactgcagggccgtacagctctggggacaggaggtcacagccgactttaaaccacaggttaagtagaaggttgcaggtcaaatagaagttcccgtgtgattgcatcacccaacggcactgttctgtcatcaggaaatgctgagtgcccgccgtggccgggtgggcgcgggcggtggtcagacgctgctctggagctggctatctgtggcactgtcaggggctgaggactggctgggcagacaagtttccaggccatctgaagactccgacaggggcttgtataagaagcaggctatggcaaagaagaggacgcccagcaccttgtacaggagccccatgatgagtatgtagcggctcatggccgaattctggtacaccaagcaggagccctgctggccacactggtcctgccacagcagacaggccttgtcgatcacccagccgaaggcgatgggccccgggatgccccctagtattctaactacaatccactggattcccagggcaaaggatctctgagggtcacggacacatcgtagagttgccgttagtgcaggaatgctgctgaggaatgtaaagaaaattacaacgaatatgaaaaccagaaggaggggctttctctgacaagttgaagtgcatttccctgcagtggcatggccaaaaccagaggaaagattctgagggatacagctacagtctcggtacacctgggaagcccaacaatagctccgattacaaggggaaggcacgggggccccttcccagggtccaggggaggacaggggcggtaggcagcggctccactcaccttctggccgtccacattcgtctccgtggctgcagggcaccctgcgtggcacagtgagaagtacatgaggccgtccgagccgcacacagggctgtagtgttctggctggcagctgcaggcagcgttgcagggagccgttaggttcaggtggccttcgggcaggaggctcccgccgtagctggctgtgacgcccgccatgggcacactggggcagtgcagtgagaagacgaggatgcccagcaggctgacaacggtgcagaacaggcagaacttgatgaccgcggagccccggagcctgagcttgttcacaaagaagccgcccaggaaggtgccgccaccacccgctggcaccaccaggtacccaaacaaggtggcagcttctgaggcactcaggcgaattccaccacacgga

SEQ ID NO: 72722 - DNA, 910 bp, Homo sapiens; identical to SEQ ID NO: 65522

SEQ ID NO: 72723 - DNA, 2127 bp, Homo sapiens; identical to SEQ ID NO: 65524

SEQ ID NO: 72724 - DNA, 1667 bp, Homo sapiens; identical to SEQ ID NO: 65525

SEQ ID NO: 72725 - DNA, 1468 bp, Homo sapiens; identical to SEQ ID NO: 65526

SEQ ID NO: 72726 - DNA, 5979 bp, Homo sapiens; identical to SEQ ID NO: 65527

SEQ ID NO: 72727 - DNA, 5539 bp, Homo sapiens
tggatttcgaggtcggggataaaatccgaattctggcgaccttggaagatggctggctggaaggatccctgaagggcaggacaggcatctttccttaccggtttgtgaaattatgtcctgacacacgggtggaggaaaccatggctctgccccaggaaggcagccttgccaggatcccggaaacttctttggattgtttggagaacaccttaggagtagaggaacaaagacatgaaaccagtgaccatgaggccgaggagcctgactgcattatttctgaagcacccacttctcccctcggtcatctgacttcagagtatgacacagacagaaactcttatcaggacgaggacaccgcaggagggcccccgagaagcccaggcgtggagtgggaaatgcctcttgccacagactctcccacatctgaccctacagaagtagtcaatggtatttcctcccaacctcaggtcccttttcatcccaacttgcagaaaagccagtattattctacagtgggagggagccacccgcactcagaacagtaccccgaccttcttcccctagaagcaaggactagagactatgccagcctacctcccaaaagaatgtattcccagctaaaaactcttcagaagccagtgctccctctttacaggggctcttctgtttcagcttcaagggtagtcaaacccagacaatcaagtcctcagctccacaacctagcaagttatactaaaaagcaccacacgtccagtgtttactccatctcagagagattggagatgaagcctggtccgcaagcccaagggcttgttatggaagcagcaacacattcacagggagacggcagcactgacctggactcgaagctgacacaacagctgatcgagtttgagaagagcttggcagggcccggcacagagccagataaaattttacgccacttttcaatcatggactttaactctgagaaggatattgtccgaggttcctcaaagttaatcaccgagcaggagctgccggaaaggagaaaggccctaaggccaccgccacctcgtccctgtactccggtatccacttctccccatttgctggttgaccagaacctaaaacctgcaccacccttggtggtgcgaccctctcgcccagctcccctgcctccctcagcacagcagagaacgaatgcggtatcccccaagctcctatctcgacaccgtcctacctgtgagaccttagaaaaggagggccctggtcatatgggaaggagtctggaccagacctccccatgccccttagtgctggtgaggattgaggaaatggagcgggacttggatatgtacagtagagctcaagaagagctaaacctcatgctggaggagaagcaggatgaatcatcaagagcagagaccctcgaggatctcaagttctgtgaaagtaacattgaaagtttgaatatggaactccagcaactaagagaaatgacgctcctctcctcccagtcttcatcactggtggccccttctgggtctgtgtctgccgaaaatccagagcagaggatgctggagaagagagccaaggtcatagaagaacttcttcagacagaaagagactacattcgggatctggaaatgtgtattgagcggatcatggtacccatgcagcaggcacaggtaccaaacattgattttgagggactttttggaaatatgcagatggtgattaaggtctcgaagcaattattggctgctctggaaatcagcgatgctgtaggacctgtgtttcttggtcaccgggatgagcttgagggaacatacaagatttactgccagaatcatgatgaggccattgcgctgcttgaaatctacgagaaggatgagaagatccagaagcatcttcaggactccttggcagatctgaagagcctatacaacgaatggggatgcacaaattatattaacctgggctccttcctcatcaaaccagtacagagagtaatgcgttacccgctgttgctaatggagttgctgaattccaccccagaatcccacccagataaagtgcctttaaccaatgcagtccttgcggtcaaggaaatcaacgttaacattaatgaatataaacggcgaaaggacctggtcctcaagtaccgtaagggtgatgaagatagccttatggagaaaatttccaaactgaacatccactccatcatcaagaaatccaaccgagttagcagtcacctgaagcatctcactggctttgctcctcagataaaagatgaagtatttgaagaaacagaaaaaaacttccgaatgcaagaaagattgattaagtcttttatccgagacctgtctctctacctccagcacatccgggagtccgcatgtgtgaaagtggtggctgctgtgagcatgtgggatgtgtgcatggagagaggacaccgggacctggagcagtttgagagggtgcatcgctacatcagtgaccagctcttcacaaactttaaggagaggacagagcggcttgtcatctcccccttaaatcagttactgagcatgtttacagggccccataagctggtacagaaacgctttgacaagctcctggacttctataactgtacagaacgggcagaaaagctaaaggacaagaagaccctggaggagctgcagtcggcccggaacaactatgaggccctgaatgcacagctgctggatgagctgcccaagttccaccagtacgcccagggcctcttcaccaactgtgtccacggctatgctgaagcccactgtgactttgtgcaccaggctctggagcaattaaagccactgctttcgttactcaaagtggctggcagagagggaaaccttattgccatcttccacgaagagcacagcagagttctgcagcaactccaggtttttaccttcttcccggagtctcttccagctaccaagaagccatttgagaggaaaaccattgaccgccagtctgctcgaaagccactcctgggcctgccaagttacatgctacagtcagaagaactccgggcctccctcctggccaggtatccccctgaaaaactcttccaggcagaacggaacttcaatgctgctcaagacttggatgtctcacttttggaaggtgacctggtgggtgtgattaagaaaaaagaccccatgggcagccagaaccgctggctgattgacaatggagtcaccaaaggcttcgtgtacagctctttcctaaagccctacaatcctcgccgcagccactccgatgcctccgtgggtagccactcctccacagagtctgagcacggcagctcctcccccaggttcccacgccagaacagcggcagcaccctgaccttcaaccccaacaggcataggctgtatcctttacctcggggtcttgccagaagcagcctcaagatgcatctcctccgccaaaagaatgggaccaaggaactctcagtgcatccctaaatccgagtaattcagagagtagtccttccagatgcccttcagacccagactctacctcccagccaaggtcaggggactctgcagatgtagctagagatgtaaagcaacccactgccacgccgaggagctaccggaacttcaggcatccagaaatagttggctactccgtaccaggacgaaatgggcaaagtcaagacctcgtcaaaggatgtgcaagaacagcccaggctccggaagacagaagtacagagccagatggcagtgaggcagaaggcaaccaggtctattttgctgtctacaccttcaaggcacgaaacccaaatgagctgagcgtgtcagccaatcagaaactcaagatcctcgagtttaaagatgttacaggaaatacagagtggtggttagctgaggttaacgggaagaagggctacgttccctccaattatatccgcaaaaccgagtacacctgagcccacgttgcctgccacccagccttgctgcctttgctttcagtccgccgagggttctggcggcccaccgagagggcgcctgctcctgagacacaggccctgtctgcgttgcttaaccatggcatggtggagcacaccacagatcttgttctcctcgattgggttgtaaaccttgatgctcactagaatctctagaatttgaaatggaccctggggctttgcaaatgacttagtgactatgagaagagagacaagtcttagagctggcttttggaaaggagaaacttgcagtcagaagcccagtgtcctatgtatgcaggaagctgtgctctagcaatagacagtgttggtaatggttgtgctgtacggcgtttggggtggccccatgttccatgctcagctgaccggatgccaactcagatgaaaagaattcatggctctgggcaccccgtgaggcagtgcttgcacatggctgggagtttgtcgggattgaaccaaacctagtgcttcaaagctcctgggacacctccagtgtccagcacacattctcatacatactgcccctaatttctaaagtccctaaagcactacattctgtaaccttgtttcttttactccattcccagattagttatgcaaaattcaactgcgttctacttttagaagtgtttagggtctttattttctgttgacccttcatctgaaagattctcttcccttgttaggtacaatcactgcccccccgcttttttttttgagatggggtcttgctatgttgcccaggctggttttaaacgcctgggctcaagcaaccctcccgcctccctgctgagattacaggtgtaagccaccataccgcaacctcaatgacacctttctgatggtctttacacagtctgtgatgtctggtggcccccctgccctggactcaataattgatagattttcctagagtaacagtatgagagctccagccattccattaaaagtattagttctgctttgagctgaaaccagttgagcctaatggaagactggatgtctttcttcttcatccaagcaccctaatgactgtttagttacatccatagatgcagacaacataacacctgtgacttacttgaattgggataagccattccagaagtagcttatcctagacttggaaataagatttttttcaccactaacttccatgcttcagagatgacattcaaagccagattcccaagtgcctgatcatacctcccagtctcaggaagatatttgcttaccccttagaccaagaatcttaagatcttccccagctatgaagcctatcttggaatgggaaaccatgaaatttgtcttttaaaagaaagggaagaaatagccttacagcccctgttcctccaagtgcacatttagccttaaaatcctgggagtcgggagacaccgtggagtcctaacatccacagtgtctgctggtcgtggtcagaaggcagtaatgcaagagtccttttggtgaagaagtgtttctatgtaagagatgtttatatttaagtagttcttttataaataaaagcatttctaatggcaaaaaaaaaa

SEQ ID NO: 72728 - DNA, 714 bp, Homo sapiens; identical to SEQ ID NO: 65529

SEQ ID NO: 72729 - DNA, 1258 bp, Homo sapiens; identical to SEQ ID NO: 65530

SEQ ID NO: 72730 - DNA, 2549 bp, Homo sapiens; identical to SEQ ID NO: 65531

SEQ ID NO: 72731 - DNA, 415 bp, Homo sapiens; identical to SEQ ID NO: 65532

SEQ ID NO: 72732 - DNA, 2473 bp, Homo sapiens; identical to SEQ ID NO: 65533

SEQ ID NO: 72733 - DNA, 2087 bp, Homo sapiens; identical to SEQ ID NO: 65534

SEQ ID NO: 72734 - DNA, 998 bp, Homo sapiens; identical to SEQ ID NO: 65535

SEQ ID NO: 72735 - DNA, 3325 bp, Homo sapiens; identical to SEQ ID NO: 65536

SEQ ID NO: 72736 - DNA, 1938 bp, Homo sapiens; identical to SEQ ID NO: 65537
  misc_feature (1)...(1938): n = a,t,c or g

SEQ ID NO: 72737 - DNA, 3654 bp, Homo sapiens; identical to SEQ ID NO: 65538

SEQ ID NO: 72738 - DNA, 1345 bp, Homo sapiens
ttttttttttttccaatcttcattctcggggttggcccgccccgatagtcactccatgtcctcgtttactggttcatcttcgtaatctctgtcatggtcaaaatctggactgtggttggctgttgtcactaaggacaggggcccttcagcttcctctggatcgaggggctcttctttgacgtgtacaggatgcacggcttgcataggagatctgcctggactgctgtcactctcgttgctgttggtatgctccattgccccgttcagctcttcccgtattgcgctggctaagttgcccagagtgggatttcccatggaagcggtagtgtatagaggtatactattctcagccattgaagcctgtaaagctgcattgagaggtgtgcagtaggcgtggctgctctgcatgtttttaataagggaagggttaccactgatcttttgtggccttcgtttttggaattctacttcatccactgtccatactgcccctttaacgttttctactcgcacaaaacacttgtgaagactaagattatgacgcactgcattcttccacgtggccgcgttgcgtcggaagtaagcaaacattcgtgtgaaccagttatagatctcatttagtgttagctgcttttctggagattcgagaatggcctgcctaattaaagatgcatatgtaaatggtggtctaacttctgcgttcttataaaattcttggttctgcgcaatatctgctgacgaaatgggcacgttgtatttgtctgagtaccgcctgcggatgggtccccccgtgtgcatgctggtggttgtgatgacagaggggccttgggtgacgggagtcaggggggcggttggggtcgttggagtatgaggtaagctctgtggagaagcctccgatgcggacttggagagagtgacacttgataccagattcaagggctgaggggcggctttgggttctgtagacttcacatgcaggtgggtcatcatggcttgcaggcgttctttgtcttttgcaagctgtagctctaactgctgtacaacctgcatttgtactctacattgggctgtacttctatcgtccagcgcatgctcactgttgagatgttttagaaatgattggaaatcttcgcacactgcttcacagcctggccacttgcatacaccatgtccatagagaggatggctatgggagtgctcctcatgggacaaactttcccttttgggagtgtggactgagagctgtccattggtagaggcatgtgggttcattattaaggaggtcttggaaggtgcagaggaggagacacatgtcgtggtcagatccaaactgctgtgattgttg

SEQ ID NO: 72739 - DNA, 1283 bp, Homo sapiens; identical to SEQ ID NO: 65539
  misc_feature (1)...(1283): n = a,t,c or g

SEQ ID NO: 72740 - DNA, 1584 bp, Homo sapiens
ttttttttttttggatttaaaaacactttatagtgtgttgtttttattgagcgctcacacccgaaggggtggcggcggatgctgtgggtgagtggggccgcctgagcctgctcgggccacatccacacatccacagagtccacctggactcggaggaaggccgagaggacacggacggtggccacacccacgctgcagtgaaggcccaagtgtgatggcagagaaagagggaaagttggagaaagagcggtatctgacaataacttttctcttggatgttaattttttggtctataaattggaaaggaaggctcggactgaaataaatacatttattctgagtaatgaccttttgggagcagtgtccgtcaactctgcttcgagagcgtctccacgtgaggcagcagcgcctgtctcgcgcctcgccgaggcggaaccacaccgggcctccagcggaggcggctttctcctgtgtctgtgaagggaagtagcaggtgtgtcactgttcttaatggagcggacaatgatgccttttctctgacagaaaaatgtccggcttaactatgcaagacaagacttggtcgtcacgttcgcgtctctagttgattttgtcctggaatatgtacaagttattggtggcagccacggcaatgacattgtccacggggtgccaggctgtgtgcaggatcttcttgttgaagtccagactgtccacactgatctcgtctttcctccgcttaccccccgtacacaccttccggggtttgaggctggcgcgcggtttgctgctctctctcgaggcctccagggtcacatccctccgcgtgtctctatcaaacatcctgaagaagttgttataggacccggtcatgatggcgctatccgaaccgttccagcaacactcaaacttgtcaaagatgcagtcgttctcatagagagagcagagcttgctgcgcaggtactcgtggacctggtgggtctccaccggcctgctctccatgttgaggtcccacaccttcaccgacaggtagtctctggtcatcatgtaccgcccactatgactgaattttacatcggatatggatgaaattatttctgagaagaaggacctactgctgggatcttcaggctcttcaaaaaacttggagtgtctgtcgcacagggccgaggagcgcatgtcacacaggcggatggtccctttgctactgctgtagacgaacacgttgcactggtgcgggtggaactcggctgcagtgatgacttcggtcagctcctccatgttagcaggcttgatgtccacgatgttaaagcttctatctgtgatttctaagtgccataaattaattctcaggtcatccgtagcgccgtgatcctaaatgggtctcgaagtcttccatcttcgtctttcaggttataaccttctgctcttttatcccgttcacttattttccataattttatagttttatcatttgtagacagtagaaaatgagcagcattctgttgtggtaaccacctaattttattaattttttcctcaatttctagacttttcaaatagtcgatctccggttcatgactgtg

SEQ ID NO: 72741 - DNA, 2149 bp, Homo sapiens; identical to SEQ ID NO: 65541

SEQ ID NO: 72742 - DNA, 831 bp, Homo sapiens
ttttttttttttcaggtgaaattaaactgatttaatcagcacacattatatacatgtatcaaatttcacactccataaatatgtataacttatatgtcatttaaaaataatgataaaattatatccagattcaagcgcctcttgtagcgcttcccacagtcctcacatttggatgggttttctccactgtggtactctttgttggtctttacagtatgaccgggcatacaagcctctttccacagtcttcacatttcaatggctttctttggcagtggagtttcttatgattcaaaatactagaagcatgtctaaagctcttcccgcagttatcacagttataagatctctctcccgtgtgggttctatggtggaagtcaagacctgacttactaatgtagcccttcccacactcctcacatttgtatggcttttctccagtgtggactcgttgatggaccaaaagatatgaggaccatttgaagctcttcccacattctttacaattatatggtttctgtcccatatgaatcatctgatgcttatgcaaatctagcctatcaatgaaacctcttccatacttttcagatttgtacagtttctctgctgtgtggaccatgcaatgcctattaagacttgacctaagacagaagctcttaccacatatttcacatttgaatggcttctccccagtatgaattctgtgatgtttctgaagctggaaattgtgcatgaaagccttcccacatttctcacaattataaggtttctctcctgtgtgtaatttgcagtgaacttgaagtatcgctctacatctgaagcctttcccac

SEQ ID NO: 72743 - DNA, 770 bp, Homo sapiens; identical to SEQ ID NO: 65544

SEQ ID NO: 72744 - DNA, 2069 bp, Homo sapiens; identical to SEQ ID NO: 65545

SEQ ID NO: 72745 - DNA, 1678 bp, Homo sapiens
gcggtggaattcatagacctcttacctgaaggaaagagacaggcagcaattgataaaatgaccaagaaaatgcagaagaccctagagaacaccaagttccgaggtgcaccgattatacccgtggcggccaagccggggggaccagaggcccccgaaactgaagctccacagggcattccagagctcattgaggtggtgaagaaggtgaagtccatgcagatgttccacatgcccatcacttcagccatgcaaggagaccggctgggcatctgcgtcacccagtttgaccctaagctgctggagcgcgggttggtgtgtgcccccgagtccctgcacactgtccatgcggccctcatctctgtggaaaagataccgtatttccgggggcccctgcaaaccaaggccaagttccacattacagtgggccatgaaacagtcatgggccggttgatgttcttcagtcctgctccagataactttgaccaggagcctatactggactctttcaacttctctcaagaataccttttccaggagcagtacctgtccaaggatttgacaccagcagtgacagacaatgatgaggccgacaagaaggccggccaggccacagagggccattgtcctcggcagcagtgggccctggtggagtttgagaagcccgtcacctgccctcggctgtgcctggtgattggctccaggctagatgcggacattcacaccaacacgtgccggctagccttccatggcatcctgctccacgggctagaggacaggaactacgccgacagcttcctgcccaggctgaaggtgtacaagctgaagcacaagcatggccttgtggagcgggcgatggatgactacagtgtgatcggccgctccctgttcaaaaaggaaaccaacatccagctcttcgtggggctcaaggtgcacttgtccactggggaactgggcatcatcgacagtgccttcggccagagcggcaagttcaagatccacatcccaggtggcctcagccccgagtccaagaagatcctgacacccgccctcaagaagcgggcccgggctggccgtggggaggccaccaggcaggaggagagcgccgagcggagcgagccctcacagcatgtggtgctcagcctgactttcaagcgttatgtcttcgacacccacaagcgcatggttcagtctccctgagtgtccggtgacctcccccagggcctccttgcccagcccagtccaggctgctgtgccaaatcccaaccagccacgcctcagcctctcccagtctctccctgcagtcctgcagcagcagcccccacccccaagcttggtgctgagccctggtgaggagctgagggggatgggttgctggggccaggagggtctctcctccagcccctgcacactcccacccaggacagcccccagcccaactaggaaagggccatgggcagagggctggtagccagtatcttccactgccccatctgttggccacctgcaggccagtctcaaccctcccccaggtgggcaggcacttgatggctacaaataaatgtcccgtggccccagcccactctactggtgtctctctctctgtgacttcactaggtccgccgccctccccagctgtgttccaaggggaatctcagaaatcccaagagttcctgcccag

SEQ ID NO: 72746 - DNA, 914 bp, Homo sapiens; identical to SEQ ID NO: 65547
  misc_feature (1)...(914): n = a,t,c or g

SEQ ID NO: 72747 - DNA, 1895 bp, Homo sapiens
actgtagaccattagtccagtgcggtggaattcatcaaccgaaacaacagtgtggtacaggtcctgcttgctgctggggctgatccaaaccttggagatgatttcagcagtgtttacaagactgccaaggaacagggaatccattctttggaagtcctgatcacccgagaggatgacttcaacaacaggctgaacaaccgcgccagtttcaagggctgcacggccttgcactatgctgttcttgctgatgactaccgcactgtcaaggagctgcttgatggaggagccaaccccctgcagaggaatgaaatgggacacacacccttggattatgcccgagaaggggaagtgatgaagcttctgaggacttctgaagccaagtaccaagagaagcagcggaagcgtgaggctgaggagcggcgccgcttccccctggagcagcgactaaaggagcacatcattggccaggagagcgccatcgccacagtgggtgctgcgatccggaggaaggagaatggctggtacgatgaagaacaccctctggtcttcctcttcttgggatcatctggaataggaaaaacagagctggccaagcagacagccaaatatatgcacaaagatgctaaaaagggcttcatcaggctggacatgtccgagttccaggagcgacacgaggtggccaagtttattgggtctccaccaggctacgttggccatgaggagggtggccagctgaccaagaagttgaagcagtgccccaatgctgtggtgctctttgatgaagtagacaaggcccatccagatgtgctcaccatcatgctgcagctgtttgatgagggccggctgacagatggaaaagggaagaccattgattgcaaggacgccatcttcatcatgacctccaatgtggccagcgacgagatcgcacagcacgcgctgcagctgaggcaggaagctttggagatgagccgtaaccgtattgccgaaaacctgggggatgtccagataagtgacaagatcaccatctcaaagaacttcaaggagaatgtgattcgccctatcctgaaagctcacttccggagggatgagtttctgggacggatcaatgagatcgtctacttcctccccttctgccactcggagctcatccaactcgtcaacaaggaactaaacttctgggccaagagagccaagcaaaggcacaacatcacgctgctctgggaccgcgaggtggcagatgtgctggtcgacggctacaatgtgcactatggcgcccgctccatcaaacatgaggtagaacgccgtgtggggaaccagctggcagcagcctatgagcaggacctgctgcccagggggctgtactttgcgcatcacggtggaggactcagacaagcagctactcaaaagcccagaactgccctcaccccaggctgagaagcgcctccccaagctgcgtctggagatcatcgacaaggacagcaagactcgcagactggacatccgggcaccactgcaccctgagaaggtgtgcaacaccatctagcagccacctgcctgctcctatgtgccctcaccatccaataaaggccccttggctgtggcatggcaaaaaaaaaaaaaagggggggccgtttaaaagaacccttggggggcccaaatttaacccgggcgggcaaggaaaaatttttttccttatggggggccgaataaaaaccaacctgggaattttgggaaagaacccttattttgggggggggacaaattgggccaacctccctacaaaaattaaaggctttagggaaaaaaaaaatttttaaggggaaaagggggaaaaacaaccggcataccctggcggttggaaagttttgtttacggagtatgatttagaaaaattt

SEQ ID NO: 72748 - DNA, 983 bp, Homo sapiens; identical to SEQ ID NO: 65549

SEQ ID NO: 72749 - DNA, 3848 bp, Homo sapiens; identical to SEQ ID NO: 65550

SEQ ID NO: 72750 - DNA, 6995 bp, Homo sapiens; identical to SEQ ID NO: 65551

SEQ ID NO: 72751 - DNA, 1155 bp, Homo sapiens; identical to SEQ ID NO: 65552

SEQ ID NO: 72752 - DNA, 1841 bp, Homo sapiens
gagaaccagaatgcttatattttattagtatccaagactggggagagggatggggtgggagagatcaagaattggggagcagatgggaggcgctacctcactcaggagacacgagttcttatccaagttcaaggtgaaagaagtgagggcaggaagagaaatctccctgctagcaacagcgactcagggagaaactctgggcccatagctagctggaggcagggtgacattgctcccaccaatgggccatcttcttagctacacctttgtagctgtggtgccaggcagaagaaccacctggaaactgagctaaggcaggttccttcttccaacagaagacacagctgggcagggactgtgcagactcaacagggccaggccagctagtggccagtcagtgttcatgtctctcaccagtgcctggagggtccccagccaaggaaagaactggtcagttcctgccagcagcttgagctggaatgccctgggagggtcagtagagggtggtcacttgaggagcttcacagagaggcggatgtcaacatcgcagaggaagatgtccatgaggtcatggcctgcctcctgtgctatctgggagatcacgtggcccttcggaccaatcaggagtttcacataagattctttgggcaccagaagcttctgttggataaccagctccccacctggtccttcctcccacactgctgtcttctgctgtacattgtaaggcacctcctggggcaggtgttctaggagcttctctcggataatgttggcacagatctcttctggtgtctggctagtgaggactgcactgtggtactcccagggccctggctgggcctgtgtcagaaggtattgctttagtgttttcacatcctcctggcttagggctgacaacatgaagatctccttgaagtggggccagccaatcctctgaggatttcccacagattgtgtgtttgggtccttaactgctgggctggggcaatgggtgccagggtgtgagtggaaggcctgcctcatcttgagctttttgccattgaccacaccttcagtgagggctgccgtgagctccaggagaactgacttctgcttcaaacaatctaccttgttcatgaccaggacactagggatctgggagtacttggtcaagcacctgagcaactgggggctgagctggttccgtgtccacttgtctgagacatccacaagaaccacaacaagatcagcagattccatgctcttccatggatcttccaacaaagagagctccaggtgatgcctcttctgtttaccaggactgataatgccaggtgtgtcaagtagaatcacctgggtctccttctctgtgatgacccccagagcttggcagcgagtagtatgcaccttcctggaaacagggaacacctttcggcccagtagctggttggagagtgttgacttccctgcattcggggctcccaggaggaccactcgtaggacccgggaattctcaggcatatcagggtgatggaccaagaggacatcctgctcatctctgttcatggacaccgcggggacgcaaggagtcaccgaactgtcgggctgagagaatccgaggaagtggtccagggcagagccctggccattactgcgagaagccgaggccaagcggggaccagagaaagcggaccccgcgacgcaggacacgcacctccgttggaagcctaagagtgaggaaaaagggatcacccgctccctcgcgacatgagggcccacctgccagactcttaacaccgattgaacaagcctagccccgcgccagctgggggcagccatcctcgtgccaagcttggcgt

SEQ ID NO: 72753 - DNA, 1917 bp, Homo sapiens; identical to SEQ ID NO: 65554

SEQ ID NO: 72754 - DNA, 1292 bp, Homo sapiens; identical to SEQ ID NO: 65555
  misc_feature (1)...(1292): n = a,t,c or g

SEQ ID NO: 72755 - DNA, 2092 bp, Homo sapiens; identical to SEQ ID NO: 65556

SEQ ID NO: 72756 - DNA, 920 bp, Homo sapiens; identical to SEQ ID NO: 65557

SEQ ID NO: 72757 - DNA, 1189 bp, Homo sapiens; identical to SEQ ID NO: 65558

SEQ ID NO: 72758 - DNA, 1159 bp, Homo sapiens; identical to SEQ ID NO: 65559

SEQ ID NO: 72759 - DNA, 5530 bp, Homo sapiens; identical to SEQ ID NO: 65560

SEQ ID NO: 72760 - DNA, 4254 bp, Homo sapiens; identical to SEQ ID NO: 65561

SEQ ID NO: 72761 - DNA, 4956 bp, Homo sapiens
acacccagcaccacaggcaccaagtccaacacgcccacatcctccgtgccctcggccgccgtcacacccctcaacgagagcctgcagcccctgggggactatggcgtgggctccaagaacagcaagcgtgcccgggagaagcgcgacagccgcaacatggaagtacaggtcacccaggagatgcgcaacgtcagtataggcatgggcagcagtgacgagtggtctgatgttcaagacattattgactccacgccagagctggacatgtgtccagagacccgcctggaccgcacaggaagcagcccaacccagggcatcgtgaacaaagctttcggcatcaacaccgactccctgtaccatgagctgtcgacggcagggtctgaggtcatcggggatgtggacgaaggggccgacctcctaggggagttctcaggaatgggcaaagaagtggggaatctgctactggaaaactcacagcttctggaaaccaaaaacgccttgaatgtggtgaagaatgacctgattgccaaggtcgaccagctgtccggggagcaggaggtgctgaggggcgagttggaggctgctaagcaggccaaagtcaagctggaaaaccgtatcaaggagctggaagaggaactgaaaagagtgaagtccgaggccatcatcgcccgccgtgaacccaaagaagaggcggaggatgtaagcagctatctctgtacagaatcggacaaaatccccatggcccagcgccgccgcttcacgcgggtggagatggcccgtgtgctcatggagcggaaccagtacaaggagcggctgatggagctgcaggaggctgtgcggtggactgagatgatcagagcgtcccgagagcacccatccgtccaggagaagaagaagtcgaccatctggcagttcttcagccgcctcttcagctcttcctccagcccccctccggccaagcgcccctatccctcggggaacatccactacaagtcacccaccactgccggcttcagccagcgccgcaaccatgccatgtgcccgatctcggcaggcagccggcccctggaattcttccctgacgacgactgcacgtcctccgcccgtcgagagcagaagcgcgagcagtaccgccaggtgcgtgagcacgtgcgtaacgacgacggccgtctgcaggcctgcggctggagcctgcccgccaagtacaagcagctgagtcccaacgggggccaggaggacacgcggatgaagaacgtgccggtgccggtgtactgccgccctctggtggagaaggaccccaccatgaagctgtggtgtgccgcgggcgtcaacctgagcgggtggaggcccaatgaggacgacgctgggaatggagtcaagccagcgccaggccgcgatcccctgacctgcgaccgcgaaggagacggcgagcccaagagcgcccacacgtctcccgagaagaagaaggccaaggagctccctgaaatggacgccacctccagccgggtgtggatcctgaccagcaccctgaccaccagcaaggtggtgatcatcgacgccaaccagccgggcacggtggtggaccagttcaccgtctgcaacgcgcacgtgctgtgcatctccagcatccccgcggccagcgacagcgactaccctcccggggagatgttcctggacagcgacgtgaacccagaggacccgggcgcagatggcgtgctggccggtatcaccctggtgggctgtgccacccgctgcaacgtgccgcggagcaactgctcctcccgaggggacaccccagtgctagacaaggggcagggggaggtggccaccatcgccaacgggaaggtcaacccgtcccagtccacagaggaggccacagaggccacggaggtgccagaccctgggcccagcgagccagagacagccacattgcggcccgggcctctcacagagcacgtcttcactgacccagccccgaccccgtcctctggcccccagcctggcagcgagaacgggccagagcctgacagcagcagcacacggccagagccagagcccagcggggaccccacgggagcaggcagcagtgctgcacccaccatgtggctgggagcccagaacggctggctctatgtgcactcggctgtggccaactggaagaagtgcctgcactccatcaagctgaaggattctgtgctgagcctggtgcatgtcaaaggccgtgtgctggtggctctggcggacgggaccctggccatcttccaccgtggtgaagatggccagtgggatctgagcaactatcacctaatggacctgggccacccgcaccactccatccgctgcatggctgttgtgtacgaccgcgtgtggtgtggctacaagaacaaggtgcacgtcatccagcccaagaccatgcagatagagaagtcatttgacgcccacccgcggcgggagagccaggtgcggcagctggcgtggatcggcgatggcgtatgggtgtccatccgcctggactccaccctgaggctctaccatgcacacacgcaccagcatctacaggacgtggacattgagccctacgtcagcaagatgctaggcactggcaagctgggtttctccttcgtacgcatcacggccctgcttgtcgcgggcagccggctctgggtgggcaccggcaacggagtggtcatctccatccccctgacagagactgtggtcctgcaccgaggccaagctcctggggcctccgagccaataagacatcccccacctctggggaagggcgcccgtcccgggggcaatcatccacgtgtatgggcgatgacagcagtgacagggcggccagaagcttcatcccctactgctccatggcccaggcccagctatgcttccatgggcaccgcgatgccgtgaagttctttgtctcggtgccagggaacgtgctggccaccctgaatggcagtgtgctggacagcccagccgagggccctgggccagctgcccctgcctcggaggtcgagggccagaagctgcggaacgtgctggtgctgagcggcggggagggctacatcgacttccgcattggagacggagaggacgacgagacggaggagggcgcaggggacatgagccaggtgaagcccgtgctgtccaaggcagagcgcagtcacatcatcgtgtggcaggtgtcctacacccccgagtgaagctgctgccctgcctggcccgacctgtacataggacccccgaccacctgacccccgcccggcccgcggggtagccagccaggcgccgccgcccctcttctaacctctcaacctgcagctttcacctgagtctggcccctccagcgggcagggagtgcggggatgcggatcaactgggaggaggaggggaggggtgcttccacccgaggggaagatgctctcgggacagtttcccgggcagctcctggccagcttccagcccagagtcctcaagtccagggcaccttgggcccagcgcaggcagaatccgaggtggtcctggctctaccctgggcctcctactccccagcacccctggaggaggcaggggctccccgccgccgaggctgcctgccctgggcccacctctgcatgctgctcatggggccaccctgcctcctgggccctcactctgcctaggggagctgggccaggcactagcctttgcccagggaggtgggcctcaggctgcccaggtgcctgcaccccagccggccttctctggggcctccccgtcgtcaagcctctatcctgtctgtccccaccccagctgtcccctgcccagggagctggcataaaagcacgaggcccggctccctggggcagctgcttgagaacagagactgctaccccatcctgcccatgcaggcaggctcttgccagccccgttctgacccgtgtccccccaggctctgcctgggcagaagactcaccttggaggagtgggccctggagtcctgtccctcccagaagcccccagggtgggatttctcaggctgccagggcaggcccaggcctcaggaagaaggggaggcccctggcctctccgggatcagtcctaggacacaggctcagcctcaggttgatgggggatgatgtgctcccggggcctgcctcctgcacggggctccacggagcccagctcccagacacgctactaagtgcctagggttgcccgctgtggcctgctcccagggagcaacagagaggccaccaagcagaggcccgtggggctgaggatggagccgcccccagccgactccaagcccgcagagggcagacgccaccctggactgctctccctgcccagctgggcctctctggccctaattcctaaccttcccaggcccactgcaactcctgtctgggaggcccttatgaggggcagcccagcccccccggcaccacccccaaccagagaagcacagatcttggggagctgccccacaagccccgctggccaccgagggctgcagccgctgcgctgccggcttctccccaccaccctgccacctccactgtgatgtatgtccgctccctcgtctgttcccccaggatctcgaagtgactccgggctgagcagtggggcggctgggggaggggtgacgattctcctcaggctttggccctgcaagcaaacccacatatctgctctgtatgtaataaatgtcttaacgtcgaaaaaaaaaaaaaaggggcggccgttttaaaggatccttgggggggcccaagtttacccgggcttgcaaggtaatagttttttccttataggggggcgtattataacctacctgggaatcttgggaaagaacccttacttggggggggggacatattgggccaacctccctacagaaattaaaggctctagggaaaatataaaattttaaagggtataaggggtaaaactaccggcataggctggcggctg

SEQ ID NO: 72762 - DNA, 1647 bp, Homo sapiens; identical to SEQ ID NO: 65563

SEQ ID NO: 72763 - DNA, 2126 bp, Homo sapiens
ttttttttttttccagagacaacttctaagtttctctttatttcttttggaaacaacctccattcttcatctctcaatgtagtcctggcctagtgaaaaagaaggcttttctttctggcctccagagactgcttcctttgtaggaaaaggaacaataaacacttcccattaggtttctgtctccagataccaatcagggaatgactggccaggactggaacttaacggccttgagaacatgtgggatttgtctttgagccccattggcttgtgatgttttcctctgtcctccctgagacagttgctcctgtcctgggggggctctgcctccacctcccagtccaggatgtctgaggtggttgcaggctgcttgctgcccagtttccagtctgttctggtccaggaaagcaccaccccatggcccttgctgcttctggcaggggtcctcaagagctcaccatgtcccagtgctggctcatgagtgaggactcacatgggttgacgacgatttccttgccgttctcggtgccatcaccgaacatatctgtatcgaggcagaggtgggatgctatgtgctcgatgtgggaaccagttttggtccattgctgtcggtcatctccattcttgcaaaggacaagaaccactggggcgccagggaacaaggtgatgactgacaggcacagctcctcctggaggatctgctgggtgtatgtgaaggcccatacctgggactttgcatcttcgcctttgaccttggcacaggggctcaactttaggtttggggtttcttggttgttctgcctttgagattccaggcacttctgtctctgtcggatattgcccttctggatggaggactccttggggatgctgagttcagggtagatattctccaggtaccacttgaagctctggcagcgcagattcttcctcaggtccaatctgctctcaacattcccgaagggcctctccagggcgaatggccgggcagcgtaatagtattgcttgtattcatccatccacacttcagctgtccgcttggtgttctttatatacgtgttggcatttccatcagggaaaacgtaggggtgcttcttccggaagacgtgccccactcggctgcaggggacgatctctaggctgcccccgcacatccacactcggaaggagatttcaaagttctccccaccccagatgtccatgtccatatcatatttccccaggtaatcaaaccaagctttgtcgatcacgaagagccctccagctatgataggagtcctgatgggctccgtggggtccaggcgccgagccttctgctctggggagagctgctcccactggaagtggaggctccagtcaaacccccctctgagctccgaggcagactcgatgtaggtgaaggtgtccaggttaatgatatcgatcacagggcacaccacccgcgtgtagtcctctttgaccctgtgcaacagaggctggagccagtccctgttcacctcacagtggctgtcgaggaaagtcagagtggtgccctgggcgatgtcagcgccccgaatccgggaccggaccagaccttgccgttcattattgcgcaagcatttcaccttgggcaacttgatgagctgtttacagtcatcagggtcattgctgaagtcatccactaatatgatttcccggatcagatgcgtaggggtgcggtttaatacactgcggattggtcctgagcagcgtggagcgggccctcgttgtggaaggtgatgatgatgctagtgggtggaaggtccgtgcaatacaccagcagtgtgcatctcagatggcgagtgtccgggatggcccgattgctggagatccgctcactctcccgctggttgaaagcatacagcttataggggtcgtcaccaacgcgccactttttggcattcagataccgccgctcatcaaactggtcccacaggtcgtcccagtcagcgtccgaaggcttaggggtctgcacttcaggtcccgtcggcacctccaacttcctcttggttacccagaagaacagcagcaccgtgatccagagcaccccgaagactggcagaaccagccgacgagtcaggcgccgcatggtcccctttgccacgaaa

SEQ ID NO: 72764 - DNA, 698 bp, Homo sapiens; identical to SEQ ID NO: 65564

SEQ ID NO: 72765 - DNA, 2146 bp, Homo sapiens; identical to SEQ ID NO: 65565

SEQ ID NO: 72766 - DNA, 1193 bp, Homo sapiens
tcctagtccatgtggaggaattcagcccgttaggacgtgggaaggtccacaggtggggccgagtaaagggggacaggagacgtgcggggcaggacctcggggctggatgcagaggccggggtggtggaaaggggaggagaactgggcagggcagataagtgggtggggcctctggaggtggcgggggcaaggttggagccccgggacgaagaagggacgcgggtcagcgaggcctgaagagtgggaggagatgggacccggctgtagagtgcccagaggtctaggccaggggccgcgctgccgcaggaagatgcgagagtttggctttggtgatctggtccacccggggccagtcttgccccctctgccaccgcagcgtagggcctcctgcattccgtttctctggccggaagggtctagtgttcatccctctcaggctttggcctcctcccactctcccgccctggggcccattcgtttaggaagaatgggagagccggtcgtggcccctgggcggggtaaaggagggaggcttggtaaacctctgctggggaggacccagtacagtggcagctccttgtcggggaaagaacggatctggggaaagaacggatctgcgtcacacgctcttacaggggaaccctaaggggcctgaggggtagggcttggtctccacccagagggaaggagaaatttttcgagtcgtaaagaaatgtatcagaagccatggaacatttacagccgcacacgctgggtctcccaacaaacagatccccaaaatattttccagtgctgtactcgtggcatagacccagacccacagaccaggaggaagcgctagagatgtcaacagccaacaaaaacagtgctttacacacttgtaaaattgtgacctacaggggctgggcactgtggctcacgcctgtaaccccagcactttgggtggccaaggtgggaggattgcttgagccccaggagttcgagatcagcctggcaaacatggtaaaatcctgtctctactaaaaatacaaaaattagctgggcgtggtggtgcatgcctgtaatcccagctacctgggaggctgaggcaggagaattgctggaacccaaaaggcggaggctgcagtgagccgagattgcgccattgcacttcagtttcggccacaaagcgagagtccgtctcaaaaaaaaaa

SEQ ID NO: 72767 - DNA, 2427 bp, Homo sapiens; identical to SEQ ID NO: 65567

SEQ ID NO: 72768 - DNA, 1766 bp, Homo sapiens; identical to SEQ ID NO: 65568
  misc_feature (1)...(1766): n = a,t,c or g

SEQ ID NO: 72769 - DNA, 2416 bp, Homo sapiens; identical to SEQ ID NO: 65215
  misc_feature (1)...(2416): n = a,t,c or g

SEQ ID NO: 72770 - DNA, 2416 bp, Homo sapiens; identical to SEQ ID NO: 65215
  misc_feature (1)...(2416): n = a,t,c or g

SEQ ID NO: 72771 - DNA, 1495 bp, Homo sapiens; identical to SEQ ID NO: 65571

SEQ ID NO: 72772 - DNA, 5662 bp, Homo sapiens
tttttttttttattcacaaacaaaacagtgattaaattttattcctttttgagttgttttgtttttatttttaaatgaagtttccatctgtacacgttaagaaaataaacaaaacaacaggaagccattctctgtgtatcctccttggaggcaggaaggatggatctgccgataggcacacaacagcacacagccagggctcatgggagtgagtgcccgtcacctcacgaaggtcatgggcctaaaacatacggaggctccatagaaaatgctccagctggctttgcagtcatgcataaaggtgaggacacttaattcaaggcatctgggggctggtgtcaccgcacatgaagagtagtgcccatgctgtcccacgagcttccttgggaaaagggaaaaacaaatcttttcctcaaatagaattgtcgcaggaaagagccatgacattttattcactgtttaatcatcgggtggcaggatttctttgaagtagaatctggtagtacccctcccaatctttgctggatcacttctaaatggtgaatatactctgtcaaggaatgttctggatcttgagaagcagtcagggatctttctaatcttgaatttggggatggagtggctcttcccccactgtgtggggaggctgctgctgccagtctgcggcctctggcagggtccctggtgtggccagagggtacatcccgggttgggggggactctctggttctgggtggagactgcggctgtcgtgctcggggccctgggcgaggggctttgccttgtgccagagctcctttccgatctacttcttgccatttcttaaccaaaaaacgtaatcttaatattgcaatgaccaccctgacggccgtgcggaacctggtgaaaggacgagatgtgattttccgttctgctttggaaggaaatacccccaaatgggcaatcatggagagtgtttcttgttcagaatcctggaatccaccaatcaacagcaaaagatacttcttttgataaatcagagcttttctaaagctctctgctctcaagtaatgcaggtacaatttttccatcttgacattgctggtgtgtgcttcctcgctggcagctggtggaagccggccggggtctgggcgcctcagggaactctgtggagccgtttcgtctggcttccaagcagacctttccgacctgcttgggctgcagcccttctgcagatggtgcttcagcaacttctcaagcttagacacggctctgctcagctccagcttctcctgggtcaccgtgctgagcgcttttgtgagggaaacattgtctttcagcaggacgtccacaaactggaactgcagctctgctgccatttttttctgggaggaggtgggcctgctcaagtcagactccagctcctccaacgtgtgcagtaaagacatcactgctttctcattggatgacgtccaatcattaactgtcctgtccacggcctggctggtgaagctggtgagaagccgggcggcagagagcagccgctgcctcatcgcctccagctctcgctgctgttcccggaggtggtccgcatccgagccggcagccctgcgggcagaacctaggtggaggcggctgccaggcacctcgtccttcgactccaggtctctcactgtctgctgaagctgcttgatcttatgcaagtcacgctgacgctgcagttctaattctcgctccttctctctcctgagcgcctcacagtgcttctgagcctcagcctcaagctgctgctgagaatgcagggcttgctgctgcaccttttcaagcatcgcttgcaagtccaccacccgggacttctcctccttcagcttctgcagcagagcgtgatgggcctgtgtgtcctggtgcacgcaagcctcctgtgtcctctggctcagctgctcggtcaggagccgctcgtgccgcaaggcctctgacagctccagggtgcggctcttctcagccgcaaggtccttctggagctcagagagctggctccgctcctgagccagcaaggcctcgcagcgtgagtgctcgatacgcagctccttctgcaggttgtccttggccgtctgctcgtgtttcagtgccacgcagagtcgactgctctgagcacgctgtgtctccaaagacgcccgcagctcctccagggccttggcactctggctctccctctgcaggtgccgcagctgctcctcctccagctggctctgcagggcacgccccttcccgtgctcactctccagctcctgaagcgcggccttcagctcgttctccttactgctcagcatggatctcagctggaggacctcctgctgcacctcgcagagggaccgggacagctgttcgctcttctgcctgctctcacagaggtcggacttcaaatctcgcactacagtctgctccgccgccaggagcttctgcacgctgtttgccttctcttgctcttcactcagcgtcttctgcaagtccccagcaatgcacttctcctgctctactttataagccagcagttcaacctgcctgcgcagctggtgctcctgctggctcccgcgcgcctctgcgcttgtcagcgccgtgcgcaagtgctgcagcttctcctggttctgcaggtgcgtcatgcgcatgctgggcacgcagcgcctggatctcggacagcaggctgctccggtccggcaagcgaagatgctccagggacttttcctgcaggtctccctgctcacggatgatcttctccagcctttcgagcagggagctgtgaccccccagatctgagccactgagtcggggctgcagctcaaccccctgcatctcctgctctttttcaaaggcctcttgcacaacctgcagaaggtcccctctccaatcggggcacgcggtgggcacttcctgcgtctttcccccatggagcgagatgtcctgtatctcgtcttccttccggggtgggtgtggctcgccgcttgggggtgcaaggccttctgacagcgccaggataaggtggctctcgtcacgcaccatctgcagtaaagccttcacgtgcttcggacgcacttccttctccttcatggcttccggcagcggctgaaaccttccagagatggaagcaggggtcacaggaccagcagtttgagcctcagggcctcctgaccccgggctcagtcttgctccaaaacccgagccgtcacttttctcacttctatcagcttttccttctaatccaggaggaggtgaacttaatgtttcttgagaatcaaaggatgttgtgataaaatcttcgacatctttctccacagccgtcctctgcacatggtggtcgtcagccggcggagactcggcccactgcagtgccagcgctgctgcagacacgcctggggaacaaagcagccccggcccctgggtctgtggcagcgaggtgtccgccctgtcccccagggatgtgtcggcactgcacaggctcagggctcctgagtggggtgtcacggggaggctgggccagggctccagggtccagtccttcctgaggacctcaggggagctccaggaagacaggtccagcatcccgaccgggctcttccggggcccagcctctgcagtgtggctctggtggcgggagccaccaagtacgctggtcggtgaagaaagagacatgtcctgacattctgatttttcttgaatgggagaatctggcatttcatctggtatcaaggaatcccaatttttgataacatcagttacaccccctggggttgtattggcatcacacgcgtctatggcctgatttttgataacatcagttacaccccccgtggctgtattggcatcacatgtgtctatgtggggtgatatgtcaggctcttctccgtcacaggaatcatcactccagctgctctccaacaggtgtgctgaggccatgggccacagagatttggtgtcggcagcatccacattctggaaggtcatggaatacagcaaacggttcagtttttcctgaagctgtttcacctgagctacgagatcgaccttcggcagctgacaatcttccagtactttttctttacccttgccgccgtcctccagactcaggcgcatttcatttttcaccaagagcagctccgactgcagctgcctctggcagacggtgagcactgacatcacgccttcttgcttgcagagaggtgcatccttcaacgtcaccaggacaggctgcagatcaccctgtgggtcagggacaaccggctccaaagcagcatcatgggaggcctccacgtcgccggtgacctgggccttggcgccaccatccatgcgaggctgtgggtgggccccgggcacccgtgtgtgagctgtggctctgcgggcctgccgcctgtccagctccacctggcacctcaggaaccgctggtgcagcacctgcagctggcggctgaggcgggcacactgcgctcggagccactgcagctcgggaggcgccgccccggctgccaggggctgctgctccagggcgcggcggatgcgggccaaggccaacaggacggcctccagctcggcagagtgggccgccttccgctggttcagagcgtcgatttctaaatttctctcggcaatcgtcgcttcctttgctttcagggccgcttcgaactcctggatccgggaggccatgtcttcgacctcagcctccctgagggctacattgcgctccagctcagccagctgtagctccgcagcctcctctgcgccctggaggcgctgctgcagggcctccagggcctggctgtgcctgcgctcctggtcagccagcagccggctcagggcctccttggcttccagcgcagcctcgagctcgccctgtagggcctgcccacgagggcccccggcctgggagcagagcagctcgctctgcagactgccagcctgactgtcgctgacttcgtgcaccacaggccccatgagggacagctcgtgctgcagcttctcaatgacttcatggagttgttcaatttcctctgctttctccttttgtaatcgtttctgattctcttgcagattttcaatagtggctttcagctcttcaatctcagaacttctggtatatatgaccttcaagctcgtgttctcttcctcaagttctctgaggctgacagcagtctggctgttctgcatgtccaattttaagttcagatgtagtatttcttcatttttactttctaagtcacctttcatcttttctagctgttcttttaagtccaaaacctcgctctcgcgccgcaggagtgctctctgtgtcacctctaactgtatttctggaccctcaggagggctgcccgaaggaggctcgggacatctgcctgcatctagtgtagactgcaacgtggacgccagaagcaagctactcatctgctgtttctttaacacctctttatcctgttccagccctttcacgatgtttttctgtttttccacttcttcctggagctgggccacttttttcctgatgttgatgttcatctcctccagacgtttaatttcttcttcctgcattaacacttgtctatctgccgactctttctgtatagccaattcattaaattcatccaacttttctctcaacttttgttgtaacaactcaacctctccatccagcggcgcc

SEQ ID NO: 72773 - DNA, 2655 bp, Homo sapiens
cgaactgctacagaatgtgacgttcgtatgagcaagtctaagtcagacaatcagatcagtgacagagctgctttggaggccaaagtgaaggatcttctcacgctggcaaaaaccaaagacgtagaaattttacatttgagaaatgaactgcgagacatgcgtgcccagctgggcattaatgaggatcattctgagggtgatgaaaaatctgagaaggaaactattatggctcaccagccgactgatgtggagtccactttattgcagttgcaggaacagaatactgccatccgtgaagaactcaaccagctgaaaaatgaaaacagaatgttaaaggacaggttgaatgcattgggcttttccctagagcagaggttagacaattctgaaaaactgtttggctatcagtccctgagcccagaaatcacccctggtaaccagagcgatggaggaggaactctgacttcttcagtggaaggctctgcccctggctcagtggaggatctcttgagtcaggatgaaaatacactaatggaccatcagcacagtaactccatggacaatttagacagtgagtgcagtgaggtctaccagcccctcacatcgagcgatgatgcgctggatgcaccatcctcctcagagtcggaaggcatccccagcatagagcgctcccggaaggggagcagcgggaatgccagtgaagtgtccgtggcttgcctgactgaacggatacaccagatggaagagaaccaacacagtacaagagagaaactccaggcaaccctgcaagagctagctgatttacagcagattacccaggaactgaatagtgaaaacgaaaggcttggagaagagaaggttattctgatggagtctttatgtcagcagagcgataagttggaacactttagtcgacagattgaatacttccgctctcttctagatgagcatcacatttcttatgtcatagatgaagatgtaaaaagtgggcgctatatggaattagagcaacgttacatggacctcgctgagaatgcccgttttgaacgggagcagcttcttggtgtccagcagcatttaagcaatactttgaaaatggcagaacaagacaataaggaagctcaagaaatgataggggcactcaaagaacgcagtcaccatatggagcgaattattgagtctgagcagaaaggaaaagcagccttggcagccacgttagaggaatacaaagccacagtggccagtgaccagatagagatgaatcgcctgaaggctcagctggagaatgaaaagcagaaagtggcagagctgtattctatccataactctggagacaaatctgatattcaggacctcctggagagtgtcaggctggacaaagaaaaagcagagactttggctagtagcttgcaggaagatctggctcatacccgaaatgatgccaatcgattacaggatgccattgctaaaggtagaggatgaataccgagccttccaagaagaagctaagaaacaaattgaagatttgaatatgacgttagaaaaattaagatcagacctggatgaaaaagaaacagaaaggagtgacatgaaagaaaccatctttgaacttgaagatgaagtagaacaacatcgtgctgggaaacttcatgacaacctcattatttctgatctagagaatacagttaaaaaactccaggaccaaaagcacgacatggaaagagaaataaagacactccacagaagacttcgggaagaatctgcggaatggcggcagtttcaggctgatctccagactgcagtagtcattgcaaatgacattaaatctgaagcccaagaggagattggtgatctaagcgccggttacatgaggctcaagaaaaaaatgagaaactcacaaaagaattggaggaaataaagtcacgcaagcaagaggaggagcgaggccgggtatacaattacatgaatgccgttgagagagatttggcagccttaaggcagggaatgggactgagtagaaggtcctcgacttcctcagagccaactcctacagtaaaaaccctcatcaagtcctttgacagtgcatctcaagtaccaaaccctgctgcagctgcaattcctcgaacgcccctgagcccaagtcctatgaaaacccctcctgcagcagctgtgtcccctatgcagagacattccataagtggaccaatctcaacatccaaacccctgacagccctgtcagataagagaccaaactatggggaaatccctgttcaagagcatctgttaagaacatcttcagccagccggcctgcttccctgccaagagtgcctgcgatggaaagtgccaagaccctctcagtgtctcgacgaagtagtgaagaaattaaacgggacatttctgcacaggagggagcgtcgccagcctctctgatggctatgggaaccacgtctccacagctttccctgtcctcttctccaacggcatctgtgactcccaccacccgaagccgaataagagaagaaaggaaagaccctctctcagcattggccagagaatatggaggatcaaagaggaacgccttgctgaagtggtgtcagaagaaaacagaaggctatcagaatattgacattacaaacttcagcagcagctggaaa

SEQ ID NO: 72774 - DNA, 4410 bp, Homo sapiens; identical to SEQ ID NO: 65574
  misc_feature (1)...(4410): n = a,t,c or g

SEQ ID NO: 72775 - DNA, 2752 bp, Homo sapiens
gcgaccgccagcggctacacggtacccgcgtgagaagctcaagtccatgacgtcccgggacaactataaggcgggcagccgggaggccgcgcgccgctgccgcagccgccgtagccgccgcagccgcagccgccgctgccgccgaaccttaccctgtgtccggggccaagcgcaagtatctggaggactcggaccccgagcgcagcgactatgaggagcagcagctgcaggaggaggaggaggcgcgcaaggtgaagagcggcatccgccagatgcgcctcttcagccaggacgagtgcgccaagatcgaggcccgcattgacgaggtggtgtcccgcgctgagaagggcctgtacaacgagcacacggtggaccgggccccactgcgcaacaagtacttcttcggcgaaggctacacttacggcgcccagctgcagaagcgcgggcccggccaggagcgcctctacccgccgggcgacgtggacgagatccccgagtgggtgcaccagctggtgatccaaaagctggtggagcaccgcgtcatccccgagggcttcgtcaacagcgccgtcatcaacgactaccagcccggcggctgcatcgtgtctcacgtggaccccatccacatcttcgagcgccccatcgtgtccgtgtccttctttagcgactctgcgctgtgcttcggctgcaagttccagttcaagcctattcgggtgtcggaaccagtgctttccctgccggtgcgcaggggaagcgtgactgtgctcagtggatatgctgctgatgaaatcactcactgcatacggcctcaggacatcaaggagcgccgagcagtcatcatcctcaggaagacaagattagatgcaccccggttggaaacaaagtccctgagcagctccgtgttaccacccagctatgcttcagatcgcctgtcaggaaacaacagggaccctgctctgaaacccaagcggtcccaccgcaaggcagaccctgatgctgcccacaggccacggatcctggagatggacaaggaagagaaccggcgctcggtgctgctgcccacacaccggcggaggggtagcttcagctctgagaactactggcgcaagtcatacgagtcctcagaggactgctctgaggcagcaggcagccctgcccgaaaggtgaagatgcggcggcactgagtctacccgccgccctcctgggaactctggctcatccttacgtagttgcccctccttttgttttgagggttttgtttttgttcattggggggtttttgttttttggtttttgttttttttgattctatatatttttccttggttttgttgcctgttaaggctgaacaatagaattggccaggacctaggttctcatattcttggtattcctcctggatggaaaggctgttggcatcaataggggacagaggctgatgctggagtggccagtagaggtggtggagcagagcacccatcttttaagtggggctgtatcaggctgggtttatttaaaagcaacaaaatgttttggttaagaaaattattttgctttcagtgtaaatcttcgcagtgttctaaacaaagttcagtcttctgcttgcccctttccctcactgatgtctgcacttggttgaggtctcctggagcctcacaggctctgctgttctccacttctcacctgccatccacgccctgcaagctcatgcaaacaccctttcttcctcctgcggcagagttgttcaggttgcctgggcaggggcttaaacagtgccagcccctgccatcccaaagctattgttaagccccccaggcgtcctccacccacgcccactagcctgccatgtccacagttccttgggctgctgaggggctagtgcagtggtcctgacctctcttatcaagagcacacttctttgctggttgctccttttgagcatatgcgtgtgattatttggaacagttagacttgccacgttgggtcagttttagaaattgtttctagctagagggactggtgtccttccaagtctagcatttggggtatggaaaattgttgtggtgtgtggtagggtttttgttttcttttttgagttttttttccccctttagtctccctggctttttcctttcccttcccttctccactggccagcttgggcctcatcctcatgtcatccttctaggaaggcgcctgccccatcttgtctgccggcagcatgcatccaaggccagagctcaggcctgcagactgggctggtgcctcctccgcttcagggtatgggagttggtgaaggggctttcaaaaaataataagaaaaaaaaggtaaagtctttggtagcttctatccactcagatcctggaaggcagcaaggttttgtggatctagattcattaggaatgtcttcttgtcagccaggccaggacccgggcttgccaagagcagaggccctcccagcaaccaggataccaccactttgggggctttgtgtacagaggtccgggtctgagacctcataggctgcagaaatctggggcagccaccatcaagaagcccctctcaggggccagaactcctttgccagcgtggatttctcaagtcgggactgcataattaaagcagttgcagttttattttttttacagcttttttcccaaaaatgatttatagttgtgtgtgcagcacttcgccctgaaatgtgtgctctacaataaacaaccaaatctaatatattttgaaaaaaaaaaa

SEQ ID NO: 72776 - DNA, 2354 bp, Homo sapiens; identical to SEQ ID NO: 65576

SEQ ID NO: 72777 - DNA, 2547 bp, Homo sapiens; identical to SEQ ID NO: 65577

SEQ ID NO: 72778 - DNA, 2349 bp, Homo sapiens; identical to SEQ ID NO: 65578

SEQ ID NO: 72779 - DNA, 3269 bp, Homo sapiens; identical to SEQ ID NO: 65579

SEQ ID NO: 72780 - DNA, 3307 bp, Homo sapiens; identical to SEQ ID NO: 65580

SEQ ID NO: 72781 - DNA, 2386 bp, Homo sapiens; identical to SEQ ID NO: 65581
  misc_feature (1)...(2386): n = a,t,c or g

SEQ ID NO: 72782 - DNA, 3455 bp, Homo sapiens; identical to SEQ ID NO: 65582

SEQ ID NO: 72783 - DNA, 1266 bp, Homo sapiens; identical to SEQ ID NO: 65583

SEQ ID NO: 72784 - DNA, 1006 bp, Homo sapiens; identical to SEQ ID NO: 65584

SEQ ID NO: 72785 - DNA, 2781 bp, Homo sapiens; identical to SEQ ID NO: 65310

SEQ ID NO: 72786 - DNA, 2548 bp, Homo sapiens
cggaagccttctctggggctgcaaggacctgagctcagcttccgccccagccagggaagcggcaggggaaagcaccggctccaggccagcgtgggccgctctctcgctcggtgcccgccgccatgtgggccgtcctgaggttagccctgcggccgtgtgcccgcgcctctcccgccgggccgcgcgcctatcacggggactcggtggcctcgctgggcacccagccggacttgggctctgccctctaccaggagaactacaagcagatgaaagcactagtaaatcagctccatgaacgagtggagcatataaaactaggaggtggtgagaaagcccgagcacttcacatatcaagaggaaaactattgcccagagaaagaattgacaatctcatagacccagggtctccatttctggaattatcccagtttgcaggttaccagttatatgacaatgaggaggtgccaggaggtggcattattacaggcattggaagagtatcaggagtagaatgcatgattattgccaatgatgccaccgtcaaaggaggtgcctactacccagtgactgtgaaaaaacaattacgggcccaagaaattgccatgcaaaacaggctcccctgcatctacttagttgattcgggaggagcatacttacctcgacaagcagatgtgtttccagatcgagaccactttggccgtacattctataatcaggcaattatgtcttctaaaaatattgcacagatcgcagtggtcatgggctcctgcaccgcaggaggagcctatgtgcctgccatggctgatgaaaacatcattgtacgcaagcagggtaccattttcttggcaggaccccccttggttaaagcggcaactggggaagaagtatctgctgaggatcttggaggtgctgatcttcattgcagaaagtctggagtaagtgaccactgggctttggatgatcatcatgcccttcacttaactaggaaggttgtgaggaatctaaattatcagaagaaattggatgtcaccattgaaccttctgaagagcctttatttcctgctgatgaattgtatggaatagttggtgctaaccttaagaggagctttgatgtccgagaggtcattgctagaatcgtggatggaagcagattcactgagttcaaagccttttatggagacacattagttacaggatttgctcgaatatttgggtacccagtaggtatcgttggaaacaacggagttctcttttctgaatctgcaaaaaagggtactcactttgtccagttatgctgccaaagaaatattcctctgctgttccttcaaaacattactggatttatggttggtagagagtatgaagctgaaggaattgccaaggatggtgccaagatggtggccgctgtggcctgtgcccaagtgcctaaaataaccctcatcattgggggctcctatggagccggaaactatgggatgtgtggcagagcatatagcccaagatttctctacatttggccaaatgctcgtatctcagtgatgggaggagagcaggcagccaatgtgttggccacgataacaaaggaccaaagagcccgggaaggaaagcagttctccagtgctgatgaagcggctttaaaagagcccatcattaagaagtttgaagaggaaggaaacccttactattccagcgcaagggtatgggatgatgggatcattgatccagcagacaccagactggtcttgggtctcagttttagtgcagccctcaacgcaccaatagagaagactgacttcggtatcttcaggatgtaactggaataaaggatgttttctgttggacatgtactgaaaattaacacatgtagtagccttaaaattttagacttctcgaacatgaggctgttacagtaatttttttaacactgtgcattgtacttttctaccttaaaaaaatcagtgaggatatttatttaatgaacatcaattccttttaaattttcttagagaaatttctctgtggctcagttttaccacccataaagcggagacagtaatttatggttatcctttctgacccacaaagtatgaaaagttctgtaatctgtaaactcagttctgtaatctgtattattgagatgattaatataaagttgtattttcactgaaatgattgttttgctggttatgcttggtgatattttagcgggcttatttttgaaaggcatctgttacttcagtggcataaagtgccctcacactgctgtgcagccatcaccaccattcatctccagaatttgttctcagtcccaaactgaaactataccattcaaacaacagcgctccccatttccccctcccccgagcccatgacatctccttattattattttttttttgagacagggtgtttctctgttgcccaggctggagtgcgggggggtgatctcggctcactgcaacctccgccttccaggttcaagcgattctcccacctcagcctcctgagtagctggaattacaggtgcccaccaccatgtctggccaag

SEQ ID NO: 72787 - DNA, 3923 bp, Homo sapiens
tttcgtgcagggagaccacttagaggctgctgctctagcgcaggctcagggcactaggggcttgggccagagtggtgatgccagaggcgagaagatgctgctgagttctggctatgttttgccctggacccatccaaggacccctgcctgaaggtaaaatgcagccctcacaaagtgtgtgtgacccaggactaccagaccgccctgtgtgtcagccgcaagcacctgctccccaggcaaaagaaggggaacgtggcccagaaacactgggttggaccttcgaatttggtcaagtgcaagccctgtcccgtggcacagtcagccatggtctgcggctcagatggccactcctacacatccaagtgcaaattggagttccatgcttgttctactggcaaaagcctcgccaccctctgtgatggggccctgtccctgtctcccagagcctggagccaccaaagcacaagggcagaaagggagtgccttgcacagacaaggagttgcggaaccttgcctcccggctgaaggattggtttggagctctccacgaggatgcgaacagagtcatcaagcccaccagctccaacacagcccaaggcaggtttgacactagcatcctgcccatctgcaaggactccctgggctggatgttgaacaagttggacatgaactatgacctcctgcttgacccttcagagatcaatgccatctacctggataagtacgagccctgtatcaagcctcttttcaactcgtgtgactccttcaaggatggcaaacctttcctaaacaatgaatggtgcctactgccttcccagaaccctggaggtctccccttgcccagaatgaaatgaacagaattcaagaagctgagtaaggggaaaagcctgttgggggccttcatacctcggtgtaatgaggagggctattacaaagccacacagtgccacggcagcacggggcagtgctggtgtgtggacaaatatgggaatgagttggctggctccaggaaacagggtgctgtgagctgtgaagaggagcaggaaacctcaggggattttggcagtggtgggtccgtggtcctgctggatgacctagaatatgaacgggagctgggaccaaaggacaaagaggggaagctgagggtgcacacccgagccgtgacagaggatgatgaggatgaggatgatgacaaagaggatgaggtcgggtacatatggtagtgcccacaagaaagaggacacaagttttgcacaaaattgcaagtcacttcctattcctgcatttgtatctaagactccaaggcaccaaggtcttttttccattgttgctctctatacccgacctaaggtttggaagacaactgcttgttcccagaggattctgattttgcatatgtttgtatgggaaaaagggtgttgtgtttttttttttgttgttgtttattttttggatagggaagtcattggcttaattagagcctccttcctttctgtgagatttttccaacaagcatgtgatttacgtggaattctgacagtgcagggagcccccaccctcttaaatgtcaaagaccctttttgattacccacactggtggttattacagcatggttcccagccttacagtgtctaagtgcttctcttgtgtcctgtagatgttgtgaaaaagaaaaaaacaaaaaatacaccacactgtactttttccccctgcccccgttactgccggtgattattattaaaaattagtttttttcacatcattatatctggcttcctataaacaacagccttaattcagtcaagactccctttggggaattcattttattaaaaattggtgtctggatacttccctgtacatgcataaatatgcatgcatgtacagaaagactgtatgtgtgtgccttgcacacacacccatacctctcagaaaaagtgggtatcttaaaaactcgaaaaacaatgataaatttctcagcttgtccagacctggaacaaaatttctggaataagaaatttgtattaaagtccttttttgcactaacagttggctcttgtagcctgcaggctgaggaagtctcttctctgtgcatcagcagagttactgaaagcctctgattgagaaaaaacctccgtctgcctaaatcacttttctcgcagaagccatgcgactcccacacgacacgggcagcttcacaagccatctctttcatttctgcttgaagcccccttggctgcagcaatcctgtctggccataggtttcttccttccttacctacttcaaggggctttttctaagggcatggcacacatatcttcctgtttctctggaggagtaccatggggttccttaaaagaagaaaatttctaattctgaactcaatgttttgcttttactccctttctactgacaaatcatgataagggcacaaaagctgtacagatttttttttttaaccactcaatcccaaatggaggcctacaaagaacatcgtaataacacatggaagcaaaccctgggtttttaagagccaaattctgtcccccccctccactccccccaagtgacaagatactaatgaagaaagttcttcaccatagtgtttgttttaactaaactcattggagtctagttccaaatttgggtagggtcatcatctctacattccttaggatttctctccctatcaagctggcccagatacaagtaccaaacagtagtctctgaagttcccccatttccttcagtaccagtctataagctactgtccgccactgattttcatctatcagggtgtcctaatcagaatcagccacccaagcaagcctctctggcccacatatctatctcttgccttcccccatgaacttcagcctgtccacacaaaagccacataaactcaagcaagaaatatgttcagccaaaacatgattatagtggcagctgaccaatcccccatcccaaattgaccatttagatgtaccaactcaccttaaattagcatgttccaatccagtcggcattgcctgaatacagtagcatcatacctatagttggtcttagataagaaatgaactacttgatatagcaaagtcctttggcttcgtaaataaccctgaggttttgtacttactttccccataggaagacagaccataggcaaactctgttttgggatctcaactccatcacctttgtttcaatattttttttctctcttgaacaaaactgagataatttagaaaacaggtgcttaattgcaataaaattactatgaagtatattaaaaatcacgacattgtaaaatctcactttagatcatcaaagaaaaccattgttactatctcctttgagcttaggaaaatgtacaagagaacaaattaaaattgaaaaattgatttcacttagaaaaacttctaggaacagggtgaaccactgattttaatttgcctaattatcttatgacaagtatcaaattaagatgacacttaaagatccttagcattaacttaatgatggagaagagtgctcaacagacagttcccagtaaggtaatgagatgccattttcagagacattctaagaagatattttgattcattaaaacattaaataaaaagccctcctcagattggaacccccaaatcgatggagccacattaataatacttttcatgcctcactttgacatgacagcattcgatttttttaaagatctttaatactttccatgagtactaaagattgtaatgagttaccttatccttagaagtagaatgtttgctttcttcttcttggaaatggtcctccaaaaagtccacttgtaccagtgacaagaagtcacttgtatagtgaccaagtacacataaaatactgattataaaaatattgtaataaaccacttcctcatttgatacg

SEQ ID NO: 72788 - DNA, 5352 bp, Homo sapiens; identical to SEQ ID NO: 65588
  misc_feature (1)...(5352): n = a,t,c or g

SEQ ID NO: 72789 - DNA, 803 bp, Homo sapiens; identical to SEQ ID NO: 65589

SEQ ID NO: 72790 - DNA, 917 bp, Homo sapiens; identical to SEQ ID NO: 65590
  misc_feature (1)...(917): n = a,t,c or g

SEQ ID NO: 72791 - DNA, 2094 bp, Homo sapiens; identical to SEQ ID NO: 65591

SEQ ID NO: 72792 - DNA, 2054 bp, Homo sapiens; identical to SEQ ID NO: 65593

SEQ ID NO: 72793 - DNA, 1202 bp, Homo sapiens; identical to SEQ ID NO: 65594
  misc_feature (1)...(1202): n = a,t,c or g

SEQ ID NO: 72794 - DNA, 1738 bp, Homo sapiens; identical to SEQ ID NO: 65595

SEQ ID NO: 72795 - DNA, 3561 bp, Homo sapiens; identical to SEQ ID NO: 65596

SEQ ID NO: 72796 - DNA, 2580 bp, Homo sapiens
gaataccattaaacttcaaagaatcttcgcttgtgcttaaaaataatgctgtcaaattgcttcatacactttataagactttaggcaagaaacattactaatggtatcataaataagtattataactttattaaaatgaaaagacaatattcaaaataatgcaacaaaatgaataaaatcctttgtccaatactgtacacataatgcagaaatcagtgcatttttcttaagcatgttttaaccttcatttagttcatactaaaatataataagctttaaatagctcaaataatattcagcagtttaaactgtaaacagcttgtttaactgttaagagaacattgcagtaatgtacctctgttagtgagcaccttctcttctgtgcttatctcttcaagataaatacatggaaggatgtgaaaatcggaacaccaactatgtgtctcactgcatctaagtgaagcagccacagctgtgagagttttcaaagcagaaagatgctgatgtgacctctggaattcagacatactgagctatgggtcagaagtgttttacttaaaaagcaaacaatccccaggaaatactgaataggaaccagcaacacaaggccagcttgtgttgtatgtttattaatacagtctaaaaaaaaaagcaaaaccacaacacacatccccaaacaataactctcaatcacatagctaattgcttcattattttgtaaaactgacatcctaacactggcacctagaatacttttccatctgagtctaacgtaccccactgcctctaatacggcccgcactacgatgagctacttcagtgggtgggaccaagcaggaactgtaagggaaaattagtcactagttctattatcgttttatttttcaagatgtgtgacaggtacaggtgacaatatggttgccaagtaacctgctctccctccctcaacaagacgcaacatgaaacctggaagtatgaggccttggtatgatttttaacctaagcaggtacacccatggtaaagaatggataccctgccctccatggaaaagattgcctgcaaaaataaatggaacaaaatagaaaaggcctaaaagccagaaatcttcaaacttactaaacaaaaatattttttaatgattctgatctaaacaatactgtatcttcttccatttgctcaattttcagtctatcaggactcatttctccagcttgagtttattattctgaatatatattactctacgatagtaactaattggttaacctgcagctatggtctatggttataccacaagtttatatataggtatgtaatgtatgcatatataaaaagcttccccatcctcccctccccaccatcacatctttaaattatagacttgtaagacttttttccaacactaacaaagtcagggtttctcagcataacagcatctcacaactgctctaaaccttccacatgaagacagagagttcaactattttattttgcaatctaagggatttttctctgcacttcaatcaaactggaaaattgagaaccatttgctcctatgtaacctctgctgaaccatgaccccaaggtctaaggagtccccacataggataaatgtttacgcttcacgtggccacccagatccatttttgtttttgagtctggcttttctgtggctgaagatataccgcagtcagcaggtaatggctggatttgggcgcctccattttttttttttgcttccctaaaaaatttttcatatttgtccaggtatggtggtcgttcaggtagtaggtaataatgtgttgaactaaccttcttcccattttcaataatgggcagaatgcaaggaaccttactggcagatccttcgctgttctgtctttgcagtgctttgctgctgacatacttgggatcaggggcaaagctctgtgtcgggggcatgaccccattgaggtaagacggaaggcttttgggactcggtgtgcgcgagttactcggtgacaaaggttctcttggcggtactttgggaggcctgtcttcatcactataggtgctcgaagtaacttctgctgaccatcttctataatctggctttactggtctaggaggtatgggaactctggggggaacctcaggtttgtcttcatcggagttaggagaagctctgtgtatacaacagttggatatccttatggctggcttgttaaaggagccagctggtcccgaatgagaccttcttaatcttcggtgggtctgaggtggaggaggatttggatctgggacacctcccattttggtcagacacatagctgagatctgctgcagaaacagctggggtatcaaaatatgcatagttgatttgtccacacccacggcaacttcgcctgcccaggaacatcatatttgaaatcagaaagtgtagagtcttctaaaaggaagtctgtatctgagctagttaggaattccacctcacagtctgtgtcatccagagagagggcttcagagattggcaacggtggaagaggcctagaaccccgttcacaaagaggggcacaggggaaaagggaaggggagttttt

SEQ ID NO: 72797 - DNA, 2903 bp, Homo sapiens
ttttttttttttagactcaaaactttaatcagagaaccaacaaatatgcacacacggagggcgtttctaccttggcctgcagcaacacaggtgactgatttacagactgcccccacacccaatggctgccagttttccatagagtccctattgtgtcacagccctgcaacactttgtacactcttttggtatacaacatgcccatctccccgacaagacagagctccagaggacgggaaccatgtgcgagaagttaaatgttgcaaccatttgaaaaacagtgtaaggccccaatggttagccaacaggttcccagtttcaactaagtttaacaaactttaaccagcagaactccaggtgccagagttgaaaagcccaagggtgcagagcactcactccctcaccattttcagcacctaaaatatgaaaggtattcaaagtatgtgtccagtgctttttcataagactactgtgtttcagcaaaggtgtggactgagccacttagtggcagggaacaaacaccccagagctgacaagacacttggtagggaacttggttgtgtggttccatctcactggactctccaacaatccttggtgatcccagaacttcctgtgacatgagggaatgtggcattttcaagatgtcacttgtcaactaacagcaatcgtcgatgaaaatgggttcatttctgattccagaagcttcagagcagtagtgcatagtgtatggatactacccgcccccgagcctagcaaattgcctggtgagcggccatcctggataaatggtgaatgatgacatcccagtggtcacttccacacaccacaggtttgacccctaagtatgtcttccatatgggttgtttcatatgcggttaacaccctgatcaatgcagctttcctgatggaatccagctgtgttttggtgtcaactcccatgaaaaattgggtgtcttattgcataaccaacactgttaaatggaggaaggtcataggaagagggagcatgtgtttgtgggatagggagtcctctttaagtgagaagcttgggaggttaggagtggaaggttgtagctagttgaggtgaagagtttacatgttctttttggctttctggggcttaagaaaaaacccaggagagataaagggacaaaaaaggccaggcacttaagaagagtaaagtgctggagaaaaactgtaaaaaaggaaaacttaaattaaaagcgatacattgtaagaacattaactacagtaaacacagattactaattcctttcttgtaacacaagtatatttgtgctatagctgatgtgtatttgtggcttacacttggtgagccctcatgtgctggccatcagttctaagtgcttcacatttatttatttaatcctcagaaaagccctctgaggtaggtgatgcccattttacagataaggacaccgaggccctgagagatttttctgaccttcccaaggtcacttaggtagtagatggcagaggtgggatttaactcaaggtagactggctccagagcctacctctgaatcctgacgttgtacagcttctccacttttgtgttttcattgttataatgaaaaacatgcgcacaaactttctaatcaatctttagatgcatttatttggagagaaactgtgcaagtgggagagtttccaactttcagcatccgagtaacggtctcatattctgggactctgctgccacccaatggctacaggcagtattgctgcttgttgtgtacacgctgatggcggctgaggctcgagtggcaccgaaaggctttctggcaacgttgacactgataaagtgtctcctgggtgtgaactctcaggtgctggttgagatgggcacttaggacaaaagctttgccacacaacaatacaggagtaaggcttctcccctgtgtgaattctctgggtgctgtgttaggatttgctttctggggcaaaaggttttcccacatttcaccacatctgtaggggcttctcccccagtgtgaactcttccggtgaatagaaaggcatgagctctgggtgaaggctttcccgcattcctgacaaacataaggcttttctccagtgtgaattctctggtggcggacaagctcagcactcaggccgaaggccttcccgcagtaatcacatacatagggcttctcacctgagtgaattctctgatgcttagaaaggcatgagctctgacggaacgttttcccgcattcgttacacaccaacggcttctttctggcatgagttcgctcatgctgaacaaggtagtttctctgggtgaagactctgtcacacttactacatttaaagggattctctccagcgtgaattaactgatgttttgagaggtgtgcactgtggctgaaggtctttccgcattcgttacatttaaaagggtgctcctttgtgtggaaggactgaagtttgataagggaggcactgctgatggctttcccttgctcaccccatttatacagcctcactctagagtggattctttgatggtgaatgagccgagtactttggccaaaggctttcccacactggtcacattcaaagggcttcactcccctggtgtgaatcctctcgtgctgagttaggtatttgctgcagctaaaggttttctcacatttgttacacttaaagcacttctctttctgttctgggttctgatccaagatcttcccactcacaaaaaatccttgtttttctctggcgtgaacactctcgtggcacttcagggttgagccgcaaatgaagcgttctccgcactcctgacattcatatggggttttgacagtgtgcattttctggtgttgcacaaggcgattgttatcgctgaaagtctccttgcattcagcacagctataggc

SEQ ID NO: 72798 - DNA, 1738 bp, Homo sapiens; identical to SEQ ID NO: 65599

SEQ ID NO: 72799 - DNA, 1740 bp, Homo sapiens
  misc_feature (1)...(1740): n = a,t,c or g
gggctgaaatggaagagatgaatacatctgaggaagaagagtctccgtgtggggaggtgacgctgaaacgggaccgttccttctcagagcatgacctggcccagctccgaagtgaggtggcctctggcctgcagtcggccacccaccccccaggagggacggagccaccacggccccgagctggcagtgcgcatgtgtggaggcccggctcccgagaccagggtacctgtcccgcgagtgtctctgaccccagccaccccctactcagcaaccggggctcctcgggggacagacccgaggcctccatgacccccgatgccaaacacctgtggctggagttcagccaccccgtggagagcctggcgctgactgtggaagaggtgatggacgtgcgccgtgtgctggtgaaggccgagatggaaaagtttttgcagaacaaggagctcttcagcagtctgaagaaggggaagatttgctgctgctgccgggccaagttcccgctgttctcgtggccgcccagctgtctcttctgcaagagagccgtctgcacttcctgtagcataaagatgaagatgccttctaagaaatttggacacatccctgtctacacactgggctttgagagtcctcagagggtatcagctgccaaaaccgcgccaatccagagaagagacatctttcagtctctgcaagggccacagtggcagagcgtggaggaggcgttcccccacatctactcccacggctgtgtcctgaaggatgtctgcagtgagtgcaccagctttgtggcagacgtggtgcgttccagccgcaagagcgtggacgtcctcaacactacgccacgacgcagtcgccagacccaatccctctacatccctaacaccaggactcttgacttcaagtgacagccccaggtggccaggcctccaggaggcaccaggcaggccctgtatcaggctaggacgctctgagctgtgcatgtacatatatacatatatagatacatttataatatatacacacagtctatatatttatatacactgtttcctggccccagagctcatttgggttcaggcgcacttcaaaaccctccctgggggaggctgtttcttctcaggattccttgccagggaggaaggggagggaacagggtgggttttctcactgaagagagaaagcagaaggttctagatcctggcacagactgcatcccatgttcccatgctcttctccgtccccaggaatgcgaacggcagtttcccttccccagtggacgtctaggtggggacagggtatcttggctcccagctggaccagagtgccctgcttgcctctgctctccctttgtggggactcaggcagcagaggcatctgggaagtctctgagtaggcagggtcctcctgggaggcacccccacctgtttgaaaggtctngccaggcgtggtggttcaggcctgtaattccagcactttgggaggccgaggagggaggatcacctgaggtcaggagtttgagaccagcctggccaacatgatgaaatgttgtctctactgaaaatgcaaaaattagccaggtatagtggcaggaacctgtaatcccagctacaggggaggctgaggcaggagaatcgcttgaacccgggaggtgtaggttgcagtgagccgagattgcaccactgcactccagcctgggcgacagagcgagactctgtatcaaaaaaaaaagttgcggggggg

SEQ ID NO: 72800 - DNA, 3115 bp, Homo sapiens; identical to SEQ ID NO: 65601

SEQ ID NO: 72801 - DNA, 3977 bp, Homo sapiens; identical to SEQ ID NO: 65602

SEQ ID NO: 72802 - DNA, 2215 bp, Homo sapiens; identical to SEQ ID NO: 65603

SEQ ID NO: 72803 - DNA, 1555 bp, Homo sapiens; identical to SEQ ID NO: 65604

SEQ ID NO: 72804 - DNA, 3219 bp, Homo sapiens; identical to SEQ ID NO: 65606
  misc_feature (1)...(3219): n = a,t,c or g

SEQ ID NO: 72805 - DNA, 3698 bp, Homo sapiens; identical to SEQ ID NO: 65607
  misc_feature (1)...(3698): n = a,t,c or g

SEQ ID NO: 72806 - DNA, 1022 bp, Homo sapiens; identical to SEQ ID NO: 65609

SEQ ID NO: 72807 - DNA, 553 bp, Homo sapiens; identical to SEQ ID NO: 65611

SEQ ID NO: 72808 - DNA, 1264 bp, Homo sapiens; identical to SEQ ID NO: 65612

SEQ ID NO: 72809 - DNA, 1455 bp, Homo sapiens; identical to SEQ ID NO: 65613

SEQ ID NO: 72810 - DNA, 1296 bp, Homo sapiens; identical to SEQ ID NO: 65614
  misc_feature (1)...(1296): n = a,t,c or g

SEQ ID NO: 72811 - DNA, 672 bp, Homo sapiens; identical to SEQ ID NO: 65615

SEQ ID NO: 72812 - DNA, 908 bp, Homo sapiens; identical to SEQ ID NO: 65616

SEQ ID NO: 72813 - DNA, 1091 bp, Homo sapiens; identical to SEQ ID NO: 65617

SEQ ID NO: 72814 - DNA, 2001 bp, Homo sapiens; identical to SEQ ID NO: 65618
  misc_feature (1)...(2001): n = a,t,c or g

SEQ ID NO: 72815 - DNA, 731 bp, Homo sapiens
  misc_feature (1)...(731): n = a,t,c or g
gccgatgcgcaatcccggttcgagccacgcgtccggtggagacgcgctgtcccagaagaggtctgataagccgccctttgctccatctgcagggctgaacctgaggctggtgaggagcaggcaggtgacgacagggacagtggcggccccgtcctccagtttgactacgaggcagttgctaacagactgtttgaaatggccagccgccagagcaccccttctcagaacagaaagcgtctctacagagtgatccggaagctgcaggacctggcaggaggcattttccctgaagatgagatcccagagaaggcctgcaggcgcctgcttgaagggaggcggcagaagaagacgaagaagcagaagcgtctgctcaggttgcagcaggagagaggtaggactagggggtgtgttagtcatggagccggcgtcctcacctgcttgcttctcccctggatgggggtcacctgcagtgtctccccctgaagcatgagtgccgagtcccccatcctgggtgcctgctatccacgcatcccggaaatgccctgtcctcggcatccctcctgtaggcctctccctgcctcccccacccaccttccttgtctgcagctcccccgagctgtgtgcgctgccctccctcccggtctggagacatcctcctggctgggctgcctccttccgtgcctccgacgaaatcgtcgacccgagaaattccggagcggtnnnaaagaggc

SEQ ID NO: 72816 - DNA, 1118 bp, Homo sapiens; identical to SEQ ID NO: 65619

SEQ ID NO: 72817 - DNA, 897 bp, Homo sapiens; identical to SEQ ID NO: 65620

SEQ ID NO: 72818 - DNA, 1093 bp, Homo sapiens; identical to SEQ ID NO: 65621

SEQ ID NO: 72819 - DNA, 7150 bp, Homo sapiens; identical to SEQ ID NO: 65622
  misc_feature (1)...(7150): n = a,t,c or g

SEQ ID NO: 72820 - DNA, 1652 bp, Homo sapiens
tgcggccgccctcgtggctgagtacctcgccctgctcgaggaccaccgccacctgcccgtgggctgcgtttccttccagaacatctcatccaatgtgctagaggagtccgccatctccgacgacatcctgtcgcccgacgaggagggcttctgctccgggaagcacttcactgagctggggctggtagggttgctggaacaggcagccggctacttcaccatgggcgggctctacgaggcggtgaatgaggtctacaagaacctcatccccatcctggaagcccaccgtgactacaagaagctggccgcggtgcacggcaaactgcaggaggccttcaccaagatcatgcaccagagttccggctgggagcgcgtgttcgggacgtatttccgcgtgggcttctacggcgcccacttcggtgacctggatgagcaggagtttgtgtacaaggagccatcgatcacgaagctggcagagatctcacaccggctggaggagttctacacggagagatttggcgacgacgtcgttgagattatcaaagactctaaccctgtggacaagtccaagcttgactcacaaaaggcctacatccagatcacgtatgtggaaccgtactttgatacctacgagctcaaggaccgggtgacctactttgaccgcaactatgggcttcgcacattcctgttctgcacgccgttcacgccggatgggcgcgcacacggggagctgcccgagcaacacaagcgtaagacgctgctcagcaccgaccacgccttcccctacatcaagactcgcatccgtgtgtgccaccgggaggagacggtgctgacgcccagtggaggtggccatcgaggacatgcagaagaagacacgggagctggcctttgccaccgagcaggacccaccagatgctaagatgctacagatggtgcttcagggctctgtagggcccaccgtgaaccagggtcccctggaggtggcccaggtgtttttagcagagatcccggaagaccccaagctcttccggcatcacaacaaattgcggctctgcttcaaggacttctgcaaagaaatgtgaggatgcgctgcggaaaaataaggccctgattgggccggaccagaaggagtaccaccgtgagctggagcgcaactactgccgcctgcgggaggctctgcagcccctgcttacccagcgcctgccccagctgatggcacccaccccacccggcctcaggaactccttgaacagagcaagtttccgaaaggcagacctctgagcccacaaggaccaaagctgtacctagaggaaccagcacccgggcctcagctgtctgtgctgcgaggggagtctgccctggtgcccactgggctgtggggtgaccacactgtacttggggctgggccctctgcccctgtgtccccatctgtgtgcactgatgcttcctcccttttttaatttaaaatggtttttataagcaaaaaaaaaaaaaagggggggcccttttaaaggaaccaattttaacgcccgggggttgggaaggaaaaatttttttaagggggccccaaaattaaattccggggccggggtttaaaaacggggggaggggaaaaacccgggggttacccaatttaatccccttgggaaaag

SEQ ID NO: 72821 - DNA, 1790 bp, Homo sapiens; identical to SEQ ID NO: 65624

SEQ ID NO: 72822 - DNA, 1447 bp, Homo sapiens; identical to SEQ ID NO: 65625

SEQ ID NO: 72823 - DNA, 897 bp, Homo sapiens; identical to SEQ ID NO: 65626

SEQ ID NO: 72824 - DNA, 3788 bp, Homo sapiens; identical to SEQ ID NO: 65627

SEQ ID NO: 72825 - DNA, 574 bp, Homo sapiens; identical to SEQ ID NO: 65628

SEQ ID NO: 72826 - DNA, 3438 bp, Homo sapiens; identical to SEQ ID NO: 65629

SEQ ID NO: 72827 - DNA, 783 bp, Homo sapiens; identical to SEQ ID NO: 65630

SEQ ID NO: 72828 - DNA, 1274 bp, Homo sapiens; identical to SEQ ID NO: 65636

SEQ ID NO: 72829 - DNA, 2748 bp, Homo sapiens; identical to SEQ ID NO: 65637

SEQ ID NO: 72830 - DNA, 4917 bp, Homo sapiens; identical to SEQ ID NO: 65230

SEQ ID NO: 72831 - DNA, 1858 bp, Homo sapiens; identical to SEQ ID NO: 65639

SEQ ID NO: 72832 - DNA, 2049 bp, Homo sapiens; identical to SEQ ID NO: 65640

SEQ ID NO: 72833 - DNA, 1538 bp, Homo sapiens; identical to SEQ ID NO: 65641
  misc_feature (1)...(1538): n = a,t,c or g

SEQ ID NO: 72834 - DNA, 670 bp, Homo sapiens; identical to SEQ ID NO: 65642

SEQ ID NO: 72835 - DNA, 4539 bp, Homo sapiens; identical to SEQ ID NO: 65643

SEQ ID NO: 72836 - DNA, 4063 bp, Homo sapiens; identical to SEQ ID NO: 65644

SEQ ID NO: 72837 - DNA, 688 bp, Homo sapiens; identical to SEQ ID NO: 65645

SEQ ID NO: 72838 - DNA, 790 bp, Homo sapiens; identical to SEQ ID NO: 65646

SEQ ID NO: 72839 - DNA, 4372 bp, Homo sapiens; identical to SEQ ID NO: 65647

SEQ ID NO: 72840 - DNA, 818 bp, Homo sapiens; identical to SEQ ID NO: 65648

SEQ ID NO: 72841 - DNA, 724 bp, Homo sapiens; identical to SEQ ID NO: 65649
  misc_feature (1)...(724): n = a,t,c or g

SEQ ID NO: 72842 - DNA, 1270 bp, Homo sapiens
  misc_feature (1)...(1270): n = a,t,c or g
ttttttttttttttccagtaaaactttattaattattattattttttgatacagagtctcgtttggtcttccaggctggagtgcagtggtggcgatctgtggatcaactgcaacctccgcctcctgggttcaagcggtcgcatgccttcagcctccagagcagctgggattacaggtgcgtgccaccacacccagctaattttttgtagagacagggttttgccatgttgtccagactgatcttgaactcctgatctcaagtgatccacccgcctcggcctcccaaagtgctgggattacaggtgtgagccaccgtgcctggccaatatttttaaatagttctgttttgaattggtataattcgaaacacaggaaacgggcacccagtgcttgggctttatttcacaccacgtacgtgacaacaagctggcctagagcccacatcagcaggcaggcggcccacagtgccccaggacctaccctgcccccaaacaggccatggggccccttaggaagatgtggggcttcttgagatcagctccagtttttctcagagcccctgtgaaaggagctccatctgcttcctgtggaaacctggactctggctgggtcagagtggactcctagttgctcctcttcttttgtttctgtttaagcttgttccaaatcctttccagggccacttttcccatgaagaaggtgatggcaaaattgcgcttgtaccaatctctgttataatacatgtgcttctgaaaatttttacttaaaaattccttgtagaagtccgccatttcttctgcattcaatgttgctttctgacctgattcagttctcaggcccaggcctttagtttttagtcttgagtgaataaattcttctttttccttactaaaagtcaaattctggtttgcccagaactgttgattccattcttgtgtttcttgtcttaattttctaagcttttgttccaatggagattcattttcaggtatgtaaaagtgaacaggtcgaaggtttgaatatttatctgggggtcctatccaatcatggcaagactttcttggagggcagaatcttgagaccccgctgggcgctgtatccctgcgctcggcgccgcgctccggagcgagttgacagccgcggcaggcgaaggcgcggcagagaggggggagaaaggtcttcttccccgcccgcaagaccaccatggccccacgccccctggctcccgcgcggacgcgtggctcgncccgggaatccgcgtcacagcctc

SEQ ID NO: 72843 - DNA, 4424 bp, Homo sapiens
ctcacattcctggcatagcagccgcctccggcgcgggccgaccctggggctgcgcgctggggcgcgaacagccagagcgtcggcgccacggccgataacacatcttcgccgccgagctgagctgggccgagccggaggttgtggtgtctgactgcgctgggcaccctcgggccgcagcggtgctctggggccaggtgccaccggccattgtccaggcagctgtgtgcaagccaaagaagcatgaggacactggaagactcctcggggacagtcctgcaccgcctcatccaggagcagctgcgctacggcaacctgactgagacgcgcacgctgctagccatccagcagcaggccctgaggggtggggctggaactgggggtacagggagcccccaggcctccctggagatcctggccccagaggacagtcaggtgctgcagcaggccaccaggcaggagccccagggccaggagcaccagggcggtgagaaccacctggcagagaacaccctctaccggctatgcccacagcccagcaagggagaggagctgcccacctatgaggaggccaaagcccactcgcagtactatgcggcccagcaggcagggacccggccacatgcgggggaccgagatccccgtggggccccgggaggcagtcggaggcaggacgaggccctgcgggagctgaggcatgggcacgtgcgctcgttgagtgaacggctccttcagttgtccctggagaggaacggcgcccgggcccccagccacatgagctcctcccacagcttcccacagctggcccgcaaccagcagggccccccactgaggggcccccctgctgagggcccagagtcccgaggacccccacctcagtaccctcatgttgtactagctcatgagaccaccactgctgtcactgacccacggtaccgtgcccgcggcagcccgcacttccagcatgctgaagtcaggatcctgcaggcccaggtgcctcctgtgttcctccaacagcagcagcagtaccagtacctgcagcaatctcaggagcacccccctcccccacatccagctgctctcggccatggccccctgagctccctcagtccacctgctgtggaggggccagtgagtgcccaggcctcctcagccacctcgggcagtgcccacctggcccagatggaggccgtgctgagggagaatgccaggctgcagagagacaatgagcggctgcagagggagctggagagctctgcggagaaggctggccgcattgagaagctggaaagcgaaatccagcggctctctgaggcccatgagagcctgaccagagcctcctccaagcgtgaggccctggagaagaccatgcggaacaagatggacagtgaaatgaggaggctgcaagacttcaaccgggatcttagagagagattggaatctgcaaatcgccgcctggcaagcaagacacaggaggcccaggccggcagtcaggacatggtggccaagctgcttgctcagagctacgaacagcagcaggagcaagagaagctggagcgagagatggcactgctgcgcggcgccatcgaggaccagcggcggcgtgccgagctgctggagcaggctctgggcaatgcgcagggccgggcagctcgagccgaagaggagctgcgcaagaagcaggcctatgtggagaaagtggagcggctgcagcaggcgctcgggcagctgcaggcagcctgtgagaagcgggagcagctggagctgcgtctgcggactcgcctggagcaggaactcaaggccctgcgtgcacagcagagacaggcaggtgccccaggtggtagcagtggcagtggtgggtctccagagctcagcgccctgcgactgtcagaacaactgcgagagaaggaggagcagatcctggcgctggaggccgacatgaccaagtgggagcagaagtatttggaggaacgtgccatgaggcagtttgccatggatgcggctgccacggctgctgctcagcgtgacaccactctcatccgacattccccccagccctcacccagcagcagcttcaatgagggtctgctcactggtggccacaggcatcaggagatggaaagcaggttaaaggtgctccatgcccagatcctggagaaggatgcagtgatcaaggtccttcagcagcgctccaggagagaccctggcaaggccatccagggctccctgcggcctgccaagtcggtgccatctgttttcgcggctgcggcagcaggaacccagggctggcaagggctctcttctagtgagcgacaaacagcagacgcccctgctcggctgactacagcagacagagcacccacagaggagccagtggtcacagctccccctgctgcccatgccaaacacgggagcagagatgggagcacccagactgacggccccccagacagcacctccacctgcctgccaccggagcctgacagccttctggggtgcagcagtagccagagagcagcctctctggactctgtagctacatccagagtccaggacttgtcagacatggtggagatactgatctgaaggaggtggtgcttcaggactctgagccattctctcccctcctctgccctgtgccactctcagccatttcagcagccccgtcaaccgctgctccgtccctttccccagccagacactcattcccattgaccatctggtcccaggagctcaggaggaggaccccaggggagaggagagctgtgagagcaccggcacccccagaagactctgcttcttagcccacattcctccgggccttatggagaatgaggattcagccttgacttcttgcccaaggcctgctactggggtagcaactgacagctcagaaaggagctgagctccctctgccctgccagttgtcagtcaggcagggagggagtggctgtgttggtttggggaactaatttccaaggacggctgcccgtggacaccaggtggactggttcactaatcaagtcagccatattgttctctggctaagtttggttccagccaacgtcatctgctcttcagttcctcactgccttcttgggatactaagacttgaattttttggggactattaagggtgttagtcttggagaagacacagcctcaccttctcacttgctgtgggtgaggggccatttaagtggactgggagacagtgcgcagtttgtatataattccctttcttgtggaacagaagactgaggcctgcaggttccgatgtgtctccatgggctgtgctcccctcttcctactgtcagtttctgaaacttctgactggcctcccagttatgcctcctcctcaagttcctggcccgtggatgttaaagctgctcgattcccaggatctcggctgccttttcctctatcttgagccctataaatgcccacgggacccccaccaccagcctcttgaagtggctccacagctcctgtccctggaacatcctgtcagtttggtcataaaccctgagccagatgaaatgagccaccgtgaacagacatctgccatgcccccaggtgggcttcggtggccctacccggtaccagttctctctgagaaactggagatgtcttgttagcataagtgtcttcattcccacctggagggtttgggagaggagcaaagcagttgaaaactagttaatgagctacaagagtcaaatagtcctctgaatggagcccccatcacaaaacagtgcccaggaggctggctcctcaagctacccatgcccagcgccctaaagcaggaccagatgctttggaattggggtgaaacacccacatggcagcctgctagcagcagtgactttgacttctggtcttaaagagtcccccacttcagccccaggagctattggtgggttttagcagttttgtctttaccgtttttagttctccttgattctttgttttcttcctttatcgtttttaggtttggtatgtgttgttttatttccatggttcctcaagtttcctttttaaacatttgcatttgctggacaattgcaattttttttaaaaaattcccctacccctgtttaaagctgaaaaatacatttggttcatgtgcattgtttacaaagcaaaaagaaaaaagagaaaaaaaaggcaaaaaatattgtgaaagaaaaaaaacaacttaatatattttggattaatatttggtatttcttttaaagtattttttgtgctgtgaacattttctgccaaagaccatgatgtgtgtctgtatgtttaagttatcgtaaatatttaaaatgtaaacatggctgttttgttatgccaccctgtaccaggattgctgccgcattccactgggtataacagtattttaattaaaaaaaaataattaaaagtgaaaaaaaaaa

SEQ ID NO: 72844 - DNA, 1000 bp, Homo sapiens; identical to SEQ ID NO: 65652
  misc_feature (1)...(1000): n = a,t,c or g

SEQ ID NO: 72845 - DNA, 5403 bp, Homo sapiens; identical to SEQ ID NO: 65653

SEQ ID NO: 72846 - DNA, 402 bp, Homo sapiens; identical to SEQ ID NO: 65654

SEQ ID NO: 72847 - DNA, 2410 bp, Homo sapiens; identical to SEQ ID NO: 65655

SEQ ID NO: 72848 - DNA, 2207 bp, Homo sapiens; identical to SEQ ID NO: 65656

SEQ ID NO: 72849 - DNA, 716 bp, Homo sapiens; identical to SEQ ID NO: 65657

SEQ ID NO: 72850 - DNA, 1045 bp, Homo sapiens; identical to SEQ ID NO: 65658

SEQ ID NO: 72851 - DNA, 1867 bp, Homo sapiens
ggcccctaaaaaaaaatataaccttcccaccccccggcttataaatttgttccctttaaagggccccccccttttttttttttttgatgtacaaacgtagctgtattggggagggggtggggaggggggagggacgggtcagtcttccttcaggctcccaaacactgcggctggcacgctctgctgctccagccgaacctcgttgggctccaggtccatctcgtcctcgtcctcgtcctcgcccagctggatctcctcggggttgacctgctgtgccagctctgccagctcctcccgggaggcgtcactcctcacgaacaggatcttgctctgggcgcgcaagggctggtcacgctccgcctcagccgccagctgctctgcccgctgttccagcagcttcatgtcgtccatgccactctgcccaggggccaggtcagacacggtgcccgtggcactgcccgagaccttgagcatcttgcgaagccatgaagttgaactgcgtgttgtacgtggcctgcacgctgcgccggatacgcaccatttccttgatggtgtcctcattgccatgccggacctcaaagtccttccacgtctgccagaacgcgcccgtcgtccgggggtcacagatctgggagcagaagctgtagatggcccgggcgcggtcaatctccccgagcttgcactccatgtctgcaaaccgcaggcacatctcacgcgcgtgctcgtccgacagcacctcaatggccttctggtagatgccgcgggtgtgggtgaccccatagatctcggccgcccgcttgatgtagatgttgaacatgtcatactgctgggcgggctccacggccctggtggcacgctcgtacacggccatggcatgccgggccaggccccactcctcctccagctgtgcgtacagcaggtacaaggtcttggcatattttggggggcagccgtccagagcctgttcaaacaggtcccgtgcccgctccagcttgcggcccccatagcgggcaatgaatttggtcaggtaggtgctccagatgtcggacacgttgggccacttgaacagcgagatgccgcgctcgtacgccttgaagctctcctcgaagtacttgtgctcctccaggaacatggcatagttgatgacgatctggggtgttgcgatacgcaggtccaggatgcggtcgtacacggccttggtggactggaaggtgccgaggctctcctccaggtcggcgagcatggaccagaccttcagtgacttgtacacgcggttctgcacgggctctgaaccataaaagtactcggcccggcgggcaggcagcgccgtggcctttcgcagcagccgcaaggcctcatcgtagttctcgtgtcggagctccagctctccgcactgacaccacacgcttgccaggtcatccacctgcttgaaagttcaccttggtggccttctccaggatgacacgggcatcgtccaagctgtccgttgtcctcataaaacttggcaaacgcccacccacagagtgtggggcttggcttgtggccttgaaggggtccaccgtctgcacagcctctgtgtaggtgttgatgatctcccgggggcggccctggtgcagggcgacacgcttgtgccactcgtgcacgtggtgtgggttttggcgcagcaagacgctgttgaggagcaggggccgccggctgatgagctgctcgaagcgggccaggcgcagctccaggtccacatcatcctcctcctcgcgccccagctccgaggcggtctccatctttgcagcgatcatgctctcctcgaactgggcgtagctgtcaaacacctgtgtgaagtcccgcacggtcatcactgtccggatgg

SEQ ID NO: 72852 - DNA, 1804 bp, Homo sapiens; identical to SEQ ID NO: 65660

SEQ ID NO: 72853 - DNA, 671 bp, Homo sapiens; identical to SEQ ID NO: 65661

SEQ ID NO: 72854 - DNA, 2950 bp, Homo sapiens; identical to SEQ ID NO: 65662

SEQ ID NO: 72855 - DNA, 3222 bp, Homo sapiens; identical to SEQ ID NO: 65663

SEQ ID NO: 72856 - DNA, 2384 bp, Homo sapiens
  misc_feature (1)...(2384): n = a,t,c or g
tttaatgccaaagtatgggtccatttgagcactttgcctttatggctactgaaatcatgaaatcaatttctctcaaagattttactctcagtgaggtcacatacatagttcttaatcagtgaaaattataggcagctttctatttatcctttaaaggaaatatgtcttagatggaaagaatataaagtagtaaagcaaaagttaacctaggggaaactttttcaccaacagattatctagacatcaattcataatgcactgggagatctatagtatataccacatggtatatttagggtacacagctctataggatttgagatggctgctcacagcaggagcttaaagaaagatatggaaaaaatatattttataaaagatggaaaaattcaagttgtaaggagtaaaaatgaaaatttgaaaagttaacgcatatttgtttttatttataggtaactaccacatgaattataaagacaacaaaggatgtcagaatgaacatggataggtgtatgcatactacggctaaggagaaacaatgttcctacatattatgggtagtgagaacattatctgtataacagggaactgtgattatttaaaaatatgcagaacttatttcatctgtgctttagaaataactgtatacagtgttataagttgaaaagaactcaaaataactaataccaaatatacacctatgtattagaattcaaaaaagctgctttctgtgaagtcaatcagctatattaaaaaatgacacaaatccaaaacaagatgcatgttatatataaagggacattgtaagtttccttgctgcattaaacccatggtttaatccatgaaatttccttttaattatcatttagacagaagcatgcaaatagtctcaggatctacttaagaacctttcccaaatccactagttacactccccttttcaggaactaagcaggtattcgggtagctgcttcctcctctgcatcagctcggtttgcattaatttctgcaagtgttcggccaaaccgtgcccattcatcattgcggggaacagcaatctgctctcccacatcgtatataacaatctgtccttcagaatcacccacagcaatctctctgccagaatgggtccatctcacacgattaagagcaggattaccctccacagaaatgctggcagttggtacctctgtgtcattattgagattccacaaatccaatctccccatgccatccacacaggcaaacagggctgggtgggtaggtgaccacataacatcataaacatagcctgcgttatcttcaaatgaatacaaaggcttgttattcttagttgtccaaagctttactgtccagtcaaacgatgaagtgacnaaaagatgtgagaagtctactgctccaacagctgcatgacaatggatgccagtgattggtccttgatgcccctcaaacatctcactgattccagctttgctgccatggcggcatgctgtgtacacagaaccttcttcactcccaacaacaaagttgttgacatctccaacagggaaggacatagatgtcacagctactgcttttgactgtttatgaaccaactccatgctatcctgtggatgggaaagcatgtccagactccatgaacaaatttttccatcagtagagatgctaatcagattgtgagcattttgtgttccaacaacatttacacaatatacagggtgtgtgtgtgcagctgctgacagtggagttctttgcactggagttcttttattgctacggttatcccaaagcacaatttggcctgaatatgtaccaccaacaacaagatttggatgaaattttgcaaatgtggcagacatcacagctgactggcagtgaaacacatactctggggtagtttttttgtatttcatattccatacaagggccacaccatcaggctcatgaggggcatcttcattgttgttataggaagccacgagtaactccgggatactgagatgaccaatccaaacaactaacccacccggatgctttggaccaaacgttcgtccaaaaaattgtcgatttaatgacagtttagcacctgcttgaatctctccttctttgtcattccaaaatctctcccactatagtcaaagaagatgttaatctgctcagaaagagctctttctacaaatcttgtagaatggtcaaagaaacttaaaaattcctcagagtgcaagatttgttgcttttcttcttcagtcagctcatgagggggagctttactattcattttcctcatctttctttaaagttttctcttcttcaggttcaataggtggtttaggagccactacatcatcatcttcctcttcatcttctttgggttgagccataac

SEQ ID NO: 72857 - DNA, 1092 bp, Homo sapiens
ttttttttttttaagaatttgtaccagtaaatttattccaagtaagacttgtgtgcacacaccaggcagataatttccacacaaacaccaaacattgtagtaaaactagttaacactttggccatgaaactcaaagatacttgaaaaacctctcgatagcactttgagtcacttaattctgacaaatattaatatgtcatccatgcttgcccagttataattttacaatataattgtatttttcattgtacttattattcattatacttactatatatatttaaaacatctttgctgaaattctcttatcccaaaaataatttttcagtaactccaaaatacccacatgtacctcttagcaggctattccaatatcaaaattctttttcttcaagtaacaagttctcaatccacaccattcctgatcacagatataactgatatgcagttttataaacagctcttttactccttgttcctattttagcaggccaaccatcacttcactgatatcccagagttttcttgcaacagattcatccatagctttgggcaacagttcttcctctttacaatccccaaagtatcttcctgacactccttctacctcaggtgaagaggccaaataaatggaagtctgggcaccttctactggagttttgaaaaaagcccatgacaccaaattgaagagtggtttgaccaacagtggaatgtgtatgtgcctccccagatttgtccgtacaataccaggatgcaacacattgacggtgacatttgtgccttctaagcggcgggctagttccctggtaaaaagaatgttagccagtttgctccggctataacaaaagcttttattatagctttgttcactgttcaagtcatcaaaattgatgtctccgtatttataaagtttggaagaaactaccacaatcctgctgggagctgaacttttgaggagtccaaggagaagattggtgagtagaaagtgccccagatggttcactccgaactgcatctcaaacccatcttcagtcttcatgtaagggcactggaagatccctgcgttattgatcaagacatcacagcctatgc

SEQ ID NO: 72858 - DNA, 5182 bp, Homo sapiens; identical to SEQ ID NO: 65665

SEQ ID NO: 72859 - DNA, 1507 bp, Homo sapiens; identical to SEQ ID NO: 65666

SEQ ID NO: 72860 - DNA, 5771 bp, Homo sapiens; identical to SEQ ID NO: 65667

SEQ ID NO: 72861 - DNA, 562 bp, Homo sapiens; identical to SEQ ID NO: 65668

SEQ ID NO: 72862 - DNA, 1287 bp, Homo sapiens
cttaaatagtatttgttaactgtgatctgcatacacttatataagcagaattatgagttaaagtaatacttagcaatatgattttattatcaagacatatgccaaaagtattcctttgattgccattaaatagccaggaggctagacagcattaaagtttcccttctctgatcttctggtccttcagtacaaactgagaattttgaaactatttggtgatcccagtctttgggggagggttaatatcacaaaacctccatgagaacaatgggctcaggtggaagactttgaagactaaaaggcttacagttaaggtagaattatcactagtagatcttagggaaataggaatgcaaccagaatcactcaatttatttattagaaagcaagattcattaaatcatttctcttttagaaaaatatctttaactgttatattttcaaatgttcttttttaaagaacatataaaattaagatatttgtgaaaataaacatttcagatatacttgtttctcttcatttttcccctttcaatggaattcttcttatcaagcacaaatgtgctaatctttaaagcaaggcaaactcttccgtgctaaatctttttaattgtttcttttcatcctctgaaaaaaggtcttcttcattggttgtagtagatgtaaaatcatagtctctggaatgaccatttacaaaagtaaataagggatatttctccttagaagaaaatttcagcatcttggtgatttcttcagaagctcgtttgaagtcctgaacatttcgacagtaaaatcctattgtacagctgggatccatttttcgaaaagacatctttttgggagaagggcagtggaatgtctcaagagggaaatcctttatgctgacatctacaaaagattggcagtaatgaggatccatgtaaatcaaactgtcatcttgaaatccagcaaagtaatatgactgtttaggtttgccaccaataatacccacacaatattccaggcttaaaatacccttcacaaattctaagtagtcggtgttggttctttctccaccaagtctaacaggaactagaataataacagctttgtcatctgcattatcagaagtcatggaagcactctgtttatcaattacatcagaattgtaaactgtacaatcttgtgcaacataaatagttattccttgtaaatcaggatgccttgcttcttcaactgcttttcttaaaatgtgagcaaccacagctgagaccataccaatctcctgcttttttcccagacttcttt

SEQ ID NO: 72863 - DNA, 1706 bp, Homo sapiens
cttgccccgcgttatgactttgattaccccagcttggcacgaggcctcgtgccattttttttgctccacaaatgtttaatttattaagtgtgccagggtatactgctaactcattgcattttaatttttctctagatactcaaatagctaagcaaatgaaggtacatgccagtctttcttcttttatacacaacagacaaaagtgttggggggctagacaccaaccagctatttttttcccctggaaccagatcatcatactgctgagttccttcaaaccatcaaagtacagccttccttccaatgttgcataatctgttcaaaatcacagtataaatacaaagttcttccatccattttacaaaaccagcaaaactctacaataaaatcctacaggaaaaagtagaccaatctcatttacaaacagcattttaacagtaattattaaatgttacaaaacataagatacaaaatctaaatccttaaagtcacacgatttctacagaaataagaccctcgccccacccatattacttatgactcaggacagtagttcgtcctcacggggacccactggccaacttttcaccaaccctcaccagaggtggatgccggccctagcactggccctggccctcatactggcttcagctctggccttggctctggccctgtcggcctcgtctgctagggcctcacggtactgcactggccagtgctgcggttccttcttatgcagtttggccacgaaccccaggacttccatcttgctgatttccaggttgcttcggggaccccaagagaattcatatgctggtggattggtgtgaggcacccgcctgtaactgagatatcgctgctgcacaaaatcttccataataagcctcttcggatacccaaagaggaaatgatactttgagggttgcacccccaaccgacgcagcatctcccagacctgggcctccctggcgctattacctctcatatagataaggcccaggatcatcattaacagacccaatctggggccatctcctcccagatcctcctcctcctcctcctcctccagaggttttagtttgttgatcaggatgtaagtgtggtgcttgcggtcaaactgtttcagctcaaaaccaaagacataccgcagatgctctgcggcccttgcgatgatgtccgggaacagaatcttcaagtctccaataacgtatttcaccatctccgagcgtgtgatgggactcttcttcttgtctttcaccaggaggaactgcaccaactccgccaccgtccgattcagccggcggtaggccctgcgccttgccaaggatttggccgccaaggccctcgcgcctttccgggtgagggcgggctccgcagccccctcctccctcccggcgccaagctcctccttggggcgctcctgcgaggcggtcggggcccgggtctcaccatcatggccggcatccttctccccctcgggctgcgggaaccgggagccccctgctctctggtgtctgcaacatgttttcgggcaggcaggtgcagagcgcggtacacgggccgaggggtgtgggagccgccgcgcaagcccccgggggagggggttggacacgcggcaagtgacggcgggagtacaaggagcaatgcgcagcgggaagcttggtggctgctgggccgcaccgcacgggagtcataactgcggccgc

SEQ ID NO: 72864 - DNA, 2172 bp, Homo sapiens
gatggctagagaaccgagaaaaaacgcagccctggacgcccagtctgcagaagaccagacggggctcctgaccgtgaaggtggagaaggaggaagcctccgccttgacggcggaggtgagagcaccctgcagccctgctcggggccccgaacgctcccgccagcgcttccgaggcttccgctacccggaggctgcgggcccccgcgaggcgttgagccggctccgagaactctgcggacaatggctgcagcctgagatgcacagcaaggagcagatcctggagctgctggtgctggagcagttcctgaccatcctgccggggaatctgcagagctgggtgcgggagcagcatccagagagcggggaggaggtggtggtgctattggagtatttggagaggcagctggatgagccggcgccgcaggtagaaagaacaggtttagtatctgagcgctgtggtctgtttcctcctgaaatcccagatcggagcgaggggcattcctttaaggtccaggagttcttcatctctttttgtactgtgaacctccttggcagtaagggtttgctgaaaatggaagatgtggccctgaccctcactcctgggtggacacagctggattcatctcaggtgaacctctacagagatgaaaagcaggagaaccatagcagcctggtctcccttggtggtgaaatacagactaagagcagggacttgcctccagtcaagaagcttccagaaaaggagcatgggaagatatgccacctgagggaagacattgcccagattcctacacatgcagaagctggtgaacaggagggcaggttacaaagaaagcagaaaaatgccatagggagtaggcgacattattgccatgaatgtggaaagagttttgctcaaagttcaggcctgactaaacacaggagaatccacactggtgagaaaccctatgaatgtgaagactgtggaaagaccttcattgggagctctgcccttgtcattcatcagagagtccacactggtgagaagccatatgagtgtgaagaatgtggtaaggtcttcagtcacagctcaaaccttatcaaacaccagagaacccacactggggagaagccctatggagtgtgatgactgtgggaagaccttcagccagagctgcagcctccttgaacatcacaaaattcatactggggagaagccataccagtgcaatatgtgtggcaaagcctttaggcggaattcacatctcctgagacatcagaggattcatggtgataaaaatgttcagaatcctgagcacggggagtcctgggaaagtcagggtaggacggaaagccagtgggaaaatactgaggctcccgtgtcttataaatgtaatgagtgtgagagaagtttcacacggaatagaagtcttattgaacatcagaaaatccacactggtgagaaaccctatcagtgtgacacatgtggaaaaggtttcactcgaacttcataccttgttcaacatcagagaagccatgtagggaaaaaaactctttcacagtgacccatggtattcatgccaacattggtgctcatttgtcactgaactgaagccaccctggagcccttaatggttacagaaattgtggaccagggctttatttaccactatacatcatcgggtattagaaaatgtagtctggctgagacgatgagttatcttctacattctagaaagtgattggaagaagtcatttgataagaggccatgggagagtggtctggaagttgtaggacctaaaatagtttgttctcacccagtgtatttaaatggccttctggacttgttaattgccctcagccagcactttaggacatctggttggatggctctgatgtggggggctgctgctctgaccattcattttgcctctaatgaatctttcacaaattggtcagatccatgaggtcttttactcttctttgtgccttgtatgataggtgctaataaacatttattaaatgtaccagtaaaatggcctttgtaccaaaaatttgatgttgtctatatttctgagaaatttctaacttatgccatttgaatttatgtattattctctgaggttctagattctgggccaatctagtgtatttgttgccacgtacatactgttttcagaattggggtgggg

SEQ ID NO: 72865 - DNA, 1715 bp, Homo sapiens
agatttattttattttattttattttatttatttatttatttttttaattgatcatttcttggggtgtttctcgcataagggggatttggcagggtccataggacaatagtggagggaagttcaagcaagataaacagttgtgaacaaagggtctctggttttcctaaggcagacgaaccctgcggccttccgcagtgtttgtgtccctgggtacttgagattagggagtggtgatgactcttaaggagcatgctgccttcaagcatctgtttaacaaagcacatcttgcaccgcccttaatccatttaaccctgagtggacacagcacatatttcagagagcacggggttgggggtaaggtcttagattaacagcatcccaaggcagaagaatttttcttagtacagaacaaaatgaagtctcccatgtctacttctttctacacagacacggcaacaatctgatttctctatcttttccccacctttcccccttttctattccacaaaaccgccatcgtcatcatggcccgttctcaatgagctgttgggtacacctcccagacggggtggtggccgggcagaggggctcctcacctcccagacggggcggccgggcagaggcgaccccccacctcccggacggggcggctgccgggcggagactctcctcacctcccagacggggcggcagggcagaggtgctccccacatcccggacgatgggcggcagggcagagacgctccccacatctcagatgtgatggcggccgggaagaggcgctcctcacttcctagatgggatggcggccgggcagagacgctcctcactttccagactgggcagccaggcagaggggctcctcacatcccagacgatgggcggccaggcggagacgctcctcacttcccagacggggtggcggccgggcagaggctgcaatctcggcactttgggaggccaaggcaggcggctgggaggtggaggttgtagcgagccgagatcacgccactgcactccagcctgggcaccattgagcactgagtgaacgagactccgtctgcaatcccggcacctcgggaggccgaggctggcggatcactcgcggttaggagctggagaccagcccggccaacacagcgaaaccccgtctccaccaaaaaaatacgaaaaccagtcaggcgtggcggcgcgcgcctgcaatcgcaggcactcggcaggctgaggcaggagaatcaggcagggaggttgcagtgagccgagatggcagcagtacagtccagcttcggctcggcatcagagggagactagggaaaggggagaggggagaggttagtattttcaaaaatcatcatatagtacgtggttacacaactctgaatatactaaaacacattgaattgtatactttaaaggagtgaactatatctcaatatataaggggtgagttatagctcaataaagctgttaacaacaaaacaaaaatgccataccaaaaaaaaaatcatcatactgatctgtgaccttccaatggaaggaattaaactaaacttttcaaaatggggctactggcccttaggcaaggtcctgagattatcctaaaattatggatttagagtatttaatgacttttctgaagaattcttagaattcatctactaagcaaataaccattcatgtagttatgatgtagtcattgtcaatttttacaagg

SEQ ID NO: 72866 - DNA, 718 bp, Homo sapiens; identical to SEQ ID NO: 65672

SEQ ID NO: 72867 - DNA, 1677 bp, Homo sapiens; identical to SEQ ID NO: 65673

SEQ ID NO: 72868 - DNA, 1709 bp, Homo sapiens; identical to SEQ ID NO: 65674

SEQ ID NO: 72869 - DNA, 1473 bp, Homo sapiens; identical to SEQ ID NO: 65675

SEQ ID NO: 72870 - DNA, 2039 bp, Homo sapiens; identical to SEQ ID NO: 65676

SEQ ID NO: 72871 - DNA, 1324 bp, Homo sapiens; identical to SEQ ID NO: 65677

SEQ ID NO: 72872 - DNA, 1330 bp, Homo sapiens; identical to SEQ ID NO: 65678

SEQ ID NO: 72873 - DNA, 3274 bp, Homo sapiens; identical to SEQ ID NO: 65679

SEQ ID NO: 72874 - DNA, 1891 bp, Homo sapiens; identical to SEQ ID NO: 65680

SEQ ID NO: 72875 - DNA, 1909 bp, Homo sapiens; identical to SEQ ID NO: 65681

SEQ ID NO: 72876 - DNA, 1638 bp, Homo sapiens; identical to SEQ ID NO: 65682

SEQ ID NO: 72877 - DNA, 2124 bp, Homo sapiens; identical to SEQ ID NO: 65683

SEQ ID NO: 72878 - DNA, 2042 bp, Homo sapiens; identical to SEQ ID NO: 65684

SEQ ID NO: 72879 - DNA, 1985 bp, Homo sapiens; identical to SEQ ID NO: 65685

SEQ ID NO: 72880 - DNA, 1122 bp, Homo sapiens; identical to SEQ ID NO: 65686

SEQ ID NO: 72881 - DNA, 1773 bp, Homo sapiens; identical to SEQ ID NO: 65687

SEQ ID NO: 72882 - DNA, 1854 bp, Homo sapiens; identical to SEQ ID NO: 65688

SEQ ID NO: 72883 - DNA, 1147 bp, Homo sapiens; identical to SEQ ID NO: 65689

SEQ ID NO: 72884 - DNA, 2234 bp, Homo sapiens
ggtggcacgaggcgccttccaccctaagatgggtcccagcttccccagcccgaagcctggcagcgagcggctgtccttcgtctctgccaagcagagcactgggcaagacacagaggcagagctccaggacgccacgctggccctccacgggctcacggtggaggacgagggcaactacacttgcgagtttgccaccttccccaaggggtccgtccgagggatgacctggctcagagtcatagccaagcccaagaaccaagctgaggcccagaaggtcacgttcagccaggaccctacgacagtggccctctgcatctccaaagagggccgcccacctgcccggatctcctggctctcatccctggactgggaagccaaagagactcaggtgtcagggaccctggccggaactgtcactgtcaccagccgcttcaccttggtgccctcgggccgagcagatggtgtcacggtcacctgcaaagtggagcatgagagcttcgaggaaccagccctgatacctgtgaccctctctgtacgctaccctcctgaagtgtccatctccggctatgatgacaactggtacctcggccgtactgatgccaccctgagctgtgacgtccgcagcaacccagagcccacgggctatgactggagcacgacctcaggcaccttcccgacctccgcagtggcccagggctcccagctggtcatccacgcagtggacagtctgttcaataccaccttcgtctgcacagtcaccaatgccgtgggcatgggccgcgctgagcaggtcatctttgtccgagaaacccccaacacagcaggcgcaggggccacaggcggcatcatcgggggcatcatcgccgccatcattgctactgctgatgctcacgggcatccttatctgccggcagcagcggaaggagcagacgctgcagggggcagaggaggacgaagacctggagggacctccctcctacaagccaccgaccccaaaagcgaagctggaggcacaggagatgccctcccagctcttcactctgggggcctcggagcacagcccactcaagaccccctactttgatgctggcgcctcatgcactgagcaggaaatgcctcgataccatgagctgcccaccttggaagaacggtcaggacccttgcaccctggagccacaagcctggggtcccccatcccggtgcctccagggccacctgctgtggaagacgtttccctggatctagaggatgaggagggggaggaggaggaagagtatctggacaagatcaaccccatctatgatgctctgtcctatagcagcccctctgattcctaccagggcaaaggctttgtcatgtcccgggccatgtatgtgtgagctgccatgcgcctggcgtctcacatctcacctgttgatcccttagctttcttgccaaggatctagtgccccctgacctctggccaggccactgtcagttaacacatatgcattccatttgtaaatgtctaccttggtggctccactatgacccctaacccatgagcccagagaaattcaccgtgataatggaatcctggcaaccttatctcatgaggcaggaggtggggaaggtgcttctgcacaacctctgatcccaaggactcctctcccagactgtgaccttagaccatacctctcaccccccaatgcctcgactcccccaaaatcacaaagaagaccctagacctataatttgtcttcaggtagtaaattcccaataggtctgctggagtgggcgctgagggctccctgctgctcagacctgagccctccaggcagcagggtcccacttaccccctccccaccctgttccccaaaggtgggaaagaggggattccccagcccaaggcagggttttcccagcaccctcctgtaagcagaagtctcagggtccagacccttccctgagcccccacccccaccccaattcctgcctaccaagcaagcagccccagcctagggtcagacagggtgagcctcatacagactgtgccttgatggccccagccttgggagaagaatttactgttaacctggaagactactgaatcattttacccttgcccagtggaataggacctaaacatcccccttccggggaaagtgggtcatctgaattgggggtagcaattgatactgttttgtaaactacatttcctacaaaatatgaatttatactttgaaactcgtgcc

SEQ ID NO: 72885 - DNA, 2076 bp, Homo sapiens; identical to SEQ ID NO: 65690

SEQ ID NO: 72886 - DNA, 1226 bp, Homo sapiens; identical to SEQ ID NO: 65691

SEQ ID NO: 72887 - DNA, 5703 bp, Homo sapiens; identical to SEQ ID NO: 65692

SEQ ID NO: 72888 - DNA, 1623 bp, Homo sapiens; identical to SEQ ID NO: 65694

SEQ ID NO: 72889 - DNA, 1296 bp, Homo sapiens
gctttagactattttccttcagttctctgcagtcgcagtgaaatacttcaagcgcaatttttgctgaactcttcttttcagcagtggaaaagctgcggaaatggaaacttacccccaacatatttcaatttggaagttcaacttcaaagaaaaatcataaaaatgtaagttttattgagtgcctatagtgtgcatgggcctttattagacacgccaaattcaggcacaacagacacaagatccctgggctcaggtaccttatgatctaattaatagatattagaaacagtaggaaaggcaagttacacgtcaatgcccaatgactagagtcaacattaaagagttgtaatttaagtaatccaaactgacatctaattccaaaatcatttataaaatgtatttggctttggaatccacaggacttcaaacaagcaaagtttcactgcagatagtcacaaagatgcagatacactgaaatactttaagagccttattaatgatttttgttattttggatcttctgtttttttcttattatggtccgaagcctccttaataccaatttatcagacagaagcatgtcatcttgttgttcaagataatccagtaaattttcagtcccatccaagtgccgctttatggctaatatgcttctctggattcagttctgtttttctactcttactggaaggcttttgctcagcagccttggtctggtcctcagcactttcactgtcagtcagcacctgacagcttgagtcactgctccgagagtcgaaccactgatcaatattctcaatgtcaacatgttcacattcttctgtgttctgtaaaactgttggtaaattagctgctaaaatggctccttcatcaatgttcatacctgaattctcttcattgccagggaaaagttttttccatgctttggttatggtacttgattttaccatgttccaagctcttgacacttcataaattgcatccaacactgtcaagttcttccaaaatatttttgggtcatttccttcatccatgtatttctggagaagtcctgctcgatagtatctttttacagtggctagaactccctggctcattggttgaatcagacttgtgacatttggtggcaaatacttcacaattattctgccatcatctgaactcaacatttcttcatttggacgtgctggggggaaatctaaaagaagcactgctttttctaaaagtcccttggatttcaaatgcttctgtacctgtggcacaaagtacttttcaaaccactgtctgaaaacagac

SEQ ID NO: 72890 - DNA, 3886 bp, Homo sapiens
ttttcttttttcccccccggtggaaaaggggtgttttttccaggcgatttaagtgggggaccccctggtttttcccctccccgcgttgttaaaccgcgggccgtggatttaaatttgggggccccataaaaaaaattttattttgcaagcccggggcgtataaattgggtcctttaaaacggccccccccttttttttttttttgcaaaatgctcaagtgtatttatgcaacagactggccatgtactgaggaggggagcgcaggctgagggctgaggtaggagtgagggtcttcctcctgcagccaccaggcagctgatcaccatgtccaagcgtcattcctgagaccctcaggtgatgctcacgtccccagaacagcaggctggatgcatggccagaggagctcggccagccccggggctggtcctgagaggtggctgcaggcggggtgggtaagggcccctcctccaggcagcaggtgacccatagcccacaccctccacaagaaagcgggcgtggacagtgtgttcaaagctgcagccgcctggacaggggcacaagttccactggccttggaagccgagctcagaggacatatgggaggttctccttggaggtcaggaggggcggcagtgctggtcagtgcatgggggacactgggacgcctctctcccagctcccactctctgcctcctggctgggctcgggttccgcctcctccgagtgctgggtgtcgcccggcgcagggcagcgccggcccatgcagccgcactcttccacctcggtgtagctgaaggcccggctggagccgtcggtgcagtgcagggtcacattcctcagcgaggtccgcagctcctggcagcactggcacctgtgctccaccgtgttgccctcgaggcgagtacatggaagagctgtccccacagttcccccggcagtaagccaggcgcacgggctccgaggagctgcagccctgctgctggatgatcagggctcctatggtacacagcacaggtcgactggttctggtacgggggcgggggcagcgggcagaagcggcagcagccgtccttgctcatgcgggcctcatccagagaacagctgagcggggggcacgccttcttcgtggtgaccaccacgagcccatcctggtgcttctcacactggtgggtcacacagtggttccctgcgtctgaccaggtgctcgccagggtagaagaggtgggcggggctcttgctggtgttggtgacacaggcgacctgcacacaggtgccacagcactgcccgctctgctcctggtactcgaagcccacagggcagtgtgtgttgcagatctgggtctcacagctgaccacaaacgcgtccgatggggggccacccggcagctcacacctgcaggtttcgcacaggctcgaggagaccacggcgccgggctggtacagggtcccgttgatgctgcacactgtccagctgcagttttggactgggcagcaggccccctcctggtaggtcgggatcgcgcgggcgccctcaggacagcccacgggcgcggggcagcggctggtgttgcaggcgcagctgtactgggggcagcactggccggcctgtggggctgcaggcacaggcacgaagccgggcagggggcaggcagggggcagcgggcagagcttgggtcggcaggtcagcgtccacgtggccgcctcacacgtgcactcctggcagtccatgccgacggtgtggcccaccttcaccggctctccgtggggccccagacacctggggcagcccgtgggcacgcagacttgggcactggtcgtgaagagggtcatgccctccggacagaagcagccttcggtgatggggccggcctcccggagagccccgaggctggcgctgtcattcccgtagcagtaggaggggttgctcgggccgcagggctggtacaccttgtcggctgggcaggtgaatgggcacatgtggccggtccggcctctccaatcgatgcagatgtcgtgggacgcgcagagtgccgcgtacagctccaggctggagcacaccacatccaggtccgtcatgtggcaccggtcaaagacgcagccctcatagaacagcagtggggggatcacagtgtggcacggctcaaagaccttgctcagaatcagctggcagatgggtgatggcaggcacggagcaggcggtgtggtgggcccgacggtggtagacccaactgtggtgggcccgaccgtggtagacccaactgtggtgggcccgaccgtggtgggcgtcgggtgaggccggtggcaggctggctggtcagggatgctcacgttccagaggccggacatctcggagcaggaagcgaccaccgtccccctaggcgtgcggcactcatccttcctgtcgttggtgcaagtgccgcactggccctcggtgttgttggcaaacttgctgaagggcacctccacggagaagatgaggccggagaacatgacctggactcccagctccgggatggtcgcgtacatcttgacgccgatgcgcgagaccacgatgccgtttttccggaagccggggctgaccaccttgttgttgaagatgatctcgttcgtcatcaccccgtggactggcttgcgggtcagcaccacgcggtcctggtggtactccaggatgatggacctcgggcaggagagcccgtcctccgcaccgcagaagtagttgtcgacgagcacgcggaagtggccatacacgggcacaatctgctgcaccagcacgtacgtgcagttgtccaggaaggtgtagtaggtgccgtcgaaggtgatgtagtgggggtcaccccagccgctgcacacacactggcactggtagtgatggcagcagccatcttggtcagccaccttcacagccgggtagccgttggcacaagtgggcttctccaccctcgggcacgtgcgcgggctcagggagatgacgttgttgccctcacaggtggcctcggagcagttgggtgtggcccaggtctcacctttctttctggggggaaccgcatttgggcatcccagctcagtgacgggctcggaggtggatattgaaggggacgtggctggggcaggaggcagcgtggtggacggacagtcactgtcaacccctctgaccacttggcagtcctggctacacagggcataatagcaatggccagcgaggtctctgtggcggtatatggtggatcctgcagggtagagccggtcagccacgttgcagaagcaggtttgggtggagtaagccacagagctggatgccacagagctggatgccacagaggtggatgccacggaggcggataccatggaagtagacagggaaggatacagagcattggtaggagaagtcccatatggggtcacagaggtcaccgggcagcctctgggggtctcgcagcagagcacgcgcacctcgtagttgaggcacatcttgaagggtccctgctggtcctggttccggcacaccaggccctcttcccggctgcactgcaccacctggcccaggtgttcgatgctcacctccgggtggctctcggctcggcactggagcctggtgatctcctcaggtcggcggcagattttttccccactcctgatgatgttgttgtaggtttccttgtccccaccgtggggtccaggggatggaaagtccacgtcaaaccacttggtccaggtgcaccggggatgacagtctctggtgactggttgggagtgggttgtcttggatacagaaacatggcttgtgctggtctttgaaacagaggctgtgctggtggtgggaacggggctgggagtagttccagaaccgaaggttgtgctgcttgtagcagctgagcgcacgcgtggg

SEQ ID NO: 72891 - DNA, 1086 bp, Homo sapiens; identical to SEQ ID NO: 65697

SEQ ID NO: 72892 - DNA, 2973 bp, Homo sapiens
caagctttacaaggacccagcgggaccgtcgcgcgtgcttctgccggtgtgggaggcagaagctgtacaaaggctactgaggagttcaacgtgtcctgcctgacagacagcaatgccgatacctactgggagagcgatgggtcccagtgccaacactgggtacggcttactatgaagaagggtaccattgtcaagaagctgctactcacagtggataccacagatgacaactttatgccaaagcgggtggtggtctatgggggtgaaggggacaacctgaagaagctgagtgacgtgagcattgacgagaccctcatcggggatgtctgtgtcctggaggacatgaccgtccacctcccgatcatcgagatccgcatcgtggagtgccgagatgatgggattgatgttcgtctccgaggggtcaagatcaagtcatctagacagcgggaactagggttgaatgcagacctgttccagccaactagtctggtgcgatatccacgcctagaaggcaccgaccctgaagtactgtaccgcagagctgtcctcctgcagagattcatcaagatcctcgatagtgtcctgcaccacctggtacctgcctgggaccacacactgggcaccttcagtgagattaagcaagtgaagcagttcctactgctgtcccgccagcggccaggcctggtggctcagtgcctgcgtgactctgagagcagcaagcccagcttcatgccacgcctatacatcaaccgccgtcttgccatggaacaccgtgcctgcccctctcgagaccctgcctgcaagaatgcagtcttcacccaggtatatgaaggcctcaagccctctgacaaatatgaaaagcccctggactacaggtggcccatgcgctatgaccagtggtgggagtgtaaatttattgcagaaggcatcattgaccaagggggtggtttccgggacagcctggcagatatgtcagaagagctgtgccctagctcagcggatacccccgtgcccctgcccttctttgtacgcacagccaaccagggcaatggcactggtgaggctcgggacatgtatgtacccaacccctcctgccgagactttgccaagtatgaatggatcggacagctgatgggggctgcccttcggggtaaggagttcctggtgagtagccttatccacacccccgtccgatcagccctggcccttggaaggaaaggccagccaaacctgggcagctcagggtgagaagacagtggggagtgtttgtcacacaggtcctggccctgcctggttttgtgtggaagcagctttctggtgaggaggtgagctggagcaaggacttcccagctgtggactctgtgctggtgaagctcctggaagtgatggaaggaatggacaaggagacgtttgagttcaagtttgggaaggaactaacattcaccactgtactgagtgaccaacaggtggtggagctgatccctgggggtgcaggcatcgtcgtgggatatggggaccgttctcgtttcatccaactggtccagaaggcacggctagaggagagcaaggagcaggtggcagctatgcaggcaggtctgctgaaggtggtaccacaggctgtgctggacttgctgacctggcaagagttggagaagaaagtgtgtggggatccagaggtcactgtggatgctctgcgcaagctcacccggtttgaggacttcgagccatctgactcgcgggtgcagtatttctgggaggcactgaacaacttcaccaacgaggaccggagccgcttcctgcgctttgtcacgggccgcagtcgcctgccagcacggatctacatctacccagacaagctgggctacgagaccacagacgcgctgcccgagtcttccacttgctccagcaccctcttcctgccacactatgccagtgccaaggtatgcgaggagaagctccgctatgcggcctacaactgcgtggccatcgacactgacatgagcccttgggaggagtgaggcgtgccgccggctgtgggaccagcaagactgcacgtgtccctcttggccttgcccagggcgaagacaccttccctgccctgggttggctgacgtgctcagcaaaaccccatgtgccctgctcctgtgtgcagttggggtaggggcagctggcatggtcaggtaacactagtggcccagccccgcagacccacaagccctacccgtgctggggcttgcttcccgaggtatttcacctcttaagagggaatcttccacaagcccagcacaagctgccaggcctgagctacttgaagggggccatctaggtccccaacccatggactttgcctccattttcagctccgccttttttctcctattttctctctggctttcttcagccatgactcacaactaaaaacataaaacactggaggttagtggaggcccctccccaagcagggagcctgggatgggcagggagtgatagccaaactccttggtcacctgctccaagaaggaagcagtagctgagcacctgccctcacatactgctcttttcccctctccctccacaccagagatgtggtgagctctgttcttctaccaacccagtctcaacacacaaagtgccaccaccttccctgactcagaacccacatccactcaatgtgaactctactaccacgacctccccatattcctcacttctccatcacctccagcctgactccctgtctgccctttcacccccaagattttgcacaggttaaggccagttatggcctttttgaaatctgtaatagctcccctttccccaactctaaagcctagaccttaaacctgttcctagagctatgcacacccctgccccagtttaccgttcctccctcagggcctccgtgacactccatgaaaagaagttcttgcataccggaaagttgaataaatggatgaattcccaaaaaaaaaa

SEQ ID NO: 72893 - DNA, 2186 bp, Homo sapiens; identical to SEQ ID NO: 65699

SEQ ID NO: 72894 - DNA, 4308 bp, Homo sapiens
ttttttttttttaaaatcaaaatgtttattggagtgttgtacaaaaaagtttccagtcataaaatgtatattacaaatcattggaaaaaaaaaagaacacattaggcatgcatcttcttaaaaaccgaatctctgaaatgaaagtccatgccagccccagctgcagcccagctccgtttttgcaggttgtgctgtgacgctcgctggacgcagggcttggaagaggctgcaggcggcgacgccccaggactgaggagtccctcagatctttaacaaagaactgccgcgtgcaggcttcagaccaaccccagccaaagccgctggcatgaggacaggtgcatgatcggattctgggtcagcccgcaggcctcccggctcctgggctcagcggggcaggcttcagcgttaacctggcgctgtgcaccccagaacccgcgttggtccagcaggcgtgggcctccccccagggctgggtggcgtctgatgcttcgcagggagggcgctaggcttcgagtcacacggcacgggcttacacagagggatggtttcgcatcgttctaagcggcacacagctaagcgtatttggggacaaatgcaaattgtttcccaggccataaataacttttaaaaatttgattttcttagtgtttccaaagactcaattctcaatgaacctccaattacccacaggctgcccagtccacgcttctccccacccccttcagctaagggcacccgcagtcctaggaccacccccagctccacccaaggcaaatgtagggtggggggttctgtgggcctggggcgtgctgttttcaggacaggactgggcagcgtctggacatgaggacctgcgggttttgggggggactttgtccctgagcccagcctgcaaggctgtcggcaaatcacagaccaactccaggatacagctttgctcctccagagccaaaatacataggatgtggctgagaccactgcagactccccataggacaagatcaccaagacccacccccagaaccctcgctagcacgaagcccagccagtcgggtccgggtgattcctgctatgaaggtgggaaagaggacacagtctgtcgccagcattcccacttccagcggctggcagagggtatccccggggcaggcaaagctccctaccagccgcctgactgggagcacagcggcgtagcctccaggaggaaatgctttggtaagatgcgcccccctctatctacatgggaccgggacttctgagagcaaggacagcgagcaggggctacgtggagcagcgggtgtttctgctttgtcggccgctggctccttcccggcctggggctggggccccccattccttcctgccacaggcaggtccccagggaggcgggatgcagtcacaggggagcggtgccgcccccgccctgcagtgaacgccatggcccggagacggcgcgtgcccatggctcagttttggtgtctttaagacttgagctgcactttctgaaggaggctctgccgtcggagggtgccccagccccacgccaccccggggaggagggtcagcctgtcctcaaggccctggcgtgagctcctgacctgtgtactgaccaatgtaaaaaaataaatatccattaaaaaaataacttctgtgtatctatgagggagggtgtaaacggtgagctattgccgaaggggggtgccaggcattgggaagctggactgaggggcttgggtgcgtcgtgataggagtcaggtggccttggcctgtctgagaaacatggtttcagcgagaaaatcacagataaaagcacagtatggatagacgcatgtgtatatataggcacagggcagacggagctggaacacgggaggggctccacagcgctctcctccagagggtcaacatggtggcgttccctgcagacagctgttctgaaactcacagcttctgcctccaaggcaaccagatgtgtcccctccacatctcccctccctgcttattgttgtgacaggtcttacgacgggactgtcctcattcttccttccccaggtcttcccctcccctgccctgttggccctgcacagtcaggaactgaactgcgggaaaactcccccaaataaagtcaacggtccgagaaacccggccggtgcgctgccagaacgggaatctggaagcccaggcagcggagtgaaaacccgccctgggggccacgccatccccatgctggcccacacccgctgcgtggctgcctgaggagttcccgctgtccgaagctgggcagccagaatgcaggcttggccccgggccccaccaggtcgacgcctggattctgaatttggttttgtagaaagccttaaaaaaaacccaccaccactgaattcctacgcagtttccgcgctccgtccgcagcagggccgtctcctgtcccctcgctagcctcgccggccctcctccctccaagcccaagcatcttctaaacctcggggtcctggccctgggcttccaatttgaccaaatggtgagatgaggagtggggtgggattgaaaagtctccggggcagcggcgaagtggcagcgaagtgaggctggaggagacccgccaggagggagggctgggggagacccacccacacgttctggcagttcgcttagaaattctctagaaatgtatcaagaactaaagaaagccaatgatataaaaatagttttcagtggctctgggtaaagaaaggtgtgtggatgaggagtgtgggttcacatcacgtagcagcctcttgaggtggtcctcgggtccccctgttggtggaaaagatcctcctcgccaaactcggcttcctcctcctcttcctccccattctcattctcacgcatcaccgaggacttcttcacagtcctcatggccacttcctcgccatccgcgttaaccaggacggtgcggaagctctcgcccgtgccccagctgctctggcccttccacaccagcgtcgagggggggctgtgggccacccccgcaccagctgcccacaccgtgaccatctggccggcgcgcaggatgtacttgggcgtgaacttgtaggcgatctcctccccctccaagacctgcctcttgattctccagttccccagagactgatccttgtccgagttgttcttgagctgcacaaacttgccctccaggtcgatctcctcgatgctgacgctgcccgaggccgaggcctgctgggccaggtggaagccaccgctgccacccgtgcccgtgcccaggacgcttgggccgctgcccaagggctcctccacctccagccgcttccgcttactgcggcccaggcgcccggtggcggacaagctgccgctgctgctcgaggtggctcgtgagacggtgacgcgcgaagatgggctgggggacagcttcagcctctcctcctcgccctccaggagcttccggtaggcgttgatctccatgtccagggccagcttcacgtccagcagctcctggtactcggccagctgctgctgcatcacgtcccgcatctccgtcatctcctgctccttggcgtccagcatcttccggaacttgtcccgctccccggccatggcctcctccagctcccgaatgcgatcttcagcggcactggcctgcttctggaggccggagagctggtagctgagggactccaggcgcatgcgggcctccttcagctcctcgcgagccgcactggccgccttgtcgttctggtcagagctcagcttggcgctgtccagcttggcctggtaggtctgctccagctccagcttgtagagccgcacttgctcgtcgtgctggctccgcagctcctccagcgcctgtgccatcttgaagtcgtactcctgctgccggctgctgtccacctccaccaggcgccgctcgtgccgccgccgcgtctcccgcacctcctcctcgaacacactcttccggaagtccagctcctcctgcaggctctggcagcggttctccaggtccacacgcatcagcgtctccttctccagctgctttttggccactgcatgaccgtcctcggccttggccagctgggcccgcagctcagccacgtcactctccaggccgcgcttgtcgctgagggcagctgccagctccacctcgctccggtggaacagggactccaggtccttcacacggccctgggccaccgtaagctcgccctccctcttcttggcgctcttgttgacctcgtccaactctgccctcagcttcccaatctctatctgcagccgggcacgctctcgagccgtctcatccaggactct

SEQ ID NO: 72895 - DNA, 2457 bp, Homo sapiens; identical to SEQ ID NO: 65701

SEQ ID NO: 72896 - DNA, 678 bp, Homo sapiens; identical to SEQ ID NO: 65702

SEQ ID NO: 72897 - DNA, 1042 bp, Homo sapiens; identical to SEQ ID NO: 65703

SEQ ID NO: 72898 - DNA, 6839 bp, Homo sapiens; identical to SEQ ID NO: 65705

SEQ ID NO: 72899 - DNA, 3457 bp, Homo sapiens; identical to SEQ ID NO: 65706

SEQ ID NO: 72900 - DNA, 1602 bp, Homo sapiens; identical to SEQ ID NO: 65707

SEQ ID NO: 72901 - DNA, 2255 bp, Homo sapiens; identical to SEQ ID NO: 65708

SEQ ID NO: 72902 - DNA, 1310 bp, Homo sapiens; identical to SEQ ID NO: 65709

SEQ ID NO: 72903 - DNA, 498 bp, Homo sapiens; identical to SEQ ID NO: 65710

SEQ ID NO: 72904 - DNA, 1673 bp, Homo sapiens; identical to SEQ ID NO: 65711

SEQ ID NO: 72905 - DNA, 604 bp, Homo sapiens; identical to SEQ ID NO: 65712

SEQ ID NO: 72906 - DNA, 1180 bp, Homo sapiens; identical to SEQ ID NO: 65713

SEQ ID NO: 72907 - DNA, 415 bp, Homo sapiens; identical to SEQ ID NO: 65714

SEQ ID NO: 72908 - DNA, 746 bp, Homo sapiens; identical to SEQ ID NO: 65715

SEQ ID NO: 72909 - DNA, 1419 bp, Homo sapiens; identical to SEQ ID NO: 65716

SEQ ID NO: 72910 - DNA, 4917 bp, Homo sapiens; identical to SEQ ID NO: 65230

SEQ ID NO: 72911 - DNA, 2141 bp, Homo sapiens; identical to SEQ ID NO: 65718

SEQ ID NO: 72912 - DNA, 1895 bp, Homo sapiens
agctgcaacacttgaaggctggaaactgtaccatgaccctaatgttaatggaggaacagaattagaacctgttgaagggaatccatatagacgcatttggaaaataagttgctggagaatggcagaagatgagctttttaatagatacgagagagcaatttatgcagctttaagtgggaatcttaagcagctgcttcctgtctgtgacacctgggaagacacagtttgggcctacttccgggtgatggtggacagtctggtagaacaggagatccagacatcagtagcaactctggatgaaactgaagaactccctagagaatatctgggagcaaactggacgttagaaaaggtttttgaggaacttcaagctactgacaaaaagagagttctggaagagaatcaagaacattatcatatagttcaaaagtttcttatcctgggagacattgatggtttgatggatgagtttagcaaatggctttccaaaagcagaaacaatctacctggacacctgcttcgctttatgactcaccttattttgtttttccgtactctgggactacagaccaaggaggaagtttctattgaagttttaaagacatacatacagcttttaataagagagaaacatacaaatcttatagcattttatacctgtcatttgcctcaagacctagctgttgcccagtatgcattatttttggaaagtgttacagaatttgaacagcgccaccattgcctggagttggctaaagaagcagatttggatgttgcaacaataacaaaaactgtagttgagaatattcgaaagaaagataatggtgaatttagtcatcatgacctggccccagccctagatactggcactactgaggaggatcgtttaaaaattgatgtaattgactggttggtatttgacccagcgcagagggcagaagcactgaaacaaggcaatgcaattatgagaaaattcttggcatcaaaaaagcacgaagctgcaaaagaagtatttgtgaaaattcctcaggattctatagcagaaatctataatcagtgcgaggaacaaggaatggaaagtccacttcctgctgaagatgataatgctatccgagaacatttgtgcatcagagcttatttggaagcccatgaaacctttaatgagtggtttaagcatatgaattcagttccacaaaaacctgctttgatacctcaaccaacttttactgataaagtggctcatgaacacaaagaaaagaaatatgaaatggattttggtatttggaaagggcatttggatgccctaactgctgatgtgaaggagaaaatgtataacgtcttgttgtttgttgatggagggtggatggtggatgttagagaggatgccaaagaagaccatgaaagaacacatcaaatggtcttactgagaaagctttgtctgccaatgttgtgttttctgcttcatacgatattgcacagtactggtcagtattcaggaatgcctacagttagccagatatggttatcctctgagcgccacaaactgtacctgggtattttctaaggaagagctaaggaagttgctgcagaagctccagagagtcctcttctaattgctcctagaccaggggactttgacccattagggtatggaatttcagttattagtttaatctttgtaatctccctaattttcatgataaatgaagtttttaataaaatatacttgttattagtaattttttcttttgcattcccatgtaaaatttagccatttgaattttgtacttttcagaatattatcgtgcccctttcaacatgtagggatatcagcgtttctctgtgtgcttgttaataaaactatataaaaattaaaattttctgtttttacaaaa

SEQ ID NO: 72913 - DNA, 4134 bp, Homo sapiens
ttttttttttttcccgattaaaaactttttatttcagcaaaataaacgtgcctgtgaaagaaccacacggtggcttccgagagaccccactgtgtacctgagccccaggtggccacacctggtgttctggaaaagggagtccagggccagtattcaggccctgctgtactgcaccctggaaactgcaccaaaccccagctccgcccccatccacggctcccagaatggtttctggagtccctgcaacagacctgtgaggagagggcagggcagggcctgcctcctgcgtccccgtgatgacctgggggatgcactgggcagggacagcttcctccatccacacagccctgtgggcaccaacaaggccactgtgacttcacacgacagcagtgttccccagctcagctgagccggggtgcaggggacagcacagggcacagtcctgtgccgcaaggccctcgtgctcctggaagcctctgggaggaggcgcccgctggtgggacgtcgaagtccaggcgctctcggcagcgaccccaggacggcgcacctaagctatgccgtggtgcaggggacgtgctggagggacaggagcaggcgagagagaagccacctgtggtcccagccccaccccagctcacacgaattccggctgcctttccctgcaggagcccagcgtcatccgcccgccacggagcctcatggggggcagtggggcctgcagcacgttgttggactggttggtgttgaatcctgagagctgctgggccgggccgtcctcgtccccgtccccgtcctcccgggctgtggcctccagctgctcctcactgccgctgtggctgccagaagccacctctaggctggcctcgctctgctgctgctccaggaagctgaggtggcccagggcactggcctccgatgaggacagcagctcggaggcctcctctaggtccgagtccgaatcgttggacacaactcgggattctctgcacccgtccgccgccgcctcctgcagcgggtagaccaccgcctcgcccgcctccaggtacggcacctggacgactacctcagctcgctggttggatgactcgtcctggcccccgggggtctcctccggctcctcctcgaagaccaggccgtagtggacgatgagagtctcgatgacgcgggcctgatggggataatccaccagggaggagagggacacggtggcctcggtgggccgtggccgaagcagcgtgggcccgaacacgatgcccaggttcccgggggtcatcttgttgtcctgctccacctccacgatcctgcgtaggtgacgcagcaggtactgcagcgaggcccggttctcaggcggcaggtcccgcaggagctcccgcagccgacctgccagggccaccgccactgcctcgctctccgagccgtcctgccggccccgggacgccgccttggcctcggcctctgccttcaggctgtccttggccagccctacgagctcgtggtagaggcggaaggagatgagcggctcgggaagctgacgcaggtagagcttgaggacgttgctgatgtcgtggggcgaggcctgcgacagctcgaccagctccttgccgttctcgaaggcctggcacagcttctccacgcgtgtctttaccccattgacccggtagatgcccttggtgcgcagcgcccgccgctcgatctcgcagacgcacttcttgacgatgaagggcacgccgtcgggggcgctgcgggccgcgtggctgaagtcctggccgaacagctgcaggcggccttgcagcttcttgtgcccgcactgtatggccagcgtctccagacatttcttgtggcaggccaggcagcactcttcacactcagcaccctggaagtagacgtagctgttgcactcgcggcacttggcgggcgtgcggagcttcccggagccggtgagtacgggccgccttggacagcccctcgtggcggaacggtccactgggcacggccaccggcagctcgggggtcatgccgttgaggtcagcctgctcaaaggctgaagccccggctccaccgtctgggtccaccagctcctccgtggacgacatggtaccactggatgacgtccgctcgaacttcttaaagtcccctgcgccagggccggggtccagcccactgtccgagtctgagatcgagagcggccatgacttgtgaacctggtgtcctcgcccggccctgtggtccttggcaggtgtgccctcagtgcacccgccttcttctggggggctcccggcagcctccggccgcgccacatcactcacgttgaagctgctcttccgggcacgcatgacgggggaccaggcgttggcggagacgtggggctcaaagtcgtagtgcacatcgggctcctggtcccgctgcagctggcgcacgtgggaggcgtactgctggcctgggtcatacagcttgctgctctcacacagcatctggaagtgcacgggcagcggcgccgtctgcatatgcatcatctggtagtaggagatcgtggccgacttgatggtttggtcgctctgccggatgacctcctggatctgccgcagcgccgtcaccttggtatcctccagctcctgcttctgcgtcttcgcgtcggccacgcaggtgcggtaggtggccatagcttcctccgccttgttcttggcctcctcctccagccgccgccgcttgtccagggtcttggtggccgtgctgcctgctcccggcgcgctgccagcctgctcctcctccgccttggccacgaggaagcgagccttgtcgtggtcctcgcagcgctgcacgtaaccctgcttggccttgcgcaggttggactccgcctcttgcagcttcctctgggcacggtgccaggcctccttgatctccttcctgcgcttctcgtgttcaagccgccgcagggtcaggggctgcatgaaggtctgggtctgcaaggtgcccaccgcctgcaccatgctgtggccgaactccaggtcctgctccagggccagcgagtagatggacaggagcggcatgtggggctcctgcatgacgctctgtctgcagttgtgagcgatcttctgcaggcccttggcaaactccatctccagcgtcgtccgcttctccaggtagctgatgaggtccttcatgtacttggccatgttcttggcatacagcagtgcggcatccacgcccccctcacagcgctgtagcagcacgtccacctcctcggcgggcaggcagccggcgtcacagtcttccaggctgggaggcgtgccctcactgcccggtccatacaggctttccatggactggctcgagtccccaggaggcactgctaggagggtgctgctgtccacttcacccatgaggaactcggacactgtgctactgaaggccacagcaatcgtctccagggccttctcgaactcctgtttctccagatcattgttgctctcataatggaaggctttgaccttggcaatgagggtgccggctgcggtgagcgtctccacggtgttcagcagcgggtacttggagatgatctgatgcatgacacgcagagcctcacccaggcactcgtgggcccgcgggcggcgggcctcaaggaggtcgtcatgcagcacacactccttaagtttctcaaggccctcagcgaagcgggccacgtccgccagcagatgggagatgtcctcgacgacgtccgggccggcaccctcggtgggcagctcgcccgggctggcggctgtcagtgggctccggtggctccggcccagtgtccaggaggcagcacccgacagggggaagccagccgcgctggcgtggcggctcaggctggtgggccgcttgagggtccctgtggccttgacgccggaggacccagcgggcggctccaggcttggtccggggaacaccgcgtcagccccatccttcctgggcagctcccccgagggctgcgggctggggcttcccgcgcggttctttttcgagatggaaggggttttcatgagctctcgtttcttcctggagaacatgatggggccccggccgggagcccgagggggcgggctgggggtctcagcgctgcagctcccggcgctggccgcttcgggaccacattgt

SEQ ID NO: 72914 - DNA, 1849 bp, Homo sapiens; identical to SEQ ID NO: 65721

SEQ ID NO: 72915 - DNA, 1021 bp, Homo sapiens
cggacgcgtgggctccgagaactcagccccgacatcgcccacctggcctcgctcaagacgttggacctctcgaacaaccagctgagcgagatccctgcagagcttgcggactgccccaagctcaaggagatcaatttccgtgggaacaagctgagggacaagcgcctggagaagatggtcagcggctgccagaccagatccatcctggagtacctgcgcgtcggaggccgtggtggcgggaagggcaagggccgtgccgagggctcggagaaggaagagagccggaggaagaggagggagaggaagcagaggcgggaaggtggtgatggggaggagcaggacgtgggagatgccggccggctgctgctcagggtcctgcacgtctctgaaaaccccgtacctctgacagtcagagtgagccccgaggtccgggatgtgcggccctacattgtgggggccgtggtgcgaggcatggacctgcagccagggaatgcactcaagcgcttcctcacctcgcagaccaagctccacgaagatctctgtgagaagaggacggctgccacccttgccacccacgagctccgtgccgtcaaagggcccctgctgtactgcgcccggcccccacaggacctcaagattgtccccttggggcggaaagaagccaaggccaaggagctggtgcggcagctgcagctggaggccgaggagcagaggaagcagaagaagcggcagagtgtgtcgggcctgcacagataccttcacttgctggatggaaatgaaaattacccgtgtcttgtggatgcagacggtgatgtgatttccttcccaccaataaccaacagtgagaagacaaaggttaagaaaacgacttctgatttgtttttggaagtaacaagtgccaccagtctgcagatttgcaaggatgtcatggatgccctcattctgaaaatggcagaaatgaaaaagtacactttagaaaataaagaggaaggatcactctcagatactgaagccgatgcag

SEQ ID NO: 72916 - DNA, 1666 bp, Homo sapiens; identical to SEQ ID NO: 65722

SEQ ID NO: 72917 - DNA, 5527 bp, Homo sapiens; identical to SEQ ID NO: 65723

SEQ ID NO: 72918 - DNA, 868 bp, Homo sapiens; identical to SEQ ID NO: 65724

SEQ ID NO: 72919 - DNA, 1296 bp, Homo sapiens; identical to SEQ ID NO: 65725

SEQ ID NO: 72920 - DNA, 6140 bp, Homo sapiens; identical to SEQ ID NO: 65726

SEQ ID NO: 72921 - DNA, 1705 bp, Homo sapiens; identical to SEQ ID NO: 65728

SEQ ID NO: 72922 - DNA, 1456 bp, Homo sapiens; identical to SEQ ID NO: 65729

SEQ ID NO: 72923 - DNA, 465 bp, Homo sapiens; identical to SEQ ID NO: 65730

SEQ ID NO: 72924 - DNA, 973 bp, Homo sapiens
aacaaagttggtctcttttttccaccagttttcaagtaattagttcaagtaagcttatttacagctgctactgtatatatgtgacctactttaacccttctttccctttaggaattggtctcccttggaatgggacaccacattttaaaaaaaacttgaaccaggtttttttcatctaccaattcaattcagtcatgtttctgctttattgggcagataaagagaagaaaccagcaagttatgtccaaaagctggaaaacgccgaaatgcttcccaactatctgaaaagatgttgtacttgaggaacactcggtgttccaagctggtcgacagggtgacgtctctgctcatgatgtagatgccgtcgttatggagcgcacaagtcaagttaagacccgatttggacgtgttctccttgaggtagagccactggcgggtgacggtgttgtaggactgcacggtgagcatgtcctcgctctggctgctcctgcggttgggccccagctcgtggagacacccccccacgatgtagatggtctcttccacagacaccatctgctgcttgcgaatgtggacgtcacatgtttcaaagagcgtccacatgtcggaagaggggcagtactgcaaaatgttcatgttccggtctctggtagtgtatcctccaatgacataaatttttcccttacactcacaggcagagaactcagccagaggattgggtaagggcgccacaaaattccacgcatcctgctcggggttgtaacactcaacgttagaaacggcctgccctccgatggcatagagttttgaattaacagccacaagtttgaagttagacctcttctggttcatggaggccacctggagccactcgttggtgctggggttgtaggaatgcgcagcggagatctcctggctagtgatcctgtacccgcccactataagaggtagttgtccaggctcggcagggtct

SEQ ID NO: 72925 - DNA, 2555 bp, Homo sapiens; identical to SEQ ID NO: 65732

SEQ ID NO: 72926 - DNA, 795 bp, Homo sapiens; identical to SEQ ID NO: 65733
  misc_feature (1)...(795): n = a,t,c or g

SEQ ID NO: 72927 - DNA, 1798 bp, Homo sapiens
gggggccaatgggctcccaaggtccggtcaggggagaacaggcaccggtcccccgcgggatgggtccgcaccattccagcggctctctccacgaaagtgggccactgccgggctgcactatgtgtcactgaaattcagggagacctctcagtcggggttccagcctacgcatgttcaagggaccccctcattcccaaaacccgccgggcgcacagaattctcaggcctggctgcgttgctgggaagcggaggcccagttcctcctgcagcctggctcacacccacgcctcacagtggggccctctgaccgtggccgcagcccccagcatctaccccaagctagtgcaacatcctgcccagtccacgtgctactgcgctcccggcgcctgcctccaggccaccgggcggaccctttctcagccccaggggccttccaggcccttctgttcaaaggaccggatgcttcacaccgctaagggctttatttcacagatcatggtggtgagtttggatttccagccctcaccacggttaagtcacacatttcccgacacctgctcatttctccagatctgaaacatctcacccaacacatcctagttgttgtaaaccccaaatgaactttccagaagcaaaaacaataacagattcagagaaccctggtcacacctgctgagcaggtcccctctactctggttgcatatagaatgcttgtttgctcaaaagagaggcgctctcaacatcaaggcacaaagaaagacgtctccaggggcaaaatgatgacgaagtgaccagcggcctctgcgaggcccgaggcagagtcacgggggaggcgagttcagcctgacgggcattgggaggaagagccaaggacaggtctcccgctggggctcaggcgtcctcacgcgtacttctccaggaagttgatgtggaagtctttcaccttctgcagcaccgttttcagcttctccactggagggaggatagtcatcctgaagtggtaagtgccttccctctgcccaaagccactgccgggcacgacacagatgccagtctcctccaggagcttcatgcagtagaacatgtctggagccatttgatgggcctgagcagcctccacagctttgggcaggaatgaagatccgagggaaggcgtacatggccccctgcaaggggttgcagtgaattcctgggacttggttaaacaggtcttccgtcagctttgcttttttggccagattacccaggaccgactccttctctcggctgaattgctcaaaggactcctctcctgccaccggggggttcacgacaatgtccatggcggcctgcccagacactggggggcacaggcgcaccgacagcagcttcaccagctggcccttgatctcagggtgcaggttgatcacctccatgtagcctcctctgtaaccacactcgcccatgtagcccttggaggtggagtggaaggaggcgagctccacgttgctggagtactcgggccccatctcgtacagcaccttcttgaaggagtggaatctgcaatctggagagtacacgttgtcctggtacacctcatcagccaggagaaagagcttctcttcccaggcaaagtggatcacatcttctatgcactttctgctttgtacctggcctgtggggttcccagggttgattatgcagagcaccttaggatcacagtggtctttggcctcctgcaccgcccgccggagctcattcacattcagcgcccagcagttctcctgtccaggtagtaattcacgtggatggcgcatgc

SEQ ID NO: 72928 - DNA, 1096 bp, Homo sapiens; identical to SEQ ID NO: 65735

SEQ ID NO: 72929 - DNA, 2507 bp, Homo sapiens; identical to SEQ ID NO: 65736

SEQ ID NO: 72930 - DNA, 2392 bp, Homo sapiens; identical to SEQ ID NO: 65737

SEQ ID NO: 72931 - DNA, 2950 bp, Homo sapiens
tgcaagtgacttcattcggagcctggaccactgtggatacctatctctggagggtgtgttctcccacaagtttgatttcgaactgcaggatgtgtccagcgtgaatgaggatgtcctgctgacaactgggctcctctgtaaatatacagctcaaaggttcaagccaaagtataaattctttcacaagtcattccaggagtacacagcaggacgaagactcagcagtttattgacgtctcatgagccagaggaggtgaccaaggggaatggttacttgcagaaaatggtttccatttcggacattacatccacttatagcagcctgctccggtacacctgtgggtcatctgtggaagccaccagggctgttatgaagcacctcgcagcagtgtatcaacacggctgccttctcggactttccatcgccaagaggcctctctggagacaggaatctttgcaaagtgtgaaaaacaccactgagcaagaaattctgaaagccataaacatcaattcctttgtagagtgtggcatccatttatatcaagagagtacatccaaatcagccctgagccaagaatttgaagctttctttcaaggtaaaagcttatatatcaactcagggaacatccccgattacttatttgacttctttgaacatttgcccaattgtgcaagtgctctggacttcattaaactgggcttttatgggggagctatggcttcatgggaaaaggctgcagaagacacaggtggaatccacatggaagaggccccagaaacctacattcccagcagggctgtatctttgttcttcaactggaagcaggaattcaggactctggaggtcacactccgggatttcagcaagttgaataagcaagatatcagatatctggggaaaatattcagctctgccacaagcctcaggctgcaaataaagagatgtgctggtgtggctggaagcctcagtttggtcctcagcacctgtaagaacatttattctctcatggtggaagccagtcccctcaccatagaagatgagaggcacatcacatctgtaacaaacctgaaaaccttgagtattcatgacctacagaatcaacggctgccgggtggtctgactgacagcttgggtaacttgaagaaccttacaaagctcataatggataacataaagatgaatgaagaagatgctataaaactagctgaaggcctgaaaaacctgaagaagatgtgtttatttcatttgacccacttgtctgacattggagagggaatggattacatagtcaagtctctgtcaagtgaaccctgtgaccttgaagaaattcaattagtctcctgctgcttgtctgcaaatgcagtgaaaatcctagctcagaatcttcacaatttggtcaaactgagcattcttgatttatcagaaaattacctggaaaaagatggaaatgaagctcttcatgaactgatcgacaggatgaacgtgctagaacagctcaccgcactgatgctgccctggggctgtgacgtgcaaggcagcctgagcagcctgttgaaacatttggaggaggtcccacaactcgtcaagcttgggttgaaaaactggagactcacagatacagagattagaattttaggtgcattttttggaaagaaccctctgaaaaacttccagcagttgaatttggcgggaaatcgtgtgagcagtgatggatggcttgccttcatgggtgtatttgagaatcttaagcaattagtgttttttgactttagtactaaagaatttctacctgatccagcattagtcagaaaacttagccaagtgttatccaagttaacttttctgcaagaagctaggcttgttgggtggcaatttgatgatgatgatctcagtgttattacaggtgcttttaaactagtaactgcttaaataaagtgtactcgaagccagtaagtgctctgggacctcattattttaagcctggtagttaaaaaaaatcttgcaaaaggatgccaaagaagataaggacgtggaaagaagtttaatttgatgattaaaaacatgcaacagttttgtgtcttagctctcctactaggattatcggcgccttgaaggaattctcattcatctttgtgttacctttggtctgggtcacaccaactggtatactgaatgcatattaacttagtatagtgcctggcatgtaagagattctcaacaatattctcaataaatattcgctgaatatgagataaattattaatagctactgaataaagaaagattatttaaaaccagagaggaaactccatatatgttctttaatccaaacagtttaattcaagcaatctggaatataaaaagcactttctgatattagaaggagatcagactcccaaaaaagatcagcattctttagtcaagcaaaacttggaagtttacaaacagctaaatcagaagcttgaaattcaggtcctctccagtacctgctacattatatgtaattccaaacatgacttcagagattaaagaagaaagggaagatgtttcccattcttttgtaccctatataaactaagggtaccctgccctaatcttttttccaacacttccccaaataacccttccttacaaagaaagaagtctaagagaactctctcatctaaatatatttaagtagaggcaagcctgaaaaaaacacaaaaacctaaatggtgttaggctgtggttcacctattctcatggcacctcaaattaatggcttgggtgttggtgtaggtaacgcttggcctgtatgttgaggtagtcactagataaaattctgggcacaacatccgtttagcaattgggcatacattctacagatttagccataacgttctgaagctgattattttacagatcaactaattaattcctctccctaactttacagatgagaaagctcag

SEQ ID NO: 72932 - DNA, 1476 bp, Homo sapiens
  misc_feature (1)...(1476): n = a,t,c or g
ttttttttttttcctattaggaaaaaatggggggaaaaaaaaaagactgcaaaggaagcaaacacaaagtcatgtaattgcccattgcccaagacgacagcactatagaaaacagttgcaagttaattctcggagatgaccagagatttttcagtgtttacacaaaagtacatagtacatttttttttttttacaaaataaaataaacatcatttgccaccataaaccttttctttagagaggaaaaatttttgcagcaggacacaagggttctattaagtcatttcaatgcctgagaaaaacaaaattgagtaataggactaatcacttccctatatatggatgttaagatgacaatttagattatttttcaaactaatcctgaggaaaaaatctgtttacaatttaaacagtaatgttatgtaaaaagtattattaacaaatcccctattacaaatatcaatttcctatatggtcttctatatatacacacaataaaatggtaaatatatgcaaaaatatttaaaaaaaaaacatgcacagatcactttcccctttggaatctggacttcctatcagatacctttgttttccttccccacctcatcctctgatactgttttttgtttctatcaccctaccaacactgaatactattccctataactctgcataaagccaatgagaaatatatttattttaccttcaagctttaaatcttaaaatgaccctgttgtagcatatgacttatcaaataagcagccctttttttccctcttttttgcttgcttttttttttgttttgttttgttttttttgcagttgtcagtcttcatgatccattctgtggcgagctgggaaaaaacgcagttgctaagtcaacgtctgaacagtgtgaggctcctgaatatctcccaggagtccctgcgcaactgtcctgagcatgagatcattgcacagagaagacagtccaccgcgcagcgctgactatctacagaggtctgagaggggcgcgtccctcttgtgtttcctctttttgccatggtaatactgattattggatttgccttgatgttgtttgtttgtcatcaaggaaccatggcttgtttgagttgtaccttggaagcctttgctggaagaacgaaagagccttgctgatccatgctgagatttgttggtgctgttggatgtgttagtggtttgggtgctttgcattttcccaactgcctgagaggactccaaggatacatcttgcgaccctactcgggttnccagtggacggacggcaaagcagctgtttcggggttttgcatggtgttgcatcggaatctacatcactagagctggactgtgtggcagaagaggacgacactggaccattgcatgaaggctcaggtctattcttcaagccccactgctttgatatccaatctctatatgtggcaacttcatctgttactctaattattcttccag

SEQ ID NO: 72933 - DNA, 1045 bp, Homo sapiens; identical to SEQ ID NO: 65740

SEQ ID NO: 72934 - DNA, 612 bp, Homo sapiens; identical to SEQ ID NO: 65741

SEQ ID NO: 72935 - DNA, 2018 bp, Homo sapiens; identical to SEQ ID NO: 65742

SEQ ID NO: 72936 - DNA, 2476 bp, Homo sapiens; identical to SEQ ID NO: 65743

SEQ ID NO: 72937 - DNA, 672 bp, Homo sapiens; identical to SEQ ID NO: 65744

SEQ ID NO: 72938 - DNA, 919 bp, Homo sapiens; identical to SEQ ID NO: 65745

SEQ ID NO: 72939 - DNA, 461 bp, Homo sapiens; identical to SEQ ID NO: 65746
  misc_feature (1)...(461): n = a,t,c or g

SEQ ID NO: 72940 - DNA, 2573 bp, Homo sapiens; identical to SEQ ID NO: 65747

SEQ ID NO: 72941 - DNA, 1482 bp, Homo sapiens; identical to SEQ ID NO: 65748

SEQ ID NO: 72942 - DNA, 919 bp, Homo sapiens; identical to SEQ ID NO: 65749

SEQ ID NO: 72943 - DNA, 1458 bp, Homo sapiens
  misc_feature (1)...(1458): n = a,t,c or g
ttcactgtaacaaataatcgagggtcaagctgtttttttactgcttgtctttttcggtcaggtgagcagggctgggtataagccccattgccagattctgtagccaggtggagaaaagtggactggaggctcataatgttcagaatactcacattctgttaatcattttgtcttccatatagcacatcactaccattaccatcctccccctgtcctcagttntaagtctgtttggtttaatttctccagacaataaggcttcagtcatctgctagagagatagctgcctgcctacaaaagaagagcaaaaataaatgttcaaataatccccttgtttcaactttctttattactcccaccttccagggtcacagcaattagctaacaataaaaacactcccacttcctgcagtcacagctgaaagacttttcaaggcagactacatttgggctggagatacaagtgatgtagtttgacttgggcaatacaaaacaaaagtcataggaattaaatggattttcaatcactgtataattcattctcctggcttaagtacgttttaattttttcacagaaaaaaatatatttcaggcaaataaaaacaaattccagattagcatagttcagcgtttcatttatcttacctttatcaaggcaaacaaagtacagatgctgtacattaaaaacatagaaatatatcactcacaccacatcaactcctacggacaaaagggctttttctaagccctgctcctttctgaagcacacaccacagctaaatgtacaaagagccatctgctggtccaacatagccaactccaatgagcaggacgtctatcagcgtccatattcccaggccaccgaagctgaagagcttgccsgaggccgtccccgctactggccccaggtagraaacggtctgctcccaaaccccaccgagggtgatgccttaagagccagagcccgtagacccacttatagcctccagtccaattgcaatatagcattttgggaaaagtacggttacccaagcagtggacgtggtccccgcaccgtgcagttggcagggtagcgctgccgaggacaggacaccgtcatgcagctggtggagttggtacactcgtaatctgtttcaggaagctgccagcaaaatctgcaagtcatgttaatgatgaagttcttttgggatttgaagtcttgatcaacacaggtaacagatggtttcactgcacagtcaaaagtgacaggcttcccataggtacaggagaaatttgttgtgcagtctatacagtctgcaggaagcctgctacacaaaccattgctcggacacttcatcacataaggtgggatttcagtactttcaccgcccgacagaatgcagaactgcgaaaggaagagcagcacgcgacacaaggcgcggaggcccctcagcgggcgcacccctcccgccatcttgc

SEQ ID NO: 72944 - DNA, 1904 bp, Homo sapiens
ccttttttttttttttaaccttagtttaggtaaatttaatgactgtaaaagctgttcacatagcagctttaaagagacacgttttccactgacataaagttgcttcgccccttgcagcttatctccaccttcatgacctgtttcctcagtggcaggcaatgtctccccttcctgttggggaggattgcccaagtcagctctgaggccatcctctcaggtcagcaatatgcagaagagtccctcagagtggtcctgcagagaacatgtcccctaagtgtctgagaactggctgaggtgatcttcaccagcacatagtccccaggctgggctctgaccctgagcccagggttattgacatcctccatctctgcatcagggaagatcaccttaaggtttccatcattcctgccacacaggtcagtggcagagcgtttactgagcccttccactagcaccaactgggtacagcccacagaggtctgattggcttttgttgcttcttctcggaagatagtgatgagttcctccaaacgccttaattttacctcttccgggacatcatccttcagcctatgatatgcccgtgtcttctgtctcatgctgtaggcaaagaggaagcccatgttgtactgaacttcccggagcaaagagactgtctggacgtgatcttcctccgtctcaccacaaaagccagcaatgaaatcgctgctgaggctcacacctggaatagattctctaatatggtgaactaactccacataagcttctcttgaatatcccctccgcatggcctccaacacacggctgcttccactctgggctggcaggtggatctgtttacagatgttatctctctcatgaatcagctgcagaacctcatcaggaaaatccttggggtggggagaggtaaaacggatcctcatttcaggatctactctggagacctgatccagaagatgagcaaaacgaagtcctccttgcttggttttatagttggtggtaaagccacgactgagattggtaggcactgcactgttgaactggacctccgaattgtcccgaaaactattaacattctgaccaagaagtgtcacttctttcagcccctgtaatcccaacactttgggaggccgaggtgggaggaacacctgctcagaaagcttcttcacttcctctagaatggaggcaataggccgactcctctccctgccccgggtgaaaggaacaatgcagtagctacacatgttgtcacagcctcgcatgattgacacaaaggcagacgtggcactggcgcttgtctggactggcatgacatcagcataggtctcgtccagagagagcagcacgttggcagcttgctggcccgactcagcaacagccagcagccggggaaggtcccggtaggcatcaggaccagccaaaatatctaccattttctctctgttgagaatctcctccttcaacctctcagccatgcagcctagaattccaatcctcagaggaacccgggagcggggccgccttgtcttcaaggctttaagctgatgtaaacggttccagatggtctgctcagccttctccctgatagagcatgtgacaaggagaatcacatctgctcttgaggttactggtcgcaggtagccactcttctgtaagatggaccaggctatctctgtgtcattcacattcatctggcagccataggtctcgaggtagacttttctctgccttccaagaagttcatccatcatgagatagggaggtgggtcttccacttctgaagacagcttctcctgaggagctgaggcactttttaaaaaatgttgaaaagtcggtccagcagccagcctggagctgaaatccttccgagctccatcctcctgcctctctggactgggacacat

SEQ ID NO: 72945 - DNA, 4114 bp, Homo sapiens; identical to SEQ ID NO: 65751
  misc_feature (1)...(4114): n = a,t,c or g

SEQ ID NO: 72946 - DNA, 339 bp, Homo sapiens; identical to SEQ ID NO: 64966

SEQ ID NO: 72947 - DNA, 5059 bp, Homo sapiens
ggcggcggcgagccggtgccctgggatcatggtggcgttgcggggccttggtagcggcctgcagccctggtgtccgctggatcttagactcgaatgggttgacacagtgtgggaactggatttcacagagactgagcctttggatcccagcatagaagcagagatcatagagactggattggctgcattcacaaaactctatgaaagccttttaccctttgctactggagaacatggatctatggagagtatctggaccttcttcattgagaacaatgtttcccatagtacactggtggcattgttctatcattttgttcaaatagttcataagaagaatgtcagtgtacagtatcgagaatatggccttcatgccgctgggctttactttttgctactagaagtaccaggcagtgtagccaatcaagtattccacccagtgatgtttgacaaatgcattcagactctaaagaagagctggccccaggaatctaacttgaatcggaaaagaaagaaagaacagcctaagagctctcaggctaaccccgggaggcatagaaaaaggggaaagccacccaggagagaagatattgagatggatgaaattatagaagaacaagaagatgagaatatttgtttttctgcccgggacctttctcaaattcgaaatgccatctttcaccttttaaagaattttttaaggcttctgccaaagttttccttgaaagaaaagccacaatgtgtacagaattgtatagaggtctttgtttcattaactaattttgagccagttcttcatgaatgtcatgttacacaagccagagctcttaaccaagcaaaatacataccagaactggcttattatggattgtatttgctgtgctctcccattcatggagaaggagataaggtcatcagttgtgttttccatcaaatgctcagtgtaatattaatgttagaagttggtgaaggatcccatcgtgccccccttgctgttacctcccaagtcatcaactgtagaaaccaggcggtccagtttatcagcgcccttgtggatgaattaaaggagagtatattcccagtcgtccgtatcttactgcagcacatctgtgccaaggtggtagataaatcagagtatcgtacttttgcagcccagtccctagtccagctgctcagtaaacttccttgtggggaatacgctatgttcattgcctggctttacaaatactcccgaagttccaagatcccacaccgggtttttactcttgatgttgtcttagctctgttagaactgcctgaaagagaggtggataacaccctctccttggagcatcagaagttcttaaagcataagttcctggtgcaggaaattatgtttgatcgttgcttagacaaggcgcctactgtccgcagcaaggcactgtccagctttgcacactgtctggagttgactgttaccagtgcgtcggagagtatcctggagctcctgattaacagtcctacgttttctgtaatagagagtcaccctggtaccttactgagaaattcatcagctttttcctaccaaaggcagacatctaaccgttccgaaccctcaggggagatcaacatagacagcagtggtgaaacagttggatctggagaaagatgtgtcatggcaatgctgagaaggaggatcagggatgagaagaccaacgttaggaagtctgcactgcaggtattagtgagtattttgaaacactgtgatgtctcaggcatgaaggaagacctgtggattctgcaggaccagtgtcgggaccctgcagtgtctgtccggaagcaggccctccagtctcttactgaactccttatggctcagcctagatgcgtgcagatccagaaagcctggttgcggggggtggtcccggtggtgatggactgcgagagcactgtgcaggagaaggccctggagttcctggaccagctgctgctgcagaacatccggcatcacagtcattttcactctggggacgacagccaggtcctcgcctgggcgcttcttactctcctcaccaccgaaagccaggaactgagccgatatttaaataaggcttttcatatctggtccaagaaagaaaaattctcacccacttttataaacaatgtaatatctcacactggcacggaacattcggcacctgcctggatgctgctctccaagattgctggctcctcacccaggctggactacagcagaataatacaatcttgggagaaaatcagcagtcagcagaatcccaattcaaacaccttaggacatattctctgtgtgattgggcatattgcaaagcatcttcctaagagcacccgggacaaagtgactgatgctgtcaagtgtaagctgaatgggatttcagtgggtctctaggaggtgatcagttcagctgttgacgccttgcagaggctttgtagagcatctgcagagacaccagcagaggagcaggaattgctgacgcaggtgtgtggggatgtactctccacctgcgagcaccgcctctccaacatcgttctcaaggagaatggaacagggaatatggacgaagacctgttggtgaagtacatttttaccttaggggatatagcccagctgtgtccagccagggtggagaagcgcatcttccttctgattcagtccgtcctggcttcgtctgctgatgctgaccactcaccatcatctcaaggcagcagtgaggccccagcgtctcagccacccccccaggtcagaggttctgtcatgccctctgtgattagagcacatgccatcattaccttaggtaagctgtgcttacagcacgaggatctggcaaagaagagcatcccagccctggtgcgagagctcgaggtgtgtgaggacgtggctgtccgcaacaacgtcatcattgtaatgtgcgatctctgcattcgctacaccatcatggtggacaagtatattcccaacatctccatgtgtctgaaggattccgacccattcatccggaagcagacactcatcttgcttaccaatctcttgcaggaggaatttgtgaaatggaagggctccctgttcttccgatttgtcagcactctgatcgattcacacccagacattgccagcttcggggagttttgcctggctcacctgttactgaagaggaaccctgtcatgttcttccaacacttcattgaatgtatttttcactttaataactatgagaagcatgagaagtacaacaagttcccccagtcagagagagagaagcggctgttttcattgaagggaaagtcaaacaaagagagacgaatgaaaatctacaaatttcttctagagcacttcacagatgaacagcgattcaacatcacttccaaaatctgccttagtattttggcgtgctttgctgatggcatcctacccctggacctggacgccagtgagttactctcagacacgtttgaggtcctcagctcaaaggagatcaagcttttggcaatgagatctaaaccagacaaagacctccttatggaagaagatgacatggccttggcaaatgtagtcatgcaggaagctcagaagaagctcatctcacaagttcagaagaggaatttcatagaaaatattattccaattatcatctccctgaagactgtgctggagaaaaataagatcccagctttgcgggaactcatgcactatctcagggaggtgatgcaggattaccgagatgagctcaaggacttctttgcagttgacaaacagctggcatcagagcttgagtatgacatgaagaagtaccaggaacagctggtccaggagcaggagctagcaaaacatgcagatgtggccgggacggctggaggtgctgaggtggcacctgtggcacaggttgccctgtgtttagaaacagtgccagttcctgctggccaagaaaaccctgccatgtcacctgccgtgagccagccctgcacacccagggcaagtgctggccatgtagcagtatcatctcctacacctgaaacagggccattgcagaggttgctgcccaaagccaggcccatgtccctgagcaccattgcaatcctgaattctgtcaagaaagccgtggagtcaaagagcaggcatcggagtcggagcttaggagtgctgcctttcactttaaattctggaagcccagaaaaaacgtgcagtcaggtgtcttcatacagtttggagcaagagtcgaatggcgagattgagcacgtgaccaagcgggccatcagcacccccgagaagagcatcagtgatgtcacgtttggagcaggggtcagttacatcgggacaccacggactccgtcgtcagccaaagagaaaattgaaggccggagtcaaggaaatgacatcttatgtttatcactgcctgataaaccgcccccacagcctcagcagtggaatgtgcggtctcccgccaggaataaagacactccagcctgcagcaggaggtccctccgaaagacccctctgaaaaacagccaactaaaacagcggctccccaccagtgtccaggcaggcaggagcccttgaggaagcagtctcgtgtcctccgtgtgaaggccagctggatcacttcccgcagtccctggggcagcgctttgctgtggaacacgagagctccctccctcaggggcccggcactcaccttctattctgttatgatgtatttggttaaacactgttcaaataatagagatgtgcccagatttagattttccttaccctaatctgtttaatattgtaactttattccatttgaaagtgtcaagccccattccagataagcctataatctggtcctttaagggaacacaactttaaaactgcagctttcttttatataaatcaaggcctctgttaacttgaattccttatagtacatattttcccatctgtaatgacgaaattttgattctaatattttttctattatttataagggcaaattttttaaaaaaagtgtacagcttttctaaaagtaataaaggtttagcataaatacagccaaaaaaaaaa

SEQ ID NO: 72948 - DNA, 1964 bp, Homo sapiens; identical to SEQ ID NO: 64968

SEQ ID NO: 72949 - DNA, 1191 bp, Homo sapiens; identical to SEQ ID NO: 64969

SEQ ID NO: 72950 - DNA, 360 bp, Homo sapiens; identical to SEQ ID NO: 64970

SEQ ID NO: 72951 - DNA, 380 bp, Homo sapiens; identical to SEQ ID NO: 64971

SEQ ID NO: 72952 - DNA, 927 bp, Homo sapiens; identical to SEQ ID NO: 64972

SEQ ID NO: 72953 - DNA, 374 bp, Homo sapiens; identical to SEQ ID NO: 35811

SEQ ID NO: 72954 - DNA, 428 bp, Homo sapiens; identical to SEQ ID NO: 64975

SEQ ID NO: 72955 - DNA, 986 bp, Homo sapiens; identical to SEQ ID NO: 64976

SEQ ID NO: 72956 - DNA, 1364 bp, Homo sapiens; identical to SEQ ID NO: 64977

SEQ ID NO: 72957 - DNA, 2388 bp, Homo sapiens; identical to SEQ ID NO: 64978

SEQ ID NO: 72958 - DNA, 1773 bp, Homo sapiens; identical to SEQ ID NO: 64980

SEQ ID NO: 72959 - DNA, 333 bp, Homo sapiens; identical to SEQ ID NO: 64981

SEQ ID NO: 72960 - DNA, 2145 bp, Homo sapiens; identical to SEQ ID NO: 64982

SEQ ID NO: 72961 - DNA, 369 bp, Homo sapiens; identical to SEQ ID NO: 64983
  misc_feature (1)...(369): n = a,t,c or g

SEQ ID NO: 72962 - DNA, 2734 bp, Homo sapiens
cagttaataatcaactgtacctaattgggcattcacttgtggacctcttttctgccaactaaagaaaaattgagctgctttactcctctgccttcccacccagaaaccgtgtcagcatggttgcctggctacctgctcatgaaggacttgattaatagcaaattggcaatttaacgagccacttccatgatctccaaagaaaccaaaatacaaacacaatatttaatcttgccaaccgaagacgatgtgactgcatgaagtgcccttcgttttaaaagaaagattattggattaaaagatgagttttacaaccgctacataatgaaaagttttttgtttgaaccagtagtgaaagcatttctcaacaatggatcccgctacaatctgatgaactctgccataatagagatgtttgaatttattagagtggaagatataaaatcattaactgctcatgtaattgaaaattactggaaagcactggaagatgtagattatgtacagacatttaaaggattaaaactgagatttgaacaacaaagagaaaggcaagataatcccaaacttgacagtatgcgttccattttgaggaatcacagatatcgaagagatgccagaacactagaagatgaagaagagatgtggtttaacacagatgaagatgacatggaagatggagaagctgtagtgtctccatctgacaaaactaaaaatgatgatgatattatggatccaataagtaaattcatggaaaggaagaaattaaaagaaagtgaggaaaaggaagtgcttctgaaaacaaacctttctggacggcagagcccaagtttcaagctttccctgtccagtggaacgaagactaacctcaccagccagtcatctacaacaaatctgcctggttctccgggatcacctggatccccaggatctccaggctctcctggatccgtacctaaaaatacatctcagacggcagctattactacaaagggaggcctcgtgggtctggtagattatcctgatgatgatgaagatgatgatgaggatgaagataaggaagatacgttaccattgtcaaagaaagcaaaatttgattcataataatggcaacggcctaggatcagtacctgttgaaaaaaactggttctccacccctcccccatacaaaatccacaacaaagcgcagtggtctcttgtgaatgactgacacagatcagcctcttacacttgacttctgctcatcaagtgccaattcaatggagcaggaggaggggatatcatatatttaggggaaagacttaagcctttgagctctccagcttggaccacacattgcccttttctcagggaaggaaatggaaacaaaaagccaacagggcaggggttttgtaagtggaactctggattgactggtcagttgctacaatcagaatatgctttcttggaccatgtttgagactcagaagaatgggcctttctgccataattcttcactagtcaagaatgccagcagtttctttgtataaagagacctgcctttaaaatcatacattctgaacattttagtcaagctacaacaggtttggaaaacctctgtgggggaggggcgagtataaagttttcctcttttttaactgttccctttgcccttcaaactgcagatatttttttttttaaggggggacttctccctacttgattaaagattgagtggaattctagatgtggtcatttgtgtcataatttttttgttttattttgtttttgattttttttttcctcccctgagtgtatgcttagttgttgagtatatatatttgggaccattaaaactttttttgatgtaatataacctaacgttgtgctggtacctgttttaccatgtgtaatttttgttctacatcacagttcttaatttgtttagagttttatgaaagatggtatagtttttattgacaaaagcaaagtaatcttacaactatgtgcatacaaaagcaatacctattttgtgactaaatattttatattaaaatttacatcagcaactgtcttgagaattcagggaaatagaatggaatttaaaacttcaacagttttgttaaatctagaaacatgaaattagtattccaaagagattctgaaatttcttttcttggggaaatgacgggtacattaaatcaaaattgaggatggatgatttaaaaacattttgactttttaataataaaaagaaaagtgaagagtaagagaaattgtattagttgtatgtttcttgtttttgtttttaactactccctttggaataccagtttgacttgtaagtggtggtttctaaataaatacctggccagaggaccatcacctgtcaccttattaaaacagtatttttaaataggttctttttgttgtcttagatgtgatcaaattatttcaaggaaaatgaaaataattctacttaccctcactttttaaagtgaagagtttagaccttaagaatatattttcaaatgtgaataaaacttcatatccaggaaaggatgctattttaagtatcatatactttaagagtatctagcaagcgctgtgtgcttctctgtcttgtcttgtttattcctcagtaaattacaatggtggtaccaaaaacaagactatactgcatagttggatagaaaaccagaaagtgtcaacttgctccagtcattaaaagttttattattggctgataaaaaaaaaa

SEQ ID NO: 72963 - DNA, 298 bp, Homo sapiens; identical to SEQ ID NO: 64985

SEQ ID NO: 72964 - DNA, 325 bp, Homo sapiens; identical to SEQ ID NO: 64986

SEQ ID NO: 72965 - DNA, 1028 bp, Homo sapiens
gtggcggaattcggagaccccattctataccaacacctattctgatttttcggtcaccctgaagtttatattcttatcctaccaggcttcggaataatctcccatattgtaacttactactccggaaaaaaagaaccatttggatacataggtatggtctgagctatgatatcaattggcttcctagggtttatcgtgtgagcacaccatatatttacagtaggaatagacgtagacacacgagcatatttcacctccgctaccataatcatcgctatccccaccggcgtcaaagtatttagctgactcgccacactccacggaagcaatatgaaatgatctgctgcagtgctctgagccctaggattcatctttcttttcaccgtaggtggcctgactggcattgtattagcaaactcatcactagacatcgtactacacgacacgtactacgttgtagctcacttccactatgtcctatcaataggagctgtatttgccatcataggaggcttcattcactgatttcccctattctcaggctacaccctagaccaaacctacgccaaaatccatttcactatcatattcatcggcgtaaatctaactttcttcccacaacactttctcggcctatccggaatgccccgacgttactcggactaccccgatgcatacaccacatgaaacatcctatcatctgtaggctcattcatttctctaacagcagtaatattaataattttcatgatttgagaagccttcgcttcgaagcgaaaagtcctaatagtagaagaaccctccataaacctggagtgactatatggatgccccccaccctaccacacattcgaagaacccgtatacataaaatctagacaaaaaaggaaggaatcgaaccccccaaagctggtttcaagccaaccccatggcctccatgactttttcaaaaaaaaaaaaaagagggaggcccgctctagagattccttcgagggcctccaacttacgcgtggtggcaaatattagtt

SEQ ID NO: 72966 - DNA, 304 bp, Homo sapiens; identical to SEQ ID NO: 64988

SEQ ID NO: 72967 - DNA, 335 bp, Homo sapiens; identical to SEQ ID NO: 64989

SEQ ID NO: 72968 - DNA, 1221 bp, Homo sapiens
ttttttttttttggtatttctggatggtttaatcatgaatggcggtaggcagtgtaagaaaaaagttcctagagcatgataaaccttggtttctggcacaggataaacctttcatttcatggtgtacatttcacaatattaaaaaaaccccagcctggttttcatgattaaagccgtggggaaaggacaatgtttccagggagcaacgactcgcaagcacaccccctggggctgtgcggtggccgtcggcggggccagcttcaaagtccaacccacaaggcacaggttttcaaatctttacctctgtgtacaagaacgtacatgaactttaaaaacgtgtgtttcctcgtctgtgtttaacaccctaacgatgatcagtttgggggagacgtacccctccctaatcacaggtaggaccacttcccaaatcaatgaaacgaccgtcctcttttgtgtcttgacttcaggtgtccggccgaacgacggagtcttttcctttcttgtcgatgcagtttctcagcctcctgttgcttcttctgctgttcagacctctttaacgtgaatgtcaattgtttgctgccaacggtggtgtcggatacactcaatgtcccattttttgcttcaattttcaaacgatcttcaagggttttgttcatcagtttctgctttgtggcagaatctttgaagcttctaaattcttctcctgctttgatctcataaaactggggctttaggactgtctgctggtcctccttgagtcgttcctgccgcttcactttttcctcctgctggaggagtctgcgttgcttcctgacctcttcaacccaggctttttcatcatctgaactctccgaactttctgcatcacttggttttccttccggctcttcctcctcttctttttcacgaagttcttgttgctctaagagtcttagtttcttcttccttttttcactaatttttgaaacaagtggattcagaagcctaaattcttcactctcttcatctacttggaagtcagggttctcaaacataactttaaatcgatcatcggtgagaatattaggaagactcttaactttctttttccatgtagatttctgcttctcctcttcttcctcaattaatttaagtgccagctctttgttaacttttggcaatttctttaactggactctctgtgcacgtgtttcttctatgttgcgtggtagcgtatctatg

SEQ ID NO: 72969 - DNA, 360 bp, Homo sapiens; identical to SEQ ID NO: 64991

SEQ ID NO: 72970 - DNA, 335 bp, Homo sapiens; identical to SEQ ID NO: 64992

SEQ ID NO: 72971 - DNA, 767 bp, Homo sapiens; identical to SEQ ID NO: 64993

SEQ ID NO: 72972 - DNA, 334 bp, Homo sapiens; identical to SEQ ID NO: 64994

SEQ ID NO: 72973 - DNA, 340 bp, Homo sapiens; identical to SEQ ID NO: 64995

SEQ ID NO: 72974 - DNA, 1420 bp, Homo sapiens; identical to SEQ ID NO: 64996

SEQ ID NO: 72975 - DNA, 1924 bp, Homo sapiens; identical to SEQ ID NO: 64997

SEQ ID NO: 72976 - DNA, 565 bp, Homo sapiens; identical to SEQ ID NO: 64998
  misc_feature (1)...(565): n = a,t,c or g

SEQ ID NO: 72977 - DNA, 1209 bp, Homo sapiens; identical to SEQ ID NO: 64999

SEQ ID NO: 72978 - DNA, 1523 bp, Homo sapiens; identical to SEQ ID NO: 65000

SEQ ID NO: 72979 - DNA, 410 bp, Homo sapiens; identical to SEQ ID NO: 65001

SEQ ID NO: 72980 - DNA, 1171 bp, Homo sapiens; identical to SEQ ID NO: 65002

SEQ ID NO: 72981 - DNA, 1167 bp, Homo sapiens; identical to SEQ ID NO: 65003

SEQ ID NO: 72982 - DNA, 352 bp, Homo sapiens; identical to SEQ ID NO: 65004

SEQ ID NO: 72983 - DNA, 1634 bp, Homo sapiens; identical to SEQ ID NO: 65005

SEQ ID NO: 72984 - DNA, 1468 bp, Homo sapiens; identical to SEQ ID NO: 65006

SEQ ID NO: 72985 - DNA, 2395 bp, Homo sapiens; identical to SEQ ID NO: 65007

SEQ ID NO: 72986 - DNA, 1774 bp, Homo sapiens
cggacgcgtgggcggacgcgcgggcgaggaactagaggcggaggcgggggcggaggaactggagcaggcggcagaggggaaggaagtcaggttccaggcctctctgccgctgaccaggatcgatgaggaagaggctgctgcagccccggaggccgagacagagcgggtggagggggaggaataggacaaggaggagacgcagagagacggcgcggagagcaaggagagggatggggaaggacgcccggccaaaagccaggaagaggggaagcgcctctatggaagggacgagtttgaggacctcgagtggtccgaggaggtccagaagctgcaggagcagcagctgcgcagcgacctcctggaccagtaccgttccctgctggtggagcggaaccgctcccagcgctacaacctatacctgcagcacaagatcttcgaggcgctgcgcaaaaagaagggcctggaggccgctgaggtggctgaccggggcgcagaggccgaggcccccgagaaagagcaagcgtacctgcgccatctgggcatgctggaggagctgaagaagcagcaggcagacgacctgcagtggtaccaccaggagctgggccagttgaagcggcagtgccaggagaagctcaccagggtggagaaggagtggcgacgcttccaggcactcaagaagcaggtggtgatgcaggccatgggcagctgtcggatgaggggcgggcgccaggctgctctgcgagaggtggagcagatccaggcgttggaggataaaaaggagaaggagatgagcgccgtgcggctggagaacattcagctgaagcagagcctggtgcattttgaaaccaggatgaggacccaggaggacctgacccagggtctgcttcttattgactttgaacagctgaagattgagaaccaaaccttcaatgagaaaattgaggaacgaaatgaggaacttttaaaacttcgcagcaaggtgaccaacagtgtgcaagtaataacccacgtgaaggaaaagctgcacttcatggacatggagaacgcgtgcaaaaagacacagctggcagaaatcgaggcccaggccgccctaggaagagacatcctgaccaagacgaagcaagcccgagaggggctgcggacggacaacatcagactgaatcagaagtgcggccttctaggcaaggactcacttcttcgggacttggaagaaaaggtggacaagaccgaactgcttcaccggcgcctggaatccctgaagcgccaccacgctagcctcactttgtcctgcagaggcgtgaggcagaagatcagggaggccaaagcctttctcccttcttgaccagatcgatgagaagagtctgcaaaacacttcatcctcaggacgtgctgtcctgctttattttaccttcgttgctatttaaaaaggcctgtgttcatttggggacgggactcttatttttgtatttattcttcaaaacgttttagcttccaaatcagtgctgagccccaacccccgggttaggagttttatcctgggattgagcaaaaataggtcccagaaaagcaaacaaagggtgatttaatgtaactgacttctcatgaaaaactgtcaaaagtctcaagtctgagcaattctataatttcagtgatgtaatactaaagagtactgttcctctttcatatgtaggagggtttaaaagttcagcgaatgggcaaggtacaaaaaaaccctgtgcattaagctaattattaaattctttggatttattaa

SEQ ID NO: 72987 - DNA, 1594 bp, Homo sapiens; identical to SEQ ID NO: 65009

SEQ ID NO: 72988 - DNA, 628 bp, Homo sapiens; identical to SEQ ID NO: 65010

SEQ ID NO: 72989 - DNA, 1088 bp, Homo sapiens; identical to SEQ ID NO: 65011

SEQ ID NO: 72990 - DNA, 1733 bp, Homo sapiens
aggagctggagagctacacaggagtggggaggaggaggagccacgcgttccagtatatgctttaatcaagtggtcccttatatcaaacccagattgttctctgaaatccagggaggtgaagtgacttgcttagggtcattctgtaagctagtatagcacagaatgggtttcccttccctgatcctagcagttgtaggctgcaatgctgttccgtatcaggaactgcccaaggttgaaacagttcagccctgaagggcctagttatggtgaaagcagcaactgactccaggaaaggaatggcattttgttctgtaacatagccatgttgttcaaccctacaggaggtgttaaatcactctgaccatcaccctatcctttttctttcaaacctggttgagggaacctacacttttcacctgaaagtgaccgatgcaaagggtgagagtgacacagaccggaccactgtggaggtgaaacctgatcccaggaaaaacaacctggtggagatcatcttggatatcaacgtcagtcagctaactgagaggctgaaggggatgttcatccgccagattggggtcctcctgggggtgctggattccgacatcattgtgcaaaagattcagccgtacacggagcagagcaccaaaatggtattttttgttcaaaacgagcctccccaccagatcttcaaaggccatgaggtggcagcgatgctcaagagtgagctgcggaagcaaaaggcagactttttgatattcagagccttggaagtcaacactgtcacatgtcagctgaactgttccgaccatggccactgtgactcgttcaccaaacgctgtatctgtgaccctttttggatggagaatttcatcaaggtgcagctgagggatggagacagcaactgtgagtggagcgtgttatatgttatcattgctacctttgtcattgttgttgccttgggaatcctgtcttggactgtgatctgttgttgtaagaggcaaaaaggaaaacccaagaggaaaagcaagtacaagatcctggatgccacggatcaggaaagcctggagctgaagccaacctcccgagcaggcatcaaacagaaaggccttttgctaagtagcagcctgatgcactccgagtcagagctggacagcgacgatgccatctttacatggccagaccgagagaagggcaaactcctgcatggtcagaatggctctgtacccaacgggcagacccctctgaaggccaggagcccgcgggaggagatcctgtagccacctggtctgtctcctcagggcagggcccagcacactgcccggccagtcctcctacctcccgagtctgcgggcagctgctgtcccagcatctgctggtcatttcgccctgacagtcccaaccagaacccctgggacttgaatccagagacgtcctccaggaacccctcaacgaagctgtgaatgaagaggtttcctctttaaacctgtctggtgggcccccagatatcctcacctcagggcctcctttttttgcaaactcctcccctcccccgagggcagacccagccagctgctaagctctgcagctccccagtggacagtgtcattgtgcccagagtgctgcaaggtgaggcctgctgtggttgcccgcacacctgagtgcaaaaccaagcactgtgggcatggtgtttccctctctggggtagagtacgccctctcgctgggcaaagagga

SEQ ID NO: 72991 - DNA, 1968 bp, Homo sapiens; identical to SEQ ID NO: 65013

SEQ ID NO: 72992 - DNA, 5214 bp, Homo sapiens; identical to SEQ ID NO: 65014

SEQ ID NO: 72993 - DNA, 1821 bp, Homo sapiens; identical to SEQ ID NO: 65015

SEQ ID NO: 72994 - DNA, 2507 bp, Homo sapiens; identical to SEQ ID NO: 65016

SEQ ID NO: 72995 - DNA, 1171 bp, Homo sapiens; identical to SEQ ID NO: 65017

SEQ ID NO: 72996 - DNA, 1287 bp, Homo sapiens; identical to SEQ ID NO: 65018

SEQ ID NO: 72997 - DNA, 2055 bp, Homo sapiens; identical to SEQ ID NO: 65019
  misc_feature (1)...(2055): n = a,t,c or g

SEQ ID NO: 72998 - DNA, 3211 bp, Homo sapiens; identical to SEQ ID NO: 65020

SEQ ID NO: 72999 - DNA, 2531 bp, Homo sapiens; identical to SEQ ID NO: 65021

SEQ ID NO: 73000 - DNA, 2778 bp, Homo sapiens; identical to SEQ ID NO: 65022

SEQ ID NO: 73001 - DNA, 1671 bp, Homo sapiens; identical to SEQ ID NO: 65023

SEQ ID NO: 73002 - DNA, 890 bp, Homo sapiens; identical to SEQ ID NO: 65024

SEQ ID NO: 73003 - DNA, 403 bp, Homo sapiens; identical to SEQ ID NO: 65025
  misc_feature (1)...(403): n = a,t,c or g

SEQ ID NO: 73004 - DNA, 3202 bp, Homo sapiens; identical to SEQ ID NO: 65026

SEQ ID NO: 73005 - DNA, 833 bp, Homo sapiens; identical to SEQ ID NO: 65027

SEQ ID NO: 73006 - DNA, 1456 bp, Homo sapiens; identical to SEQ ID NO: 65028

SEQ ID NO: 73007 - DNA, 1269 bp, Homo sapiens; identical to SEQ ID NO: 65029

SEQ ID NO: 73008 - DNA, 1449 bp, Homo sapiens; identical to SEQ ID NO: 65030

SEQ ID NO: 73009 - DNA, 1550 bp, Homo sapiens; identical to SEQ ID NO: 65031

SEQ ID NO: 73010 - DNA, 638 bp, Homo sapiens; identical to SEQ ID NO: 65032

SEQ ID NO: 73011 - DNA, 2057 bp, Homo sapiens; identical to SEQ ID NO: 65033

SEQ ID NO: 73012 - DNA, 442 bp, Homo sapiens; identical to SEQ ID NO: 65034
  misc_feature (1)...(442): n = a,t,c or g

SEQ ID NO: 73013 - DNA, 844 bp, Homo sapiens
tgcattgctagtcagtttggggcaacattctttatcatctctgcttcatcgttaacttctaaatgggtaggtgagggggagaaaatggtccgtgcattgtttgctgttgcaaggtgtcagcaaccagctgtgatatttattgacgaaattgattccttgttatctcaacggggagatggtgagcatgaatcttctagaaggataaaaacagaatttttagttcaattagatggagcaacaacatcttctgaagatcgtatcctagtggtgggagcaacaaatcggccacaagaaattgatgaggctgcccggagaagattggtgaaaaggctttatattcccctcccagaagcttcagccaggaaacagatagtaattaatctaatgtccaaagagcagtgttgcctcagtgaagaagaaattgaacagattgtacagcagtctgatgcgttttcaggagcagacatgacacagctttgcagggaggcttctcttggtcctattcgcagtttacaaactgctgacattgctaccataacaccggatcaagttcgacccatagcttacattgattttgaaaatgcttttataactgtgcgacctatagtttctccaaaagatttatagctttatgaaaactggaacaaaactttatgttgtggaaagtaagtgggatacttgtaatcaaggcatctctgtattcagtcttctttattttttagcatataaagtttgggtgtgttaatatgatttttaagactatcttctaaatactgtacttgaccatatatcacagattttacatctgattgacatagtgtatgttaacgtacgttaggcatcg

SEQ ID NO: 73014 - DNA, 1018 bp, Homo sapiens; identical to SEQ ID NO: 65036

SEQ ID NO: 73015 - DNA, 474 bp, Homo sapiens; identical to SEQ ID NO: 65037

SEQ ID NO: 73016 - DNA, 2263 bp, Homo sapiens; identical to SEQ ID NO: 65038

SEQ ID NO: 73017 - DNA, 581 bp, Homo sapiens; identical to SEQ ID NO: 65039

SEQ ID NO: 73018 - DNA, 1275 bp, Homo sapiens; identical to SEQ ID NO: 65040

SEQ ID NO: 73019 - DNA, 569 bp, Homo sapiens; identical to SEQ ID NO: 65041

SEQ ID NO: 73020 - DNA, 602 bp, Homo sapiens; identical to SEQ ID NO: 65043

SEQ ID NO: 73021 - DNA, 1672 bp, Homo sapiens; identical to SEQ ID NO: 65044

SEQ ID NO: 73022 - DNA, 2288 bp, Homo sapiens; identical to SEQ ID NO: 65045

SEQ ID NO: 73023 - DNA, 551 bp, Homo sapiens; identical to SEQ ID NO: 65046

SEQ ID NO: 73024 - DNA, 1832 bp, Homo sapiens; identical to SEQ ID NO: 65047

SEQ ID NO: 73025 - DNA, 353 bp, Homo sapiens; identical to SEQ ID NO: 65048

SEQ ID NO: 73026 - DNA, 1453 bp, Homo sapiens; identical to SEQ ID NO: 65049

SEQ ID NO: 73027 - DNA, 1255 bp, Homo sapiens; identical to SEQ ID NO: 65050

SEQ ID NO: 73028 - DNA, 1131 bp, Homo sapiens; identical to SEQ ID NO: 65051

SEQ ID NO: 73029 - DNA, 1382 bp, Homo sapiens
cggacgcgtgggcaaattaatgacacaattcgaatgatagatgcgtatactcatcttgaaactttctataatgaagagaaagataagaagtttgcagtcatagaagatgatagtgatgagggtggtgatgatgagtattgtgatggtgatgaacatgaggatgattttaagaaacctttgaaactggatgaaacagatacgatttctcatgactttattttttgaaaacaataaaatagttgaataggctggctgaacacccctaatatgaaaatgaaaagctgaccaaattaagaaataccataatggagcaatatactaggactgaggaatcagcacgaggaataatctttacaaaaacacgacagagtgcatatgcgctttcccagtggattactgaaaatgaaaaatttgctgaagtaggagtcaaagcccaccatctgattggagctggacacagcagtgagttcaaacccatgacacagaatgaacaaaaagaagtcattagtaaatttcgcactggaaaaataaatctgcttatcgctaccacagtggcagaagaaggtctggatattaaagaatgtaacattgttatccgttatggtctcgtcaccaatgaaatagccatggtccaggcccgtggtcgagccagagctgatgagagcacctacgtcctggttgctcacagtggttcaggagttatcgaacatgagacagttaatgatttccgagagaagatgatgtataaagctatacattgtgttcaaaatatgaaaccagaggagtatgctcataagattttggaattacagatgcaaagtataatggaaaagaaaatgaaaaccaagagaaatattgccaagcattacaagaataacccatcactaataactttcctttgcaaaaactgcagtgtgctagcctgttctggggaagatatccatgtaattgagaaaatgcatcacgtcaatatgaccccagaattcaaggaactttacattgtaagagaaaacaaaacactgcaaaagaagtgtgccgactatcaaataaatggtgaaatcatctgcaaatgtggccaggcttggggaacaatgatggtgcacaaaggcttagatttgccttgtctcaaaataaggaattttgtagtggttttcaaaaataattcaacaaagaaacaatacaaaaagtgggtagaattacctatcacatttcccaatcttgactattcagaatgctgtttatttagtgatgaggattagcacttgattgaagattcttttaaaatactatcagttaaacatttaatatgattatgattaatgtattccataatgctacagaactgacataagaatcaataaaatgattgttttactctgaaa

SEQ ID NO: 73030 - DNA, 1093 bp, Homo sapiens; identical to SEQ ID NO: 65052

SEQ ID NO: 73031 - DNA, 2542 bp, Homo sapiens
cttagataacagagttagatccaggtgtgtcctggtgtccttctaggctgagcccctaagacttggtgtgaatggtttgctgctttcctccatacttaattttcctctttgttttcatagataaatatcattcagggaattgtggcagaaatcaacaccaagactggtgaatctgaatgccgctattataaagagcggcttctttacttggaagaaggccagaaagactccctgatcgacagctctcgagtcttgtgttgtcatggtgaactgaagaacaatcggggcgtgaaactgcatgttttcctcttccaagaagtgcttgtgatcactcgagccgtcacccacaatgagcagctttgctaccagctgtaccgtcagccaatccccgtgaaagacctcctgctggaagacctccaggatggagaagtgaggctgggtggctccctgcgaggggcattcagcaacaatgagagaattaaaaacttcttcagagtcagtttcaaaaatggatcccaaagtcagacccactcgctacaagccaatgacactttcaacaaacagcagtggcttaactgtattcgtcaagccaaagaaacagttttgtgtgctgccgggcaagctggggtgcttgactccgagggatcgttcctaaatcccaccaccgggagcagagagctacagggagaaacaaaacttgagcagatggaccaatcggacagtgagtcagactgtagtatggacacgagtgaggtcagcctcgactgtgagcgcatggaacagacagactcttcctgtgggaacagcaggcatggtgaaagtaacgtctgacagaagcatgtgcacttcgggaagcaggcctgcatcttacctgtacagtatttgcattccacagatggaacggtttggagaagcactttttcatacttttgtgaaagtatacatgttggcccagtctctcgtatctgtacctttgtccctagtactgtaactgccaatctgtctgtgtaagctggaatctgtggcaactattaccctgtgttgtatttcccaagtgtctggatggatggagaggtactcaaacaagttactttcagttgtcctgctggattttaaaaaaatagaaaaagaatctcaaaactactgttttacatagattgtttgaagagtccttcctcttgtgcttctgtaccactttcccagctcttagatgtggtagctaaaggcacggaatttagacggccttgtaaatagggcatgaggaactcatctgtgtattgggatggtattagagagagaatcaggaaagaccaactcatgaagtgaacttggtttgatcttactcaactagaaagcttgaaaacatccctggggattctgaaggcttaattttgcaaaggaggatgcattgtctgaactttgcaacttcatccagtgcaagtttgatgcaagaatgtattaggacataaaatagaggctgaccttaaaagggccaggacagaagcggctgccagctctgaatctttaactgaaatgcacatggcaccaggaggtgtctctcatagttggttgctagcctaaaacatcagaatagaacccaaagggcttaggaaggcctgccaggataacaagaaggccctgtattcattgtgtttcatctgcctaggcctactcattattttagagaatgaatgaagcaacaaggaagagagaccatgactctatcgatgacactgtttatagaaacacaggagaggaagaatttggaatgaaaagcacttcgtcagaaccttctgtgggagccattgagagaaaagcatggtccagtgccttctgagaaaggccagagctttgggctttcctgctctgcttttgggtcgtcaatttgccatctctggttctgtgctataatcagaattgtaattatgttctccagaggccaatttcattaactctgattaattagaatcagctagccagattagtaacctctttgtccagccttgatttacagtgcagggtaaagtgcagaccttaaaaacagctaagtacctagaagagctccctgcaagtgtaaatattaaggatgacctgtgcaaaattatacccacaccagcactagtggtaattattctaaattattgccaaaaagttttttttaatctgtctttcaagtttacagaaaagaaagcagtaaatgcattgatgtcattttattatgtacatatatcatgtgcattcaagctgtgtgacaagatatatcaatataaaaacaaggtatatactttattattttttgaaaacaaggatattgtgatcaattttaccctgtaaaacatatttctgtatttataggtcttaaacatgatgaattttttctattacaagcttatttaaaactgctttctcaagtcgttattgatacagcaagtgaacctgctgcagacagaagcagaggaaagccaagaacagcctttactggtgaagaaaagaatgaatgattctttgtaggcgccatcagccacttttagaagccatcaac

SEQ ID NO: 73032 - DNA, 1918 bp, Homo sapiens; identical to SEQ ID NO: 65054
  misc_feature (1)...(1918): n = a,t,c or g

SEQ ID NO: 73033 - DNA, 1846 bp, Homo sapiens; identical to SEQ ID NO: 65055

SEQ ID NO: 73034 - DNA, 1762 bp, Homo sapiens; identical to SEQ ID NO: 65056

SEQ ID NO: 73035 - DNA, 1428 bp, Homo sapiens
tttttttttttttttttttaccggtggagctgtttaagccaaggagttgtggagatctctgtgatgatccaaaatctggactaatataaaatcaactctgatgctaattaaatctgacttataacttgtctgctaaaagaaattataacaggaaactttggtgactggtaaggaatgttgaaaagggaaaatcagaaggaaaaacctggttcataagaaggaaggaaatattggtccaagcacgtcaagggctctaagtaaaaaccgatggcactacaattccacataatccattacatttggaaaaagaagctcctggtagacacagggcctctttgggatattgttctttgttctgattctgtgctcaccaggaaacaaatttcatctccgtagggggcccgtccttcagtaggaatggccctgctcctaggttcttggctcacttgccaagactacaatagcactcgcgtttatcagttatgcttgtgtgaagctggttattgcaattcattgttctcaaaatactttcatgaaaagcctgacctgagaaaaagccttctctgtaatcatattaattagaacataaatgtctactttgccataattatacaaagagcccaaatgggcaattaactccagttggttgcttctctctgagccttacttgccagctcttattaccgcattccagagagagtcaacctggatggagtttgtcccctaaataaatgtagcgataaagaaaagggtgctccaaatcagtttcatcagaatgataaggtacagtactgcagccatgtctgcaatagcacttcaattttacttttttttcccctagcatgtccttaagcattttctccccagcttttcacaatctttcttctaaggctgtaatgtcttacatccttaataggcatgattagatttctcccaaattttccaaattaactttctttcaatgtaaccaaaacaaaaccatggcatacagtaaactaaaagggtagacaggagagaaaggttgctgcaagtacagaaaatttagaaatcagcctttaccagttacatctgagacaaggtaaactttccaacacattggaatcatcagaagggctttaaaaaatacaactgccagccgggcatggtggctcatacctgtaatcctagcactttgggaggccaaggcgggcagattgcctgagctcaggagtttgagaccagcctgggcaacacagtgaaaccctgtctctactaaaaaatacaaaaaattagctgggcgcggcagtgtgtgcctgtagttccagctactcgggaggctgaggcaggagaattgctttaaccccggaggcaaaggtttcaattaacccaaattgggcccctgcactccagcctgggggaaggagtgagattccgtttccaaaaaaaaaa

SEQ ID NO: 73036 - DNA, 983 bp, Homo sapiens; identical to SEQ ID NO: 65058

SEQ ID NO: 73037 - DNA, 3603 bp, Homo sapiens; identical to SEQ ID NO: 65059

SEQ ID NO: 73038 - DNA, 2901 bp, Homo sapiens
acaggcatacagcagaatccagacagagtatatagtagcgaaaaagatgggagaatatgaagaacaaagtctattttaacattaattatggctataataacccttatgaggaaatactggtgagcaggataaagtgatattgaaaagaaaaaaaggaaaactcctcaaaacacaataaagcatattctaacaggtttttgaaaaagttgcaagccttttaattcattgacctcttttgactgattggaatttttaccattctgtacactctgaattataactaaacaactacatgttactgacaaatttgtgattctttgagtctaaacaacacagaaactagaagatccctttcctagatttatatacttgattttcttataaaaataacttcagttattatgtcaatatttatctgaaaaaggcagccctctgacagtaaactagtaactggaataactacagtatcattataagctacaataaaacaacctgtaaagtaatttttcctatttgaataataaatagactggacaggagtgaaaaaccaaaactatgaaagaaaaacccaatgtaaataaaggatacaggtcaaaacaaagttcagaaggcaaatatgtaaatattagatgcctcaaaaatcaactatcagtgggaaaatttctatgaaagcaatttcagaaaatacatgaacacatatatctttaaaatatagaactctaaatacttgataacatatttaggatactctacaatgcccagttaattgctataatttttttccctcaggttttcctggatgatacagcaaactacagaatttgtgcacttactgttgctcaaatttgtgtacttactgtgtgcacatatactgctgcactgtttctcggctgtgaaaaattaaaagcattttttcaacctttgagaaggaaagaaaacaatgaagaatctcctcataataatacagcataacagggtttgtttactgtgccacatcatgggtgtttttaaaacgaaatataaatatatggttagggatagcatttttaggagaacaagtgaccaaaaactaagttacctcttttcaggtcagccaaaaaacgtgaagggaaagtggactttatacaacttagacatttatgtagatagcacagcagactcatgttcaagccagccacctgaaacattataagtccgtcgagggggacagcaatctatggtccatggactgaatccagcctacttttgtatggctctgagctaagaatcgttttaatattttttaaaggttgttaaaagcaaataacaaagaatacatgatgactctattcttgttctcatgtgtgaaccatatattatagcctgcaaagtctaaaatatttataaaccggccctttacagaaaaagtttgcagacccttcttttacaccagtgctgtagataattctggcagtacaactgcaagtctaagataatgttcattcattcccatcataaatgtaacattctaaataggtgtcttctgatgtcatctgtcagaatttcttttaaactttttcttcatcttcaacattatcaaagttcatccttattcctcttgccttgatttcggagagtttccaatttttcacttattaaggcagcgattgcttttgcatctctggtatttatctgctcttcttgaaaatttctctttgctctttcgtagaaataaaacttaacagttggataggccctgatcccagctttctggcatgtctgagcataagcctgacagtctacttttccagctttcacttttcctttaatcatcctagccaagagctcaaattctggagcaaaattctggcaaggtccacaccaaggagcatagaaatcaatcacccaatgatttttcccttgtagaactttttcactgaaagtctgaggtgttagatctgtggatacttgaggtaaaaatcctagaccccagattctcagggaataagcatccctattccaaccattgtaactgtgatactgataagctttatttgattttgggggaaaaaatcttatctcagggtatctttgaacgttttcctgggcacaaaaagaatgatactgttggcaatctatactgcccacgttgatcagtccagttaatgtccgggccattcttttccattctggcattaagacttggcaaggatgacaccacggagaatagaaatcaaccatccagacttcgttgtgttttctttgtgtaactagttcgttgaaggtggtgggtgtaagggagaccactgaaggattcataagatcctctatgaactccaagatttgttcagcagagtgatgtccttcatactcatgaatgttggactggttgaataccactgttgttggataagcctgaatgttatacatgttacagagtccctcatgaactgtacaatctagtgtaccaaacttaagctgaccataaagaagatttgatgctcttcgtaactctggtagtaaagctcgacatggtggacaccagggggcaaagaaatcaacaagccatggttctttgtcattggcaggaaaattttgaggtccaagcgtggtaacatgagaattcacactttctttggcaaaggcaagtatatcatatagaatcttctttccatgatgaatttcatattctttggttccttgtcctttaaatactgctagagacggctgaaaaacatacagattactacagatgtctggtgcagaggaacagtcaaacctgccaacctaaaggagaaaaaggtcaaatttgataaaaacactgtcttacccatttgatttgtaaatattcatgataatccaaaaatggcactgccctaatgacacagtttttaaacagaagctaataggctacgaaaataa

SEQ ID NO: 73039 - DNA, 930 bp, Homo sapiens; identical to SEQ ID NO: 65061

SEQ ID NO: 73040 - DNA, 2722 bp, Homo sapiens; identical to SEQ ID NO: 65062
  misc_feature (1)...(2722): n = a,t,c or g

SEQ ID NO: 73041 - DNA, 1037 bp, Homo sapiens; identical to SEQ ID NO: 65063

SEQ ID NO: 73042 - DNA, 406 bp, Homo sapiens; identical to SEQ ID NO: 65064
  misc_feature (1)...(406): n = a,t,c or g

SEQ ID NO: 73043 - DNA, 567 bp, Homo sapiens; identical to SEQ ID NO: 65066

SEQ ID NO: 73044 - DNA, 1653 bp, Homo sapiens; identical to SEQ ID NO: 65067

SEQ ID NO: 73045 - DNA, 748 bp, Homo sapiens
tttttttgatttataaacatttttaatgactgtgttaaaaaaccatcatacaaaaagaaaagaaagttgttttcaacttaaaaaaaatccttatataatgtaccactcatctgggatatgcttctgggagggggacactccctgcttgggctgcagcagaaggcagtggggagaaagtcttaaagttctgggagtcaggctagcccctcctgcaggtgtcctcattgccacttcttggtccctggggtcaagggttaaaggtgccaaaagacccactgatcgaacctgagactgttgagatgtcctgttcccaacagagagtatctgaactccagaaacttccctctcaggcctccactcccccctcctttgtactgtgcatcctactctgacttccgtggctggggcagatcaaatgtacattctcagtgtcccctggtaacaacctctcccttgcctctgatttgcgaggcacagacaaagctgacaaggccttcttccaggaggctgctctgctttctcctctcctaccccagcttttggctcctggcttctctggaaagccacaggactccaccagcttctctctgccaacagttcagtcttcagggctggagctgcagggtctgcggaattcctgtccatactcatgtatccacttgttggccacccacttatctcccaccaggacaggacagccagcatgaagtgtgtcactgtccccttcaccactcctgtgcaggttcca

SEQ ID NO: 73046 - DNA, 1850 bp, Homo sapiens; identical to SEQ ID NO: 65069

SEQ ID NO: 73047 - DNA, 1790 bp, Homo sapiens; identical to SEQ ID NO: 65070
  misc_feature (1)...(1790): n = a,t,c or g

SEQ ID NO: 73048 - DNA, 641 bp, Homo sapiens; identical to SEQ ID NO: 65071

SEQ ID NO: 73049 - DNA, 970 bp, Homo sapiens
ttttttttttttcccatagttgcttttatttttccctaaaaaaaagagtccattttcttatacagacattcatttatgtaagacccacatcaggctttttctaaagtgccaaaacccgtgcaatccccataacttcaggtgagaattataatgggcagaagaatgtatcaactaaaatactcaaggccatctcaaatcctgaagagtccctggtttctgtgacaagggggaattttgctagcaaataagtaaaatccaggtaaatatgctctaaatcttcatcttcaggttcttaattctttaacatattgtatcagattttgtattcaaatctaattatattttgtaaaaaatgttttaaaaattcctagataaaattttcattcattaattttctattttattctctatacccttctttgtttagtctgtcttcttttctttccacaaattcccaaggacaatccctaaaaaaactattagtcccagtgttcggttggagataaatttattccaacaatcctcaggtctgtggatgtctagagtgtaaatctggtgagtcagatgggctcctacagcacccagggcagcgtagtagggagcagtctgtccactgttcacacccactaggctcagtgcccccagcattgcaacactgaagccgctgagccacggcttggtattttctccgaaccgcagagccgttgacttaagaccaatcaaaacatcatctcttttgtcctgatgggcataaatagtgtcatatattagtgtccacataactccagaaaaataaagaggcaggcaaacagatggatcacaggaacccttgatagcagaccatccaagtaacgctccccaattaaatgtcaagcccaaggctagttgaggccagtatgaaattcttttcattagtgggtaggtgatgacaagaagtaaggatcctgctcccagagctatactgtagttg

SEQ ID NO: 73050 - DNA, 896 bp, Homo sapiens; identical to SEQ ID NO: 65072

SEQ ID NO: 73051 - DNA, 1121 bp, Homo sapiens; identical to SEQ ID NO: 65073

SEQ ID NO: 73052 - DNA, 1245 bp, Homo sapiens; identical to SEQ ID NO: 65074

SEQ ID NO: 73053 - DNA, 1481 bp, Homo sapiens; identical to SEQ ID NO: 65075
  misc_feature (1)...(1481): n = a,t,c or g

SEQ ID NO: 73054 - DNA, 1665 bp, Homo sapiens; identical to SEQ ID NO: 65076

SEQ ID NO: 73055 - DNA, 2478 bp, Homo sapiens; identical to SEQ ID NO: 65077

SEQ ID NO: 73056 - DNA, 2105 bp, Homo sapiens
caggaagaaaaccatgctggcaccatctctgaagcagttttccctacgagtggagattttgccatcctacattccagtgagggtggctgaaaaaaatcctatgtgctggagaatctgtacagacgtctgagactcaaaatgtgaccctgactagaaaaggatccattttgaaaaaccaggaagacgcttttggtgcagagctgctccgtctcaagcagcagccactcttcagcttggtggactttgaacaggtggtggatcgcattcgcagcactgtggctgagcatctctggaagttgatggtagaagaatccgatttactgggtcagctgaagatcattaaagacttttaccttctgggacgtggagaactgtttcaggccttcattgacacagctcaacacatgttgaaaacaccacccactgcagtaactgagcatgatgtgaatgtggcctttcaacagtcagcacacaaggtattgctagatgatgacaaccttctccctctgttgcacttgacaatcgagtatcacggaaaggagcacaaagatgctactcaggcaagagaagggccttctcgggaaacttctccccgggaagcccctgcatctggctgggcagccctaggtctttcctacaaagtacagtggccactacatattctcttcaccccagctgtcctggaaaagtacaatgttgtttttaagtacttactgagtgtgcgccgggtgcaagctgagctgcagcactgctgggccctacaaatgcagcgcaagcacctcaagtcgaaccagactgatgcaatcaagtggcgcctaagaaatcacatggcatttttggtggataatcttcagtactatctccaggtagatgtgttggagtctcagttctcccagctgcttcatcagatcaattctacccgagactttgaaagcatccgattggctcatgaccacttcctgagcaatttgctggctcaatcctttatcctattgaaacctgtgtttcactgcctgaatgaaatcctagatctctgtcacagtttttgttcgctggtcagtcagaacctaggcccactggatgagcgtggagccgcccagctgagcattctcgtgaagggctttagccgccagtcttcactcctgttcaagattctctccagtgttcggaatcatcagatcaactcagatttggctcaactactgttacgactagattataacaaatactatacccaggctggtggaactctgggcagtttcgggatgtgaaaatttctggctcataaattgaaataacagccacgttcccaaggttgtaacagaagattcaaaacatcccattctagccacacacaaataaatatctgcggcttagtgataggactctaccttttctcctagaagcagttactgaacatccaggagtacaactccttcccatcattcccatgtggaagggtctctcccatcaaggagaacatgtggcatctctgatcctttacattgagaacatttgttggatatgttcatttattcaatagtcatttattgagcacctactacgtaccttggtactgttcaagctgtgggagatacagcggtaaacaaacaatatagagcagaaagttaaatattttatggttcatatgtgaaaaagtaattatgtttataaatagactaactgctggatgttaccaccaagtaagaaagcaacaggtaagataggctttctctctccctataccaagtaatttatacctacacagattgggcaattctagctaatgaaaatatacttaaaagtatttcttaggccgggcatggtggctcacacctgtaatcccagcactttgggaggccgaggcgggcggatcacctgaagtcaggagtttgagaccagcctgacccaacatgatgaaacctcgattctactaaaaatacaaaaattagcccaggtgtggtggcatgtgcctgtaatcccagctactcaggaggctgagacaggagaattgcttgaacctgggaagcagacgctgcagtgagctgagattgtgccattgcattccagcctgggcaacaagagcgaaattccgtctcaattag

SEQ ID NO: 73057 - DNA, 551 bp, Homo sapiens; identical to SEQ ID NO: 65079
  misc_feature (1)...(551): n = a,t,c or g

SEQ ID NO: 73058 - DNA, 1216 bp, Homo sapiens; identical to SEQ ID NO: 65080

SEQ ID NO: 73059 - DNA, 799 bp, Homo sapiens
tttttttttttttaatttaataattaattctttttaatacaaagctttgggcattagcaattttatgaaaaaataaaatgtactaaaaataaatgcttgtgtggcatgattggtaaatgatgcacaaaaataggttcttttttccttcaaggcaaaatcagtcagaaagcaggttttttcttcttcaaaaccattctacctcattagcattcaagctagctgtggctctgatgatcatgtagcagagtgtgagggcactgaggaggccaaaactggcaataataaaccattcttttgttactgcaatgttgatttctcctgttctcggagtgagctccccatcctgaggaagaggtgagatccccgaagttcgaagtggctcaaggccaagggagttgtcgccggcgaggtcgccgagggctgatcttcggttaacagcttgggttctggtgagcctttccatatcgaatgctacgttatcagtacatggcaaattcggcacaattcccagggccttcaatatattaagtttgcacataggacaggtacaatgttcactaagccagggatccacgcaggatttgtggaaaacatgcttgcagggagaaattccgacgacatcattctgctatagcctctctatgcagactgcacaatgatcaaagtctgggtcagtttccttgtcacccttctttactgtcctggttgtcaatttactgatggctttcttggctgcatctccgagacgacgctggttcctgtcgcgtgcatttgggtacctgatccttctgatgacgta

SEQ ID NO: 73060 - DNA, 1869 bp, Homo sapiens; identical to SEQ ID NO: 65082

SEQ ID NO: 73061 - DNA, 6147 bp, Homo sapiens; identical to SEQ ID NO: 65083

SEQ ID NO: 73062 - DNA, 698 bp, Homo sapiens; identical to SEQ ID NO: 65084

SEQ ID NO: 73063 - DNA, 1169 bp, Homo sapiens; identical to SEQ ID NO: 65085

SEQ ID NO: 73064 - DNA, 421 bp, Homo sapiens; identical to SEQ ID NO: 65086

SEQ ID NO: 73065 - DNA, 662 bp, Homo sapiens
cccagggccaatttcatgctaaaggaagatgacgatgtctttgtccacgtcccaaacgtgtaggagttctgggatggctgggacccagcccaggacctcttggtgggagatgtcatccgccaagccctgcccaacaggaacactaaggtcaaatacttcatcccaccctcaatgtacagggccacccactacccaccctatgctggtgggggaggatatgtcatgtccagagccacagtgcggcgcctccaggctatcatggaagatgctgaactcttccccattgatgatgtctttgtgggtatgtgcctgaggaggctggggctgagccctatgcaccatgctggcttcaagacatttggaatccggcggcccctggaccccttagacccctgcctgtatagggggctcctgctggttcaccgcctcagccccctcgagatgtggaccatgtgggcactggtgacagatgaggggctcaagtgtgcagctggccccataccccagcgctgaagggtgggttgggcaacagcctgagagtggactcagtgttgattctctatcgtgatgcgaaattgatgcctgctgctctacagaaaatgccaacttggttttttaactcctctcaccctgttagctctgattaagaacactgcaaccca

SEQ ID NO: 73066 - DNA, 1130 bp, Homo sapiens; identical to SEQ ID NO: 65088

SEQ ID NO: 73067 - DNA, 1627 bp, Homo sapiens; identical to SEQ ID NO: 65089

SEQ ID NO: 73068 - DNA, 1579 bp, Homo sapiens; identical to SEQ ID NO: 65090

SEQ ID NO: 73069 - DNA, 467 bp, Homo sapiens; identical to SEQ ID NO: 65091

SEQ ID NO: 73070 - DNA, 1599 bp, Homo sapiens; identical to SEQ ID NO: 65092

SEQ ID NO: 73071 - DNA, 1423 bp, Homo sapiens; identical to SEQ ID NO: 65093

SEQ ID NO: 73072 - DNA, 2081 bp, Homo sapiens; identical to SEQ ID NO: 65094

SEQ ID NO: 73073 - DNA, 1262 bp, Homo sapiens
tttttcagaacacaaatttggcattattttatcaatatatcaagcaatataactgctagatacaatgttcacagcagcattgtttcaacagcaaaaacaaataaacaaaactcaaatgtccatcaagaatgaataagttgtagtatatttatataatactatatagcaataaaaatgaaagaaagtcacagaagtaaacattttgccatttatataaaattcagaaacatacaaaattaacatttcacttacagatacatacgtatgttgtaaaactataatagacaaatgacaaacacaaaattccaaataattatttgagagggagagggccttagggaacttctaaaatgtcgacaacatctgtatcttaagctggctgatgagtacacagatatttacatttattatccctttatatatacgtttatgtatttttgtagtatgaaatacttcattaaaaaaagagtgaaaatgtaagacttcaaaaatgaagactaccatttatgtataacaataaaattagtgtaaaaaagtatacaaagaaaatgttcaattctttatctttccgtgctctatataatcagtattaatctaaagaccataatcctagtatgaaaaaaataacaagctttgacacaaaatctaagcatctgctttcctggcactcttaagttagacaagagtaaatatgttagcctctcaattctgcctcttcatctttcatctatacttagatttttctttatctttggacttctttggacttctgcttcggtctctctttttactcctttctctttcataaagatctgtttggtattttgatttatgactattactataatggccatccctctctcgagatcggctacgacttcggttctgagttcggtctctcttttcactcttttgtttctcccaacagctttcttcttcttcatagtgaccaaaccccatttctctatagatatcctgattagtatttttgattggcatgtagtcctcatcttctttctcttcagaacagtgatgggttttcttcttgtgttttttacttgtgtgtgagtgacttgattttgagtcttcggcctgctcatctaatataagatcgtattttgtatcctgtttgggctttactttatctttcagaaccaaattaggtggtttatcctgttctttttcatactccttgaaatcactcttggtgtatttcccaccttttcctttccatttaacctttgcaaccgactggctaaaat

SEQ ID NO: 73074 - DNA, 1248 bp, Homo sapiens; identical to SEQ ID NO: 65096

SEQ ID NO: 73075 - DNA, 1330 bp, Homo sapiens; identical to SEQ ID NO: 65097

SEQ ID NO: 73076 - DNA, 1435 bp, Homo sapiens
ataaattggggaacccccgggtttttcccctccccccgtttttaaaccccggccccggaatttaattttgggggccccataaaaaaaatattaccttgccagcccggggacgtaaactttgatcctttaaaacggcccccccttttttttttttttaataaaattatagatatatagatgtagatataaaaacataaaacagacacaacgcaagcagacgctgtcatgtgcttactctcaggtccctgacaccaagggaagcactgacccctccccagtgtgctttcccacggcgcgagcaccgcagccaggccggggctgcggacgtggcatgccttggggtggggttctccagtttggcagggagggcctgagggctggggagggggctctgggtgtcaccagccccctgtggcagcatcacccccgtgcctgctcccgcctgcccccccgtcgcctcccacaagagcataaagcaaaggttaaggctttgatgaaagggacagcggcggccggagcactgacacatcagacacggcgcggcagcacagcacacagacacgggacacatggagccgggcccccggccacagctggctggctggccgtctgtccacctatccaccaccacccagagcaggccagggcagaagcatcagccttgccaagctacaagcttccagcggggtccgtgaaaggcaacgcgttagttaggagtagcctggcgggggacactcggtccgggagcccacaggctgtgtcagaaggacggtgggggccctgggtgcctctgtccatctctgggacctgtccgtaaggggaccattgggggctggcctggcggtgatctggggtgctgggtgatggcagtgggccaagcctggctgagagagggtgccccaaagaggctgactgggccccctcactgccccagccatgggacaggcccagacacagaccagcccagtggcccttgtcccagtgagccgacttccccatgggcagatgagtggacgggcaggcagagcgcttggggcaagctgtggaggcgtggcactctctcccgccgatgggtccacaccaggctggggtggcctcgggtccctggggcagagaagttggtggggagggggggtgcgctgtggggtcctggtccccgtggcaccatggcggatgtgtggcagtcagtcctcacaccgagatctcgtaggtggtcccacccacgccggacaccttcttaaccagcgtgtgccgtgtagggctggcagagggccctggggggccggtggcaggtcccatccgggccaggcccggggactgcccattaagcttacttgggggagtcttcagctgagggtggtccctgcatcaaaacaagcacatacacacatgcacacggtgaacacacgaacacggggacagaggacggaggagt

SEQ ID NO: 73077 - DNA, 413 bp, Homo sapiens; identical to SEQ ID NO: 65099

SEQ ID NO: 73078 - DNA, 390 bp, Homo sapiens; identical to SEQ ID NO: 65100

SEQ ID NO: 73079 - DNA, 1743 bp, Homo sapiens
taccgggtcgacgatttcgttcggaatcctgggaccttcgggacttttgggtccgtagggtgacaaaggcagccgtggggactggggattgcaaggtccgaggggtcctcccggccccagagggcggcccggccccccgggtcctccagggggtcctatccaattgcaacaagatgatcttggggcagctttccagacgtggatggacaccagtggagcactcaggccagagagttacagctatccagaccggctggtgctggaccagggaggagagatctttaaaaccttacactacctcagcaacctcatccagagcattaagacgcccctgggcaccaaagagaaccccgcccgggtctgcagggacctcatggactgtgagcagaagatggtggatggtacctactgggtggatccaaaccttggctgctcctctgacaccatcgaggtctcctgcaacttcactcatggtggacagacgtgtctcaagcccatcacggcctccaaggtcgagtttgccatcagccgggtccagatgaatttcctgcacctgctaagctccgaggtgacccagcacatcaccatccactgccttaacatgaccgtgtggcaggagggcactgggcagaccccagccaagcaggccgtacgcttccgggcctggaatggacagatttttgaagctgggggtcagttccggcccgaggtgtccatggatggctgcaaggtccaagatggccgctggcatcagacactcttcaccttccggacccaagacccccaacagctgcccatcatcagtgtggacaacctccctcctgcctcatcagggaagcagtaccgcctggaagttggacctgcgtgcttcctctgacctctgacctcgtggccactctaggcctcatggaggagggaagaggaagaggcaaggggagggtactgaggggcagatggctccaggagaggcagctcccctgcccaagggtccttgggcagaccccagctgttgtctgcccagtagaagtgggtgggggtaggaggggatagggtgtccttgggaacaatggatcccagcttagccccaaagaccaaccaaagagccagccagagtaagctggacctgcaacctgcctgagccccgtggcctctcagctctgcggccaccccgttccctccccagcttcctgcccaaagagccccacattcaagccaacttgagggaagggggcgtctcgtcagctggtccctgctagggagctattgatgtgcaatattagaaaggagacatgaaaaaaggagaaaaggaaagacagaagtgtatatatatattatttaaacaaacaaaaagaaggtgcgttactatttttttttcacccgggaaagaggtgagaggatgggaaggagcagccaggcgtgggaagcggcgagatcctcgggctgggggtgcccacgtttgctacctccccctgtgaaatcgctggtgcctcacaattgtctctcacagtgtatgtgatttttttaaggaaaaaaaaaaaatccctatttaagattctgaaggtgctaccattattttgccacagactttgaagaaacttttggatgtggggcatcatccgcatctttctctctcctccaaatgacaaagtttggggaatttttgaattttcctagcatcgcccttgtgctcatcaggtaatctgctaaggaggaaaaaaagaaaagaaaaaaggaaaaaaaaaa

SEQ ID NO: 73080 - DNA, 1445 bp, Homo sapiens; identical to SEQ ID NO: 65101

SEQ ID NO: 73081 - DNA, 761 bp, Homo sapiens; identical to SEQ ID NO: 65102

SEQ ID NO: 73082 - DNA, 1333 bp, Homo sapiens; identical to SEQ ID NO: 65103

SEQ ID NO: 73083 - DNA, 878 bp, Homo sapiens
cggggtcacccaagcccttgtgcttgtcaagcgtcttcgttttcacaacatcgtagattctttctttgaagcctaggcgttgatgggagctgtctggagcaggggtccccagcccccaggccgcagactgatactagtccatgacctgttgggaactgggctacacagcaggaggatctctaccaccagtcctatgaatgcgtttgtgtcctcttcgcctcagtcccagacttcaaggagttctactctgaatccaacatcaatcatgagggcctagagtgtctgaggctgctcaatgagataattgctgattttgatgagctgctctccaagcccaagttcagtggggtggagaagatcaagaccatcggcagcacctacatggcagccacaggcttaaatgccacctctggacaggatgcacaacaggatgctgaacggagctgcagccaccttggcactatggtggaatttgccgtggccctggggtctaagctggacgtcatcaacaagcattcattcaacaacttccgcctgcgagtggggttgaaccatggacccgtagtagctggagttattggggcccagaagccgcaatatgacatttggggcaacacagtgaacgtggccagccgcatggagagtacaggagtccttggcaaaatccaagtgactgaggagacagcatgggccctacagtccctgggctacacctgctacagccggggtgtcatcaaggtgaaaggcaaagggcagctctgcacctacttcctgaacacagacttgacacgaactggacctccttcagctaccctaggctgagattgcactcgccttctaagaacctcaataaagagactctggggtgtctggagccc

SEQ ID NO: 73084 - DNA, 433 bp, Homo sapiens; identical to SEQ ID NO: 65105

SEQ ID NO: 73085 - DNA, 1046 bp, Homo sapiens; identical to SEQ ID NO: 65106

SEQ ID NO: 73086 - DNA, 596 bp, Homo sapiens; identical to SEQ ID NO: 65107

SEQ ID NO: 73087 - DNA, 786 bp, Homo sapiens; identical to SEQ ID NO: 65109

SEQ ID NO: 73088 - DNA, 2278 bp, Homo sapiens; identical to SEQ ID NO: 65110
  misc_feature (1)...(2278): n = a,t,c or g

SEQ ID NO: 73089 - DNA, 1307 bp, Homo sapiens; identical to SEQ ID NO: 65111

SEQ ID NO: 73090 - DNA, 1020 bp, Homo sapiens; identical to SEQ ID NO: 65112

SEQ ID NO: 73091 - DNA, 1095 bp, Homo sapiens; identical to SEQ ID NO: 65113

SEQ ID NO: 73092 - DNA, 1064 bp, Homo sapiens
cgctcaagatccttaactgaatcccatctgcaaagtcctttgtgtcatcttgggtaacatatgcagagggtccagagattagggcatagtcagtacaggggacccttattccacctaccagagagggtccagatgaggactgggtgaggggacgcagggaaagggctggcccggcccctaggaggtaccaagtgctcagctagtagcacctgtcatgggatacagaaccggccagcaggcctttgaagccagggtcctagggtcacccaccccaacccttcctactcccttctgcactccagactctgaagaactggcggcttcagcagtacagccacgactcggcagacccaggcatcctcgtgctcctggcctgcgggaccatatccagcacctgcggccaaatagccccttacccgctggccctggtccggacccgcatgcaggcacaaggatttcatcatgttgcccaggctcatctcgaactcgtggggacaaggaattggccagccttcagcctcccaacgtgctgggattacagccggtggtcatgccatgagcaaccttatggagaggaccatgtggtaaggaactcagccaatagccatgtaactgagcttggaagaggatcttgctgtcctggccaacatctcactgcaattctatcagttgaattccctggatagtccaagctttgtggatccctccaccgaaacaactggatcccagtacctgaatcctgaatcttagactcttatacttcaaacactgatcacgggaacagccggctcagcagctcctgagttcctaatgctcagaacatggatgagatgataaatgtttgttgtgttaagctgccaacctttggcgggggggtaattcgtcacatggcaacagctggctaatacatatatacctacatgtaaaaaaaaaaaaaaggggcggccgtttaaaaggaacaaagtttacttacccgggcgtgcgagtgaatattttttttatggggccccctaaattaatttcccgggccgtcttttaacaacgtggggaggggaaaacccctg

SEQ ID NO: 73093 - DNA, 1567 bp, Homo sapiens; identical to SEQ ID NO: 65115

SEQ ID NO: 73094 - DNA, 1273 bp, Homo sapiens; identical to SEQ ID NO: 65116

SEQ ID NO: 73095 - DNA, 728 bp, Homo sapiens; identical to SEQ ID NO: 65117

SEQ ID NO: 73096 - DNA, 1397 bp, Homo sapiens; identical to SEQ ID NO: 65118

SEQ ID NO: 73097 - DNA, 857 bp, Homo sapiens
ttttttcacaaattataatattttattatagaaaaagggtgcccaaatacaggatttcgtaaacactggtaggtgaacaagtgcaattttaaaagtaaatacaaagtagaggcaaaacctacaagcattttgccttcagaagaaaatcgtaatgttctcctgcactagtgatcccacccagaacacaaatgtggctccatctcccatgaaagcatcatatttgctttctgagctcagtattcccatttcaataattgcaaagtgatggcaagaagtggcactgaatacattactacaaacccttgacttaaaatattgagacagggtcttgccctgtcatccaggctggagtgcagtagcgtcatcatggctcactgcagcctcatcctcctgggctcaagcaatcatcctgtctcagcctcttgagtggctgggaccacaggtatgcactaccatgtccatgcctggctatttttttaattttttacgttgcccaggccagtctgaaactcctgacctcaagtgatcctcccaccttggcctcccaaagtgctgggattaccggcatgagccactgcacccagccaaaacctttaatttttttttttcttttttgagatggagtcttgctctgttgcccaggctggaggtgggagagctgccggaaggacttatcacagtaggagcagtggtagggcttgacgcccaggtggatgcgcaggtgctgggccaggtaggaggcgttggcaaaggacttggagcagtgcgggcacttgtggggcttggcctctgtgtgcgacttggagtggatctgcatctctgacttggtgaaaaaggtcagtgggcataccttaccc

SEQ ID NO: 73098 - DNA, 2919 bp, Homo sapiens; identical to SEQ ID NO: 65120

SEQ ID NO: 73099 - DNA, 789 bp, Homo sapiens; identical to SEQ ID NO: 65121
  misc_feature (1)...(789): n = a,t,c or g

SEQ ID NO: 73100 - DNA, 2314 bp, Homo sapiens; identical to SEQ ID NO: 65122

SEQ ID NO: 73101 - DNA, 2098 bp, Homo sapiens
  misc_feature (1)...(2098): n = a,t,c or g
aatggaggtgggagtttaaataactattcctctcccattccatcgactccagcacccagcaggagggaccctcagttcagtgttcctcccactgccaacacacccacgcccgtttgcaagcggtccatgcgctggtccaacctgtttacatctgagaaagggagtgacccagacaaagagaggaaagccccggagaatcatgctgataccatcgggagcggtagagccatccccattaaacagggcatgctcttaaagcgaagtgggaaatggctgaagacatggaaaaagaaatacgtcaccctgtgttccaatggcatgctcacctattattcaagcttaggtgattatatgaagaatattcataaaaaagagattgaccttcagacatctaccatcaaagtcccaggaaagtggccatccctagccacatcggcctgcacacccatctccagctctaaaagcaatggcctatccaaggacatggacaccgggctgggtgactccatatgcttcagccccagtatctccagcaccaccagccccaagctcaacccgcccccctctcctcatgccaataaaaagaaacacctaaagaagaaaagcaccaacaactttatgattgtgtctgccactggccaaacgtggcactttgaagccacgacgtatgaggagcgggatgcctgggtccaagccatccagagccagatcctggccagcctgcagtcatgcgagagcagtaaaagcaagtcccagctgaccagccagagcgaggccatggccctgcagtcgatccaaaacatgcgtgggaacgcccactgtgtggactgtgagacccagaatcctaagtgggccagtttgaacttgggagtcctcatgtgtattgaatgctcaggtatccaccgcagtcttggcccccacctttcccgtgtgcgatctctggagctggatgactggccagttgagctcaggaaggttatgtcatctattgtcaatgacctagccaacagcatctgggaagggagcagccaggggcagacaaaaccctcagaaaagtccacgagggaagagaaggaacggtggatccgttccaaatatgaggagaagctctttctggccccactaccctgcactgagctgtccctgggccagcagctgctgcgggccaccgctgatgaggacctgcagacagccatcctgctgctggcacatggctcctgtgaggaggtgaacgagacctgtggggagggagacggctgcacggcgctccatctggcctgccgcaaggggaatgtggtcctggcgcagctcctgatctggtacggggtggacgtcatggcccgagatgcccacgggaacacagcgctgacctacgcccggcaggcctccagccaggagtgcatcaacgtgcttctgcagtacggctgccccgacgagtgtgtatagtatctgttttatttgactgcagtctccttggtgcaaaaacaaaatgggaaaaataaggataactcagaatttcaaaaggaaatcacaaattcagctaataatagcattttcagtacttttcgtaaactaagtaaatacacaaaatgttgatttttctgaccataagacgtattttatgtccttttgccaaggtggatttgttagtctcaggccctcctggccacattgcccaagtcacacaggcttctgtattatgtatttagataaaatgtgtgaaaatatatttgaaataaagttcataaatatgcattgatttttgtacaaaaaaaaaaaaaaggggggccctttttagagatcccttggggggcccaatttttccgggggttggcaagtttttatttttttctttttggggggcgtttttaaaccctctttgggttttttgggaaagaaccttttttttgggggggggacttattggcccaccctccctccaaattttaaggcttttggggaaaataaaaatttttaaggggtaaagggggaaaaccacccccctttccctggctgttaaaaatgnngnnnnnnnnnnnnanaaccccccctctcggggggggcaatggggcccccccctctttaaggagatagagct

SEQ ID NO: 73102 - DNA, 1956 bp, Homo sapiens
  misc_feature (1)...(1956): n = a,t,c or g
tttcgtgtttgatgctgggatcctcttgtggggggcgtctgtcaacgtcaccatttgggaagtgcgcagagctcagagcagcgcttccatgcttccttctgcttgggggcccctccagggagcttctttcttcttgctatctttttctttctgttttctctcctcttccccgcaccttgggaggcaggagacccacttggtggtgctggtaagtggaagccttggtgggtgggcaggggctgggctggggagggtggctgaaccggctgctgccacacctcgtgggggctgccgcgcaggatgcctctgcacacgggtcctgcagccttgcaagaggtgggcaggactggaaggagctgttcccacaggaggatgatgagggcgccccgtgcccagcagaggatgagctggccctgcaggacaacgggttcctgagcaagaatgaggtgctgcgcagcaaggtgtctcggctcacggagcggctccgcaagcgctaccccaccaacaacttcgggaactgcacgggctgctcggccaccttctcagtgctgaagaagaggcggagctgcagtaattgtggaaacagcttctgctctcgatgctgctccttcaaggtgcccaagtcctccatgggggccacagcccctgaagcccagagggagactgtgtttgtgtgtgcctcgtgtaaccagaccttgagcaagtgagaagagaggccagggtccaaccaggcacccgtccttgggaccagcagtagaccccccactctccccacccctggcccactgtggtgtgtgctgggcaaatgtgggcctgaatgctaggtaggcttccccttccttcctcactctctccagctggattctggagctgttctccatccatgagagtggctggcaatggctgctctcaatcccttgagggagaagagcccctggagggcctggcatgtttgtcctgctctgcctgggactgagcgagtggacttagggctgggcaggcagtagccaccagagggcagcagcgaactaggccaggcctgactggggtctgaagatcagggtcagtgtggctatgcctgggaattccagacctgaggttgggaaaagaggtttttctcctgcagggtactgggccaggccctcagcctcagagagcctgcagaagggcttgggagtgccacaccccatctctgctgattgaatgtccctccaggcaccaggatctcatcatttccccatcagagggtgtggccaggcctaacaagaccatgggtgcttctagaaacagggttgaagttcccagattccctgagaggagaatgtgtataggagggtttggctgagtccttcagcgttaagtggaggaaagcttggggaagccccaatagctggacagacctcagcctcccctcgaagacacctcaattcacagactctcagcccacacaatgccccagtgtccccagctccgctggagcagctgcagggcacttggatcacaacttctgcaccctctgtccagagtctagggcagtcctccactggcccagcactccagtttcctttccctgcctcttgtccaatggagtgggaggccaggtgagtggagcagaggtcctgaagcccttgacccctgggggcctgggtagtgtaggatctcgctgggctgggtcctggattccagggctattccctggaggacagtctcagttatgggataaggccccctgggggtctccatttctttccaacagtttcatgttcactactggactcttacgggctcagtatctctcccttagccatgagctggctcagggaatccctttcccttccctggaagcttgcctggctttctcaagtatttatttaattaattgcatggttcctggggaanatgttggcanaagtnatgggatgangaggaaatttggggttgggggtcttctaacta

SEQ ID NO: 73103 - DNA, 1524 bp, Homo sapiens; identical to SEQ ID NO: 65125

SEQ ID NO: 73104 - DNA, 1399 bp, Homo sapiens; identical to SEQ ID NO: 65127

SEQ ID NO: 73105 - DNA, 1248 bp, Homo sapiens
ggtgagtagctgtgcgaattcggttctctagggaactccttcttcgcctgctggccttacctgggctccccgcttctctggaggggaggcggtgcgggaactcccgtaggcgtgagctggagcgcgcgcccgctgctctctccaggtcccgccgcgccagttcgcctccgcaaagcccgtccctctcttccgcaggcaccatgttcctgactgcgctcctctggcgcggccgcattcccggccgtcagtggatcgggaagcaccggcggccgcggttcgtgtcgttgcgcgccaagcagaacatgatccgccgcctggagatcgaggcggagaaccattactggctgagcatgccctacatgacccgggagcaggagcgcggccacgccgcggtgcgcaggagggaggccttcgaggccataaaggcggccgccacttccaagttccccccgcatagattcattgcggaccagctcgaccatctcaatgtcaccaagaaatggtcctaatcctgagtcgtcacccttggattttatggatcacggagctgaccatctttacctggtcctggaactgaaaaactgtagcttgtgtgaaaatgagcctttggaccagtctttattaaaacaaacaaacatgagtagtctgcatatcgaatatctagagctctaaaccccccaatacttaaaaggtctaattgcctgtcctgtggtttcattagtctgatacgaagatagggatttcctcagtcacagatgatattttgaaggaaagctggcaataaagccacaatgatttgaggtctttgcttaagtatgagatacttgatgggggctttatcatgcaacattagtttgcttaccttaagaattgcccaaaaatgaaagaaaatatgagcttttcagttaaacatactcctaaaaacattttccgggattttactactaaaattggacatttaagcgaagtaaaagaggccgggtgcggtggctcacgcctgtaatcccaacactttaggagtccaaggcgggcggatcacttgaggtcaggagttcaagaccagcttggccaaggtgataaaacccgtctctactaatacaaaaaaaattagctgggtatgttggtgcaggcttgcaatcccagctacttgggacgctgaggtgggaggatcgcctgaacctcagaggcagaggttgcaatgaagcggaggttgcagtgagccgagagcatgccgctgcactaccagcc

SEQ ID NO: 73106 - DNA, 831 bp, Homo sapiens; identical to SEQ ID NO: 65129

SEQ ID NO: 73107 - DNA, 458 bp, Homo sapiens; identical to SEQ ID NO: 65130

SEQ ID NO: 73108 - DNA, 479 bp, Homo sapiens; identical to SEQ ID NO: 65131

SEQ ID NO: 73109 - DNA, 1029 bp, Homo sapiens; identical to SEQ ID NO: 65132

SEQ ID NO: 73110 - DNA, 1907 bp, Homo sapiens; identical to SEQ ID NO: 65133

SEQ ID NO: 73111 - DNA, 721 bp, Homo sapiens; identical to SEQ ID NO: 65134

SEQ ID NO: 73112 - DNA, 1110 bp, Homo sapiens
ttttttttttttcctgtctgtaaccatcagatttaattttaaaatttattaggcagtaggcaaacagatgttggggtagatgacctaaaagggttttcttttggaataatattttttaaaaaatcaaataactgttatcactttaagttgcatgagcctgaagctgcacctggagaggaatttaattttcatgacatgcaaaactgattaggcagtgaactctttcctcccgcttcccctgaacacatttataaacttcaacgggggtgaattccatctaatactttgaaaaccatttctcatctcacagtttacccaaatcatgtgcatgactgcaagaggaaataaacaagaaatctttaagcatagataagccacaatggatagttaatcttgtacagacaatccagcattaaggctaatttgatcttttaaacattttatgggaaacagctgttgagttttctctagaaaagcccacaaggttccataaccccataggcatacagcctcgacaggcagggctccatcaggctcctcttgaactgggcactccttcacggaaggcaggaatgcacgtgtcttcacttcctgctgctctgcacgcacgtcacgatatctggcagaaggtggtttctgttttccttggtgacattaaacaccttcacatcctttctgtttctgatttcttctacaagagccagtggctttcctttaggaactgggattgtgccaaggattatagtccctggggtagacagcgtctgacgaacagcttgaatgaaaagctgactgaagagctccatcttcccaatctcatcgatgacgcacactctttgccctgggccactgctgcagtcggcattcctcaagacgggtagtgccaactgctcaaaagaagtcaggtcgaccacatactgcccaactcggcattcacgttttccaggtggaggctctaacctgggggccccgttaggaacacgtgccgggccatactggtgggcgggggtaggggttgcggtcaggggagcagtccaggttggggtcgcaattcaggtcaggtccggaccagggtcgcgactcaggacccgcccaccgcccacgtgccga

SEQ ID NO: 73113 - DNA, 1657 bp, Homo sapiens; identical to SEQ ID NO: 65136

SEQ ID NO: 73114 - DNA, 1714 bp, Homo sapiens
ttttttttttttgacaagtttgcaagttttattgaattaatggctggctttcacagatgttaatcactggcgggcggttgaatagggggaacaggaaaatgctctccagaggttcccactgaagccctttcatctgccctgccccaacccaccactgaagccagaggtcatgggagttgggatctaactacactctgtgaacttaccaccacccattccatccccaagcccatattttatttgggactaggccactgatgcccgggcccttcctcttccagtagggtgggagggtgggaggtggggacacggaccaaccctcaaggaaagaaaagaggttaaggtggggggttttgctgaatgtctaagaaatgtcagtggaacagggctggggcacggtggctcacgcctgtaatcccagcactttgggaggccaaggcaggtggatcacctgaggtcaggagttcgagaccagcctggctaacatggtgaaaccccatctctactaaaaatacaaaaattagccaggcgtggtggcaggtacctgtaatcccagctacttgggaggctgagacacagtctcgctctgtggcccaggctggatggagtgcagtggtgcaatctcggctcactgcaacctccgcctcccgggtttaagcaaaattatcctgcctcagcctcctgagtagctggattacaggcaggcaccaccacgtccggctaatttttgtatttttagtagagatggggttttgccatgttagccaggctggtctcgaactcctgacctcaggtgatccgcctgccttggcctcccaaagtgctgggattacaggcgagagccaccacgcccagcctctgcttcgtgagttttctttcccctgaggcaccctctgagttctccacgtgtcagacccatgtccaatgcaccacgctccttccttcacaccatgaaagccccgaagtaagaccgggtaccatcacgcagtcgaaccaggcgttcatccagcacacggacgaccacctcctccccagcctccaggtgtaccacaccacccaggaagctgctgtcccaccagacccgggagctgctggtggcccgtccgcagggtgactgctggctgaccaacagctccagctcctcggggtagcggggtgtgcgcttgtagaggccgtgggtgatggtgctggccaggcccagcgggcagcccacaccgcccagctgcaccttggagtagatgtagtagtagccagctttggtgaccacaagggccccatcgtggtagctgaggcccctcaggaaggccaggcccagctgagtctcccataacagcggccccccgctgccggtcaagctggagttggcccctgtgagatgcgctgctgggttgacctcgtgagaccttcgctcttgtatcagctgctcccaggagcctgcaggtccgtcaggcaggcgggtgaccatctctcctagacgccagtgcagctgcaggaggaaccagccttggacggccagcccagcccccatcagcaacagcaagagacccagacccacccgggccacactgcacgactgtctccggtggcttcgtcccagcctcgtgaatgggatgtcggtctgtccatccaccacaaacactgagggccgtacgacactctcctccatgcccaaggtctctggagcagggctgacacgcctgggtccttcaacctc

SEQ ID NO: 73115 - DNA, 2053 bp, Homo sapiens
tttcgtcgtttccggtggcggcggaggctgcactgagcgggacctgcgagcagcgcgggcggcagcccgggggaagcgtccgggaccatgtctggagaactaccaccaaacattaacatcaaggaacctcgatgggatcaaagcactttcattggacgagccaatcatttcttcactgtaactgaccccaggaacattctgttaaccaacgaacaactcgagagtgcgagaaaaatagtacatgattacaggcaaggaattgttcctcctggtcttacagaaaatgaattgtggagagcaaagtacatctatgattcagcttttcatcctgacactggtgagaagatgattttgataggaagaatgtcagcccaggttcccatgaacatgaccatcacaggttgtatgatgacgttttacaggactacgccggctgtgctgttctggcagtggattaaccagtccttcaatgccgtcgtcaattacaccaacagaagtggagacgcacccctcactgtcaatgagttgggaacagcttacgtttctgcaacaactggtgccgtagcaacagctctaggactcaatgcattgaccaagcatgtctcaccactgataggacgttttgttccctttgctgccgtagctgctgctaattgcattaatattccattaatgaggcaaagggaactcaaagttggcattcccgtcacggatgagaatgggaaccgcttgggggagtcggcgaacgctgcgaaacaagccatcacgcaagttgtcgtgtccaggattctcatggcagcccctggcatggccatccctccattcattatgaacactttggaaaagaaagcctttttgaagaggttcccatggatgagtgcacccattcaagttgggttagttggcttctgtttggtgtttgctacacccctgtgttgtgccctgtttcctcagaaaagttccatgtctgtgacaagcttggaggccgagttgcaagctaagatccaagagagccatcctgaattgcgacgcgtgtacttcaataagggattgtaaagcagagaggaaacctctgcagctcattctgccactgcaaagctggtgtagccatgctggtgagaaaaatcctgttcaacctgggttctcccagttacggaaaccttttaaagatccacattagccttttagaataaagctgctactttaacagagcacctggcgtgggccaagtgcctgatactcccttacactgaatcatgttatgatttatagaaatacctttcctgtagcttttatagtcattgtttttcaaagacgatataccagccctcacccaggttttaaaaaaagcactggtaggcatagaataggtgctcagtatatggtcagtaaatgttctattgattatcaatcagtgaaaaaagaaatctgtttaaaatactgaattttcatctcactcccattgcaaatcaaggagatctcagcagtgaactgggaaaatacaaaagctctgggctaatctataaaaacttaccctgaaatattaagggcagtttgcttctagtttggggattgcgctagcccaatgaaggtgatgaagcttttggatttggagggtaaaagctccttcacaccccttccaaaagtcagtcacagaccactgcaacatgccttccctgctggatcattatatacattcagattgtgagtggattgccttggttgacttttaatttattgttttttgttcttataaagatgataatcttaccttgcagttattgactttatattcaattatttacatcaaataatgaaataactgaaatgtacaaatgtcaaattttggaagtatattcaataccaatgctgtatgagtgggctgaatccagttcattgttttttttttggtaagaagtgagactacagttccagctacctacatgtcttttcttgtcatccttatagatctctttggctttcagaaagatacagtgataatccgtgtatgaatcagtctcaatgaatttaaattagatattgaaaaaaaaaa

SEQ ID NO: 73116 - DNA, 397 bp, Homo sapiens; identical to SEQ ID NO: 65138

SEQ ID NO: 73117 - DNA, 2127 bp, Homo sapiens; identical to SEQ ID NO: 65139

SEQ ID NO: 73118 - DNA, 478 bp, Homo sapiens; identical to SEQ ID NO: 65140

SEQ ID NO: 73119 - DNA, 851 bp, Homo sapiens
cccttgtaatccctgaatttctccgcttgcatcagagatactcccttacctgatgctgaggtatagcagaaaaacccaatgataatagtgtgtaggttcacagtagactttaagtattggccattgggctgaacaacttctacaaagcaggccaggtgaattccatgagattctaagtgagtaggatgagtttcaaggacctcctcgcccagacacatcccattgctatactgggtttgactcaaccatttgccgggaagtaatcacatctcctaacatagcgctctgacattcaacctgacttcagtccttcttaggtggtatttaatcacgtaattaaggagaactgtttaacatcaagctcttctgctggtctgaaaagacctgagtgtttatttacttaagcctgaaagttgattattcatggtgttgagttctcccagagtggccctaggcatccggggactgggacttaggtcgaggagatcttgagatggggcagaaggctcactggtagtattggtggcttccttctggttcttattttgctccaaaatcctttgttggtttctagtaaacctctcatatccaaggatagcattattcaaatcctcattcacctgaattagctcaacagttacatcttcgttctccaccaccacaagcaggtccatgatcctctcctgcatctcccgacctgttttatagagtttacgcagaagctctatgtcttcatggttttcagacccaggagtaattctcctcaatatggcggataatcatcgcaaattcattttcaccatatccaattcactgtgcagttttccaatctgttctgggaccaatgtaac

SEQ ID NO: 73120 - DNA, 841 bp, Homo sapiens; identical to SEQ ID NO: 65141

SEQ ID NO: 73121 - DNA, 2109 bp, Homo sapiens
  misc_feature (1)...(2109): n = a,t,c or g
ctcactctgttgcccaggctggattgcagtggtgcgatctcggctcactgcaacctctgactcccgggttcaagcgattctcctacctcagcctcctgagtaactaggactacaggcgtgagccaccacaccctgctaatttttgtactttttagtagagatgggtgccgagaccagctccgtgtgcggagaccagctcggttgtggagaccctaacccagcgttgctagaggaattaaagacacacacacagaaatataaagtgtggagtgggaaatcagggggctgacagccttcagagctgagagcctcaaacagagttttacccacatatttattgacagcaagccagtgataagcattgtttctatagattatagattaactaaaatgggaaacaaagggatgggccaaaacaaaggtatgggccctggctagttatctgcagcaggagcatgtccttaaggcacagattacttatgctatggtttgtggttcaggaacccctttaagcggttttccgccctggggataggccagggtgttcctcgctctcattccggtaaaccacagccttcccancatgggcgttatggccaccatggaacatgtcacagcgctgcagaggattttgtttatgggccagttttgggggccagtttatgtccagatttggggggcctattccccagcatatcccccttcttgtttttgcagggcaataaaagcaaaggcagctttatcacggtgagctacttctcgcaggagtcaggatctgcatctgcagactacacaaagacaaacaacacagattaaaagcacaatcatcattgaaatcacagagcttccaagtgttttcatccattttaatgggttactagctgctaatttgtctgcagctcctttaaggactccagttcctggcattaaggtcaggtgtgcctgggatgctttaaatatttgttcttttaattttgccatatccaaaaacaagtttgtagagtgtccttctagatgcttttttattctttcccaaattttgatcttattaacagacattaatagtttccacaaatccttatgtttagcttctacagtggaccatatcatttgaggttgaggtgccactataccgccacgtttccagataatgggaactcttgctgtatttcttaccatttctaccatctgactgttttgttcagaccagctgaacatagtgtggctgtggcacacagactgacaggtgcaattcaagctaaacatccccttaggggaccaatcaataatgattccataggaattgttgcacagcacctctgcctgttttgcaatgcaatcttcccaaacaaatacattcattatttctagccaggtccaattctgtttacaaataggtttttgagggcagtatacctcaattacaggagcagatttattatggtaaatacggagaccagaaagcatgtgtaactgtgtcatagagtgattacatccaggcattattgccagccaagattgataaatacgcccaataagtataattgtcctctgtgccagcccttgttgaaggaatactcatggcaatggtgatcaccactatcatagctatcattaaattactcattgtgactggttgtcccactttccttaggttttcttctgccatctgtgacagcttcttgatctgtccccaggtaggtggctgcgttcgatgggtgttgctcgtgacagttggggtccccctcagcgtcagtctcaacatggctgcaaccaggggatcctcgggatcctcccagaatctattcctcagcatcaggctcatgataaggtttcaggtgcctcgatgatatccaaattggcagttgatttggtccacggggattgcttaagagtactcaggtgtcctccagcttagttccacgttctccaaccgtcgctctggcgacccttcaacccaggttcgagccccatgtatggacaccacttgctgagaccagctcggttgtggagaccctaacccagtggcactggagcaactcagcactacctgcagcggcgcagctcctcgtgccgaattcgtgcagccggcgaagncgncgagtctcc

SEQ ID NO: 73122 - DNA, 358 bp, Homo sapiens; identical to SEQ ID NO: 65143

SEQ ID NO: 73123 - DNA, 1155 bp, Homo sapiens; identical to SEQ ID NO: 65144
  misc_feature (1)...(1155): n = a,t,c or g

SEQ ID NO: 73124 - DNA, 1355 bp, Homo sapiens; identical to SEQ ID NO: 65145

SEQ ID NO: 73125 - DNA, 792 bp, Homo sapiens; identical to SEQ ID NO: 65146

SEQ ID NO: 73126 - DNA, 830 bp, Homo sapiens; identical to SEQ ID NO: 65119

SEQ ID NO: 73127 - DNA, 925 bp, Homo sapiens; identical to SEQ ID NO: 65149

SEQ ID NO: 73128 - DNA, 403 bp, Homo sapiens; identical to SEQ ID NO: 65150

SEQ ID NO: 73129 - DNA, 898 bp, Homo sapiens; identical to SEQ ID NO: 65151

SEQ ID NO: 73130 - DNA, 2047 bp, Homo sapiens
  misc_feature (1)...(2047): n = a,t,c or g
cccacctccaaatatctcatcaacaaccgactaatcaccacccaacaatgactaatcaaactaacctcaaaacaaatgatagccatacacaacactaaaggacgaacctgatctcttatactagtatccttaatcatttttattgccacaactaacctcctcggactcctgcctcactcatttacaccaaccacccaactatctataaacctagccatggccatccccttatgagcgggcgcagtgattataggctttcgctctaagattaaaaatgccctagcccacttcttaccacaaggcacacctacaccccttatccccatactagttattatcgaaaccatcagcctactcattcaaccaatagccctggccgtacgcctaaccgctaacattactgcaggccacctactcatgcacctaattggaagcaccaccctagcaatatcaaccattaaccttccctctacacttatcatcttcacaattctaattctactgactatcctagaaatcgctgtcgccttaatccaagcctacgttttcacacttctaggatagtcagtagaattagaattgtgaagatgataagtgtagagggaaggttaatggttgatattgctagggtggcgcttccaattaggtgcatgagtaggtggcctgcagtaatgttagcggttaggcgtacggccagggctattggttgaatgagtaggctgatggtttcgataataactagtatggggataaggggtgtaggtgtgccttgtggtaagaagtgggctagggcatttttaatcttagagcgaaagcctataatcactgcgcccgctcataaggggatggccatggctaggtttatagatagttgggtggttggtgtaaatgagtgaggcaggagtccgaggaggttagttgtggcaataaaaatgattaaggatactagtataagagatcaggttcgtcctttagtgttgtgtatggttatcatttgttttgaggttagtttgattagtcattgttgggtggtgattagtcggttgttgatgagatatttggaggtggggatcaatagagggggaaatagaatgatctgttcgcttcattcattgcccccacaatcctaggcctacccgccgcagtactgatcattctatttccccgtctattgatccgcacctccaaatatctcatcaacaaccgactaatcaccacccaactatctataaacctagccatggccatccccttatgagcgggcgcagtgattataggctttcgctctaagattaaaaatgcccttagcccatttcttaccacaaggcacacctacaccccgttatccccatactagttattatcgaaacccatcagcctactcattcaaccaatagcccttggccgtacgcctaaccgctaacattactgcaggccacctgctcactgcacctaattggaagcgccacccttagcattttcaaccattaaccttccctctacacttatcatcttccacaattctaattctactgactatcctagaaatcgttgtcgtgcaggtagaggcttactagaagtgtgaaaacgtaggcttggattaaggcgacagcgatttctaggatagtcagtagaattagaattgtgaagatgataagtgtagagggaaggttaatggttgatattgctagggtggcgtttccaattaggtgcatgagtaggtggcctgcagtaatgttagcggttaggcgtacggccagggctattggttgaatgagtaggctgatggtttcgataataactagtatggggataaggggtgtaggtgtgccttgtggtaagaagtgggctagggcatttttaattttagagcgaaagcctataatcactgcgcccgctcataaggggatggccatggctaggtttatagatagttgggtggttggtgtaaatgagtgaggcaggagtccgaggaggttagttggaattccaccactctgcaataggtatctcagtggnatcaaaatnttttnttctgcttaaaaac

SEQ ID NO: 73131 - DNA, 1194 bp, Homo sapiens; identical to SEQ ID NO: 65152

SEQ ID NO: 73132 - DNA, 986 bp, Homo sapiens; identical to SEQ ID NO: 65153

SEQ ID NO: 73133 - DNA, 1084 bp, Homo sapiens; identical to SEQ ID NO: 65155

SEQ ID NO: 73134 - DNA, 1893 bp, Homo sapiens; identical to SEQ ID NO: 65156

SEQ ID NO: 73135 - DNA, 1341 bp, Homo sapiens; identical to SEQ ID NO: 65157
  misc_feature (1)...(1341): n = a,t,c or g

SEQ ID NO: 73136 - DNA, 1904 bp, Homo sapiens; identical to SEQ ID NO: 65158

SEQ ID NO: 73137 - DNA, 1409 bp, Homo sapiens; identical to SEQ ID NO: 65159

SEQ ID NO: 73138 - DNA, 792 bp, Homo sapiens; identical to SEQ ID NO: 65160

SEQ ID NO: 73139 - DNA, 783 bp, Homo sapiens; identical to SEQ ID NO: 65165

SEQ ID NO: 73140 - DNA, 1032 bp, Homo sapiens; identical to SEQ ID NO: 65166

SEQ ID NO: 73141 - DNA, 2843 bp, Homo sapiens; identical to SEQ ID NO: 65167

SEQ ID NO: 73142 - DNA, 1420 bp, Homo sapiens; identical to SEQ ID NO: 65168
  misc_feature (1)...(1420): n = a,t,c or g

SEQ ID NO: 73143 - DNA, 669 bp, Homo sapiens; identical to SEQ ID NO: 65169

SEQ ID NO: 73144 - DNA, 1338 bp, Homo sapiens; identical to SEQ ID NO: 65170

SEQ ID NO: 73145 - DNA, 709 bp, Homo sapiens; identical to SEQ ID NO: 65171

SEQ ID NO: 73146 - DNA, 1864 bp, Homo sapiens; identical to SEQ ID NO: 65172

SEQ ID NO: 73147 - DNA, 1837 bp, Homo sapiens; identical to SEQ ID NO: 65173

SEQ ID NO: 73148 - DNA, 608 bp, Homo sapiens; identical to SEQ ID NO: 65174

SEQ ID NO: 73149 - DNA, 858 bp, Homo sapiens; identical to SEQ ID NO: 65175

SEQ ID NO: 73150 - DNA, 3680 bp, Homo sapiens
attgacctgctgcggcagtagaacgagctgaagtcaccccacagccctatttccttctttcctgttcctcaccccgatcacgcttgatttattgatggtggttccaccaggcctaatcgccacacaccagcaaaggcaggctatgctatagtacaagccactagcctgcctctcagaacctctcatttcctttccatcgtggaaatctatcctcaaggaaataatttctcagtgttccatctgctgttctactattcctcagggattattcaggccccctcccttccttacacatcaagctcgaggatttgcccccacccaggactggcaaattagctttattcaacatgtcccaagtcaggaaactaaaatacctcttagtctaggtaggtactttcactggataggtagaggcctttcctgcagggtctgagaaggccaccgcagtcatttcttccattctgtcagacataattcctcagtttagccttcccacctcaatacagtctgataacaggtgagcctttattagtcaaatcagccaagcagtttttcaggctcttagtattctgtgaaacctttatatcccttaaggtcctccatcttcaagaaaagtagaatggactaaaggtcttttaaaaatacacctcaccaagctcagccaccaacttaaaaaggactggacaatacttttaccactttcccttctcagaattcaggcctgtcctcggaatgctacagggtacagcccatttaagctcctgtatagatgctcctttttattaggccccagtctcattccagacaccagaccaacttagactgtgccccaaaaaacttgtcatccctactatcttctgtctagtcatactcctattcaccattctcaactactcatacatgccctgctcttgtttacactgccggtttacactgtttctccaagccatcacagctgatatctcctggtgctatccccaaactgccactcttaactcttgaagtaaataaataatctttcctggcaggactatggtgaatctccttaagcactctctaatcagacatcctgagtcgtcccaattcttagaccttttatacctgtttttctccttctgttattccatttagtttttcaattcatacaaaaccgtatccaggccatcaccaatcattctatatgacaaatgtttcttctaacaaccccacaatatcaccccttaccacaagacctcccttcagcttaatctctcccgctctaggttcccacgccgcccctaatcccgcttgaagcagccctgagaaacatcgcccattctctctccataccaccccccaaaaatttcaccgccccaacacttcaacactattttgttttatttttcttattaatattaaggaaggcaggaatgtcaggcctctgagcccaaagccaagccatcggcattccctgtgacttgcacgtatacgtccaggatgggcctgaagtaactgaagaatcacaaaagaagtgaatatgccctgccccaccttaaagaagtgtaaatggccggtccttgccttaactgatgacattcccccacaaaagaagtgaaaatggccggtccttgccttaagtgatgacattaccttgtgaaagtccttttcctggctcatcctggctcaaaaagctcccctactgagcaccttatgacccccactcctgcccactgagcaccttgtgacccccactcctacccgccagagaacaaacacccttttgactgtaattttcctttacctacccaaatcctataaaatggccccacccctatctcccttcgctgactctcttttcggactcagcccgcctgcacccaggtgaaataaacagccatgttgctcacacaaagcctgtttggtggtctcttcacacggacgcgcatgaaatttggtgccgtgactcggatcgggggacctcccttgggagatcaatcccctgtcctcctgctctttgctccgtgagaaagatccacctacgacctcaggtcctcagaccaaccagcccaagaaacatctcaccaattttaaatcagcggccaggcgttcctccagaacctcctcccacaggaacttgctacacatgccggaaatctggccactgggccaaggaacgcccgcagcccgggattcctcctaagccgcgtcccatctgtgtgggaccccactgaaaatcggactgttcaactcacctggcagccactcccagagctcctggaactctggcccaaggctctctgactgactccttcccagatcttctcggcttagcggctgaagactcacactgcctgattgcctcggaagccccctagaccatcacgcacgccgagcttcgggtaactctcacaatggaaggcaggaatgtcaggcctctgagcccaagccaagccatcgcatctcctgtgacttgcacgtatacacccagatggcctgaagtaactgaagaatcacaaaagtgaaaaggccctgccccgcattaactgatgacattccaccattgtgatttgttcctgccccaccttaactgagtgattaaccctgtgaatttccttctcctggctcagaagctcccccaccttaactgagtgattaaccctgcgaatttccttctcctggctcagaagctcccccactgagcaccttgtgacccccgcccctgcccaccagagagcaaccccctttgactacgcccatgaaatttggtgcagtgactgggatcgggggacctcccttgggagatcaatcccctgtcctcctgctctttgctccgtgaaaaagatctacctacgacctcaggtcctcagacccaccagcccaaggaacatctcaccaattttaaatcagaaggcaggaatgtcaggcctctgtgcccaagccaagccatcgcatcccctgtgacttgcacgtatacgcccagatggcctgaagtaactgaagaatcagaaaagaagtgaaaatgccctgccctgccttaactgaatgacattccaccacaaaagaagtgaaaatgggccggcccttgccttaagtgatgacattaccttgtggaaagtccttttcctggctcatcctggctcgaaaacaccgccactgagcaccttgcgacccccactcctgcccgccagagaacaactccccctttaactgtaattttcctttacctaccgaaatcctataaaacggccccacccctatctccctttgctgactctcttttcggactcagcccgcctgcacccaggtgattaaaagctttattgctcacacaaagcctgtttggtggtctcttcacacggacgcgcatgaaatttggtgccgtcactcggatcgggggacctcccttgggaaatcaatccccgtcctcctgttctttgctccatgagaaagatccacctacgacctcaggtcctcagacagaccagcccaagaaacatctcaccaatttcaaatccggtgcagctaccaggggaactgccaggacttcaaagcccacaaccaaaagccagaaaacactaccaagtacaagccccggacactggacccagagcacaccctgggcatctgctctgagatcctctccctggacagagacagctgctccttcagaaacagaggagaccctgaacacaggcaggcct

SEQ ID NO: 73151 - DNA, 1968 bp, Homo sapiens
ccttgcttgcaggaagccatgcagttagtttctgcagttagtcgtgtgaggctaggtggttgggcaggcctcgggctgtaggtgttgggtgggaaaaagacccaagggcctgaaagggagggaaaggggagggtagcgggagggtagcaggtgagttcctagggctggaaggtttaacagcagcctggtgcagtgccctgtcatcaagacaaacccacggtcctcctgggtgcctaccaagcttggtttgtacaaaagcaaggtgggagtctatttttgtacatgagatacatcacacttacctgtgggccagtattgtgaagtgagtctgagttgtttacactgatgccttccctgcccaccacaaattgtgtacatagtcttcagatgataccacccctttccccagctcccaaccaagagctggttctaggcctgtgttatatgtcatatttagcgtttttatatatgacctttgatttctgttgtttgtattttagcacagtgtatgcaccttcatttaaatacatctgtgtgcatacagatacgcatatatgtgtgtgcgtatgcatatatctctcatctgtagtttccaagagttcagctgaagcagatggagtcctgcagcccaggagacaccctgcatccctgctaatagtgtttgccacaagtattagtgagtcttccttattaatattttcatttcagaagactgaagcaaagctgatagtgtttgctgtttctttggcagctaagtgagggtcttgggatgacttgctgtgttcctcaagctgcactttggggccatctctgcagtattagccccctttttgcttggtggtactctgtctgtgcctgtgtgtgtgtgtgatagtcactcttgcatggcttccatgtctggtttgtggcatttggggataaggtgctgaagccagagcatttgcagtttgtttgaggcctcgttgccaatgatagatcactcctgttgacctggtatgtctgcttgcttgctgcttttccttgctttctcttggaagaggaaaggactctggtcaggcccaggctgagtgagatgagctgcagctggctcatggccttcttagagcagagagaggagtatgtcattttactaagttcctaaacaaacatttatgcaggcaacactccttgcagatccagaaactgaggcacaatagggttatgacttgctcaagaatatgtagctgctagggggtaaatcaaggcatcacaatttctgttcagcgggcaggaataggctgtgaattgctagcactttttttttttaagcaattactttttgacttgttcctctgaaagggcaagaggcgtacacctttcccaaatgtaaactaaaatctgcaggatgccacccactgtatagttctgctttcccagagaggaagaacttttagaaaccaaatgatcttaattgttattgcccacccctggcttttccgggtagaaaattcacagtaggaatgattgttaagagagagtgcttggaaccatgggttaacaggaaaggctacctaacttcacatatctgcaaccagagcagccaccaagcattacttagcagcaggaaaatgattgtatttgagttcctgtgtgtccaaaactgaggcaccatgttctttgaaaacatgccacctcaaggctgggcgcggtggctcacacctgtaatcccagcactttgggaggccgaggcgggcggatcaccggaggtcgggagtttgagaccagcctgaccaacatggagaaaccccatctctactaaaaatacaaaattagccgggcgtggtggcatgcgcctataatctcagctacttgggaggctgaggcaggagaattgcttgaacccaggaggcggaggttgcggtgagttgagatcgtgccattgcactccggcctgggcaacaacagcaaaactccgtctcaaaaaaaaaa

SEQ ID NO: 73152 - DNA, 431 bp, Homo sapiens; identical to SEQ ID NO: 65178

SEQ ID NO: 73153 - DNA, 1050 bp, Homo sapiens; identical to SEQ ID NO: 65179

SEQ ID NO: 73154 - DNA, 1286 bp, Homo sapiens; identical to SEQ ID NO: 65180

SEQ ID NO: 73155 - DNA, 2112 bp, Homo sapiens; identical to SEQ ID NO: 65181

SEQ ID NO: 73156 - DNA, 2006 bp, Homo sapiens; identical to SEQ ID NO: 65182
  misc_feature (1)...(2006): n = a,t,c or g

SEQ ID NO: 73157 - DNA, 1057 bp, Homo sapiens; identical to SEQ ID NO: 65183
  misc_feature (1)...(1057): n = a,t,c or g

SEQ ID NO: 73158 - DNA, 999 bp, Homo sapiens
aggatcgctttaggtgccgcgacccacgcgtccgcctgttcgcagctgcggcacttcaaggttactgactttttatgatgtttggtggctatgagactatagaagcatacgaagatgatctttatcgagatgagtcatctagtgaactgagtgttgatagtgaggtggaatttcaactctatagccaaattcattatgcccaagatcttgatgatgtcatcagggaggaagagcatgaagaaaagaactctgggaattcggaatcttcgagtagtaaaccaaatcagaagaagctaatcgtcctttcagatagtgaggtcatccagctgtcagatgggtcagaggtcatcactttgtctgatgaagacagtatttatagatgtaaaggaaagaatgttagagttcaagcacaagaaaatgcccatggtctttcttcttctcttcaatctaatgagctggttgataagaaatgcaagagtgatattgagaagcctaaatctgaagagagatcaggtgtaatccgagaggtcatgattatagaggtcagttcaagtgaagaggaagagagcaccatttcagaaggtgataatgtggaaagctggatgctactgggatgtgaagtagatgataaagatgatgatatccttctcaaccttgtgggatgtgaaaactctgttactgaaggctgccagacaccctacttgaaggatcctgttggaacctgtggaaataatacttacaagaacgttgcagctaagctggtccgggtgcagtggtgttacaactaatggatcacaaccagtcacggatttctttgttccatctccattcccacttcttcacttgactagccttaaaaaggctcatgcctgtaatcccagcactaagggaggctcagacagaaggatcatttgagcccaggagtttgagatcagcccaggcaacatagcgagacttcatctctactaaaaataaaataaaaaaattagccaggaaaaa

SEQ ID NO: 73159 - DNA, 934 bp, Homo sapiens; identical to SEQ ID NO: 65186

SEQ ID NO: 73160 - DNA, 422 bp, Homo sapiens; identical to SEQ ID NO: 65187

SEQ ID NO: 73161 - DNA, 1319 bp, Homo sapiens; identical to SEQ ID NO: 65188

SEQ ID NO: 73162 - DNA, 1591 bp, Homo sapiens; identical to SEQ ID NO: 65189

SEQ ID NO: 73163 - DNA, 1458 bp, Homo sapiens; identical to SEQ ID NO: 65190

SEQ ID NO: 73164 - DNA, 1122 bp, Homo sapiens; identical to SEQ ID NO: 65191

SEQ ID NO: 73165 - DNA, 735 bp, Homo sapiens; identical to SEQ ID NO: 65192

SEQ ID NO: 73166 - DNA, 569 bp, Homo sapiens; identical to SEQ ID NO: 65193

SEQ ID NO: 73167 - DNA, 2545 bp, Homo sapiens; identical to SEQ ID NO: 65195

SEQ ID NO: 73168 - DNA, 1973 bp, Homo sapiens; identical to SEQ ID NO: 65196

SEQ ID NO: 73169 - DNA, 713 bp, Homo sapiens; identical to SEQ ID NO: 65197

SEQ ID NO: 73170 - DNA, 647 bp, Homo sapiens; identical to SEQ ID NO: 65198

SEQ ID NO: 73171 - DNA, 901 bp, Homo sapiens; identical to SEQ ID NO: 65199

SEQ ID NO: 73172 - DNA, 1689 bp, Homo sapiens; identical to SEQ ID NO: 65200

SEQ ID NO: 73173 - DNA, 666 bp, Homo sapiens; identical to SEQ ID NO: 65201
  misc_feature (1)...(666): n = a,t,c or g

SEQ ID NO: 73174 - DNA, 1320 bp, Homo sapiens; identical to SEQ ID NO: 65202

SEQ ID NO: 73175 - DNA, 1494 bp, Homo sapiens; identical to SEQ ID NO: 65203
  misc_feature (1)...(1494): n = a,t,c or g

SEQ ID NO: 73176 - DNA, 2362 bp, Homo sapiens; identical to SEQ ID NO: 65204

SEQ ID NO: 73177 - DNA, 2349 bp, Homo sapiens; identical to SEQ ID NO: 65205

SEQ ID NO: 73178 - DNA, 1281 bp, Homo sapiens; identical to SEQ ID NO: 65206

SEQ ID NO: 73179 - DNA, 1240 bp, Homo sapiens; identical to SEQ ID NO: 65207

SEQ ID NO: 73180 - DNA, 379 bp, Homo sapiens; identical to SEQ ID NO: 65208

SEQ ID NO: 73181 - DNA, 453 bp, Homo sapiens; identical to SEQ ID NO: 65209

SEQ ID NO: 73182 - DNA, 498 bp, Homo sapiens; identical to SEQ ID NO: 65210

SEQ ID NO: 73183 - DNA, 1500 bp, Homo sapiens; identical to SEQ ID NO: 65163

SEQ ID NO: 73184 - DNA, 1766 bp, Homo sapiens; identical to SEQ ID NO: 63455

SEQ ID NO: 73185 - DNA, 1455 bp, Homo sapiens; identical to SEQ ID NO: 63456

SEQ ID NO: 73186 - DNA, 1784 bp, Homo sapiens; identical to SEQ ID NO: 63457

SEQ ID NO: 73187 - DNA, 6723 bp, Homo sapiens
gccggggctcaacccggagtgcacgccttgcaactcaagcccgtgtgcgtgtcggacagcctcaagaagggcaccaaattcgtcaagtgggatgatgactcaactattgttactccaattattgtgaggactgaccctcagggatttttcttttactggacagatcaaaacaaggagacagagctactggatctcagccttgtcaaagatgccagatgtgggagacacgccaaagctcccaaggaccccaaattacgtgaacttttggatgtggggaacatcgggcgcctggagcagcgcatgatcacagtggtgtatgggcctgacctcgtgaacatctcccatttgaatctcgtggctttccaagaagaagtggccaaggaatggacaaatgaggttttcagtttggcaacaaacctgctggcccaaaacatgtccagggatgcatttctggaaaaagcctatactaaacttaagctgcaagtcactccagaagggcgtattcctctcaaaaacatatatcgcttgttttcagcagatcggaagcgagttgaaactgctttagaggcttgtagtcttccatcttcaaggaatgattcaatacctcaagaagatttcactccagaagtgtacagagttttcctcaacaacctttgccctcgacctgaaattgataacatcttttcagaatttggtgcaaaaagcaaaccatatcttaccgttgatcagatgatggattttatcaaccttaagcagcgagatcctcggcttaatgaaatactttatccacctctaaaacaagagcaagtccaagtattgattgagaagtatgaacccaacaacagcctcgccagaaaaggacaaatatcagtggatgggttcatgcgctatctgagtggagaagaaaacggagtcgtttcacctgagaaactggatttgaatgaagacatgtctcagcccctttctcactatttcattaattcctcgcacaacacctacctcacagctggccaactggctggaaactcctctgttgagatgtatcgccaagtgctcctgtctggttgtcgctgtgtggagctggactgctggaagggacggactgcagaagaggaacctgtcatcacccatggcttcaccatgacaactgaaatatctttcaaggaagtgatagaagcaattgcggagtgtgcatttaagacttcaccttttccaattctcctttcgtttgagaaccatgtggattccccaaagcagcaagccaagatggcggagtactgccgactgatctttggggatgcccttctcatggagcccctggaaaaatatccactggaatctggagttcctcttccaagccctatggatttaatgtataaaattttggtgaaaaataagaagaaatcacacaagtcatcagaaggaagcggcaaaaagaagctctcagaacaagcctccaacacctacagtgactcctccagcatgttcgagccctcatccccaggagccggagaagctgatacggaaagtgacgacgacgatgatgatgatgactgtaaaaaatcttcaatggatgaggggactgctggaagtgaggctatggccacagaagaaatgtctaatctggtgaactatattcagccagtcaagtttgagtcatttgaaatttcaaaaaaaagaaataaaagttttgaaatgtcttccttcgtggaaaccaaaggacttgaacaactcaccaagtctccagtggaatttgtagaatataacaaaatgcagcttagcaggatatatccaaaaggaacacgtgtggattcatccaactatatgcctcagctcttctggaatgcaggttgtcagatggtggcacttaatttccagacaatggacctggctatgcaaataaatatggggatgtatgaatacaacgggaagagtggctacagattgaagccagagttcatgaggaggcctgacaagcattttgatccatttactgaaggcatcgtagatgggatagtggcaaacactttgtctgttaagattatttcaggtcagtttctttctgataagaaagttgggacttacgtggaagtagatatgtttggtttgcctgtggatacaaggaggaaggcatttaagaccaaaacatcccaaggaaatgctgtgaatcctgtctgggaagaagaacctattgtgttcaaaaaggttgttcttcctactctggcctgtttgagaatagcagtttatgaagaaggaggtaaattcattggccaccgtatcttgccagtgcaagccattcggccaggctatcactatatctgtctaaggaatgaaaggaaccagcctctgacgctgcctgctgtctttgtctacatagaagtgaaagactatgtgccagacacatatgcagatgtcatcgaagctttatcaaacccaatccgatatgtgaacctgatggaacagagagctaagcaattggctgctttgacactggaagatgaagaagaagtaaagaaagaggctgatcctggagaaacaccatcagaggctccaagtgaagcgagaacgactccagcagaaaatggggtgaatcacactacaaccctgacacccaagccaccctcccaggctctccacagccagccagctccaggttctgtaaaggcacctgccaaaacagaagatcttattcagagtgtcttaacagaagtggaagcacagaccatcgaagaactaaagcaacagaaatcgtttgtgaaacttcaaaagaaacactacaaagaaatgaaagacctggttaagagacaccacaagaaaaccactgaccttatcaaagaacacactaccaagtataatgaaattcagaatgactacttgagaaggagagccgctttggaaaagtccgccaaaaaggacagtaagaaaaagtcggaacccagcagccctgatcatggttcatcaacgattgagcaagacctcgctgctctggatgctgaaatgacccaaaagttaatagacttgaaggacaaacaacagcagcagctgcttaatcttcggcaagaacagtattatagtgaaaaataccagaagcgagaacatattaaactgcttattcaaaagttgacggatgtcgcagaagagtgtcagaacaatcagttaaagaagctcaaagaaatctgtgagaaggaaaagaaagaattaaagaagaaaatggataaaaagaggcaggagaagataacagaagctaaatccaaagacaaaagtcagatggaagaggagaagacagagatgatccggtcatatatccaggaagtggtgcagtatatcaagaggctagaagaagcgcaaagtaaacggcaagaaaaactcgtagagaaacacaaggaaatacgtcagcagatcctggatgaaaagcccaagctgcaggtggagctggagcaagaataccaagacaaattcaaaagactgcccctcgagattttggaattcgtgcaggaagccatgaaaggaaagatcagtgaagacagcaatcacggttctgcccctctctccctgtcctcagaccctggaaaagtgaaccacaagactccctccagtgaggagctgggaggagacatcccaggaaaagaatttgatactcctctgtgaatgctcctgccaggccttcagaaattgcatggccactccagcgtcatcggactctctcttattacaaagatcactgcccaggaccatcttcccgagaagcatcccttagcctaaaatccacaccaaagggagagttccagaggaatccatgaagaattcccatgcccaggctccatgtgtcatgtggaaacctccacaggtctgctagtgaagaatgcatgtatgtgagatttttgttttctttccaatagcaaatttcaaaggcaagcaacttgcaggctccatgggaactttttaatgaaggacagtgtcttcttttgaaggaaaatcaagctcgtgtttttattcgaagctctggtgtaaaatatttcaaagtcatagaaatagtttgagaaatgcatagcattatttaacactattgaacagccgactttgagcattgtttcttctaactgcccctcaactaccattatcttcaagtcaacatgcatattacattttcatcctttgctttgcaagcactggtggcttgcagtttgctaatttatttatcatagagtcatcaatgtatttgttgctgacatggttttattagatactgtagtgattcaaataagttttctatttgaaaaaaaaaatcacttgattgtatccttgcccagtgaagccatcctaagacttagcaatatggattgtacatttggctgcatgagcaagtcggccgcacacttccagacagtgtgctgtttgaattgactatttgcactcaaagtctgggtattcattggttattggcctgaaatgatcaaataactacaaatgatctgttgaataaaaatagttgagctgatatatgttaagcagatattcaatcagaatgaacaggttccggtggttattttgccgtttgacattttttatggttcatttatttttaatatagagaggaagattgaatatttatctagagaatacaaagacccacatgtaaatgataggtattatctccatgtatatatgtacccacttagtcatgtaagtgcatatacacatacacacacatgagtgtagacatgtgtttattaattgacaatgacccaaatctcttccacaagacttaaaaccaaattcagggacaaatggatagagaagaaaagggtcaaacatcgagattacatggatgttaaattatatggagacgcctaagaaataattggatggagcccttgatgccaaacccgaagtagatttagaaccttatatgaatttgatttatattttgccaagatcaaaaattagatgttaagtatccagattttaagcttgttttaatggtcaaaaaattaggacagaaataatatggacatttattagtatcttccataatttttaagtctgacacatttctattttattctaacataaaaaaacttccattatatatttactaagtatatttaattcacttaactctgtctttataagttcctattttagatggaataagagaaacaaattatatcaaggtaaaactgatcaaaagacataattgaaagttctgaaaaaagaaaaataataatatgtagaaaaatgtaacttagagagtaacacatgaacattgaagttaaaacccagaagccagatgctcacagttttattttactttaaaataaacctgtctgactgtagctttgcgaaatatcttaaaacgcaaaaaccagttgtgtcctgaaaattgtttcaagaatttaatatttttatgaaaattattttatttaactttaagcaataactagagattacaattaaattttaatcaaaatgaaggcttagttcaaacataaggaaacagtgtttgattaaaaaaaacacatctagtaagacgtaaggggaaaatcacatcctctttggagatgattatattttgatctgaagggtttggggtgttcattagacacttaataaaacttaacttccaatgaaaaagaaatcttttgtaaatcattctacttttgcactttgaaagaaaggcgttaatcataaagaagcaagaatggtcaaaatcgaatgctgcatttttataaacaaaattacagactgtctgaaattgaagaagaatgaactaataatagcattcataaccaaacacaatgatgattattgcagaacattgtatcacattttagtccagagatagaataaagttgaataaccttgacttacacaaaactgttttggtagttggatttcattatcttagtgaatttagtcattttacaatatgtttgtatttggccatttactgtaatcacatttttatatctgtacaatgacactttttgcagttgtggggtagtgtgtaacactgtccatcttgcatcattgaaactactacaatgatactatcatttaataatattaatattacttgaaatagactaagataaagaaaaggggtctgtatgatgtgcagttttgtgcctttatgtatttgccttgttctttgtcgaatgtgtgaaattctgtactggggtttttcctataatagaaagtagagctgtgtattaaattagactgtgtctctctgatacctttacactactgagaatagcatggttttggccatgtaaaccaattttcaaagttctaatgacatagccatgtgtttttggttttttatatttcattttaaaatttgagtatcaccatacattaattaatactcctgtagtagataagctgtcattaagtaattcccaaaaaaagggccatttgcttgcattactttgaatttaatgttgcgcttgtgcactgtgttaatattgtttgtgatggattggacgttgtgactcttgccttttaagaagaaaaaaaagataggacaaagtatttgaagctcttaaaatgtacatattttggttcttctatctcaaattatttaaaatgcataattcacatttttgtaataattctatgcaattttgtggcatgatgtttcttccacttgtaattttatgtgctttcatcacaaatccaaaggaaagaataaaaatttcttaacacaacccagcggtt

SEQ ID NO: 73188 - DNA, 1987 bp, Homo sapiens
tttcgtggccgcgcgagccaccacaggaggaggaggaggaggagcggacgtcggcttctccccgcgggagcccccagcatgggaaattaaaagagagacggaattcaaggatgacagtttgcccatcaaacgggaaaggcatgggaatgtagcaagtcttgtacaacgaataagcacctatggacttccagctggaggaattcagccacatccacaaaccaaaaacattaagaagaagaccaagaagcgtcagtgtaaagttctttttgagtacattccacaaaatgaggatgaactggagctgaaagtgggagatattattgatattaatgaagaggtagaagaaggctggtggagtggaaccctgaataacaagttgggactgtttccctcaaattttgtgaaagaattagaggtaacagatgatggtgaaactcatgaagcccaggacgattcagaaactgttttggctgggcctacttcacctataccttctctgggaaatgtgagtgaaactgcatctggatcagttacacagccaaagaaaattcgaggaattggatttggagacatttttaaagaaggttctgtgaaacttcggacaagaacatccagtagtgaaacagaagagaaaaaaccagaaaagcccttaatcctacagtcactgggacccaaaactcagagtgtggagataacaaaaacagataccgaaggtaaaattaaagctaaagaatattgtagaacattatttgcctatgaaggtactaatgaagatgaacttacttttaaagagggggagataatccatttgataagtaaggagactggagaagctggctggtggaggggcgaacttaatggtaaagaaggagtatttccagacaattttgctgtccagataaatgaacttgataaagactttccaaaaccaaagaaaccaccacctcctgctaaggctccagctccaaagcctgaactgatagctgcagagaagaaatatttttctttaaagcctgaagaaaaggatgaaaaatcaacactggaacagaaaccttctaaaccagcagctccacaagtcccacccaagaaacctactccacctaccaaagccagtaatttattgagatcttctggaacagtgtacccaaagcgacctgaaaaaccagttcctccaccacctcctatagccaagattaatggggaagtttctagcatttcatcaaaatttgaaactgagccagtatcaaaactaaagctagattctgaacagctgccccttagaccaaaatcagtagactttgattcacttacagtaaggacctccaaagaaacagatgttgtaaattttgatgacatagcttcctcagaaaacttgcttcatctcactgcaaatagaccaaagatgcctggaagaaggttgccgggccgtttcaatggtggacattctccaactcacagccccgaaaaaatcttgaagttaccaaaagaagaagacagtgccaacctgaagccatctgaattaaaaaaagatacatgctactctccaaagccatctgtgtacctttcaacaccttccagtgcttctaaagcaaatacaactgctttcctgactccattagaaatcaaagctaaagtggaaacagatgatgtgaaaaaaaattccctggatgaacttagagcccagattattgaattgttgtgcattgtagaagcactgaaaaaggatcacgggaaagaactggaaaaactgcgaaaagatttggaagaagagaagacaatgagaagtaatctagagatggaaatagagaagctgaaaaaagctgtcctgtcttcttgagtggtgtggacctggtgttcataatgttccagggattcagaagcaacgctatgaacttcagctgacttgttacttaaaaaattgtgaattctgttgttgtgataaatatgagcaaatgaagtgtaatatctatagaaaagtagagtgagg

SEQ ID NO: 73189 - DNA, 1326 bp, Homo sapiens; identical to SEQ ID NO: 63461

SEQ ID NO: 73190 - DNA, 1803 bp, Homo sapiens; identical to SEQ ID NO: 63462

SEQ ID NO: 73191 - DNA, 785 bp, Homo sapiens
  misc_feature (1)...(785): n = a,t,c or g
ttttttttttttaatttgcaaaaaaaatcttttattggcatgaaaataatgttgtaaatggcaccaaatattccacttaaatgcatatacagtattagagtcaaaaactattttatccctctttgctgtttttcccccttctgcccactttcctgggtgttgggggggcccgctgacaacagtcacaaatccagcgacctgatggaatagcaccaaggcccacacaaaaagtatgataacctctgtcacacatatcacagaacatcatttcttcttcatggtggggttgtccacatataatgcatgttttacattccatacactgccatgggtaggtcttaatcatagaaacaagctccattgtcatatccaggcaagaaggatggccactattctcacattgggagcagtgtataagtgattcagcctttcctttcttgttggactccttacccttcagacaaattccacatatagcatttggaatgacctttggcttgtacccaggaactgacttggacagtacagaacgtttgggaccatcttttcttggagtggcagctttgtcttttgatttctgtcttccctggaaagagtcctcctggctgtcaggagggctttccccttcagatacattgccagaggagctgtccgaagtgcctttatttttccgtttctcatcacctcgaccatcttcgccatcatctgaatcaccatcactgtctagagcagggagctcaggatccctcgtgccgaattcgtgcagcgcaatcgagggntcgcgt

SEQ ID NO: 73192 - DNA, 2035 bp, Homo sapiens; identical to SEQ ID NO: 63464

SEQ ID NO: 73193 - DNA, 1348 bp, Homo sapiens
tttcgttccggttgtctggagcccagcggcgggtgtgagagtccgtaaggagcagcttccaggatcctgagatccggagcagccggggtcggagcggctcctcaagagttactgatctatgaaatggcagagaatggaaaaaattgtgaccagagacgtgtagcaatgaacaaggaacatcataatggaaatttcacagacccctcttcagtgaatgaaaagaagaggagggagcgggaagaaaggcagaatattgtcctgtggagacagccgctcattaccttgcagtatttttctctggaaatccttgtaatcttgaaggaatggacctcaaaattatggcatcgtcaaagcattgtggtgtcttttttactgctgcttgctgtgcttatagctacgtattatgttgaaggagtgcatcaacagtatgtgcaacgtatagagaaacagtttcttttgtatgcctactggataggcttaggaattttgtcttctgttgggcttggaacagggctgcacacctttctgctttatctgggtccacatatagcctcagttacattagctgcttatgaatgcaattcagttaattttcccgaaccaccctatcctgatcagattatttgtccagatgaagagggcactgaaggaaccatttctttgtggagtatcatctcaaaagttaggattgaagcctgcatgtggggtatcggtacagcaatcggagagctgcctccatatttcatggccagagcagctcgcctctcaggtgctgaaccagatgatgaagagtatcaggaatttgaagagatgctggaacatgcagagtctgcacaaaaatcatatactgttgcctgctgcagtggctcacgcctgtaatcccagcactttgggaggccagggtgggtggatcgcttgaggtcgggagttcgggaccggcccggctaattttttgtattttcagtagaaatgggatttcatcatgttggccaggctggtcttgatctcctgacctcagatgatccgcccgcctccgcctcccaaagtgctgggattacaggcgtgagccactgcacccggcctcaagatatattttagaggtagaattgacaaggcttgacaacagattaaatgaggaggatgaaggagagggaggagtccgggatgaccctcccatttctggcttcagcagttgggcagatgatactgtcattcactaagactggaaacacctgaggatagacaagtctcagtgaaaagtggtgattccactttgggacccacttgagtttgagatgccccgagaacctcaagcagacacgcttggcaggcaacacagatcgtcacc

SEQ ID NO: 73194 - DNA, 3285 bp, Homo sapiens
atggcatttcaggcaagccacaggccagcctggggaaaaagcaggaagaaaaactggcaatacgagggcccaacccaaaagttattcctgaagagaaacaacgtgtcagcaccagatgggccttcagaccccagcatctccgcgagcagtgagcaaagcggggcacagcagcctcccggtttacaggttgaaaggattgttgacaaaaggaaaaataaaaaagggaagacagagtatttggttcggtggaaaggctatgacagcgaggacgacacttgggagccggaacagcacctcgtgaactgtgaggaatacatccacgacttcaacagacgccacacggagaagcagaaggagagcacattgaccagaacaaacaggacctctcccaacaatgctaggaaacaaatctccagatccaccaacagcaacttttctaagacctctcctaaggcactcgtgattgggaaagaccacgaatccaaaaacagccagctgtttgctgccagccagaagttcaggaagaacacagctccatctctctccagccggaagaacatggacctagcgaagtcaggtatcaagatcctcgtgcctaaaagccccgttaagagcaggaccgcagtggacggctttcagagcgagagccctgagaaactggaccccgtcgagcagggtcaggaggacacagtggcacccgaagtggcagcggaaaagccggtcggagctttattgggccccggtgccgagagggccaggatggggagcaggcccaggatacacccactagtgcctcaggtgcccggccctgtgactgcagccatggccacaggcttagctgttaacgggaaaggtacatctccgttcatggatgcattaacagccaatgggacaaccaacatacagacatctgttacaggagtgactgccagcaaaaggaaatttattgacgacagaagagaccagccttttgacaagcgattgcgtttcagcgtgaggcaaacagaaagtgcctacagatacagagatattgtggtcaggaagcaggatggcttcacccacatcttgttatccacaaagtcctcagagaataactcactaaatccagaggtaatgagagaagtccagagtgctctgagcacggccgctgccgatgacagcaagctggtactgctcagcgccgttggcagcgtcttctgttgtggacttgactttatttattttatacgacgtctgacagatgacaggaaaagagaaagcactaaaatggcagaagctatcagaaacttcgtgaatactttcattcaatttaagaagcccattattgtagcagtcaatggcccagccattggtctaggagcatctatattgcctctttgcgatgtggtttgggctaatgaaaaggcttggtttcaaacaccctataccaccttcggacagagtccagatggctgttctaccgttatgtttcccaagataatgggaggagcatctgcaaacgagatgctgctcagtggacggaagctgacagcgcaggaggcgtgtggcaagggcctggtctcccaggtgttttggcccgggacgttcactcaggaagtgatggttcgcattaaggagcttgcctcgtgcaatccagttgtgcttgaggaatccaaagccctcgtgcgctgcaacatgaagatggagctggagcaggccaacgagagggagtgtgaggtgctgaagaaaatctggggctcggcccaggggatggactccatgttaaagtacttgcagaggaagatcgatgagttctgagtgtcgggctgcccactggtgacaccgggatcgggctgagcaggagaacatcaccggctccagttgccctgatccattctcacagcctgaaacaagctcacccgtagcttacgcttggaagcaggactgggaacatccacgctatttattatcgaggagttttaaagtactgtaactttaaaataaataactacaaagcttctttgtccaaacgtcattattttatacttatatacacgcaggtgtaaaagtataaaggtgagcactagactgctcttagaagctctaatttttgttttctttggctagtactgtataaaaaacagaattgtgttttattggttttggatgacagaaaagtctggaataatgtttgttttcctcatttcttccttctagaacacagaatctaaaggggtattagccagcctcgcctccctgccccacgtagagacacagagtgatgtgaggcgttggctttttctccaagaaggtacagatacctcagattcgggaaactcaaaatcaaaagacttagcttctaggataaatacttctgatgaaaaatccgctgaggagcataccccaaaccagacatatgcttaggattcatgctgagatatcaattggtttccccttctttttaaaatacgtccagttcttacccagttaacatgaagaaaccactgtctctagaagaaagcttgttttgcagtattagtgaatcactgaatagcttaagtatgactatctaagttataagttagtctttagtgggttttaaatagtttttctgacccttctgaaaaataactacataagtgcttcttgttgctgggtgagaaatactactttatagacagttttgggtttctgtttgcaggtatggattgatgtatttcaccaaaataaaatatttttatgtttataaagtgtaatttttaggttcacttagaatatattttatttaataagttaaaattcttttggcacactattaaatgcaaaaactcctttcaaaacaaaaaagaactaccttatattcaacatttaatgttcttggcctctgcttttatgtctatacaatatactgagttcagtatggtgtccaagagtgccctgtgtggatagacatgtgcactccttccaggagtgggtactgattccagactccagatgcctattattagttaggcttctgagcttgcaatcatattgaatgtatgaagagcgaaatcaaattcttatttttgtacagttttgaagtttatacttagaactgaccacctccccggccacgcggagagctgtacagtgtgtaaatctgcctttatcttggattgattggtacagtatttttgcatctgtgggacctaccttttcgttcagtagtttgaactatatataaactgtacaatcctgtaaaagtttttatagaataaatattcagctgtgaaaactggttaaataaaactaatatttcttaac

SEQ ID NO: 73195 - DNA, 2982 bp, Homo sapiens; identical to SEQ ID NO: 63466

SEQ ID NO: 73196 - DNA, 1479 bp, Homo sapiens; identical to SEQ ID NO: 63467

SEQ ID NO: 73197 - DNA, 1604 bp, Homo sapiens; identical to SEQ ID NO: 63468

SEQ ID NO: 73198 - DNA, 551 bp, Homo sapiens; identical to SEQ ID NO: 63469

SEQ ID NO: 73199 - DNA, 644 bp, Homo sapiens; identical to SEQ ID NO: 63470

SEQ ID NO: 73200 - DNA, 1897 bp, Homo sapiens; identical to SEQ ID NO: 63471

SEQ ID NO: 73201 - DNA, 426 bp, Homo sapiens; identical to SEQ ID NO: 63472

SEQ ID NO: 73202 - DNA, 2179 bp, Homo sapiens; identical to SEQ ID NO: 63473

SEQ ID NO: 73203 - DNA, 1810 bp, Homo sapiens; identical to SEQ ID NO: 63474

SEQ ID NO: 73204 - DNA, 321 bp, Homo sapiens; identical to SEQ ID NO: 63475

SEQ ID NO: 73205 - DNA, 2687 bp, Homo sapiens; identical to SEQ ID NO: 63476

SEQ ID NO: 73206 - DNA, 581 bp, Homo sapiens; identical to SEQ ID NO: 63477

SEQ ID NO: 73207 - DNA, 4483 bp, Homo sapiens; identical to SEQ ID NO: 63478

SEQ ID NO: 73208 - DNA, 384 bp, Homo sapiens; identical to SEQ ID NO: 63479

SEQ ID NO: 73209 - DNA, 538 bp, Homo sapiens; identical to SEQ ID NO: 63480

SEQ ID NO: 73210 - DNA, 378 bp, Homo sapiens; identical to SEQ ID NO: 63481

SEQ ID NO: 73211 - DNA, 1406 bp, Homo sapiens; identical to SEQ ID NO: 63482

SEQ ID NO: 73212 - DNA, 2614 bp, Homo sapiens
ttttttttttttcatttaacttttggataataaaatactttattggtaccatttaataaatgtcaaaaacgtatagcatttccattgcttagcttccatctttaaacttaaagctagttaaaaacaacaggaacaaaagtaaactcatttgattctctcaaaaaacaagctgtaacttacctttgcaaataattaggttctctcactttaaatatcgtaattcactgggtcttcataataaataattattaataatatataaaaggagacagtgggcctgaattattttgcagaggaacatttcacacatcttttaaaaaaatcactaaactacccacaacttaaaacttgtaagaataattaggtgaggagttattggtaatattggaattaatatagcacctagaaatttgaaatttgtaatatttcagatgatatgatttactgagaaaaagagtaatgatttttcttcagtgaattttcaggggttttcaacataggtctcttttaaaagggttaaaaaatttatgcatactaggaattgacctgatggtaacagatccatgtgtgacaaataatgtagtgcagtcctatctgaatataatttctttttcactttgtctcattaatttatacctcaattaaaacattctatatgcaagtgacatatttctctaaaacattccgtatttcagatttccattcagactatcttcccctcctcccttttctcaaatcagagtgatcttgtggcataccatttgctttttctctccacaatgaaactctttttcaactcaaagtattatagtaatgcaaatacaaatgtagcatatattaatatattagaaaaaggatagtaaatacatatggatccatgccaaattagaaaattgaaagcaaaaacaaacaaaaccatgctatgctcatctattctgaaccaccatgggaagaccctgatagagctggctcacataaactaatgttcccagacagagctaggatcctgtattccaacataattaaatgctctgttaaaaatgtttccgtgttcttttctgtttgttcaaaatagtttacagcaactgactactaatcctaatcctgaacatgataatgtaataacatatttttaatcaagccatagattctaacctattttctactattacccatttgcttaaaaacagactttcaggggtgtaagcaacagtaagttaaggagtttttagttctacctttctcttgattgattgattggggatttcagatgtgtcaattaattatcctctatttcagtggaaaaggattcttcaagctatcaagtcaaggaggctgactcaggggcgggcaggtgaagatacctatccacatactatgctcataacgctccatctcctctgtaagaatgtgctgctctccacccaacagtggcccagcacattccatccgctccacctagatgcaatcaggacaccatgcaatcccacacacaatcagaacatgggcaccaggtagaactaactcaaaacaacttttgggacaaatatgagatttcaatttgtcaattattccatagtgcagtattctcacaaaacagagattttgtgttgaaacatttgttttttcttctcacatcaagttgaattgctaaagtaatgtcagaaagaacatgaaaaataagcatgtcttctccaaaagaggcactgcatctggaagtagaagtaaggctaaataaatagtgctgttttgtggttcatacagtaacgcattaattatgatttcaaccaacagcttcactgtttgtcctgtatgcctgtttatgaagatgcgtctctatttcctccctgaagaccagcattcccaggtgggagtgagaggcctcattcatggctttagactggatgcacatgcggtactgctcgggggtcagctcatcagcacagcgcttttcatgccagaggtggaaaagaccaggaaccggagtccgaatcacaatgaggtcaccatgtaagtattttcgataaagatgaacatcttctccaccccaacctttcacttccatgtcaaatccaccaatggtcaggaaatctgaacgatactgacaagtcattccaaagccaaaatctcgccaaaagccagaatcctttttgtgaaccagctgctgctccacaggtggtggcacttcctggttggcataaacaatggcaggattgtaaagactgaacaccacagggtaaaacaccttcttacctggctcagcatttaaccggcagctgttaaggaattcggctgagaaatagatatcaacatcacagaaaaacatcaagacctctcccttgtcccaagctcgggcacccacatttagtcctcgtccacgattaaattcttcattcaatgagaccaaggtgtaattgtgaaaattagactcactatgaggaaagcacacacaacaaatgataagtcccacttaaagttaccaattttcttccttcaacacagcttacaaaatatgttttacacttcaaatatttgattatattggttctacattcacaaagggaaagaaaatcccaccttcatctgtatgattatcatcagggagagatattca

SEQ ID NO: 73213 - DNA, 3609 bp, Homo sapiens
gagagggaaatgaacataattcctaaagaaaggccatataactatatcataggccaaccatgtattttatgtgtagtgtcttcctctgtaatatgtgaaaatatccagttagttagttagtgaaagacttaacgaaagaaaaacccacaagaaattattaaacttttactatcgaaaggatttactttggtggagttgagggtgggagagaaatgaatctttatgttctcctgttagagaatagcttttttccttccagctttcacactggcacatgcttattacaattctaccttgggaacatgacagaatttttttcttatgcattcatgcaacataaacaaacagataattctaggaagactgtgattaagtcacttgcattctgacctattattttattttcatctctccctgactctgggtgagccaaaggctattaagattatgttctcctgctcactcactaggcagacctctactcgagaagtgatctgacagcgcagtagctgatgctcgtccagtgactaaagcagtcaggctgaaaacagattttatctcaacaacagtcctagtttcttctgtcctcaaacactgttatttattttcaagataaaatttagtaacaacattacgaagtagcttttattcccttgggtgaataagatgtgcacatttaataataaatttgcttactaaaggtccttttaggggaaaacaaccttaaaaatacagttctagtccttgggcagtgaacaaagaaaaaatgtgcttgagaaacacagtccaggttaaaggaaaactctcagatcggttaatgcagttgaatttttgcttgagaatgtgagcaacgtatcagcaaatacattcattcttgtgctactcttcattatttagcatagagctaccttaggtgtttctacacatgctctaaaccaagagtaagtttaacatgtcagcagtgaggagtagacattttctactatagcacactgggaggatgtttacctggtactctaggtagaaatgactccattgtccactaagtttgggaaataaataatatggcaacattgctactggagatacataatgtacagaagcctaactataaagagatttgattaacgagacttaagtcttagtccagaatttcccaaatttatgtgaacatgggacatcatttttcatagcacacacgtgaacaagccattattctttaaacaaggtattacaaactcaaccactctggagaactgatgagcgcctaactgaaattattagactaaattcttagtaaacaatgttttctgaaccttgttcagaaatataatcactgcaaattattttccaagtgttgttctaaaaaacaatataactggacactagtaagaaagtaaggtaaattattaatccactcgcattcaattctacaaggaatgaaaccatttttaaaagtggcttagaacaaacaatttactgagcacttactatgcacccaccaggtatattccttttataatgtaatcttcaaaatgagctgtcaaactattggcccattttgtgaatgaggaaaatgaaaattaagttatataatcatgagtggcagagctgggaaatgaactcaagtctgtgactctgaagacatgaaaaagttacacatttcagatgaatgcataaactatctttatgggtatgacatgaaaagtaactgtagaatgttaccttaattacatttcctaatgcatgatgtggacagacattagaaaagtttggactcagttggaaaaacaaatccagcagttaaaaaagtcctttacttgcaatccctacccctagctaacccaagagcatttaaaaaataacttaaaaagtagccatcaaagataccaatcaatttcttactggtgaaatatataagaacttccaggagtcacaagagttccaaacaattaatttataaaaataacaaaacatttgtctatgaaaaaaagatcaggattcactctcatcgacgtcctcatctggatggtgctcagcatcctccttttcctgctgctgtttcttccacagtttggccatggccaggagtttgaggttaggttggttggcagcatcttctggaaagatgtaatcaaagtattcttcccagcctgcatcagacccatcatcagtctggacctttcttctcttcttgactttctctggcatgagtttgtctactctctccttatctgaagctgttccaaattcttcttcaaaacttcgccaagattccagcagcataagtctctcttccttttcttcacagtttcgcatggttttgttagcttcttcataaatttgtctgcatttagtcaaacttccttcttttcctgaagacaactcaaactgagcaaagctgatccataccttgacatgctgcgtccgttgaagcaaccgccggtaaaggtttcgtgttctttctgtttcttcctgctcaatttcaaaatcaatatatgatttccaaagcacctctggcatgtctaaacgtggctgactgatggctaattcatagattgcccgtgctctgtcaatatcaccaaggattgtctctaattcagcgaatttaatccatgaggtacaattttcaggtccaaattccaggaacttttcataaagcttccggcatctgtcaaattctcgaagctgtagctccaattctatgtaaactttaaataatttgttctttggacatttgcctatggaagttcccaatgctcttctggctaatgacagattcttctgtcgtatttcaaactgtgcatacagtatccacattttggcaaatgtgaactttttgtgaggaattagttccaaagaggcttgatacacctgtcttgtcctctcaggatcctttgcctccaattcttcatagagtgcatagttgatccaaagataaatgtagcgcttccagtgcctcttctcctgaatgggtgggacattggcaatggccctttcatagacttctctcacggcttcagcttctgcgtcactttctaccaagcgcaagtaatcaaaccatgcatcataattgtgtggattcgccttcacttcttcttcgtactggaatctccgtttgctcacaatgatatcttcaataccccgcctatcaccaaacttcttctcaaagatggtataatttttaaagagttcttgggcatcttgttttgaaattctgtccagggcatacttgtaaatcactcgtaccctttcaaactctttctgattttcttcaaacttggcaaaggcaacataaaggtgctcatccatatgttcatctccaaagaattccacagctctctcatacactttccgtgcatgggcaaaataagcatgtttttcttcaaagcgggcatacttgatccagttcttaacatcagggtgcacgaggacaaatcgctcataaatggtgcgggcccgatccacctctttgtatctcagctcaaagttgatgtaggagtgccaggcttgctcctcaggctgccactccatccagcgctcaaacacctgccgggcaccggcaacgtttcccaacatttcctccatgtacgtgtacttgtaccagaa

SEQ ID NO: 73214 - DNA, 1574 bp, Homo sapiens; identical to SEQ ID NO: 63485

SEQ ID NO: 73215 - DNA, 2390 bp, Homo sapiens; identical to SEQ ID NO: 63486

SEQ ID NO: 73216 - DNA, 4764 bp, Homo sapiens; identical to SEQ ID NO: 63487

SEQ ID NO: 73217 - DNA, 1102 bp, Homo sapiens
tttttttttaaaaaaaaattaagctctttaattatgtgcacacagattttagaaaaggtagccttttgtatatagatacctttacattctttaggctgacttttaaattgtcatcttttttcaactacagtttttgtatatagtaaaccagaagatgtgtatggaccctgttatggccaagcatctcaaagatgaagagagaattaatgatagttatatttcactcaaaatgccaaaaaaaaaaattcaacaaagtaaaaattttaaaacttgactctaactagttcctttttgttttacattctcaaaccattgtcaaatattctaaatatctctgagaatttctcttttaatgcttcacttgtataatcttaaaatcctgacagtcatacaatacagcatgtagtaggtaccttttcttgaggcacattcaagtgttttggcaaacagtaaaaagtatctaaatgccacaggttaaaatgtcaagttttactgagtcaccaacttcacctcttttgatctgcctgttctccaagaacatcattctccggaagatccaagttcctctagttgttttctttgtgttgtttccagttcttctagtcttttgcgaagtagagagagttccctttgatgttgttcctcctgcatatgaggaggaaatggtagttccatgcttggaacccatggctgatgactgaaagctaacaggattgatagatgctgttggaggcatgttaggaaccaaaattagacttcgaaattcattatgtcttctctgtatatcttttagtcttttttgaagccttgtatagtcttcaaaaggaacattttgtctatttaagacctgattttctgtttccaattcttctttctttgcctccaagacttctactttctcttgtagtcttttcaatttgttttcatgaagagattttctctaaaaagagaaatatgaacaagtatgttaatacataatctcttatttgaacaaaactatatagaaaatattttactcaccaaaaactgtgtttagatatgaatgttttcagtgaatactagaaacaaaggttagtagacatggctcttactgaaaattgca

SEQ ID NO: 73218 - DNA, 543 bp, Homo sapiens; identical to SEQ ID NO: 63489

SEQ ID NO: 73219 - DNA, 1158 bp, Homo sapiens; identical to SEQ ID NO: 63491

SEQ ID NO: 73220 - DNA, 1882 bp, Homo sapiens; identical to SEQ ID NO: 63492
  misc_feature (1)...(1882): n = a,t,c or g

SEQ ID NO: 73221 - DNA, 559 bp, Homo sapiens; identical to SEQ ID NO: 63493
  misc_feature (1)...(559): n = a,t,c or g

SEQ ID NO: 73222 - DNA, 1608 bp, Homo sapiens; identical to SEQ ID NO: 63494

SEQ ID NO: 73223 - DNA, 2102 bp, Homo sapiens; identical to SEQ ID NO: 63495

SEQ ID NO: 73224 - DNA, 1049 bp, Homo sapiens; identical to SEQ ID NO: 63496

SEQ ID NO: 73225 - DNA, 4199 bp, Homo sapiens
cagcacatgaggaacctgcagcaacaggagctgcacaggcttctccgggtggctgacaaccaggaactgcagctcagcaacctgctctccagggaccgcatcagtccggagggcctggagaagatggcgcaactcagagctgaactgctgcagctatatgagcgctgtattctattagatattgagttctctgataatcagaatgtggatcagatcctgtggaagaatgctttctatcaggtgattgagaagttcaggcaacttgtcaaggatccgaatgttgagaacccagaacagattcggaacagacttttggagctcttggatgagggtagtgacttctttgatagtttgcttcagaagctgcaggttacttacaagttcaaactggaagactacatggatggtcttgccattcgcagcaagccattacgcaagacagtaaaatatgccttgatcagtgcccagcgatgcatgatatgccaaggagatattgctaggtaccgggagcaagccagtgatacagcgaattatgggaaagcacgcagttggtacctgaaggcccagcacattgctcccaagaatgggcgcccctataaccagttggctttgctggcagtgtatacgaggaggaagcttgacgctgtctattactatatgcgcagtttagctgccagcaaccctatcctgactgccaaggagagtctcatgagcttgtttgaagagaccaagcggaaggcagaacagatggaaaagaagcaacatgaggaatttgacctgagccctgaccagtggcggaaaggaaagaagtctactttccggcatgttggagatgacaccactcgcctggagatctggattcatccatcccatccacggtcttcccagggcactgagtctgggaaggattctgagcaagagaatgggctgggcagcctgagtcccagtgatctgaacaaaaggttcatcctcagttttctccatgcccatgggaagctgtttacccggattgggatggagacattccctgcagtggctgagaaggtcctcaaggagttccaggtgttactgcagcacagcccctctcccattggaagtacccgcatgctgcagcttatgaccatcaatatgtttgcagtacacaactcccagctgaaagactgcttctcggaggagtgccgctctgtgatccaggaacaagccgcagctctgggcttggccatgttttctctactggtccgccgctgcacctgcttacttaaggagtccgccaaagctcagctgtcctctcctgaggaccaggatgaccaagacgacatcaaggtgtcttcctttgtcccggacctgaaggagctgctccccagtgtcaaagtctggtcagattggatgctcggctacccggacacctggaatcctcctcccacatccctggatctgccctcgcatgttgctgtggatgtatggtcgacgctggctgatttctgtaacatactgactgcagtgaatcagtctgaggtgccactgtacaaggacccggatgatgacctcacccttcttatcctggaagaggatcggcttctctcgggctttgtccccttgctggctgcccctcaggacccctgctacgtggagaaaacctcggataaggttattgcagctgactgcaaaagggtcacagtgctgaagtattttctggaagccctttgtggacaagaagagcctctgctggcattcaagggtggaaagtatgtgtcagtggcacccgtcccagacaccatgggaaaggaaatgggaagccaagagggaacacgactggaagatgaggaggaggatgtggtgattgaagactttgaggaagattcagaggctgaaggcagcggaggcgaggatgacatcagggagcttcgggccaagaagctggctctggccaggaagatagctgagcagcagcgtcgccaggaaaagatccaggctgtcctggaggaccacagtcagatgaggcagatggagctcgaaatcagacctttgttcctcgtaccagacaccaacggcttcattgaccacctggccagtctggcgcggctgctggagagcaggaagtacatcctggtggtgcccctcatcgtgatcaatgagctggacggcctggccaaggggcaggagacagaccaccgggctgggggctacgcccgtgtggtacaagagaaggcccgcaagtccatcgagttcctcgagcagcgattcgagagtcgggactcttgcctgcgagccctgaccagccgtggcaatgaactcgaatccatcgccttccgcagtgaggacatcactggccagctgggtaacaacgatgatctcatcctgtcctgctgcctccactactgcaaagacaaggctaaggacttcatgcccgccagcaaagaggagccaatccggctactgcgggaggtggtgctgttgacggatgaccggaacctgcgtgtgaaggcgctcacaaggaatgttcctgtacgggacatcccagccttcctcacgtgggcccaggtgggctgagggagccacactggggcccccccccccggggaaccgttcctgaaaggccaccaggcgcccagggtagcacggaaaatgcccacgtgcctgagccaccaatccacccagacaataaaccatcctcttccaacccacgccacggccatgctgtgggggacctgctcctcacagagcccctcccaaggatcgggcggaagctgctgggaccctcctgggctgccaggatttagcagggaggtggctggctacagcaacagcagctgggcaagccagataggccgctcatgctctcagcctttctccctcccccgtctcattccaaggctgagggagggccttctcgcctggggacgcagccactttctccagtggagacagggcaggggttctgagtttccgtcagatgcagtgaaatcacagttccctttcatcttcagaacctctgtcgtgaatgtgttcaagaggctttggttaagtcaggaagaagtgcccagggtgtgtgtccccagtctccctgaggcctggactcgcccatgaacccaagtcggcttctagacagcatgtccctaacagcagccctgggcccccacctcttctaccatccaccccagacttaccacacacccttcctgctgctcctcttcctgcccttatcaacctgggtccctcacacttcgccagttgcgtccccgtggacagtcatgagtctagaggaaaggggcatctggtctcaggcccgtgctctcgggtggcctccacctgctccctttctcctcactggcctttctttccgtctagcttcctcttcaggaaatgtcctgactctcctcagctcccccttcacccctccttgcccgcctaccctccctccagaatagcccctcacccttcttccccttctagttgatccttttcacctccctgatccccttcatttcttcaccgcggttcctcgtcataggggttctcactctgaactttccctctctactacccatggcaggaacctagtacaggtctcccacccagggccttccaccctcggctcctgtgctgggagaaacttccaggcgtggacagcccagcctgaggcattccagtgctggggcaccgtcgcctaacctggtttctagctttgccctcactccccggaaaaactgacactgacacaggggccctttccttgcccctttagctggtacctcagtggggaggcttccttaccaagaatgagttcctgaaacccagggccagagacaaggacaacttaggggaagacggggttttcggtggagccaggggcaaatcttaatgggaccagtgggggataccccagagcccatggcctgactgcacagcctgcctggaggatgggtgcgcagctctgccctccctgaggcccaggactatgccagaagcgatggggtaccgtgtaggggagccaaggccagtagtttgggggtaggagtcccctagagtctcagaagactgggctctttggagtacagggtccccggcctctcctttaagattctctccccagctggaaggccgatgactgggtggtcgggagggagacccagctctcctttctgtcccgtttgcagcactggttttgtttccttaataaatttttagttatgaaacat

SEQ ID NO: 73226 - DNA, 357 bp, Homo sapiens; identical to SEQ ID NO: 63500

SEQ ID NO: 73227 - DNA, 458 bp, Homo sapiens; identical to SEQ ID NO: 63501

SEQ ID NO: 73228 - DNA, 345 bp, Homo sapiens; identical to SEQ ID NO: 63502

SEQ ID NO: 73229 - DNA, 369 bp, Homo sapiens; identical to SEQ ID NO: 63503

SEQ ID NO: 73230 - DNA, 1451 bp, Homo sapiens; identical to SEQ ID NO: 63504
  misc_feature (1)...(1451): n = a,t,c or g

SEQ ID NO: 73231 - DNA, 331 bp, Homo sapiens; identical to SEQ ID NO: 63505

SEQ ID NO: 73232 - DNA, 1006 bp, Homo sapiens; identical to SEQ ID NO: 63506
  misc_feature (1)...(1006): n = a,t,c or g

SEQ ID NO: 73233 - DNA, 1433 bp, Homo sapiens
cccattttgttccccccccaaaaaaagggttctttccaaaaattcccaagaaggtttataatacccccccctaaaggaaaaaaaattttctttccactcccgcgttaaatttggcccccccagggattctttaaaacggcccccccttttttttttttttttttttttttagaacaaaacaggtatatttctattagactacctgatacagaagatagtgtggtatggatggatagtatgaaggacaaataatacaaatatattttattgaaataaacaaaaatgcatacacagctcaatgggtcacttggaacaaacttgcttgactatattactgagcagaaacaaaacggaagcacaaacacctttctttttttgacatgtatctggagataggtaggaagacactacttggttttttaaaaaactgaccttcccttaaggcctggtcatagaagtgtaaacaatgtaaatgaatccaccattaccagttgtcatatcatatctatgtcacctgtgtattctgagattacacacatacctgccaatatacctgggaaaggttattttatcacagttacacttgagttcttggcaggcaggactgaggaagagtaatttgaaagaagttttacatcctatttagaagaaatcactagtatttccttaaataacaggttacaatagaaagatactgcctggaagttatcctttcactttggttcatttttagtttttctttatgatttacatagctgtttaattcatttgcttatagtacaatcctgccataaagtattaaagcacaagatacctattattccttcaacatctgcatttttcaagttttatactctacatccacagtacgtcagcagttcttgaatgtttaaaaaaataaatgggtaaaatgcttctaaaaaatgcagatgtttataactacaatggtactaagatgggaaggagacaatgagagaagggataaaagcaaacatgttcatgtgcagggaatgtggttcaagtctttggatttaaaaacaagttccccagagaagctggcacttcctttgccctccaaaaaggacctgaaaagtcccaatccaaactttagaaaattagttatgagatgcaataaatgatgatatgagatgcaataaatgatgatcaaagcagtcagagggagaaggatgaatgtgtcttccatttagctagagactgtagcatagcctctttaggtgttggtggatcagtaaaaacgactgaagtaccagaagtgcttggaaggataggggtacaaagtaatgaccataataccttgtctaaatcagtagcagggcttcatggctaggaaacttttttaaacagtaaaatgtcattaggatagatcactctctcaccaacattaaatgtggcagaattaaccaaaaaaaaaa

SEQ ID NO: 73234 - DNA, 760 bp, Homo sapiens; identical to SEQ ID NO: 63509

SEQ ID NO: 73235 - DNA, 4090 bp, Homo sapiens; identical to SEQ ID NO: 63511

SEQ ID NO: 73236 - DNA, 2679 bp, Homo sapiens; identical to SEQ ID NO: 63512

SEQ ID NO: 73237 - DNA, 4386 bp, Homo sapiens
gaacttattcctgcccagagttcagacacagccagaaattaccatttcatacttcacagaatggaggtttcagcagccaaagccccaagtgccgcagacttgtctgagattgaaataaagaaagagatgaagaaagaccctctcaccaacaaagctccagaaaagcccctgcacgaagtgcccagtggaaactctttgctgtcttctgaaacgattttaagaaccaataagagaggcgagcgacggaggcgccggtgccaggtggcattcagctacctgccccagaatgacgatgaacttgagctgaaagttggcgacatcatagaggtggtaggagaggtagaggaaggatggtgggaaggtgttctcaacgggaagactggaatgtttccttccaacttcatcaaggagctgtcaggggagtcggatgagcttggcatttcccaggatgagcagctatccaagtcaagtttaagggaaaccacaggctccgagagtgatgggggtgactcaagcagcaccaagtctgaaggtgccaacgggacagtggcaactgcagcaatccagcccaagaaagttaagggagtgggctttggagacattttcaaagacaagccaatcaaactaagaccaaggtcaattgaagtagaaaatgactttctgccggtagaaaagactattgggaagaagttacctgcaactacagcaactccagactcatcaaaaacagaaatggacagcaggacaaagagcaaggattactgcaaagtaatatttccatatgaggcacagaatgatgatgaattgacaatcaaagaaggagatatagtcactctcatcaataaggactgcatcgacgtaggctggtgggaaggagagctgaacggcagacgaggcgtgttccccgataacttcgtgaagttacttccaccggactttgaaaaggaagggaatagacccaagaagccaccgcctccatccgctcctgtcatcaaacaaggggcaggcaccactgagagaaaacatgaaattaaaaagatacctcctgaaagaccagaaatgcttccaaacagaacagaagaaaaagaaagaccagagagagagccaaaactggatttacagaagccctccgttcctgccataccgccaaaaaagcctcggccacctaagaccaattctctcagcagacctggcgcactgcccccgagaaggccggagagaccggtgggtccgctgacacacaccaggggtgacagtccaaagattgacttggccggcagttcgctatctggcatcctggacaaagatctctcggaccgcagcaatgacattgacttagaaggttttgactccgtggtatcatctactgagaaactcagtcatccgaccacaagcagaccaaaagctacagggaggcggcctccgtcccagtccctcacatcttcatccctttcaagccctgatatcttcgactccccaagtcccgaagaggataaggaggaacacatttcacttgcgcacagaggagtggacgcgtcaaagaaaacttccaagactgttaccatatcccaagtgtctgacaacaaagcatccctgccgcccaagccggggaccatggcagcaggtggcggtgggccagcccctctgtcctcagcggcgccctcccccctgtcatcctctttgggaacagctggacacagagccaactccccgtctctgttcggcacggaaggaaaaccaaagatggagcctgcggccagcagccaggcggccgtggaggagctaaggacacaggtccgcgagctgaggagcatcatcgagaccatgaaggaccagcagaaacgagagattaaacagttattgtctgagttggatgaagagaagaaaatccggcttcggttgcagatggaagtgaacgacataaagaaagctctacaatcaaaatgaatacttgatcaatgaaatgtcacattattcatcctgagtccgagactcaaattttctgccccagccaaaataatcttgtgccaaaagattaaaggtttgcctcaaaatgtccctgtttgaaagattagcacaaaagtcttgatagcacaacacaaattccatccaagaggagaatcttccccagggtttagtcctggggctggcactcgttgtgacttacacagagcaaaattgtgctaaaggcttttctactctgagatctcaatgcgaaatgaaaactcaggcagtttagtccatagtggtactattttgatgatattttccattaataaaatgtaatttcagattattcgtttacaagctttataattttatgattttttaatcgtgttttgtcacagacttccctagtgtttgtactacacgtagtcagaagcgagtgtccttttcttttgcttcaggctaagagctgcctcgctctttgtccccccattaggattctattacatatgcaattgtaggttcaacctgtccctttccctgccagcaaaccccaccaccctaagagaaattttagcttatatatgacggtatatttacaaaaagagaaagagaaaatctggtatttgcaatgatctgtgccttctttttaccaccctcttgattggagcttttgtgatgcagctaccatgattcaaaaaaattaaaaattaaaaaaaaaaaatctgccacttatccaagtccactagaggccactgtcttcaaagcttctctcaccctagccaaaggtcctaaaaggagacagctgtgaagttgggcgtgctctgtggtaccagctgtgacttttctatttctcctagttttaggttgttcatgaaactagaaatgtcatcctgcttgatttttcatcagccaagttaaacccctgctttctgtcctttgcaccttttgcgtgaacagaatatgcattattaaagcaaaaataaataaaagtaaaatgcaaatgaaaacaagggagggaaagttgtattatttcctgcactgggttacccgtgtgtgttatcgtttaaactgtattcacataatgtcatttgccttgctcacttgtaaccccttcctcaggtccaagagaatgggaggagggtcatgttgaagtgtagccactggaactttcttgcatttatggagttgctttttctttcccaaggaaactgatgtttgcctgtccgctttatctttgtagtacatgaacagttcagccttagactatgtaactgttttctcatccttagctgaaaatgaggggcctactgtattgcgagactgttcaggggtaggggtggagggggtggtcccttaatggcccctgaagatgttggatgtgtttctcaaaagctgctttgtctctttcctgagtttaatagtgaaactactaaacattaatagatttgcacagccacaaagaatgagagttgataataccgaagaagtgatgcaaaaacaaaaaatcacattactgatcattgatagtattacaaataaatgtctcttcctttctcttcctcccttcctccccctgccttcctcttaacctatgtgctcatccttgctacttgaggctgttatttccctccgagtatttaaggagcccaaacaccttggtcttcctgggtgggggcataattaagggaagggagtgtataaggaaggaaacctcataccctccattcccatccctggatatattgccttttcagcagcctcgggttcagtgtgcttggggtcaggagtgccaggttcccaagagcagcgtaaaacatccctgtaccccttgacagttataagcatttctgcgttaaacttgaagattccagagattccccacgacctaatgatctaagaatgcagattggattctttgatgttcaaatttctcatttacttatgaaaatccctaattatatagttttatataatgggtatacagagtaggattgttgatgaaattgagcggttggaacaccctcatggaacactggcaacatggaatgtagagagctgatgtcttccccctcatagaggccattggcttcctttgtataaggagagggagaagtgattctggaaggagaagttggtatgtctagcttcattgcggcccctcgggctacccagcaagaggattctgcatcaaggaactggacgagccgctacccaaactgccaccatctttactctttacaaaatggacccatcgagaatgttgaaaagcttggaagtatcacttttgaaaaaaaaaaaaattattttgcattcagcatggactcgaccaggcatctatggagattatttttttgcttcattttataaagttgtatttagaaaagtcttaagtattgtgctttgtaaagaagatgattacaaatgaaattttgtgag

SEQ ID NO: 73238 - DNA, 3482 bp, Homo sapiens; identical to SEQ ID NO: 63514

SEQ ID NO: 73239 - DNA, 1774 bp, Homo sapiens
ttttttttttttgccttcttattttaataggatcatgtctctcactttacaaattctcaaaacatatggttccctttttacatacatatataaacacttttaaacataaatatcaaatgcatgagaatcatatgggcagataaatttaggaagccaagaacacagaacgaaaagccagtcaccagatcttacaaataatcatctaaacttctctggccattcaatttgatacattatcccaaatattccatgtcacatggtccacaaggttttcttttgggattctgaagcaatcaatagccatacttgtcattaagatgggttctgccatctccactttgaccttcaggtgggacccacacacagtagtctgggtcatcttcaggatatttggaagaaagtgttggtggaagtttgcctggaccaggtgttttctttttcttcaattcacctctgcttttctcatattcattctttgatgctgagggtcctgcgcacaatgaagtggttttgctacagtcttgataatctttattctgttcttcctcgctaagttgagacatgttttcatgggtttgggtttctttaaaatgtgtgagatctgtgggaggcctcatttcctgcactgctgcttctggctctatctctggctgtggcctactgaggcttccatcctccagttttttcttttcatgctcctccttttctttctcttcttcctcttcctcttcctcctcctcttctacttcaggctcatctttcattctcattagagttggagggagttctggacgcttggggggtaacttccctactgttccagtttttaatttgaatttgcttcctcctttcatggcaccaaatagaggcaatgtaagctttttagctttgttttctgcacctgtagtctgagtttcagtcttttttagttctggaatctctgctggctttacaatttttattaaccctttaagtctctgttgttctttcctcagttcaaaagttctcaggtgaagtttcttccgggacacaccatctaatgtactgcctgatttcatttctgacatgaacgcatctaaagaatcctgagatggagactctgatagaacttggcttgaggctttcaatctctcagaaatttcagaaagttccctttcagcatcatttaattttgcaaccaatgattcaaaggtctctggcttctcatcaatcttgccagccttcttcattctgttcagacgcttcttctcaatcaggccagtcctatcaagaaatgtgtcatcatcactatcataaaagtcttcatcttcccagttcttggctttccttttccgagatactgcttcctgccgaagcaatcccaaagtgtcaagaatccgacaagcttccaatgagcactggatcattgcttcttttttctttcctgagtgaatggcctcagccaccagttgttttccagttgaatcgtccacaggtaatctcaccctgcagagccaagtgctatgtccctgttcatcaaattcatattctaattcttctccttctcggtcaaaaaagccttggagagcctttttgggatcctttatataaaaggcctccctttcctgctgaaactctaagacaatagggttctcttcagcatcatcctctactgcatcttctcccattccccaggtgcaacccatctcatcatcttggctaccagcatttatcttcctttcagaggtatccatttcctcttcttcatctgagtcttctcctagcatcttcttct

SEQ ID NO: 73240 - DNA, 1911 bp, Homo sapiens; identical to SEQ ID NO: 63516
  misc_feature (1)...(1911): n = a,t,c or g

SEQ ID NO: 73241 - DNA, 396 bp, Homo sapiens; identical to SEQ ID NO: 63517

SEQ ID NO: 73242 - DNA, 3068 bp, Homo sapiens
ttatatttaaatgtttttactaaaaacaaatatttttactggaagctaacagatcaaatcaaatacctttaggaaaatctaaagcaatgtttaaatattccttcctgcctaaaacctaagaggattttctgatctaccatgctacaaatttctacaaggaatgggcacctctatagagaaaagggaaatgcagcctaagccctttgtaaagaactccacagcaataatattactaatcaaatctattgcttttattgtttttaagtaagtggtggtatatgtcatctttttaaatgtttcttttgggaagatcttatagaaaatggcaccctgaaactttcagctctatgtcccaaaaattatctttcaacaatctgatgaagtttcttaaagaaactcttaaaaatgaagataatatacctggcctaaatcaaaacaatctgaaaaatggatgtgtcccagtggaaagactcaagtcttttcaagtttatcagaaatgccactatacaccactgtactataagtcgaggaggatggatatccaaaggtatcatttgttgacagttcctgatggtctcaggtatatcctataatcactggttactatgcatcatttcttgtagataaatggtattcatgtgataagctgccatccaacttggatgtctctgagcattccaataatatgaatgagaagcggcagcataatattcttgccatgccctgtagtaagctctccagtactcctcataatcctgataggtatcagaaaaactcagacgtatttccctatgacagtcataccaatcatcttcctgggcttcagtctgcaatctgaaggaagaccgcctgggtaggtttctccggctctgcttagctctctggctagccccctctttaagtcttgtcttcatctggattccaggtgattcttgatatttctctggattgggggtgtcacttccatttggtggttgttccaaagaaatacgatcatccacaggcgtagattcagagtctttcagctgattatcagaagagccttccaagtatgacttatttcctttgctctgggaagaggttcttgagctgtaagaatcactgtcactctcagagtctccagattggctactacttgccaacacagggactctctgttcaataactttatttctcacaaaaccattttgaggattcacagtctgatccccagggcctgtgtagtgcctgatgatttccacaggtttctctaacccctctttaatataatgttcataatcctctaccaattcagcaaaagtcaacgtgtatggctgatggattttaaaggaagacagacaaggaatctgggggagtgacacaggtaaagcttctttgacctggtgctgactgttggtggagttttcaacgggagtctgaacagaattcttcatttgctcttcggattgcctgtcacagcccagttcttttggtgacgttgctttttctatgattccacattctgagtggcttttcacaggaagcttttgtttggtattattttttgatttgactgatagtccagatacagaattatttctagaggaagccatgtggtcaccatgagctttctgaatttgaagggttctctctattttctgaatttgcttttttaagggttggttaggtacacttgctataccatatgtatgcacagcagctttaacttccacatcccaatccacacattcttccatcagaccagaaggaatgggatctggtaaagggagaaggttgatattacatttctgggcaattctcatcatcatattttcttcctctccccggcaacagtaggtcactgtcagccccaatgtaccaaaacggccagctctcccaatccgatgcatgtatgtctcccaatccaatggtacatccagatttacaaccagattcaccttctcagcatcaatcccacgagaagtcaaatctgtggaaatgaggactctgcaatgaaagtgcttcagtttagccatagcatcaagacgctgattctgattcatattgcctgaaatgcactcagcaggaaagcctttagaagaaaggatatcagccaaatgttgtgctctgctgtgcaaattagaaaagactaaagcttgattaaatggaattctgctgaacagttcctgtaaatgctgagtcttttcctcaaaaaccttatgtgccaaagggtatgaattgacaactttgtaatactgcttcaaacctatgagacttggatcactggaattcagtcttacaaaagtgggatctctcatgtactttgtcaaagcattagccaaaaattcgggataagtagctgatactgccagcatctgtttactggcaggcaaggaagaataaatccaatttatttgctcctggaagctgccttcttctaaaagcttatctgcttcatcaagaataaagaggcgtatactgcctgggttcaagtagtcaagttctatgagttgcttaattctgccaggagatccaacagcaatatgacactttttaagtctggttttgtcttgtgataatggggtccctccaataaagacatgacactctaagccttccatttttattccaatggctgtaataacagaatgtatctgtacagcaatttctcttgtaggagccaagatcaaaatctgggtacttaagttttcaagaacaagagagtccaaagctatggtggagaacacacaggttttcccggtgccagatttagcttgaacaattaaatcgagcccgcagcgccccaacgggatggccttgagctgcaccggcgagggcctctcgaagccggccgcccgcagcccctccagcaccggccgcgaaagcagcagtgactcgaagtcggccggctccgccaacagcacatcccccgtgcgggtccgcgggctgctgagatcctgagcggtccgcaggatcctcacaggcccgggtgttggctctggggccgggacctgcacggccacatgctcagccggcatagcagtcgccactgctgctaaggctcccgaggcttcaactgccgccgccat

SEQ ID NO: 73243 - DNA, 2050 bp, Homo sapiens; identical to SEQ ID NO: 63519

SEQ ID NO: 73244 - DNA, 4188 bp, Homo sapiens; identical to SEQ ID NO: 63520

SEQ ID NO: 73245 - DNA, 1615 bp, Homo sapiens; identical to SEQ ID NO: 63521
  misc_feature (1)...(1615): n = a,t,c or g

SEQ ID NO: 73246 - DNA, 3046 bp, Homo sapiens; identical to SEQ ID NO: 63522

SEQ ID NO: 73247 - DNA, 584 bp, Homo sapiens; identical to SEQ ID NO: 63523

SEQ ID NO: 73248 - DNA, 1833 bp, Homo sapiens; identical to SEQ ID NO: 63524

SEQ ID NO: 73249 - DNA, 411 bp, Homo sapiens; identical to SEQ ID NO: 63526
  misc_feature (1)...(411): n = a,t,c or g

SEQ ID NO: 73250 - DNA, 1475 bp, Homo sapiens
cccacgcgtccgcgccgaccaagatggagactgccgagcagccttgagccgttgagcagctgaacagaggccatgccggggcactccgaggcctgagacgaccacgcctgtgccgctgaggaccttcatcagggctccgtccacttggcccgcttggctgtccaatcacactccagtgtcaaccactggcacccagcagccaagagaggtgtggcgtggccctggggacgcatggctgaggcaggaacaggtgagccgtcccccagcgtggagggcgaacacgggacggagtatgacacgctgccttccgacacagtctccctcagtgactcggactctgacctcagcttgcccggtggtgctgaagtggaagcactgtccccgatggggctgcctggggaggaggattcaggtcctgatgagccgccctcacccccgtcaggcctcctcccagccacggtgcagccattccatctgagaggcatgagctccaccttctcccagcgcagccgtgacatctttgactgcctggagggggcggccagacgggctccatcctctgtggcccacaccagcatgagtgacaacggaggcttcaagcggcccctagcgccctcaggccggtctccagtggaaggcctgggcagggcccatcggagccctgcctcaccaagggtgcctccggtccccgactacgtggcacaccccgagcgctggaccaagtacagcctggaagatgtgaccgaggtcagcgagcagagcaatcaggccaccgccctggccttcctgggctcccagagcctggctgcccccactgactgcgtgtcctccttcaaccaggatccctccagctgtggggaggggagggtcatcttcaccaaaccagtccgaggggtcgaagccagacacgagaggaagagggtcctggggaaggtgggagagccaggcaggggcggccttgggaatcctgccacagacaggggcgagggccctgtggagctggcccatctggccgggcccgggagcccagaggctgaggagtggggcagcccccatggaggcctgcaggaggtggaggcactgtcagggtctgtccacagtgggtctgtgccaggtctcccgccggtggaaactgttggcttccatggcagcaggaagcggagtcgagaccacttccggaacaagagcagcagccccgaggacccaggtgctgaggtctgagagggagatggcccagcctgaccccactggccactgccatcctgctgccttcccagtggggctggtcagggggcagcctggccactgcctagctggaatgggaggaagcctgcaggtggcaccggtggccctggctgcagttctgggcagcatcctcccaagcagagaccttgctgaagctcctggggtgtggggtgtgggctggaagcactggctccctggtaggggcaataaagggtttgggtctttctgaa

SEQ ID NO: 73251 - DNA, 952 bp, Homo sapiens; identical to SEQ ID NO: 63528

SEQ ID NO: 73252 - DNA, 1507 bp, Homo sapiens; identical to SEQ ID NO: 63529
  misc_feature (1)...(1507): n = a,t,c or g

SEQ ID NO: 73253 - DNA, 1976 bp, Homo sapiens; identical to SEQ ID NO: 63530
  misc_feature (1)...(1976): n = a,t,c or g

SEQ ID NO: 73254 - DNA, 403 bp, Homo sapiens; identical to SEQ ID NO: 63531

SEQ ID NO: 73255 - DNA, 1209 bp, Homo sapiens; identical to SEQ ID NO: 63532

SEQ ID NO: 73256 - DNA, 718 bp, Homo sapiens; identical to SEQ ID NO: 63533

SEQ ID NO: 73257 - DNA, 1382 bp, Homo sapiens; identical to SEQ ID NO: 63534

SEQ ID NO: 73258 - DNA, 778 bp, Homo sapiens; identical to SEQ ID NO: 63535

SEQ ID NO: 73259 - DNA, 370 bp, Homo sapiens; identical to SEQ ID NO: 63536

SEQ ID NO: 73260 - DNA, 1681 bp, Homo sapiens; identical to SEQ ID NO: 63537

SEQ ID NO: 73261 - DNA, 621 bp, Homo sapiens; identical to SEQ ID NO: 63538

SEQ ID NO: 73262 - DNA, 1282 bp, Homo sapiens; identical to SEQ ID NO: 63539

SEQ ID NO: 73263 - DNA, 2207 bp, Homo sapiens; identical to SEQ ID NO: 63540
  misc_feature (1)...(2207): n = a,t,c or g

SEQ ID NO: 73264 - DNA, 1707 bp, Homo sapiens
ccgggaacgggcggtggggagcgggcggagctggccctgcctctgcctggccggcgccgcagtcggcgcgggccgcgcccgccgccgccaactgccctgagcgcttgctgaggccgagggagacgtcggggcctgcacctggagggagcctgccgcgctggccccgaggagggggcgttgccatggcgacagcctctcccgctgctgacggggggcgggggcggccctgggaaggagggctggtctcctggccccccgcccctccccttactctcccctggacttggatgggcccgagttgggggcaacaccccgggcattggggctttccagctctcacagaaccttcagcatccccagctgccggtcttggcatcttcgaagtaaggagagttttagatgcttctggatgttcaatgctagcacctttacagactggagcagctcgattttcttcgtatttactttcaagagcaagaaaagtgctgggctcccacttattttctccctgtggtgttccggagttctgctccatatccaccagaaagctggcggcccacggctttggcgcatccatggcggcaatggtgtccttccctccccagaggtatcactactttttagtgctggactttgaggccacgtgcgacaagccacagattcatcctcaggaaatcatcgagttccccatcctaaagctaaatggccggaccatggagattgagtctacctttcacatgtatgtccagcctgtagtccatccacagcttaccccattctgtacagagctcaccgggattattcaagccatggtggatggtcagccaagcctgcagcaagtgctggagagggtcgatgaatggatggcgaaggaaggcctcttagatccaaacgtcaagtcaatttttgtcacctgtggagactgggacttaaaagtcatgctcccaggccagtgccagtacttgggcttgccagtggcggattacttcaagcagtggattaatctgaaaaaggcttacagcttcgccatgggctgctggcccaagaatggacttctagacatgaacaagggcctcagcctgcaacacataggccggccccacagcggcattgacgactgcaagaacattgccaacatcatgaagacactcgcctatcgaggcttcatcttcaagcagacatcgaagccgttctgattggccgaggacaggatggggcaggacagggtagctgtttggcccagcccagaatcctcctctccctcaccagaggggaagagggagagtggcatagctctgtgtccagagtgtccccaaagccttccctgtggggctcatgccccttggccgtgggctttgttgccctttgcaaggggctttggccacttggccctttctggaagcaagacacttttgtgcccccccatcccccacccctcaatctcagcccagtatcagcccctcccattgcgggcctgggctaagggggaccccaggcactcaccgcctcctcccctggtacaacaggcttctgtggggccaccaagaccctcgctgtgccccctcccatccataagtgcatggtgtgtggtcgccccagggctccaggacagatcaggccccaccttgtgtctacccccatccccgctgtgaacgtgccactgaataaagtcggggaaacgaggcactgggtgtgtgtgcaaagcca

SEQ ID NO: 73265 - DNA, 351 bp, Homo sapiens; identical to SEQ ID NO: 63542

SEQ ID NO: 73266 - DNA, 468 bp, Homo sapiens; identical to SEQ ID NO: 63543

SEQ ID NO: 73267 - DNA, 782 bp, Homo sapiens; identical to SEQ ID NO: 63544

SEQ ID NO: 73268 - DNA, 318 bp, Homo sapiens; identical to SEQ ID NO: 63545
  misc_feature (1)...(318): n = a,t,c or g

SEQ ID NO: 73269 - DNA, 602 bp, Homo sapiens; identical to SEQ ID NO: 63546

SEQ ID NO: 73270 - DNA, 219 bp, Homo sapiens; identical to SEQ ID NO: 63547

SEQ ID NO: 73271 - DNA, 334 bp, Homo sapiens; identical to SEQ ID NO: 63548

SEQ ID NO: 73272 - DNA, 2736 bp, Homo sapiens; identical to SEQ ID NO: 63549

SEQ ID NO: 73273 - DNA, 597 bp, Homo sapiens; identical to SEQ ID NO: 63550

SEQ ID NO: 73274 - DNA, 845 bp, Homo sapiens; identical to SEQ ID NO: 63551

SEQ ID NO: 73275 - DNA, 306 bp, Homo sapiens; identical to SEQ ID NO: 63552

SEQ ID NO: 73276 - DNA, 947 bp, Homo sapiens; identical to SEQ ID NO: 63553

SEQ ID NO: 73277 - DNA, 329 bp, Homo sapiens; identical to SEQ ID NO: 63554

SEQ ID NO: 73278 - DNA, 602 bp, Homo sapiens; identical to SEQ ID NO: 63555
  misc_feature (1)...(602): n = a,t,c or g

SEQ ID NO: 73279 - DNA, 1030 bp, Homo sapiens; identical to SEQ ID NO: 63556

SEQ ID NO: 73280 - DNA, 635 bp, Homo sapiens; identical to SEQ ID NO: 63557

SEQ ID NO: 73281 - DNA, 319 bp, Homo sapiens; identical to SEQ ID NO: 63558

SEQ ID NO: 73282 - DNA, 809 bp, Homo sapiens; identical to SEQ ID NO: 63559

SEQ ID NO: 73283 - DNA, 1051 bp, Homo sapiens; identical to SEQ ID NO: 63560

SEQ ID NO: 73284 - DNA, 675 bp, Homo sapiens; identical to SEQ ID NO: 63561

SEQ ID NO: 73285 - DNA, 6227 bp, Homo sapiens; identical to SEQ ID NO: 63562

SEQ ID NO: 73286 - DNA, 376 bp, Homo sapiens; identical to SEQ ID NO: 63563

SEQ ID NO: 73287 - DNA, 4670 bp, Homo sapiens; identical to SEQ ID NO: 63564

SEQ ID NO: 73288 - DNA, 600 bp, Homo sapiens; identical to SEQ ID NO: 63565

SEQ ID NO: 73289 - DNA, 802 bp, Homo sapiens; identical to SEQ ID NO: 63566

SEQ ID NO: 73290 - DNA, 750 bp, Homo sapiens; identical to SEQ ID NO: 63569

SEQ ID NO: 73291 - DNA, 1936 bp, Homo sapiens; identical to SEQ ID NO: 63570

SEQ ID NO: 73292 - DNA, 1588 bp, Homo sapiens
ggcacgagtcagaattaaaagaagaaataaaagcattagaagatgccagaataaaccttttgaaagagacagagcaacttgaaattaaagaagtccacatagagaagaatgatgctgaaacattgcagaaatgtcttattttatgctatgaactgttgaagcagatgtccatttcaacaggcttaagtgcaaccatgaatggaatcatcgaatctttgattcttcctggaataataagtattcatcctgttgtaagaaacctggctgttttatgcttgggatgctgtggactacagaatcaggattttgcaaggaaacacttcgtattactattgcaggttttgcaaattgatgatgtcacaataaaaataagtgctttaaaggcaatctttgaccaactgatgacgttcgggattgaaccatttaaaactaaaaaaatcaaaacacttcattgtgaaggtacagaaataaacagtgatgatgagcaagaatcaaaagaagttgaagagactgctacagctaagaatgttctgaaactcctttctgatttcttagatagtgaggtatctgaacttaggactggagctgcagaaggactagccaagctgatgttctctgggcttttggtcagcagcaggattctttctcgtcttattttgttatggtacaatcctgtgactgaagaggatgttcaacttcgacattgcctaggcgtgttcttccccgtgtttgcttatgcaagcaggactaatcaggaatgctttgaagaagcttttcttccaaccctgcaaacactggccaatgcccctgcatcttctcctttagctgaaattgatatcacaaatgttgctgagttacttgtagatttgacaagaccaagtggattaaatcctcaggccaagacttcccaagattatcaggccttaacagtacatgacaatttggctatgaaaatttgcaatgagatcttaacaagtccgtgctcgccagaaattcgagtctatacaaaagccttgagttctttagaactcagtagccatcttgcaaaagatcttctggttctattgaatgagattctggagcaagtaaaagataggacatgtctgagagctttggagaaaatcaagattcagttagaaaaaggaaataaagaatttggtgaccaagctgaagcagcacaggatgccaccttgactacaactactttccaaaatgaagatgaaaagaataaagaagtatatatgactccactcaggggtgtaaaagcaacccaagcatcaaagtctactcagctaaagactaacagaggacagagaaaagtgacagtttcagctaggacgaacaggaggtgtcagactgctgaagccgactctgaaagtgatcatgaagttccagaaccagaatcagaaatgaagatgagactaccaagacgagccaaaaccgcagcactagaaaaaagtaaacttaaccttgcccaatttctcaatgaagatctaagttaggaaagacgatggaggtggaatcctttaagattatgtccagttatttgctttaataaagaagaagttacccttgtcaaaatcagaac

SEQ ID NO: 73293 - DNA, 2243 bp, Homo sapiens; identical to SEQ ID NO: 63572

SEQ ID NO: 73294 - DNA, 1883 bp, Homo sapiens
ttttttttttttcttaaaacaaccagtttctttaattagaaagcaacaaacatgcaaatggcaagtgtagaaatttatttgaaccaacattttcactatgatgaaaattattcttcaacattgatccaagctcccacatttgaaggttagggaaaatattgcactttgcattttctagcactcctcatacacggcaaaaagttttaaaaacattctgctagttttgttttatacaatctcccaaattcatgcacacaatcattccaaaccaatgttaggttatcccaaaaaaagggaaaaactccaaaaaccataaccttaaaattgcactaaagctctgtaaagaaaaaaatataataaatgtcttatacaaatttcagaacatttaagtgcttgccaaaaagagtttattattcctcatcctcattttcattctcttgaccagagccttctgatctgtcaccctccaaccggtcagctcggatatgattaagtgaagccaacatcctcaacatgaaagaggctggaactgtaatggtgtttctagtttcttccagcatgagttcgtttcgagttataacttcatcagcaagttttcggttaaaaatccttgactcttctaatggtgaccagatctttatgtcataatctatgccagatgaggctaaaattgggtcaaacggatgtggctgcaggcagtttaccacatgattatcagcttccagaagcatcaaatgctcagcagtgtgccgatcccagatgaaaatgtggccacagtcagaaccactcattacaaagttagcaccccagaaattggcttcttttatcattgtcctggagttgcgatggcctttataaaccatttttactagcggccttctaatgttcaaagtatccaattcttccatttctttcctttcttttctccgtctgaagaactcctgaatacgggcaacagcagagcgtctatcaccaggtcctgctcgataccttgcacctgggatcaggactgggtcatcatcactgtcatctgtgtcctgaagagcagagtccctggtggatgtttcttcatgagctgaaggcccagtggcttctgtttggaactgaggctcaggattggtgttattttcattggtagcactctcagtgctagtctgatctgaagtttctggttccttggctttttcagatgaagcagattcttctggaaccccacaagagcgatcaagattgaggtcatttctttctcctgagttggaatccaatggcttggctgtgaacttatctgattgtgttatattgatatggttctcaactgggttttctgcagatactccttcctgatattttgtcacatcctctgatgattcttcaggagcttttgtttcactgtctccttctggtggttgcactgagctctgtgggacgaaagattcctcctgaccctcagatttgcaatggctcccaattcctctagaacttgatgctatactgctccattcatctgtaaagttcagttttattgtgcttgtagttgttccttctgtgctgtagtgcaaacttaaaactggttcacctgtccctggtttggggctcagcttttcattattgttatcctgttgctcgtcaagtgacatggatccgagctgtttgttaaccacagaagaaggagaatcagactgatgatgtgtgtggtgtccagatgcctcaacagactgcctttgttcactgtctggagaagatagcaaaggagtagaatgagggctttctgtgggagatgatgtcgaatgagcctgacctgacattgtagaggatgtacaaggctgaagaaattgttcagctggagtatctacttccattgcagtttcaccctgtgccgaaat

SEQ ID NO: 73295 - DNA, 1308 bp, Homo sapiens; identical to SEQ ID NO: 63573

SEQ ID NO: 73296 - DNA, 2232 bp, Homo sapiens; identical to SEQ ID NO: 63574

SEQ ID NO: 73297 - DNA, 354 bp, Homo sapiens; identical to SEQ ID NO: 63575

SEQ ID NO: 73298 - DNA, 1834 bp, Homo sapiens; identical to SEQ ID NO: 63576

SEQ ID NO: 73299 - DNA, 2294 bp, Homo sapiens
acacacctaccttcccctggaggtctgtaacattgtggcaggacaaagatgtattaaaaaattaacggacaatcagacctcaaccatgatcagagcgactgctaggtcggcgcccgatcggcaagaagagattagcaaattgatgcgaagtgcaagtttcaacacagatccatacgtccgtgaatttggaatcatggtcaaagacgagatgacagacgtgactgggcgggtgctgcagccgccctccatcctctacgggggcaggaataaagctattgcgacccctgtccagggcgtctgggacatgcggaacaagcagttccacacgggcatcgagatcaaggtgtgggccattgcgtgcttcgccccccagcgccagtgcacggaagtccatctgaagtccttcacagagcagctcagaaagatctcgagagacgccggcatgcccatccagggccagccgtgcttctgcaaatacgcgcagggggcggacagcgtggagcccatgttccggcacctgaagaacacgtatgcgggcctgcagctggtggtggtcatcctgcccggcaagacgcccgtgtacgccgaggtcaagcgcgtgggagacacggtgctggggatggccacgcagtgcgtgcagatgaagaacgtgcagaggaccacgccacagaccctgtccaacctctgcctgaagatcaacgtcaagctgggaggcgtgaacaacatcctgctgccccagggcaggccgccggtgttccagcagcccgtcatctttctgggagcagacgtcactcacccccccgccggggatgggaagaagccctccattgccgccgtggtgggcagcatggacgcccaccccaatcgctactgcgccaccgtgcgtgtgcagcagcaccggcaggagatcatacaagacctggccgccatggtccgcgagctcctcatccagttctacaagtccacgcgcttcaagcccacccgcatcatcttctaccgcgacggtgtctctgaaggccagttccagcaggttctccaccacgagttgctggccatccgtgaggcctgtatcaagctagaaaaagactaccagcccgggatcaccttcatcgtggtgcagaagaggcaccacacccggctcttctgcactgacaagaacgagcgggttgggaaaagtggaaacattccagcaggcacgactgtggacacgaaaatcacccaccccaccgagttcgacttctacctgtgtagtcacgctggcatccaggggacaagcaggccttcgcactatcacgtcctctgggacgacaatcgtttctcctctgatgagctgcagatcctaacctaccagctgtgtcacacctacgtgcgctgcacacgctccgtgtccatcccagcgccagcatactacgctcacctggtggccttccgggccaggtaccacctggtggataaggaacatgacagtgctgaaggaagccatacctctgggcagagtaacgggcgagaccaccaagcactggccaaggcggtccaggttcaccaagacactctgcgcaccatgtactttgcttgacatgttttagtgtttagcgattgtgtaccgagtgggattcacgagaccagctacactcagaccaacagatggccagcccttccgtgacagccagcatcgaacatgagacgtcattgattttattagattctccgttttccagaatgccttccgtcccagatttcaaacttggattttgaactgcagacctgtatgagaacccaatgtcataggaaatatggtttgctaaaatctataagctgcttattaaaacagagtcccgtgtgtcctaaaaatctcctaaaaccagtctatgaactcagggctttaaaacatttttaatttatttggtcattcaatttacttgtttttaatacatgattctctatgaaattgatgggctcaaactagctgtgaatcttctgagagtgaaagcaacacaaaacacaagtgtggttttaaagccttgaacattctgatgttgtcactaaagttgatttccaggcgatgctcgtgtgcccctggcgtggctcacccaagttcctcgactgagggccggtggccatgcagaggcgtccgcaggtgccgtgttctgccagcaccgcccttcacccggcctgaactaaggagcagtggcagaaggtgggccccgtgtgtttacagcatttccaggtccagagaggttggcagacaagtgccattttaataaaaaatgtatttaaaaaaaaaaaaaaggggg

SEQ ID NO: 73300 - DNA, 950 bp, Homo sapiens; identical to SEQ ID NO: 63578

SEQ ID NO: 73301 - DNA, 1165 bp, Homo sapiens; identical to SEQ ID NO: 63579

SEQ ID NO: 73302 - DNA, 428 bp, Homo sapiens; identical to SEQ ID NO: 63580

SEQ ID NO: 73303 - DNA, 557 bp, Homo sapiens; identical to SEQ ID NO: 63581

SEQ ID NO: 73304 - DNA, 2572 bp, Homo sapiens; identical to SEQ ID NO: 63582

SEQ ID NO: 73305 - DNA, 363 bp, Homo sapiens; identical to SEQ ID NO: 63583

SEQ ID NO: 73306 - DNA, 1153 bp, Homo sapiens; identical to SEQ ID NO: 63584

SEQ ID NO: 73307 - DNA, 406 bp, Homo sapiens; identical to SEQ ID NO: 63585

SEQ ID NO: 73308 - DNA, 925 bp, Homo sapiens; identical to SEQ ID NO: 63586
  misc_feature (1)...(925): n = a,t,c or g

SEQ ID NO: 73309 - DNA, 645 bp, Homo sapiens; identical to SEQ ID NO: 63587

SEQ ID NO: 73310 - DNA, 951 bp, Homo sapiens; identical to SEQ ID NO: 63589

SEQ ID NO: 73311 - DNA, 2260 bp, Homo sapiens; identical to SEQ ID NO: 63590

SEQ ID NO: 73312 - DNA, 2077 bp, Homo sapiens; identical to SEQ ID NO: 63591

SEQ ID NO: 73313 - DNA, 2398 bp, Homo sapiens; identical to SEQ ID NO: 63592

SEQ ID NO: 73314 - DNA, 1246 bp, Homo sapiens; identical to SEQ ID NO: 63593
  misc_feature (1)...(1246): n = a,t,c or g

SEQ ID NO: 73315 - DNA, 1214 bp, Homo sapiens; identical to SEQ ID NO: 63594

SEQ ID NO: 73316 - DNA, 345 bp, Homo sapiens; identical to SEQ ID NO: 63595
  misc_feature (1)...(345): n = a,t,c or g

SEQ ID NO: 73317 - DNA, 1945 bp, Homo sapiens; identical to SEQ ID NO: 63596

SEQ ID NO: 73318 - DNA, 2298 bp, Homo sapiens; identical to SEQ ID NO: 63597

SEQ ID NO: 73319 - DNA, 1006 bp, Homo sapiens; identical to SEQ ID NO: 63598

SEQ ID NO: 73320 - DNA, 990 bp, Homo sapiens; identical to SEQ ID NO: 63599

SEQ ID NO: 73321 - DNA, 972 bp, Homo sapiens; identical to SEQ ID NO: 63600

SEQ ID NO: 73322 - DNA, 2671 bp, Homo sapiens; identical to SEQ ID NO: 63601

SEQ ID NO: 73323 - DNA, 391 bp, Homo sapiens; identical to SEQ ID NO: 63602

SEQ ID NO: 73324 - DNA, 1054 bp, Homo sapiens; identical to SEQ ID NO: 63603

SEQ ID NO: 73325 - DNA, 1532 bp, Homo sapiens; identical to SEQ ID NO: 63604

SEQ ID NO: 73326 - DNA, 3109 bp, Homo sapiens; identical to SEQ ID NO: 63605

SEQ ID NO: 73327 - DNA, 783 bp, Homo sapiens; identical to SEQ ID NO: 63606

SEQ ID NO: 73328 - DNA, 349 bp, Homo sapiens; identical to SEQ ID NO: 63607

SEQ ID NO: 73329 - DNA, 3076 bp, Homo sapiens; identical to SEQ ID NO: 63608

SEQ ID NO: 73330 - DNA, 1171 bp, Homo sapiens; identical to SEQ ID NO: 63609

SEQ ID NO: 73331 - DNA, 1116 bp, Homo sapiens; identical to SEQ ID NO: 63610

SEQ ID NO: 73332 - DNA, 1016 bp, Homo sapiens; identical to SEQ ID NO: 63611

SEQ ID NO: 73333 - DNA, 843 bp, Homo sapiens; identical to SEQ ID NO: 63612

SEQ ID NO: 73334 - DNA, 2736 bp, Homo sapiens; identical to SEQ ID NO: 63613
  misc_feature (1)...(2736): n = a,t,c or g

SEQ ID NO: 73335 - DNA, 808 bp, Homo sapiens; identical to SEQ ID NO: 63614

SEQ ID NO: 73336 - DNA, 2006 bp, Homo sapiens; identical to SEQ ID NO: 63615

SEQ ID NO: 73337 - DNA, 2008 bp, Homo sapiens; identical to SEQ ID NO: 63616

SEQ ID NO: 73338 - DNA, 2091 bp, Homo sapiens; identical to SEQ ID NO: 63617

SEQ ID NO: 73339 - DNA, 1298 bp, Homo sapiens; identical to SEQ ID NO: 63618

SEQ ID NO: 73340 - DNA, 5885 bp, Homo sapiens
gttagctcaaataatgtgcttttaaattctcaggctgatgacagagttgtaataaataaaccagaatctgcaggttttagagatgttggctctgaagaaatccaggatgcagaaaatagtgctaaaactcttaaggaaattcggacacttttgatggaggcagaaaatatggcactgaaacgatgcaattttcctgctccccttgcccgtttcagagatattagtgatatttcatttatacaatctaagaaggtggtttgcttcaaagaaccctcttccacgggtgtatctaatggtgatttgcttcacagacagccattcacagaggaaagcccaagcagcaggtgcatacagaaggatattggcacacagacgaatttgaaatgccggagaggcattgaaaattgggagtttattagttcaactacagttagaagtcctctacaggaagcagagagcaaagtcagtatggcattagaagaaactcttaggcaatatcaagcagccaaatctgtaatgaggtctgaacctgaagggtgtagtggaaccattgggaataaaattattatccctatgatgactgtcataaaaagtgattcaagtagtgatgccagtgatggaaatggttcctgctcgtgggacagtaatttaccagagtctttggaatcagtttctgatgttcttctaaacttctttccatatgtttcacccaagacaagtataacagatagcagggaggaagagggtgtgtcagagagtgaggatggtggtggtagcagtgtagattcactggctgcacatgtgaaaaaccttctgcaatgtgaatcctcactgaatcatgctaaagaaatactcagaaatgcagaggaagaggaaagccgggtacgagcacatgcctggaatatgaagttcaatttagcacatgattgtggatactccatttcagaattaaatgaagatgacaggaggaaagtagaagagatcaaggcagagttatttggtcatggaagaacaactgacttgtccaagggtttacagagtccacggggaatgggatgcaagccagaagctgtatgtagtcacattattattgagagccatgaaaagggatgtttccggactctaacttctgaacatccacaactagatagacacccttgtgctttcagatctgctggaccctcagaaatgaccagaggacggcagaacccatcatcatgcagagccaagcatgtcaacctttctgcatccttagaccagaacaactcccatttcaaagtttggaattccttgcagttaaaaagtcattccccatttcagaactttatacctgatgaattcaaaatcagcaaaggtcttcgaatgccattcgatgaaaagatggacccttggctgtcagaattagtagaacctgcttttgtgccacctaaagaagtggattttcattcttcatcacaaatgccgtccccagaacccatgaaaaagtttactacctccatcactttttcatctcaccgacattctaaatgcatttccaattcctctgttgttaaggttggtgttactgaaggtagccagtgtactggagcatctgtgggggtatttaattctcatttcactgaagaacaaaatcctcccagagatcttaaacagaaaacctcttccccttcatcatttaaaatgcatagtaattcacaagataaagaagtgactattttagcagaaggtagaaggcaaagccaaaaattacctgttgattttgagcgttcttttcaagaagaaaaacccttagaaagatcagattttacaggcagtcattctgagcccagtaccagggcaaattgtagcaatttcaaggaaattcagatttctgataaccatacccttattagcatgggcagaccaagttccaccctaggagtaaacagatcgagttccagactaggagtaaaagagaagaatgtaactataactccagatcttccttcttgcatttttcttgaacaacgagagctctttgaacaaagcaaagccccacgtgcagatgaccatgtgaggaaacaccattctccctctcctcaacatcaggattatgtagctccagaccttccttcttgcatttttcttgaacaacgagaactctttgaacagtgcaaagccccatatgtagatcatcaaatgagagaaaaccattctccccttcctcaaggtcaggattctatagcttcagaccttccgtctcccatttctcttgaacaatgccaaagcaaagcgccaggtgtagatgaccaaatgaataaacaccattttccccttcctcaaggtcaggattgtgtagtggaaaagaataatcaacataagcctaaatcacacatttctaatataaatgttgaagccaagttcaatactgtggtctcccagtcagccccaaatcactgtacattagcagcatctgcatctactcctccttcaaatagaaaagcactttcttgtgttcatataactctttgtcccaagacttcttccaagttggatagtggaactttagatgaaagattccattcattggatgctgcttctaaagcgaggatgaatagtgagtttaactttgacttacatactgtatcttcgagatcactggaaccaacctccaaattattgaccagtaaacctgtagcacaggatcaagaatctttaggttttctaggacctaaatcttcactggatttccaagtcgtacagccttctcttccagacagtaacactattactcaggacttgaaaaccataccttctcagaatagccagatagtaacctccaggcaaatacaagtgaacatttcagatttcgaaggacattccaatccagaggggaccccagtatttgcagatcgattaccagagaagatgaagaccccactttctgctttctctgaaaaattgtcatctgatgcagtcactcagataacaacagaaagtccagaaaagaccctattttcatctgagatttttattaatgctgaagatcgtggacatgaaattatagagcctggtaaccagaagctacgcaaagctcctgtcaagtttgcctcatcatcttcagtccaacaggttactttttctcgcggcacagatggccagcctttattattgccatataagccttctggtagtaccaagatgtattatgttccacaattaagacaaattcctccatctccggattccaaatcagataccaccgttgaaagctcccattcaggatccaatgatgccattgctccagacttcccagctcaggtgctaggcacaagagatgatgacctctcagccactgttaacattaaacataaagaaggaatctacagtaagagggtagtgactaaggcatccttgccagtgggagaaaaacccttgcagaatgaaaatgcagatgcctcagttcaagtgctaatcactggggatgagaacctctcagacaaaaaacagcaagagattcacagtacaagggcagtgactgaggctgcccaggctaaagaaaaagaatctttgcagaaagatactgcagattccagtgctgctgctgctgcagagcactcagctcaagtaggagacccagaaatgaagaacttgccagacactaaagccattacacagaaagaggagatccataggaagaagacagttcccgaggaagcctggccaaacaataaagaatccctacagatcaatattgaagagtccgaatgtcattcagaatttgaaaatactacccgttctgtcttcaggtcagcaaagttttacattcatcatcccgtacacctaccaagtgatcaagatatttgccatgaatctttgggaaagagtgttttcatgagacattcttggaaagatttctttcagcatcatccagacaaacatagagaacacatgtgtcttcctcttccttatcaaaacatggacaagactaagacagattataccagaataaagagcctcagcatcaatgtgaatttgggaaacaaagaagtgatggatactactaaaagtcaagttagagattatccaaaacataatggacaaattagtgatccacaaagggatcagaaggtcaccccagagcaaacaactcagcacactgtgagtttgaatgaactgtggaacaagtatcgggagcgacagaggcaacagagacagcctgagttgggtgacaggaaagaactgtccttggtggaccgacttgatcggttggctaaaattcttcagaatccaatcacacattctctccaggtctcagaaagtacacatgatgatagcagaggggaacgaagtgtgaaggaatggagtggtagacaacagcagagaaataagcttcagaaaaagaagcggtttaaaagcctagagaaaagccataaaaatacaggcgagcttaaaaaaagcaaggtgctttctcatcatcgagctgggaggtctaatcaaattaaaattgaacagattaaatttgataaatatattctgagtaaacagccaggttttaattatataagcaacacttcttcggattgtcggccctcagaggagagtgagctgctcacagatactaccaccaacatcctttccggcaccacttctactgtcgaatcagatatattgacccaaacagatagagaggtggctctgcacgaaaggagtagctctgtttccactattgacactgcccggctgattcaagcttttggccatgaaagagtatgcttgtcacccagacgaattaaattatatagcagcatcaccaaccaacagaggagataccttgagaagcggagcaaacacagcaagaaagtgctgaatacaggtcatcccctagtgacttctgagcacaccagaaggagacacatccagcctcccacctctgccacagcctgcaggcaaccactaatgactttctgtttctatggatttgcctattctggacctttcatataaatggaatcacagtctttcgtgactgacttcattcacttaacatagtattttcaaggtagcaaaccatgtgatttcttctgactctatttcctcttctgccagtagtttcctgagctcaaactctactttttgcaacaagcagaatgtacacatgttaaacaagggcatacaagcaggtaacttggagattgtgaacggtgccaaaaaacacactcgagatgttgggataactttcccaactccaagttccagcgaggctaaattggaagagaacagtgatgtgacttcttggtcagaagaaaaacgtgaagagaaaatgctctttaccggttatcctgaggacagaaagttaaaaaagaacaagaagaattcccatgaaggagtttcctggtttgttcctgtggaaaatgtggagtctagatcaaagaaggaaaacgtgcctaacacttgtggccctggcatctcctggtttgaaccaataaccaagaccagaccctggagggagccactgcgggagcagaactgtcaggggcagcacctggacggtcggggctacctggcaggcccaggcagagaggctggcagagacctactgaagccatttgtgagagcaacccttcaggaatcgcttcagtttcacagacctgacttcatctcccgctctggggagcggataaagcgcctgaagttaatagtccaggagaggaagctgcagagcatgttacagaccgagcgggatgcactattcaacattgacagggaacggcagggccaccagaatcgcatgtgcccgctgcccaagagagtcttcctggctatcgcagaagaacaagcctatcagcgagagggaaatgattcagaggtccaaacggatttatgagcagcttccagaagtacag

SEQ ID NO: 73341 - DNA, 1886 bp, Homo sapiens
caggggccccagagacactgcagagagtgtcagggatttccttccccacaacagaattgctgagggtctgggaagcatggagggaggaagcagaattgcgggaccaccggcgcattgggaaggaacaggagctcttcttcttccatgaactgagccctgggagctgcttcttcctgccacgagggacaagggtgtataatgcactagtggcgtttatcagggctgagtatgcccatcgtggtttctccgaggtgaaaactcccacactgttttctacgaagctctgggaacagtcagggcactgggagcattatcaggaagacatgtttgccgtgcagcccccaggctctgacaggcctcccagctcccagagtgacgattctaccaggcatatcacagatacactcgccctcaagcctatgaactgccctgcacactgcctgatgttcgcccaccggcccagatcctggcgggaactgcccctgcgactagctgactttggggctctacaccgggccgaagcctctggtggtctggggggactgacccgactgcggtgcttccagcaggatgacgctcacatcttctgtacaacagatcagctggaagcagagatccaaagctgtcttgatttcctccgttccgtctatgccgttcttggcttctccttccgcctggcactgtccacccggccatctggcttcctgggggacccttgcctttgggaccaggccgaacaggtccttaaacaggccctgaaggaatttggagaaccctgggacctcaactctggagatggtgccttctatggacctaagattgacgtgcacctccacgatgccctgggccggccacatcagtgtgggacaattcagcttgacttccaactgcccctgagatttgacctccagtataaggggcaggcgggtgccctggagcgtccagtcctcattcaccgagcagtgctcggttctgtggaaagactgttgggagtgctggcagaaagctgcggggggaaatggccactgtggctgtccccgttccaggtggtggtcatccctgtggggagtgagcaagaggaatacgccaaagaggcacagcagagcctgcgggctgcaggactggtcagtgacctggatgcagactctggactgaccctcagccggagaatccgccgggcccagcttgcccactacaattttcagtttgtggttggccagaaagagcaaagtaagagaacagtgaacattcggactcgagataatcgtcgccttggggagtgggacttgcctgaggctgtgcagcgactggtggagctacagaacacgagggtcccaaatgccgaagaaattttctgagcctttgtacatagatgaggcaaaaacctgcgagtgccatcagcctccctcacatgggagaccccaacccagctgacaatgtggagcccccagaacttcagaactgtgtggaggcacatgtctgctctcctgaaaagagacttggtttggggaccccacaaaaggagggaagctgtagctgtttggatgtgaggagaatgaaactacaaaaaaaaataaattgggccaggcgcagtggctcatgcctgtaatcccagcactctgggaggctgaggcggacggatcatgaggtcaggagatcaagaccaccctggctaacacggtgaaaccctgtctctactaaaaatacaaaaaattagccgggcatggtggcacacgcctgtaatcccagctactcaggaggctgaggcaggagaatcgcttgaacccgggaggtggaggttgcagtgagctgagattgcgccactgcacccccctatggcgacagatgcgagactctgtctctaaataaataaataaataaataaa

SEQ ID NO: 73342 - DNA, 663 bp, Homo sapiens; identical to SEQ ID NO: 63621
  misc_feature (1)...(663): n = a,t,c or g

SEQ ID NO: 73343 - DNA, 2013 bp, Homo sapiens; identical to SEQ ID NO: 63622

SEQ ID NO: 73344 - DNA, 1518 bp, Homo sapiens; identical to SEQ ID NO: 63623

SEQ ID NO: 73345 - DNA, 1272 bp, Homo sapiens; identical to SEQ ID NO: 63624

SEQ ID NO: 73346 - DNA, 1492 bp, Homo sapiens; identical to SEQ ID NO: 63625

SEQ ID NO: 73347 - DNA, 317 bp, Homo sapiens; identical to SEQ ID NO: 63627

SEQ ID NO: 73348 - DNA, 456 bp, Homo sapiens; identical to SEQ ID NO: 63628

SEQ ID NO: 73349 - DNA, 4963 bp, Homo sapiens
ttttttttttttgaaaaagacagaagcagcttttactatatttacatccaacaaaacttcgcagggaacaatccttattgcacaggtcaggacctgggtgggtgaggcattccccaaggcggggcaggcaagaaaaattaggactggagggggcaccagttcttcctaaggggagcttgagactcctctagctcccagtgcctgactttgaaggaactacaaaccaccggaccatggtgccctatttcccttccctttctcactctccataagaacctcataagcaagggggctgtggctccagaataaataatttaaaataaaatacaaacacttaggtagaaaggcatggagagccttgggctccttcagcaacgtcagggaagagggaccattattggtggagaatgacatccctacctcccattcagggcaaaggctcagtagctctgcatctttccagttgttttttaaaacaaaaacttctaaaatgaccagggcaatgcagatctgtgggtaccctggaggggagttcccggtataggacaagggaagaccagagctgtaccaactccccccagatctcccccaacatcagcacgaacaaactgggtaggttggtgatgggggaatcaggacttttggtaacagtggatccctcttcctgttgtcctcgcttggagcctttgactgggcatccttcccagcctgttcccaactccatgaaggcaacagggaagcagtttaactctagaatcccttcttcctcacttccccaccctaggctggagagggaagcttaaggtctctagcattctggaggtgctccaaaacattttcggcagtcaatggccttgggagtgggcatctgcgcccgccggtgcctcagctcctccttgcccatgctgctggccagcttgttaaaggcagacttgtacttcttatcgaaggccactatgtccacgtggtccttgcccagagcagccattgtcaggaataatatctcacggtagattcccctctgcaggtgcaggccagtgggtgggggccctagagtttccagcaggagccccacagccttgtgcacttcattgagtccaacatggcgcagcactgactccaacagtgccaaactaagggatgcaggtacagggcctggccataccacccgctgggggatctggctgtggaccctccagagcacatagagaggtgggcagctattggggtcaggggtcagtacatcccacagcagccgtacctgaacagaggctggatcaggggttagccaaggagatggggcctgggagtgcgaaggcccatcacaggaggccagcaccaggcctggtagaatactgggcaggcgtagccgttggaaataccacaaaaggttccagaagatgatggggtgggcagagggcagttcaggcaacgccagcacctcactgccctcgttctctaccagcgactccagctccttacgcagcaccagggggctcaggtatgcccatgccccactctcaacccgccgggaggctccccccatgtgcccgttgcagagctggggctcatccagagcaaggcagagccttcggtcactgagcacagggccaggaccaccagggacaggagcatctttgctgccactggcaccagcagatttggggctggggacactgggccgggaatcaagggtctggacactgagcaggggcacaaaggggcaggcgcagaaggggcaggttgtgttgaggttagagtcatcaggtgcccagccagccatgatttcctcatcatacaccagcgaatcacaggcacggcacagggagcagctggacagcagaatttccagggaaggtgactggaaggatccaggggtgtcactgaggcgctctgaggaacggcgaagactcaggttgctgagagaagattctgagaggtcccactcactgcccagagaggctgagctctcggaggcagtggatccagggcgctcccgggggtgcagaagactgtccatggggctgcggcgggctgggggtggcaggtcaggaggcagctcaggtgggggaatgcgggaggcaggggagtggcgggaaggagtgagcagctgttggaggcgggcacccagccctcgtcggggggtgcctgcctcatcctgtcgcccaccagccttgggtccccgcccacttagcccttccagggcctcagtggactgggcactcagggctgagcctgagccccctgggctgcctccagggagcggctcctcccctgtcaggctcaggtctgagagccttccatcgtgccagggcacaggtgatccccggggttccaggacccccaaggcctctatcatgtgggccacaccggcctccacagtgggctgtgcccctcgggcactgcccaggctaccactcttcaccaggcgtccagggggtgaggctgggtctctcagacttcgcccagcccaagtagtctggcgctgaagagggcgagtaggggaagggcgctccaaatagggctctgcctgggagctgcctgcctcttgatgtgctgacacctgctcctgctgctgctgctgctgctgctgctgttgctgctgctgctgctgttgccgttctctcaagggctggcggaactgagcagcccccaggacaacattccggagcttggcccagcgcagacgcccacctggtgtgccagacggccacttgctttccaacacagccttattgtagtagccataggtgatggtgttgggcacaatgcctgcctgacggacctccagcatgacccgcacagacagcacaggctgcccatagtgtgagcagagctgcatcagtacccggtaacacacctcatcagggagcaccaccttgccgctctccatctggcgcagcacatggtaggctgtgtgcagtgcctgcactcgggagggtgccgaccgcacataggcaggcagacacaggaaccacagcccatagcagtgccccagcaggcaccgggcccacagctcaggcacagctgctgacttctgtgccatccgctgtgcaactttcatctcctgtttggtacggcgaggagcaggactgctgggggcgctacgggaggggcctggcacaggcagggccccaggttgctcttgaagagactcaaacaactcagcccgtagctctgggaatccatcatagcagtactggggagtggattcactgccctctggtaaggcaggctcctcgggaggtgtgataaagacagtgagctcacttcctgacagctcctctagctccactaagggtgtcggctcaggcttctcctgctctgggtggaccttttcaacacaagagtcaaagaattcaagggcagcatggcgagcagagccaaaagagcactcctcaatgaactgtgagaacatctgtgtgtgcagcagctgagagtaaagtttgtggctggagcgttcccgggatttgaggaagccctgcaggaagaaaaggttgtcaacatcacgagctccctcggagggggcctgggtgagtgggcgcaggaagacccggtagcccttgagcagacaggccatgaagcggaggaaggctccttggacttcgcgctccagccgggccctgcggccacacactgcctcgtagtctgtcagtaggaactccagggatgcttcctcctcaggtccagtgtatgtctggtccagctgctggtacaggtttgtcagtgtggccagcagaaccttgtagggtctgcggggcagggtccgaggggagaggagcttcttttcctcagtctggaagagcgtgttggtatcaaggtctacacagatgacatcagcaggcgggtcatgcagatcaaagtagctggagtggatacccacaatgaagggcactggggcactcagcacatctgccagcaccagcgggcacagaggaatgtaggggcactgccagtgcagtgggaagatcatcgagacgagggcctcacagacgctggtgagcaggtctggccgcagcgagtggactagcagcttgtgctctgtgagcacagccagcagcagtgtgatagccagctcagggcccaggctctgcagcagctgcaggaagctggcaccactgaggggcaggggtgaggatacaggctgacagaggagcaagttgtcatagggagacatctgcactaggatgcggggtctctgtggggaagggaagggaacgttgtgaatgaagtgggagatgtgcgcttccaagggtaggcggtgggggcctgagacggagtagcggtaaagaaaggtgaggaaggcgcggaaggcagggaaggcaggccagcgggacagcacagcgatggcacgccggctgcgcacagctctgccccccagtgcccgaccccgctccacggcgctcagcaggcccagtgcccgtgcctgtcgctctgatagcctggcccttgggaacgcctcgtagaactgcctcgtacaccagcgtgttggccttcgccaggcccaccttatagcacaggtacactgctgggccccacatgccagggttgaggttgcggggcagccggcagtaagtatgaggagtgccctcgcccttactgggcagcaccaggcagaggtcagtgatgcccagggcatgcagccctgccccctctgctgcccgccggtaagtgaggtaggtgcgggggtgcccggggcctggaggggccaggtttgctgagtggctgtagggtgtcgtgtcaagcacttggaagccaggcttgggacgttccttcccctcatacaacacccccagctcaacgagggggggcttgtcacggcccctgcggtagcagatgacgggttgagttccacccagaagtccagcactgagttccaaggggtggcccccagcagaagcctggatgcatgtgtagccctggggcacttcctcgcccagtgccctagcgatgactgccacat

SEQ ID NO: 73350 - DNA, 1075 bp, Homo sapiens; identical to SEQ ID NO: 63629

SEQ ID NO: 73351 - DNA, 401 bp, Homo sapiens; identical to SEQ ID NO: 63630

SEQ ID NO: 73352 - DNA, 4860 bp, Homo sapiens
ttttttttttttaggatgtttaaagataatgctttttaatatttcaaatatttttttaaatctcatcaaaaatgttatcaccttaacagtactttgcacatgtggaatttcatacctaaatttgatactattttggtttatttatggctacttacaagagtcacagtaataatgtccactcatcagagtctttctttggtagagcctaatgggaccagacagatgaactgttatgcaaatgagatggataaagcaaattcatgatagtatgaattataagggtttttgtttaatggaaatacaacttaaaaaggatttccatatttatccccatcattattttggaagcttaataccctgttcaggggttgaagagtttgaatagctcacacaatcctgtaaaaatgacaactggctgccctttaataaataaagtcattgtaaagaattacatttacagagtgaaaagtgaatacatagcatttcaaattcaattttggaagtactaataagtactgacccataacaatatacactagctatctttttaactgtccatcattagcaccaatgaagattcaataaaattacctttattcacacatctcaaaacaattctgcaaattcttagtgaagtttaactatagtcacagaccttaaatattcacattgttttctatgtctactgaaaataagttcactacttttctggatattctttacaaaatcttattaaaattcctggtattatcacccccaattatacagtagcacaaccaccttatgtagtttttacatgatagctctgtagaggtttcacatctaaattaccaagaaagcccttccctccctcatcttgcactcagcttaattctatactagtccttggattatgtaccactgtaaaagtataactgtatcaaaattaccatgtttatggatacaatattatgccatacagagcaacaaagttacatataatgacaaagattactgaagttatgcaagaccagaacaaatgttaggacatgctacctaggcacagtccctacaaagaggctcctaagtaccccaagttcaaataacattgacaaaataatgaacaattatctttaaaaattataaagctactggcaaattaggtaattgctaaataaaggtagagcatgagattaaactctaatatttacaactgcaacatacttaattacaattgtgcacgtatcagtggctttgtaacaaaaatacagagaaaaaattaagttttcagttcaacaagaggtcgaatccaatcaatctcaaatatactcaacaactcaaaagatttaccacagaataaattcaagattagctgataaacaagagccatattactggtgtttaagacaaaatctaaacaagttaaaatctaatgcttgatcagaagtcagatgactgtgcaaactttacctcaacagaaatatactgagatgtgcaaacaaatgtaaaacctccactactggtttgcctgggaggctgaccttttctttcttacagagcttcctgataaccataaactataaatacaggtacaatgcacagtcagtaatcttttcttttttatttattgttagaatataaaagaattgagagcataggtttaatttcatttttataaggaagactacatttacctgaaaaagaaatatggcatcacacacaaacacgcttcagggaaggagtatatttaagaatatggtgtcattctgaatgctaaaggaaaagtgatccctgtttactattaaaatatgtagtgtaaaattctttaaaggaaacaactcactaaatctctactaggtaagttattgtgaatttagttttcaaatcacagtaatccacataaccattattaacagctctgtttcatagaactgcaacaagccaacaaacatttaaatgcacttcacatcaagagtatgtaaactttattttttcctcttcaagccttcagaaagttaggggctatttcagcagccaatctggtcagaacctctgaaggcaaaatttcagtgcctcacagtgtatatgaccatctgttgcactgcacacatctggtagtgaagtgtcccctatcagtggcttccagtaaggcctagagtttaaggttaacataaaaaagtgccacctttgttttagattagtgatggactctgacaagataaaataaagttattctgtatattgttatacttacaagcagctccaatcctgagtatttacggtaatatctaaacatacaaaaatgtatgtacatttttctccactttcttgtaaacagttgtcagtatactgttttatccctttatcattgaaacatgcaaatcatacatacaagtataaatacacaaaagaaaacaatttacactcattcaaaagccaagcaacaaaaaatagctacagtattcaaatcataaataatgaatgcttgaggcatcttatattcctagaagcagccagccattcatcctaatgttcttagctgcaattgtagaaatactgagttttgcaccttccatgcctttacagtatttataacactatcatatgtggagataaagacttgtttactataatctcttcttttcagaatgaagaataaagtagcacttacaaatattgaagcagtggcagcaacagcaggggttaccactgctagatcagaaggaatttttccattctaacaatttttaaattaaaaaagtaaaggaaaaattgacctaaacaaattattacatgttcattccttgggcacttaacagtgagtccagcatgtcgaatgtgtctttgtagtccatatgctggctgcttgtactgtactcgtgattggcatcaggaccgttggtctccactggcttcttgtccagtttcacgagggtgctgagatgtccgtagcccacctgaacttttggaacttttgctcattttggagtggtggttgtgagatgcatcattgacatgcagcctcttccttgaagagctggagctagaggaaatgccatcactgctcaggccaacaggactcctcagaacagtgggcgggattccgtcggcactgtgtttactgccaccgctgctgctgccactatgcgagtgggaatgcttgtggctgctggtgtggtggcggcttgaaggatgctccttgtgcttctccttatggtctctgctaatatgtgggcttgaatgtttgctcttcccactgccttcatcagaagagctgtgtctttctgaagaagaaacttttattttcattttcagttcttctttactggcgcttttatcagtgggtggtattggaatccgtaatttcagtgacccactcttttcctttttatctgccatgtatttttcagtatttgcgataggtattttcattttaatgggagaagtaacagaactgctgctggctgcctgtgactgcccttgtttgtgctgctgttctacctgggcagctatataatgatcccttacatcgagatcaagagtttctagtttacgcttttctctatatttatctaaagacattttctgaggaattattcctggagtagtggaaattggcccatggtgtttactgctccctgctttatgagtatattcttgcttaacagaagaatgatctgaaattttgtcaggtctgtgatgtaatcctgaatgcagtgatatagaaggtccctgctggaagttgatgttgtactggctaccagacaaagatgtctcctgtttctgtgaatatagctgttctgtccttgctgagtcttgatgttgaggccattcctggtgtgatgataaaccgtatgaagtacttggcattcctgttgctagcattgacaaattatcagatgtatggctgtcttgaacagaaatatttcctgaatttagaggtactggcgcagggaatgctgatgtagatggtttctgaaaacttgggtttgtaggcacaccagtgacactatctactaaaatggaattctggaccaaagatgaaccaagaagtggtgtctctgatacctgtccatctacttttggtttcctagctgcctgattagccctccagtttcgaatcttcttcaacctattaggcgttttctccaatatttgtagaaactcatgtgttagctcatctaataattctagagtaactgtaggatccacatattcccaccaatgctttccatcagttgatacagggatctcccaattggaccatttgcaagccaaatgaatgcatacacatgctatcactgttggtttgtactgaagacagaaggttgtaagatgcagactgttggtagccatgaaataggatgtctgtgccaaatccttgcttgctcttactaactgggtacatttcaccacatctgtgtgtgggtgttcaatggtgatctcaaaacctagagtttgtagcattatggtttcaagtataaccagttcttgagtctgttgaaggtaagcatcacatttagtatccagcagtggctctagaggatgaagacaagcatgtgctactttgataacatgttcaagttttcgagcctgttcttccacttttgcagccaaaaataatgcagtagacgatattatatttttgttgaatttggtgaaagaatggtgcatataaaacctgtgcatataaacaatcgcagtgtttattgtaagctgagagacattgagacgctgtcccatctcctggatgaggttggccgcctgctggcggcacgagagctctttatccgcctccactccgcagcggcggctcggcgtgttctccagctgttcccgagtaaagaaccagcgagaagaagctccacggcccgacgccat

SEQ ID NO: 73353 - DNA, 1104 bp, Homo sapiens; identical to SEQ ID NO: 63631

SEQ ID NO: 73354 - DNA, 386 bp, Homo sapiens; identical to SEQ ID NO: 63632

SEQ ID NO: 73355 - DNA, 780 bp, Homo sapiens; identical to SEQ ID NO: 63634

SEQ ID NO: 73356 - DNA, 1073 bp, Homo sapiens; identical to SEQ ID NO: 63635

SEQ ID NO: 73357 - DNA, 2262 bp, Homo sapiens; identical to SEQ ID NO: 63636

SEQ ID NO: 73358 - DNA, 2442 bp, Homo sapiens
ggcacgaggtctattgaaataaaagcccgggttacctacatagactatgaaggacgctctgatggggattccattaaaaaaatcattaatcagatgaaaccacgacagttgatcatcgtccatggcccaccagaggccagtcaagatctggcagagtgctgtcgcgcctttggtgggaaagatattaaagtgtacatgccaaagctacatgaaacagttgatgccactagtgaaactcacatctaccaggtgaggttaaaagactcacttgtcagctctcttcagttttgtaaggcaaaagatgctgaattagcttggatagatggtgtcttagatatgagagtttccaaagtggacacaggggttattttagaagaaggagaactaaaggatgatggagaagactcagagatgcaagtggaagctccctcagattctagcgttatagcacaacaaaaggccatgaaaagtctgttcggagatgatgaaaaagaaacaggtgaagaaagtgagatcattcctactttggaacccttgccacctcatgaggttcctggacatcagtcagtttttatgaatgaaccaaggctgtcagacttcaagcaagttctcttacgggaggggattcaagctgaatttgtaggaggtgtacttgtttgcaacaatcaagtagcagtccgcagaacggaaactggacgcattggattagaaggctgcctttgtcaagatttttataggataagagaccttttatatgaacaatatgccattgtataaaggacatgatgtcaagaagtatctgcttgacctttctaagaaaaagggattcttatcttactctgagcttttgatgttttgttttgtaacatacaaaaagaatctgccagaaaaacttacatgtatcagatttttaaaaatataaatagagaacattttgcaaatgctcaaatgagcattctatcttttggctttcagagtgatagagctcctaacaggtgtacaggcccaagagttgaaggtgattggttttctttacagactccttgttctctagaagggctttttacttgaataaaacaatgcaacttagcaaaccaatttatggccttagagaaacatttttgcatgagttcttacaaactgtttgttatattttctggaatgataagtgagaattatttagaaaagacatgctccaaaaaaaaaacaaaactgataaaacagtttttcgaaacttacttttaaaagcatacgtgctatgactctctccagtttgaatatgcaattgttttcacaggcaggatgtctgttttctgcctgtatttcccagggatttactctagggtaaggtagtacacatttggttcagaaattaatttttatttctcctatatcttgttttatcaagattttgttgtggcatttcaatgtaaattataacaccatcatttgagtatacataattcaaaagaactacttgatgcagtatagtcttaagggttctgcatacattttagaaacatcttagccgtaagttaggtcctgtgttaaactgtttagtgctctgtttttaagaaaacaaatgttgaacctcacacttttatgtggtgacagtgtaatttaattaaaaggtgtaaatggtttcatctcttaggcttgctgtctcctaaggtcacccaagcagtggttggattttatacacattactactaaaataatactgaagttggataaggttatcctttctgtatttgcgtctttcttgtgactaaccaccctgatatagtattaaccactgtgttcaagagtaaaaacaatatatgcaatttttcatttgaactttaaagagtgaaaaccatgtaaactattgaaactattgtaatccattaatgcttttttagaatggcagaccttgatgtttatttctcaaatgggtaagccctcttctttactcttaatttttttttgagacagagtcacccaggctggagtgcagaggtgagattttggctcactataacctcttcctccagggttcaagtgattctcccacctcagcctcccaagtagctgggactacgggcacatgccactgcacctgggctaatttttatatttttggtagagacagggtttcaccatgttggccaggctggtctcaaactcctgacctcaagcgatccacccacctaggcctcccaaagtgctgggattacaggcatgaatcaccacaactagcctacccttagatttttggaaggatcgatcttatttaactatgtgtggaacaacccagtaatatcagactcgaattactatttcattctatttcaaatgcttataaagctactattgtagattatagtgttaatgcaaagtttacagacttttgatatggaaaaccagataaacacaacaatgttacaaaaggcaaaaaaaaaa

SEQ ID NO: 73359 - DNA, 931 bp, Homo sapiens; identical to SEQ ID NO: 63638

SEQ ID NO: 73360 - DNA, 1159 bp, Homo sapiens
ggcacgaggagattcggacctcgccgcatccgggaagaatcagtgatgcttcggacagtcaatcctagcacgggggccctccccttccagtccctcatggttgcagacctaggcgatgtgaatgtcaatctttacaaccttcaggacagctgccggcaaattcaagaggcctatgagaaaattgtagcagctggctgtattcctctgaccttgggtggagatcacacaatcacatatcccatattgcaagcgatggcaaaaaagcatggcccagtggggctgctgcacgtggatgcgcacacggacacgactgacaaggccctaggagagaagctctaccacggggcgcccttccgccggtgtgtggatgagggtctcctggactgtaagcgtgtggtgcagattggcatccggggctcttccacgaccttggatccctacagatacaaccggagccagggcttccgggtagtcctggctgaagactgctggatgaagtcactggttcctctgatgggggaagtcaggcagcagatgggaggcaaacccatttatatcagctttgatattgacgctctggatcctgcctatgcgccagggacagggacacctgaaattgctggtctcactcctagtcaggctctggagatcatcaggggttgtcaaggcctgaacgtgatgggctgtgatcttgtcgaagtttcaccaccgtatgatctttctgggaacacagccctgctggcggctaacctgctgtttgagatgctatgtgctctccccaaagtgacaaccgtctgagtcttgtgctcttcaagacaaaacagattgcgtcgctgacaagttctcaagaagaacttatgagtaagcagtctgagaactaaagagtttatgccaagaaaactttctgctgaaagtgtcattgctggctgtgaagtcgggataatcagtagaattctcacccaaacagcaacatttctaaggaacttggattaattgggggaaaaaaaaaggagtacttgtactgctttgatttttatttccctttggatgaaagatgggagggataaaggggaagtgaggagaatttctttcaagattatctaaacattagaaacatgacatttaaaaaaactatgaaataatactgtataagcattcc

SEQ ID NO: 73361 - DNA, 1510 bp, Homo sapiens
actgtaggaattttgaaagtgcaaaaggccaacccaaaattctaccaacaaaggtaacctactggcatttgggtatattttttctctgggccttgtcctccgcctttatctgatgctgcagatgtaattctgtgttccgcttgtttgcttcatgttgtgttatgaacatgtccccctcaaatctccctgggagccttccagcgatcagccccctttgactgtgtggctctggccttggggaagagctgagggtctcctgccctaacggatggtttcagggtgtgaaggtcaaaggcctcatcctcatcagcccccagaaccctctgggtgatgtatactcccctgaagagctacaggagtacctggtatttgccaagaggcacaggctgcatgtgattgtggatgaggtctacatgctgtccgtgtttgagaagtctgttgggtaccgcagtgtcctaagcctggaaaggctccctgacccccagaggacccatgtgatgtgggcaaccagcaaggacttcgggatgtctgggctccgctttggcacgctgtacacagaaaaccaggatgtggccactgccgtggcttccctctgccgctaccacggcctcagtggcttggtccagtaccagatggcacagctgctccgggaccgtgactggatcaaccaggtgtacctgccggaaaaccatgcccggctcaaggctgcccacacctatgtctcagaagagcttagggcattggggatccccttcttgagtcgtggggctggcttcttcatctgggttgacttgagaaagtacctgcccaagggcacctttgaggaggaaatgctgctctggcgccgctttttggacaacaaggtgctgctgtcctttggcaaggccttcgagtgtaaagagcctggttggtttcgctttgtcttctcagaccaggtccaccggctttgcctggggatgcagagggtccagcaggtgcttgcaggcaaatcccaagtggcagaagacccccgtccctctcagagccaggagccaagtgaccaacgcaggtgagctggtcattgtctcgtggccagagggcccagcagccactgtggacctggggcgttctggggctgcagaagactgactgtggatgtgccatttgccaggaaggtatctaacttggctttgtgcctgaagaactgtttcttgtctttcgctgtagcagtgggaaactccttaagctgtggttcagcctgggccctccctctctcctattaaacaaaactaggagagtccatatgtctccattgtgagttatttagaatggaggagtcgtgactgcttctaaccagagcctcagcccccctgaggatgtgaaaagaaaacaaacaacttgtaccttctttctgatatcaccgtcattcctctttctttgtcaccaaggaaacgagtcaaaggaacagcacatacaggagagtttgtagaaaaataaaaaaaagtgataacttccaaactcaaaaaaaaaa

SEQ ID NO: 73362 - DNA, 2247 bp, Homo sapiens
atctctcggctttcctggtcagcagcgacttgacctacgtctaccagtggccctggacgctcctgctcctggctgtcagcggcttctgtaactttgcccagaatgttatcgccttcagcatcctcaacctcgttagcccgctgagctactcggtcgccaatgccaccaaaagaatcatggtcatcacggtgtccctgatcatgctgcgcaacccagtcaccagcaccaacgtcctgggcatgatgaccgccatcctgggggtcttcctctataacaagaccaagtacgatgcaaaccagcaagccaggaagcacctcctccccgtcaccacagcagacctgagcagcaaggagcgtcaccggagcccactggagaagccccacaacggcctcctcttcccccagcacggggactatcagtacggccgcaacaacatcttaacagaccacttccaatacagccggcagagctacccaaactcgtacagtttgaaccgctatgatgtgtagagtccaaaggacaggaccagactgttggtgactccttccccggcccccacagcagtatcagaaacttctgacaatcagtgaatgtacaacccagccgaggggacggggcataactctccatcagaagccctggggttcctggccccccgtgagccgcaggaggatgcgttgcctgcagtgcagacggccgtgagctctgggcaaacctaaacagagaccagtgtctcatgctctttcttcctggagtctgtcatctgagggccgtgtccctgcggagatcttggccacgttgtacctttccatgtggaattattccccaagcagtgtagctcagagcacttgtgtctgcattccagataacattcaggacctgtgtgaaaagctggggtcactgtggctgtagaccatgaactggcagtgggggtgtccagggcggtgcttgagaacgtcagactggctagtttaattccctggcgcagatacgcataggaccaacagggtcaccaagcagacagggagcccgcgagaatcattcaaaacatccccagccacagagatggatccagtttcctggtcatccccttagcagttcacaagttcctggcaaatgttccaaagcaaaaagcgattgcaattagcatccagttcctgcagcctggtgctctgccctgcacgtcagggttggcatccacccagatccagatggaagggaaacttctctcttctcctttgcctcctcttccctcaccagagcagggcgcttctcttggggtggtgagaaggatcttcgagaaatcgtgttcagtatttcaagctctatttctgtggcacatgtcttttgagaggcatcttcacctcttctgtgatgacttggtatgttgtttggtagagagatcttgattttcggaggatcttgcatttttctagggaatattttgtagttgtgtgtgtgtgtttttgccttggtccccattatgggatgcattaggactggcctatgcatcgaaaatctttttgtttgtaaacgtttaaaaacaaagttccccggccaggcacagtggctcacacctgtaatcccaaagtgctaggatgacaggcatgagccaccgtgcccagcctgattgacaatggcctcttgaaggctgggttttcccagccggacagtgcccgccccacatgctccactcccacgctttcatctgcaggcctgccttcctctcagccacctcactgctgagctctgtggtagagaatttcctttacccatcagggtatggtctggctggtaatactgactccaacccagctccttcattttatagaaggaggcatttctgaatcatgtttgttcaccatggcgagactcactgcagaatttttaaccaccttattttaagtcattcattctaggaacagtcaagcccctaccacaaaggggccagatccgttcaagtgaggaagcacttgcagtttctgaattttgctgtatatttgtcctatgtcacccaacaggccctttgctatagctgggacattaccagaccccaataccttagggtctcacagcctgaaggacacagagcattgaattattaaaagacctgaaaatattataatgtttttcaattgtcacctgttttcaagacttaaatgctatagacttttctgcaggaatgacgtgtatattcctcactggcatttaccaaaaataaatgatggtttccagggaatcaaaaaa

SEQ ID NO: 73363 - DNA, 2012 bp, Homo sapiens; identical to SEQ ID NO: 63643

SEQ ID NO: 73364 - DNA, 4288 bp, Homo sapiens
agtctcattggcagaggcgggaccgacggtgtgtgcggaacatggcggagcgcggcaggaagcggccgtgcggcccgggtgaacacggccaaaggattgagtggcgaaaatggaagcaacagaagaaagaggagaaaaaaaaatggaaggatctcaagctgatgaaaaaactggagcggcagcgggcacaggaggaacaggcaaagcgcctggaagaggaggaggcagcggcagagaaggaggaccgcgggcggccctacacactgagcgtagccctgccgggctccatcctggacaatgctcagtcgccggagcttcgcacctacttggccggtcagattgccagagcctgtgccatcttctgtgtggatgagatcgtggtgtttgatgaggagggccaggatgccaagactgtggagggggaattcacaggagttgggaagaaggggcaggcgtgcgtacagctggcccggatcctgcagtacctggagtgtccacagtacctgaggaaggcgttcttccccaagcaccaggatctacagtttgcagggctcctgaaccccctggacagcccccaccacatgcgtcaggatgaggaatccgagttccgagagggcatcgtggtggatcggcccacccggccaggccacggctcctttgtcaactgtggcatgaaaaaggaggtgaagattgacaagaacctggagcccgggcttcgggtgactgtgcgactgaaccagcagcagcacccagactgcaagacctaccatggcaaagtggtatcatcgcaggaccctcgcaccaaagctggtctctactggggctacaccgtccgactggcttcctgcctcagtgctgtgtttgctgaggcccccttccaagatgggtatgacctgaccatcgggacgtcagagcgcggctcagatgtggcctctgcccagcttcccaacttcaggcatgctcttgtggtgttcgggggcctccagggtctggaagctggagcggatgctgaccccaacctggaggtggctgaacccagtgtcctctttgacctgtacgtcaatacctgtcctggccagggtagccgtaccatccgcacggaggaagccatcctcatctccctggccgccctgcagcctggcctcacccaggcgggtgcccggcacacctgaaagttctaaggggccgaggacatcagtgaagcagcagtgaaaccaggggctctgcaggtcacttgggacggacgccaccagacttgtctccaaaaatcaccacctttaatactccccggcctgcacacacccacagtctcactgggctccaccctcacttactgcccgccgtgatggccttgaggctgcctgcccgcgccaggatgtttggcacaaagagcagccccgaagcccgctcaatgctctcgatgggcaccaggaagcgctccagtgggatggcctcatccacaggtgccgttgggcatcacgtaggtgcggagctcaatttgcccacctgctgcctccaggatcagcaccttgaagaagtgtgtgggcactgccacgtggttcttgccgatgacctggtactttacgtaggatttcccatcagcctctgtcctgtgggcagacccaggcacacgtgggcagggggcctggatgaacccaaagccacctcttccaggcagccttccctgatctgtcctctaacttctgtcaacctgcaggaccacgccctcactgtgagacttctgtagcctgcctggctcctccttgaggctggaactctctccaggggtggttaactctttccctctgttttccttatgcccaacactgggtcaggcagagtgggcgacaataaacgctgctaggagaatcgagccttctgaatattcacattcgtctgaggggagacttaacgactgtccatctctccccacagaggtgagcaacaagtgggcaaggaccatgacaggtgacatcccagcaccagcacaggtgccaggacaccggacgggggctccccctcagcagagtctcctcccttccaccaggccctaggaggcacctgctaatgaaatttgatcagtgccccaaccaccgccttggccagcctatgccgagcccttaccatggaccaggccctggggaagcatgtgacatcaaccaagaggtcacaggttttgcagagggggacacaggtcatttgcccacagcaccaaggaactaggtgatgaggcctggactccatcccgagcctgtggattccagagtgagctgctcagcctggacctgttgcctctcagccccagccctctgcaggccagaaaaaccacggagcacacccagaggtgctcagttgcttccacctgagaggcagggctgcacaggagcaagagtggaggccctgggtcaggcagatctagattcaaactcccgagaagggtggagggaagtgctccaagcagagcagagactgaaggcgggagagcctggtgcaccgcggacctgcagggggaaggcgtgagagctcggtgcactggggacctgcatggggaaggcgggagagctcggtgcactggggacctgcatggggaaggcgtgagagctcggtgcactggggacctgcatggggaaggcgggagagctcggtgcacctcggacctgcagagggaaggtgggagagcttggtgcaccgcagacctgcagggggaaggcgggagagcttggtgcactgcagacctgcggggggaaggtgggagagcttggtgcactgcagacctgcggggggttccatattggcagaacaagattgggtgggcatgccaagaggtgacagcagggagaagcgggggcagattcagggcctgctgctgcccatgggcagaggagagatggtcaggggtacccgacaggtctttggctgtggaggtggaatgaggggactcgaggcagggaagctgacaggcttgccaagaaaccagatgagtagggaactggtattgacccagagcctggggcaagcctggccctgtgagtggcagtaggggcctcgggtgagtgggaggttctgccgcccccctggtttccaccttacctgggcaggaagagtggccctgtgcagacatagacgttttggtagctgcgggtcaagctgcggctatatttctccaggttgttccaggcattctggttgaggtggggcacctggtaggagagatagggcttagcaggactgtggctgggacccttcctcctctatcagagggccgccccaggtcctgaggggatggacaggctcagagatatccagtgagacaagcggggggaaactgaggctcaaggaatgaaagtcactccctgaaacccagggctgatagagtgctagccaccaccctctgtccctcccacagcccaggtgtcaaagtcttttctcagctcccaagagtcgaatgaaggaagagcctgtctccacctttcagagaggactgaggcctgtccccagccccacccagggtctcctgggaagaccagcccttccaactaccaacccgttccttttcccagtctgagccacaggaagagcctagcggggaatgccatgaatcgacctccatcctgagctctccaggcctgggacaatggaaagtggatagggggctgtcttcccagaaggaagctgggtcagaggttggtgccccatgggctccacccagagccccatggcagtctccatccattggtgccaggacctgctgggaacaggctgagagggtggttggcccagtgcacagtgcctggcactaacaacctgatcgtgggccaggtgtctgcctcgaaactgcctgaaggcaggcagggtaggacaatgtctggaggctcacggttttatagactaggggtccccaacccctgggctacagaccggtaccagaaccgggccacacagcaggaggtgagcagcaggcgagcaagggaagcttcatctgtatttacagccacccccccattgatcccacagcagcctgagctccgcctcctgtcagatcagtggcggctggagattgtcataggagctggaaccctatggtgaactgcgcatgtgaggaggttgcgcgctccttttgaaaacctaatgcctgatctgtcgttgttgcccatcacctccagataggactgtctagttgcaggaaaacaagctcagggctcccacgggatcctacattactgtgagttgtatatttcactatatgttacaatgtaataataatagaaataaaatgtacataaatgta

SEQ ID NO: 73365 - DNA, 987 bp, Homo sapiens; identical to SEQ ID NO: 63646

SEQ ID NO: 73366 - DNA, 1848 bp, Homo sapiens
ttttttttttttgtatctatgtaaatattttattctgcttccagatagaacattgaagtttacatgttattttaaagacaataaacagctaagctactgacataaaatatacaataaatttatgagatataaggtacagatgagaaaaatctgaaataagtttttaacttcatttagcctattaggaacatgaagatgtctggaattgatgctggccttggtctcaagtactttttcccatatgtattcgttttatccttccagaaagcatatcatattagagtgtctaagaaatcagtgaatcactaagttttccatcttaccgaagtacaaaacattatttcaaatctaggccttctgacagaatccaatatctatttttatacttacttttctttctactaagttctttcataaaattatgaatcagaaagcaagtacaagacatgcttatttcacacagaatatcaatgaagacttaagaagataaatagcaagtacttctaaaaaatcacaaattttgacatttggaacaatataattgccatactattatatcttttattaaaaaagaccttttccagcttgtttccagacttcttttactcctttaatgctttctttcttcacacacttccagtattcttgtatactctgatgttgtggtacccataaacctcgatgcattctgttttttaacaccccaagaaactcttcatgactaagacattcatcaccatccaaatcaaagatcttaaagacagtgtccaaaatattgtttgagagttcttgtcctgttgctactttcacagctctcttaaactccgctagtctgacaggacgatgagctaaactgaacatctgcatggcaatagcaaagtcttccaagtgggttgtaaaatggcaaaatgacttgaattcatccaaactaatgctctctcctgctgacaacttctctctcacatttttccaataaatatctttattttcagtgttagtgaaaaaaagtagccactctgcaaagtcttcttttctcatgaaactcaaacctttagaaaactgaaggaattccatttcttgaatctctgtttgtaaattttccataaatcttcgaaattctttataatgaagttttctttgtcctctttttccaaagaaacgcatctgaagagttgtgttaatttcaggttctttcactattgcttcctgatatccagtttcattagttttcactgtcatcaagtcatcttgtttacttatgatcttctgcagcttaaaaaattcccttttttcaatcatctcattaccatctgtatccagcattttaaaagcaacatgaaatccagaatggggtttagtgaggattgtaagcaagaaaagatactcggtatatgaaattagccctttatcgccaaggtctctgaaaaaagttgatccacagccagctgtttggatccctgacagtgtatcctcgatgtccttttttgtcagcttcttgactgaagttttacgttccatttgctcaaacatcactgagaagaggaagtctcgtggtgtcatataatattctccttcatgttcgagtgaagaaaactgcatgaagcgctgcttacgaagagacggtttcccaatatatattattccatgttcaacatttttctgtgcggagactgtaaaactgccatcccgcgccgcaacactgacgcggctgtggtgccaggccgctcctgctcctgccagggccgcgccggccactgccgctgccaaggggccgggactccgcacagcctgtcggctgacagcgagcccccgtcgcagttttccgccccaggccgccacccgcgcgca

SEQ ID NO: 73367 - DNA, 952 bp, Homo sapiens; identical to SEQ ID NO: 63648

SEQ ID NO: 73368 - DNA, 4928 bp, Homo sapiens
  misc_feature (1)...(4928): n = a,t,c or g
tgaaatggagaaacaaagacaagaggaacaaaggaagagaacggaggaggaacgaaaacgcagaattgagcaggatatgttagaaaagaggaaaatacagcgtgaattagcaaaaagggctgaacagattgaggacataaacaatacgggaactgaatcagcatcagaggaaggagatgattcactacttataactgtggtacctgtcaaatcatataaaacatctggaaaaatgaaaaagaattttgaggatctagaaaaagaacgtgaagagaaagaaaggatcaagtacgaggaagataaaagaataagatatgaagaacaacgaccatctctcaaggaagcaaagtgtctttcattagttatggatgatgaaatagaaagtgaagcaaaaaaagaatcactttctcccggaaaattgaaactaacttttgaagaactggagcgacaaagacaagaaaaccgaaagaagcaagctgaagaggaagcaagaaaacgtttagaagaagagaagcgtgcttttgaagaagcaaggcggcaaatggtaaatgaagatgaggaaaaccaagacacagcaaaaatttttaaagggtaccgccctggtaaactcaaactcagttttgaagaaatggaaaggcaaagaagagaagatgaaaaaaggaaagcagaagaagaagccagaaggagaatagaggaagaaaagaaggcgtttgctgaagcaaggagaaatatggtagtagatgatgactccccagagatgtataagacaatctctcaagaatttcttacaccgggaaaactggaaattaattttgaagaattattaaaacaaaaaatggaagaagaaaaacgacgaacagaggaggaacggaagcataagctagaaatggagaaacaagaatttgaacaactgagacaggaaatgggagaggaagaggaagaaaatgaaacctttggattgagcagagaatatgaagaactgatcaaattaaaaaggagtggctctattcaagctaaaaacctaaaaagcaagtttgaaaaaattggacagttgtctgaaaaagaaatacagaaaaaaatagaagaagagcgagcaagaaggagagcaattgaccttgaaattaaagagcgagaagctgaaaattttcatgaggaagatgatgttgatgttaggcctgcaagaaaaagcgaggctccatttactcacaaagtgaatatgaaagctagatttgaacaaatggctaaggcaagagaagaagaagaacaaagaagaattgaagaacaaaagttactacgcatgcagtttgaacaaagggaaattgatgcagcactacaaaagaaaagagaagaggaggaggaggaagaaggtagcatcatgaatggctccactgctgaagatgaagagcaaaccagatcaggagctccatggttcaagaagcctcttaaaaacacatcagttgtagacagtgagccagtcagatttacggttaaagtaacaggagaacccaaaccagaaattacatggtggtttgaaggagaaatactgcaggatggagaagactatcaatatattgaaaggggagaaacttactgcctttacttaccagaaactttcccagaagatggaggagagtatatgtgtaaagcagtcaacaataaaggatctgcagctagtacctgtattcttaccattgaaagtaagaattaatcactctttttatcttttattctattaatttttttttccttaaaatcacttttcttcttctcttttttagctgatgactactagctcccctcccctctccctggaactttctctttcactccaactttcttactacatccatcttttctgtggcggggccaaaaaaggaaaccaggagtgccactatgctgacttcttattccttttcataacagtcttcaaagcacagctcatctaaagaatgcctacttcttttccaaataagcatcagatttatcgcctattatgcagtaacagtcaataaaatgtacttatgggggggaattactcaattattctatcagaacctattataaagactgtatttcccatagacgtttacagcaactatgtttaaaaaacaaaaacaaaaaaaaaacacccaaacctaagtagaatacattattttgcatgaaggaatgtcatttctgagctttttacacctaaaattaggctgaaatagctgagataattaatttggaacctatcaatttgagtggactttttctttagtagtacaccattttggttgttgtagtttcaaagtctttcctgaagccagatatattggggattgggagcggggtggggaaaactgtcactccctttcagaggaaaaggggaggagcatggagaaaaacaaaaattaaaggacttaaagaatggctatacagtgttgagtgttgaggatattaaacatgttatttttcaaacgtatgtaatatatattaaatttataaagcaaatttatgttgtgatcttgcctgaacaaattatattttaatgaaaaaactttctattaatagttcacgcaagagaaaacactttcaacatagtcgaaggcttcaagatctaagtgtatcagacttagggaaaaagtggcacaaccttcgatttaaaattctagtctttaaaatgagtttgtaaataattagctattacgttctattaagttgttttatattttaattttctggaagacaattttattttacaacgtgaacccaaataaagtaacttctggatttaaaagtctttctgtattttaagacttgtgcaaccagatgttacccttttatcattaaaactttttaaaatcattttttctcacagtaaacataaaaaaaaacccagtcaagtagaaaattttaccatgtaatatatgtataaaaaacacaaagcactcctttttaaaagtcatcaatgtacatttattgaggaaaccataatgaatacaaaattacagcaatcatgtgaccttttacatacaatgtcattaaagcaaactctaaaccacagttgtaaagtattcaatttacctcaagtccaagctgcatctccctaagacactgttcccatcacagtagccattttaagccaatcttctttttacacacgggtagtttctgtagagaacatttttctcaggacgaaaatgcatcgagcatgcataagaaaatatatatatatatatgcgcaaatacatttaagagtttctataggggtatcactgaagaaaataaaaccctgggatttatttgcttattaaaagccccaatttaaaaaaatccctcaaaagcttatattgtggcaagaaaaatgaagtcactaactcaacaaaaaataaggtaactttcagagccaaaattatctttaattaggtattgttataatgcattttaaagtgaggcagagtttgcagaaaataaaaacaagacatcctcactgattagtaaactctacatcattattctacacaacagataactttctaagtacagctgattttactggcagagtattcaaacaaataaaatgctatcacttctgaatgactcccctttccctctgaaagtactctgctattcctacccaaacccacccttatgaattaactaccaagataatttgtttaaaagatatattttacaatgtttataaacaactagtatcaaattactagttttagtattaaaaccattttttatattaaaaaataaaactatacttctcatttctaaaagaaacatcaaaccatagaattctaagtatcaccacactaagctgtcttaaaaaaaactaaaaacattgtcaaatttttgtttaagtgctaaataagtcagttcagtttcaatctaaactatacattgtttctaacactaatatccaatgcattcaaatcaactggctcaccttttctgctttccatttatttcagacttaagatcagcgtcatttaaaataatgcttatagtatcagtgaaggcttatggtaatgaataaaagaattctcatgagacagaaacaatgccccaatatctattatcatcaatctatctgtatttttttttataaaaatgcaatctacaactaaccaaaactcaacaggctctcaagtttcaatgagcccctttatattatcaattgtacatacctatcattgactattaaaacataacatacacataaatgtggtgtagtaactatgtaacttaagaaatttaacagttcatggaacatttaagatcaagtgaatagcactttaaaatgaaaagtgatcaaaagcaggtacattacaccctataccatattatgtatgggaatacatttcatatttctcaattatgatttgccaattttaccttctacattgagcccttctatggtccatgctcatcggctcaccaatggcatacactcaaaggattcctctttatgggtaactatctcaggacctgattttatgagctatgatttggtgcttgcagcatcttcagcactgtgtgtgaaaatgaaggcagtatttttgaatatttttctttgttgcagagataagcaggagttttaaaaggatcagcacattttagaaatcgaataaacaaaactgataagatgctgctttcatacattcaacttaactcaaaatatgtaccagttaaaatcatctataaaaacacacaaacattttaaactggcaaaaaaattaaatgcagtgtcagttattaaaatattattaaatcagaaaaatactgattgctacagattatgaaaggttatttgctatacagttaacatttcactgatgcacatgccttttatcaaaaccggacgcgtgggtcgaccgggattccggngggttccgaggaattcagtanggtttcattggcctgctgtggccagc

SEQ ID NO: 73369 - DNA, 1941 bp, Homo sapiens; identical to SEQ ID NO: 63650

SEQ ID NO: 73370 - DNA, 2674 bp, Homo sapiens; identical to SEQ ID NO: 63651

SEQ ID NO: 73371 - DNA, 1247 bp, Homo sapiens; identical to SEQ ID NO: 63652

SEQ ID NO: 73372 - DNA, 201 bp, Homo sapiens; identical to SEQ ID NO: 63653

SEQ ID NO: 73373 - DNA, 524 bp, Homo sapiens; identical to SEQ ID NO: 63654

SEQ ID NO: 73374 - DNA, 1216 bp, Homo sapiens; identical to SEQ ID NO: 63655

SEQ ID NO: 73375 - DNA, 1559 bp, Homo sapiens; identical to SEQ ID NO: 63656

SEQ ID NO: 73376 - DNA, 2150 bp, Homo sapiens
cgggccgagcagtgggctgatgctgccgacgtctctgggcctgacgacgagccagccaagttatattctgtgcatggctacgcgtccgccatctccgccggcagtgctgcggaaggcagcatgggcgatctcagtgagatatcctctcattccagtggttctcaccattcaggaagcccttcagctcactgttcaaaaagtagtgggtctctggattcatccaaagtctacatcgtgtctcacagcagcggacaacaggttcccgggtccatgtccaagccctaccacagacaaggggcagtgaacaaatatgtcatcggctggaagaaatcggagggcagcccaccgcccgaggagcctgaagtgactgaatgtcccgggatgtatagtgagatggatgtcatgtccacagcaactcagcatcagacagtggtgggagatgctgttgcagagactcaacatgttctgtctaaagaagattttctgaaattgatgcttcctgacagccccttagtggaggaggggcgaagaaagttttcgttctatgggaacctgtctccaaggaggtcgctttaccgcacgctgtctgacgagagcatctgcagcaacaggagggggtcctcctttggcagttcccggagttccgtgcttgaccaggccctgcccaacgacattctgttcagcaccaccccaccctaccacagcacgctgcctccgcgggcccaccccgcacccagcatggggagcctgagaaatgagttctggttctccgatgggtccttatcagataagtccaagtgcgcagatcctggcctgatgcccctcccggacacagccacagggttagattggacccacctcgtggatgctgcacgggcatttgaagaccagagggtggcatccttctgcaccctgacagatatgcagcatgggcaggacctggaaggggcccaagagctgcccttatgtgtagatccaggcagtggcaaagagttcatggacacaactggggagcgttctccatcaccactgaccgggaaagtcaatcagctggaattaattcttcgacaactccagaccgaccttcggaaggaaaaacaagacaaggccgttctccaagcagaagtgcagcacctgagacaggacaacatgaggctgcaggaggagtcccagaccgcgacagctcagctgcggaaattcacagaatggtttttcaccaccatcgacaaaaaatcttagccaatccgcacctcatcaagggaccactgggaaatgccccttgtccctttgaagtcacaaacatgtggtttttctgtgtgctttcaaccaatcgtagatgtttttgctgttccattctgtgtagcaccattcaccacagcaggatagggagcctcgactctttctcggtaaccacggcagagagcagcgccgatgtgaagatgaatgaatgtaactcctggtgtgaagatgaatgtaaaccctggcgacagttgagacctttttcttttagactctgctaaaacagtgctctggcttgggcttacctcaagagggaagatagttgagttttatttcctgtatatcaggtgacctggtagagatgtaaagcaatttaccatagtttgggctttagtattgtaaaataaacatgagaacaaataatcagacatatactttaatgttaaaggtgctctatttttttggatgtacagtagttttatttccacagccacattaccatagcaataagaaaggaggcatagtacatagttggaaaagctttgtggggggattaaaaaaaaaaaaaagcactgtggggtttaacactagttcagatgcagttaccttaaaaacttatttatttgcaggaacaaagggggcctgaatattaacagggttctgattaaaaaaaaaaaaaagatacatatgccttgaaaagggctcaccgaggggccagtagtcacttcaactcttagttcacttttgtatagctgctctgctggaaaaaaatgaaagggaatctgcttactccctaaaacttccctgggggctgggagccagcggaaccacttgtacaatgccagatttgtttatttttgtccaaaacctttgatgaagggccttgtatttaacccccttatttaagcttg

SEQ ID NO: 73377 - DNA, 601 bp, Homo sapiens; identical to SEQ ID NO: 63658

SEQ ID NO: 73378 - DNA, 2635 bp, Homo sapiens
caccacgcctggccaacttttgtgttttcagcagagacggtttcaccatgttggccaggctggtgttgaactcctgacctcaagtgatccacccacctcaatctcccaaagtgctgggatcacaggtgtgagccaccactcccggccaataatatctttaaaactaaaaaaaaaaacagaaaattgataagtaaaatgacttttactattgatatcagttttgtttaatctgaaactataaaatagagatatatctacctatttatggatggataataccatcatctcatatttgtggaatgctttatagtttttcaaagtacttttattcactttatcttccatatatgttatctcctctgattccagcaataacagcccggtgaggtagccagggcaagtatgtttttttacacattagcaggaagggaggctaagcgaggtttatgtaacttactcaggctgaaacactgaagaaaaatttgtgactctcatttcagtgatgttttctgcattattaaaaaatattatgctactcctcactatattatgttgatggttgaaatgtcattataaagcttaatttatatgattctcttgatgaggatgatgaagcaaatgctccatcaactcactagtttacaggggcaagcattttcctacatttcacacataatttgattacctctgtcctaagtgaataatctactatctgggtatgagaaacatgatttgaaaacactaaaccactatattatttcaacaaagaaccatctttcacacctaagtaaaaaggaacttcaaaaaaagtcctaaccaaaaaaaatccaaatgatgcatgaaatcaaagtcaaaaattggggtatcttttaatctgtttcttcggttgtggtgaagaatgttgcctggattccttccaatctaaagacttgattgttagacctgtggcagaactctagatctgactttagccttggggaagcaaagaggacaaaacctaaaagctcaactttctgcatggtatgcatgattcaatgagctctttctgctttggagtctgttggcttggagactcggatatgatagggcttcagttcctcaggagggacagaatctggggtattgctcatgaggtcatgtccccggaaggactttgggaaggctatgacatctctgatgcttggagatccagtgacaaggcatatcagtctgtctaaccctaaggcaattcctccatgagggggtgccccataatctaaagcctggagcagatgggagagcattttcacatcctcctttagtaaggttgccaggatataacgctgcagctctgcattgtgaattcgaattgaaccacctcctatttcattgccatttaaaaccaagtcatagtgttggctacgggcctttttgggctcagtgtacaggagatgtatgtcactggggtggggagcagtaaatgggtggtgggccgattccagctctctgggattttcctccttgggcaggaagagtgggaaatctaccacccaaaggaaagagaacagagtggggtcacggagcaccactcctcttgtttctagaaggtcagcacattccagtcgtaattttcctaacaaagagcatgctttattgtgctctccagcagttagtaggaccacatcttcctcttgggtctccattagtctgattaattccagtctttgtgactccattatgaaattagcaactggagaattccagtttctattggcgttaaggaatacaggtaagatttcctgattaaaatggtcagctgcaaagtttctaatggattcaatgtctttcctttttaagtattttgctccttcagggatacatatggctttctcagttccatggggcttactaagtgcatcttgaagaaatccaatctctgtgtttctaaacacatcactgatatctataatcttcattccaaagcgagtgtcaggtttatcagttccataggtggccagcacctcagcaaaagtcatagtaggaaaaggaacaaccacaggatctttgtcattgggccaggaatactggagcaaaccctcaattaaactctggatcccagtctggtctacaaatgacatctctatgtcaatctgagtaaactcaggctgtctgtctggtcttgaaccttcatctcgataacatcgggcaacctgaaaatatctgtctaaaccgccaaccatcagaagttgcttaaactgttgaggactctgagggagagaataaaactttccaggttccctggatggtactaaaaactctttggcaccccctggggtcctcttaaacaatgtgggggtttctatatccacaaacccatgcagattacagagatattcccgcattttcatgaccatctgggacctcagtcgcaggttatactgcatttggaaactacgcaagtctaagtagcgatactgcaaccgaagagcctctgttttcttcacgaagttcttaatttcaaagggcagcttcttgcaggcattcagaagctcagctgttttaactttgatttcaatctcacctgttggcatttttggattctcttgtcctgcaggacgggaaatgactgtaccagacacttgcaccacagattcca

SEQ ID NO: 73379 - DNA, 2644 bp, Homo sapiens; identical to SEQ ID NO: 63660

SEQ ID NO: 73380 - DNA, 1542 bp, Homo sapiens; identical to SEQ ID NO: 63661

SEQ ID NO: 73381 - DNA, 1333 bp, Homo sapiens
ttttttttttttccatgagatgcctgccatgacaggcgccacaaacctttcctttaattgcaaaacatgtcccagtcccgggaggcttgggaagagtgggaaccaggggaacccagggatgggattccactgaaaacaaaccgtcctgctgtcctgtcgagggcccccacccacaggatgtagccatgggacagccactgagggtccaggaagaggggcggcagagcagggaggcagggacagggaggggtcgccccagggcagtggcagggctggaactcgtccctaacatccctgagccccagcaggtgccctgtgttagaagcgagagggctggtgggggtgcgtggacaaggggcagaatgatcctgcccccaaccagtatcgccaggcgctggcccagtggccccaggccctggcagctggcgtcttccgctgccttccctctgctctgcgcggggacattcagtgcgctggggaggcctcggtgatggccctctccacccgcaggtaccagggctggatgtgcgtgtgctgcatcaggtcatcgaatgcatccagcccctccatcacacgcagcacgccatacaccgccaaatcagcgagattcggcttctggccccccatgaagggccggtccttgcccacagcagccacccacttgtcagcagcctcatagaggtcctcgcgcacgttgtcctggaggcggtgcctgctcttgagtcgcttgctgatgaggtacatggccgctgcacccatgtacttggccacggcaccctccacggctccgaacttgccctcgcggacaatgtagtcaaaggacgccagagcctcggtgggcgtgcggtacacattgggggagatcaggtgcaccagccagtcgtccgcccactgccgccacttcatctcctccgtcctggcctccttcccaccatacacttgctgggcctccttctcgttgagcatgagccagtacttattgccgaactcggtcacctccttgccctgctcgttcacagccttcatggctgggtagtaggtgatgatctcttccaggggctgccccgacaccaggtaggtcttgagggcgctgatgatgacagaggagtcatttagttgttgcgagctttctccttcctgggccaccaggatgggcacctttctgtaggaggagaacttgatctcagccctgcgctcagggttcacctccaccacctggtagggcagggcatggaagtcgaggaaggctcggaccccgctgcagaagggacacgtcgtgtactggtacagggtcagctgcaggcggctgcacagggagagctgagcggctgag

SEQ ID NO: 73382 - DNA, 1966 bp, Homo sapiens; identical to SEQ ID NO: 63663

SEQ ID NO: 73383 - DNA, 1553 bp, Homo sapiens; identical to SEQ ID NO: 63665

SEQ ID NO: 73384 - DNA, 2127 bp, Homo sapiens; identical to SEQ ID NO: 63666
  misc_feature (1)...(2127): n = a,t,c or g

SEQ ID NO: 73385 - DNA, 856 bp, Homo sapiens; identical to SEQ ID NO: 63667

SEQ ID NO: 73386 - DNA, 1371 bp, Homo sapiens; identical to SEQ ID NO: 63668

SEQ ID NO: 73387 - DNA, 2141 bp, Homo sapiens; identical to SEQ ID NO: 63669

SEQ ID NO: 73388 - DNA, 1456 bp, Homo sapiens; identical to SEQ ID NO: 63670

SEQ ID NO: 73389 - DNA, 1600 bp, Homo sapiens; identical to SEQ ID NO: 63671

SEQ ID NO: 73390 - DNA, 1351 bp, Homo sapiens; identical to SEQ ID NO: 63672
  misc_feature (1)...(1351): n = a,t,c or g

SEQ ID NO: 73391 - DNA, 1244 bp, Homo sapiens; identical to SEQ ID NO: 63673

SEQ ID NO: 73392 - DNA, 2448 bp, Homo sapiens
gagactgacaatgatttgacaaaggaaatgtatgaaggaaaagagaatgtatcatttgaacttcaaagagacttttcccaggaaacagacttttcagaagcctctcttctagagaaacaacaggaagtccactcagcaggaaatataaagaaggagaagagcaacaccattgatggaacagtgaaagatgagacaagccccgtggaggagtgtttttttagtcaaagttcaaactcatatcagtgtcataccatcactggagagcagccctctgggtgtacaggattggggaaatccatcagctttgatacaaaactcgtgaagcatgaaataattaattctgaggaaagacctttcaaatgtgaagaattagtagagccctttaggtgtgactctcaacttattcaacatcaagagaacaacactgaggaaaagccttatcagtgttcggagtgtggcaaagctttcagcattaatgagaaattaatttggcatcagagacttcacagtggggagaaacccttcaaatgtgtggagtgtgggaaaagcttcagctacagttcccattatatcacacatcagacaatccacagtggggagaagccctatcagtgtaagatgtgtgggaaggccttcagtgttaatggaagcctaagtaggcatcagagaatccatacgggagagaagccctatcagtgcaaggaatgtggaaatggcttcagctgtagttctgcatatattacacatcagagagtccacactggagagaaaccttacgagtgtaatgactgtgggaaagcgttcaatggtaatgcaaaattaattcaacatcagagaatccatactggagagaaaccttatgaatgtaatgaatgtggaaaaggctttaggtgcagctcccagcttaggcagcatcagagcatccacacaggagaaaagccctatcagtgtaaagagtgtggaaaaggcttcaataataatacaaaactcattcagcatcagagaatccacacaggtgagaaaccctatgaatgcactgaatgtggaaaagccttcagtgtcaaagggaagttaatccaacaccagagaattcacacaggcgagaaaccctatgagtgtaatgaatgcgggaaagccttcagatgtaactcccaatttcggcagcatctgagaattcacactggggagaagccctatgagtgtaatgagtgtggaaaggccttcagcgttaatgggaaactaatgcggcatcagagaattcacactggggagaaaccttttgaatgtaatgagtgtgggagatgctttacttctaaaagaaacctacttgatcatcaccgaatccatactggagaaaagccctatcaatgtaaggaatgtgggaaagccttcagtatcaatgccaaactaactaggcatcagaggatacatactggggagaaacctttcaaatgtatggaatgtgagaaagcattcagctgtagttctaactatattgtgcaccagagaatccatacaggagagaaaccctttcagtgtaaggagtgtggaaaagccttccatgttaatgcccatttaattcggcatcagagaagccacactggggagaaacccttcagatgtgtggaatgtggcaaaggcttcagctttagttctgactacattatacatcagacagtccacacttggaagaaaccctatatgtgtagtgtgtgtgggaaagcattcaggtttagcttccagctcagtcagcatcagagtgtccatagtgaaggaaaatcctaataatgagaaagatatagaaaactcttaaggttaatgccaaaatggatcaagtatcatcagattcatccattgaaaaacctccaagagggcatgaatatggcagagtcttcatatggaaacagtttttattctattcagtttaaatcaggaaaggatgaccagttaaagagaaacatccaaaaatagctttgttttgtaccaacaggaattagaaaatataatgaaaagatttcgttcccagcagcatcaagaaaagtagattttctagaaataaacagttatggaggacttgtatggagaaatttaagtcttcactgagggccactttacaaaggaaatttgaataaatggagagagagagaagccttgttgttggataggaaaacccgtactaaagatactctacctacattaatttatttgtttaatttttgacaacaagcatgtattacttttgaaaagatgaaaaataaagttttatttaaaaaaggaaaaaggtatgagtacatttttaattttcatgtaattgagaaaacctttctaagtattagatgaaagctagaaactatccacagggtatgtactgataaattgactactcaaaaactaaatattcctgtatgtttttgttttaaagtttaaaagataaagcgcaaaatgggg

SEQ ID NO: 73393 - DNA, 1822 bp, Homo sapiens; identical to SEQ ID NO: 63675

SEQ ID NO: 73394 - DNA, 1883 bp, Homo sapiens; identical to SEQ ID NO: 63676

SEQ ID NO: 73395 - DNA, 1901 bp, Homo sapiens; identical to SEQ ID NO: 63677

SEQ ID NO: 73396 - DNA, 2458 bp, Homo sapiens
ctgcgctggccctaaagtttcttactttttaaagaaaacaacttttggtaggattatgaatatacttaggaggttaaagtgtgaaatgaggcaggacttggttaggtgaaaagtagcatcttattttgggtaatattataatttatgttttttagacttcccttagaaatttttttaaaatatacatatggcatccttgaactcccttaaactcttttatttgtataaatttatagggtaccagtacaattttatttcatgcataaattgtgtagatgaacccaagttctatgtaaattctgtgtatgtagatttttctggggagagggtctagtttcttcatgacccataaaaatttaataaatactatcttagggtataaagattatgaattaaaagtttaccaattgttatgttataagcaaggttaaggtcagtgtggtacagaactttcaagacagaataggatcatctgttttaaattttttacagaaaattgccacctttaataatgtaaaaacagtgattaatcaggaatgataaagcaagaaattcttaggaaagctacaaaatgatagaatgtatccagggaagttatttcaactgtgatatttggtcttaaattcaattattattaggtaaactgagtgagttctaccttgtttctagaatttgtaagttattctgagtaaagcctcttccattgacttggccacattgcccacctttgattttatatataatagttctttcaacttagattgcaaacgatgagaactgagtttttaaaaccacttacaatctggaacatttccttttattcctggtgaccggggaatgcagaggtgtggctgttatctctttctgactgctgcagcccacagggagagctaatcatgaagaatagttttacagaaacttgtatgaaatcttaattttattagcatgggctggtaaacgctgatttttagattggacaattctgccaggaggaatagctcaactcacacatctgatgccgctggctttcaaaacataagtggaatgaaaaaattattgcactgcatatactgcctctggaacataatggagacaaaagagggcttaataggatggctcatttcaaatgactaggtttctgcaaaacaaatataattttgagtttattccccctactgaaaatactcatacagtactccaagttggtaaaatttattctacatttaaattcagaaagtcagaatttcagtgtgtattacaatccacggccatttctatttctgctgaagattttcattgttcagcttcagatctccttgcatgaagactcagggtcacaagaggaacatggatccaaatattcattttgctcaacttgttaggtccacttgctccaaaggactgaagatatagcaatgtacagaaaggaagactatggaaacccatccacagcttgtaaactcgccactatcctttatgttttgtgcatgaggaaaggaacaaatttgattccccacaacactttttgcttgtcattccgtctgcaaggtaaaatctgggttgaaattccaaagtccaaagaagccttcttaaccaaacaaatgccctccaaaagaaggaaaataacatcaggtctgatatcaaagaggagttttgagcctgtagagatgaattcagaagacggagctttcacccgcctccctgggccatgatggcagctctttttagtaaacagtgcaccagttgctgccatcacttggcatcagccctccagtaattagcaaaataaggtcaacaaaccaccaaatcccaagtcctccaagcgtcaacagcttccctactgcagtgccagtgtgtcccaaacagaatcgatccacaccaaaacatcccaggaagaaggagtagagtaaagtggttatgaagtagtgtccggtatactttatacaaggtttattttctcgtagaaaggtcctaggactggcacactcaattccatctaaggcatggcactggactgaagtgtgttccacgtcgctgtaggcctgaccgccgaacttgagacaaccataaccaagttcctgggatgcagttgcatttccaacatgatccactgggtcttcacattctataaattcatcaggtaggtaagagcagaggatgaccggagagtgggggtcgccatattcccagctcgcagcacccccggggccctccggctgggcggcgccagcggatgtgagctcaggctcagcggtcgcattttgcgagtggctccgagacacacaatgcagcagaagtaaattccccagcagcaaagccgcctggccgcacagaagtaagtaactaaccgggcaaccacctagcaccatcttcccgggcacaggagcggagacccggcctcaaccacaaccccaggccagcagcacagacccaagaactgcgtggtcaggccacgaaa

SEQ ID NO: 73397 - DNA, 3555 bp, Homo sapiens; identical to SEQ ID NO: 63679

SEQ ID NO: 73398 - DNA, 774 bp, Homo sapiens; identical to SEQ ID NO: 63680

SEQ ID NO: 73399 - DNA, 1517 bp, Homo sapiens; identical to SEQ ID NO: 63682

SEQ ID NO: 73400 - DNA, 1339 bp, Homo sapiens
  misc_feature (1)...(1339): n = a,t,c or g
ttttttttttttgattcttaacatatttaatgaaactcgagcttcataaaccagtgaaatgcctacccctatggagacggggagctggtcatgggacccaggtgcctggaggacatcccagtggctttgaaggctccagccagtcaagacggtcaatattagcccttctgccaacatctggcaatgtgaggctggggtggacgttggcctgatgttgccaggagtaggatgctgatgctgccagagagtaggtgggctccaaaccccaggcttctcacttgcttactaagcacagcagtctgaagcttgggacctgggcagtgcgtctttggagaaggcaaaaaagccacagcagcaacacttaggagcaagacccttcccgctctccaccctatttcctcccctgaagaagagcaacagctcaagctctagcatggcacagaacgctaggttgggccaggcaagcagccatggtggggccaggtgaagcaatgtgggtctcagcaaggaacccctctgaaggtggcagtggctcccagggctgctgcacactggacaccacaactttggcatcagctgcatggtgagctgcagagtggtcagaggggctggggccctgccaagagagcaaggccagacctgcccagcgggaggcaggaaggccctgatccagcaaggagaagtagaggaagtccacagccacctctgttactcatcgctactgggacatctggggacaggctctgttcttgggagagcaggtcaccaggatttgtagggctgcctgccggtgacagacacgtaagtcacagggaaaggccgggatccaggcctcagctgtagcagcagctgtctgtcggtcaggatccccggctctgggcgcttccaagatgaagccagaaggatgtagagcaccagcagcccaaaggccaccaccagcatcccggtgctgttggcaaagaccgcctcactgggcaggctgtggtatggcctggtggtgtttttcaaactgaagaaaagcttctcattaatgcccgaaatgacggatgcgatggacagagagaggatggcggctccaaaaaagacgtggataggttttaggaggctgcgcagccacatggacgcccagggcaggaggaagacagcaaagcccaggaacctctggcaggcgaagaggaagacagtggtgatgcccagccagctgtgaagggagtagaggttggcagtccttccatggttgtgaaacgtaaagacagcaaccagccccacaacagtgaggacgaaggccgnnttccncaaggtnctcaaagatctcagttnnnnnnnnnncggnactcct

SEQ ID NO: 73401 - DNA, 6050 bp, Homo sapiens; identical to SEQ ID NO: 63684

SEQ ID NO: 73402 - DNA, 1429 bp, Homo sapiens; identical to SEQ ID NO: 63685

SEQ ID NO: 73403 - DNA, 1296 bp, Homo sapiens; identical to SEQ ID NO: 63686

SEQ ID NO: 73404 - DNA, 2047 bp, Homo sapiens; identical to SEQ ID NO: 63687

SEQ ID NO: 73405 - DNA, 2319 bp, Homo sapiens; identical to SEQ ID NO: 63688

SEQ ID NO: 73406 - DNA, 1703 bp, Homo sapiens; identical to SEQ ID NO: 63689

SEQ ID NO: 73407 - DNA, 2071 bp, Homo sapiens; identical to SEQ ID NO: 63691

SEQ ID NO: 73408 - DNA, 1797 bp, Homo sapiens; identical to SEQ ID NO: 63692

SEQ ID NO: 73409 - DNA, 2514 bp, Homo sapiens; identical to SEQ ID NO: 63693

SEQ ID NO: 73410 - DNA, 1551 bp, Homo sapiens
gtggaagggccttcatacatgcttcccatcttcaggaacatcagagaattcatactggggagaaaccattcaaatgtgatacatgtggtaagaacttccgtcgtagatcagcacttaataatcattgcatggtccacacaggagagaaaccatacaaatgtgaggactgtggtaagtgtttcacttgtagctcaaaccttcgtatccatcaaagggtccacacaggagagaaaccttacaagtgtgaagaatgtggtaagtgctttattcagccttcacaatttcaggcccatcggagaatccacactggagagaaaccatacgtatgtaaagtgtgtggtaagggtttcatttacagttcaagttttcaggcccatcagggagtccacactggagagaagccatacaaatgcaatgagtgtgggaagagcttcagaatgaaaattcattatcaagtgcatctggtagtccacacaggggaaaaaccctataaatgtgaagtatgtggtaaagccttccgtcagagttcatatcttaaaatccatctgaaagcacatagtgtacagaaaccttttaagtgtgaggagtgtgggcagggcttcaatcagagctcacgacttcagattcaccagctgatccataccggtgagaaaccatacaaatgtgaagagtgcggaaagggatttagtcgtaaagcagatcttaaaattcattgtaggatccacacaggggagaaaccatataattgtgaggagtgtgggaaggtcttcagtcaggcctcgcatcttctaacccatcagagagttcacagtggggaaaaaccatttaaatgtgaagagtgtgggaagagcttcagtcggagtgcacaccttcaagcccatcaaaaagtccacactggagaaaagccatacaaatgtggggagtgtggaaagggcttcaagtggagcttgaaccttgacatgcatcagagggtgcacacaggagaaaaaccctatacatgtggggagtgtgggaagcacttcagtcaggcctcaagtctccaacttcatcagagtgtccacacaggagagaaaccatacaaatgtgatgtatgtggtaaagtcttcagtcggtcttcacaattacagtatcataggcgagttcacactggggaaaaaccttacaaatgtgagatatgtggtaagaggttcagctggcgatcaaatcttgtaagtcatcacaaaattcatgctgctggtacattttatgaaaatgatgagaatagtaagaacatcagagagttgtcagagggaggaagttctacaaggtgattaaaaaaaaaaaaaccaaacctcttgtccaccctgaaggcttgaaattaaatttcataggggggaaaaattttttttatcaccctttttgaatttatttgattggaaacgctccacatttccccctaaactttttttggtttttaatttttggtttggaaacaaaatctccttttgttgcccatgctggaggcaggggggctatttaagttcactgaaacctccatttcccgggttaaga

SEQ ID NO: 73411 - DNA, 494 bp, Homo sapiens; identical to SEQ ID NO: 63695

SEQ ID NO: 73412 - DNA, 1877 bp, Homo sapiens; identical to SEQ ID NO: 63696

SEQ ID NO: 73413 - DNA, 4157 bp, Homo sapiens; identical to SEQ ID NO: 63697

SEQ ID NO: 73414 - DNA, 5185 bp, Homo sapiens; identical to SEQ ID NO: 63698

SEQ ID NO: 73415 - DNA, 633 bp, Homo sapiens; identical to SEQ ID NO: 63699

SEQ ID NO: 73416 - DNA, 1799 bp, Homo sapiens
ttttttatctgtacagaaatatttactttagatgacaaaagaactcaagatcacagtacacagcagttatttatttaaatacttgaaaaggctgatgatggaaaaaataggtttatcatgagagtttatattcattagatttattttatcatttaaaaaattactgcctctaggttatcctagcctgatatagaacacttggtgacacatgcagttactgtaatatactataacagacacagccattatagaatgatttacacttgggatgaaattcaacagtagtaagggtgactctttatttaaactaaaaacattggtaatatacaaattttttttttatttcattgaaagggctataaaattcaacatactgacaaggaagcaacataatcacatagataacgcctctgctaattgcttttacctaacttcacccttaaaggtgagctgcacactcagctacacaagtttctagactgtgcgatgggcttcaaggctgggcctaccacaactgactgaaaaaatgtcatgttggtaagctgacactgacttgtatgtttttaaaaatggagagacaatggcaaattgtaccttatgtccttatagaacccaaaggatcattctgagtaaatgtgaaataaataaagtgatccatgagtaaatacaatctctgggctaacttaaacctagaagagtgagccaagtgagcactaacaataccacttagaaatgtctagaaacatcatttctagaactcagcttgggagaccatatcttgcctgaatatgtacatatatttacaaaatattcccttttggcctctggaatttagccattttagtttggctgttagctgttttctttccatatgctagccaatactgcagttataactatcattaaaatactcttatgcatgaattacaaatattaataaagtaactctgcatgtataaatatctcaataattctagcagaacttaaagcattcagaatgtacataaaagtatttgtttttggtagggacagtatttctttttatatcatcgctgtttcaataatgctttgtacatagcaaagcccaaaactgcaaaaacagtagcaccaaaacttgctcgaagccaaaacgtggagctcttgaggtcagcttgtgtcacgtgcggatacatggccattgttgtcaatttaacaaagatatccttactgggggcatcagcagtattgcaagtgaaggcttgtggtggaggcattttgtgtttcctgcagaaatcagtaggtgaaatactgtattcttgtttaacttcatgcaggtctgactttgcagctacgattaagcaaggtattctgctgtccataaagtgttgcttaaaaatcctggcacagtattcaaaggatttgggattgctgacatcatataccaggcatacaacatcacaaatgatttcagcttcagttagaaattccgattctgagatatcatgcaacaacaagtatttctcttgtccatatacataaacagtgttaatcgcatagtaggatttatgatcttcacgaattttcttctgcctcattaagtttcttccaagaagagcctgaagaactccacttttcccacagtttttcactccaattacattacatctgaacacatttctttgagtttgttttttctgcaggtctatctttttatctcttgtcactgtaacagctgaagcttgagactcttgctcagtcaatattgaatagcctagatagcccaaatattccaggcaccgctgtacatctaaataagtcgt

SEQ ID NO: 73417 - DNA, 3141 bp, Homo sapiens
cgggtcgacgatttcgtactatacctaatctgcctggaactaaatccagatctaggctctacttttatttattccattcttgcaatgattgaatgaccttctcttttgtaaaaaattgagctatagtttacataccatcaaaatcacccttttgatgtatacaactcaggggtgattagtatattcacaaaaggtgtgctagcatcaccactgtctcattttggagcattttcatgcccccaccatgaagaccatgtccactggcagccattcccatgacctttccttgtgagatctccagttatcactttgcacaagctgatgaattgctgttcttgataatactgagctttcacaatcacagttgccagagaaacatcagcgggctttagctggggcagagcttagcaagtgttggggtatcagcagttagtcactgtttgcctggaaccacaggatgtgaatcctagttcctggattccaaggaatcctgcatccaggtgtttattgtgctttgcagagtcaacatcaagctcaggagctggttgcagacatagatgagtgtgaagtttctggcctgtgcaggcatggagggcgatgcgtgaacactcatgggagctttgaatgctactgtatggatggatacttgccaaggaatggacctgaacctttccacccgaccaccgatgccacatcatgcacagaaatagactgtggtacccctcctgaggttccagatggctatatcataggaaattatacgtctagtctgggcagccaggttcgttatgcttgcagagaaggattcttcagtgttccagaagatacagtttcaagctgcacaggcctgggcacatgggagtccccaaaattacattgccaagagatcaactgtggcaaccctccagaaatgcggcacgccatcttggtaggaaatcacagctccaggctgggcggtgtggctcgctatgtctgtcaagagggctttgagagccctggaggaaagatcacttctgtttgcacagagaaaggcacctggagagaaagtactttaacatgcacagaaattctgacaaagattaatgatgtatcactgtttaatgatacctgtgtgagatggcaaataaactcaagaagaataaaccccaagatctcatatgtgatatccataaaaggacaacggttggaccctatggaatcagttcgtgaggagacagtcaacttgaccacagacagcaggaccccagaagtgtgcctagccctgtacccaggcaccaactacaccgtgaacatctccacagcacctcccaggcgctcgatgccagccgtcatcggtttccagacagctgaagttgatctcttagaagatgatggaagtttcaatatttcaatatttaatgaaacttgtttgaaattgaacaggcgttctaggaaagttggatcagaacacatgtaccaatttaccgttctgggtcagaggtggtatctggctaacttttctcatgcaacatcgtttaacttcacaacgagggaacaagtgcctgtagtgtgtttggatctgtaccctacgactgattatacggtgaatgtgaccctgctgagatctcctaagcggcactcagtgcaaataacaatagcaactcccccagcagtaaaacagaccatcagtaacatttcaggatttaatgaaacctgcttgagatggagaagcatcaagacagctgatatggaggagatgtatttattccacatttggggccagagatggtatcagaaggaatttgcccaggaaatgacctttaatatcagtagcagcagccgagatcccgaggtgtgcttggacctacgtccgggtaccaactacaatgtcagtctccgggctctgtcttcggaacttcctgtggtcatctccctgacaacccagataacagagcctcccctcccggaagtagaattttttacggtgcacagaggacctctaccacgcctcagactgaggaaagccaaggagaaaaatggaccaatcagttcatatcaggtgttagtgcttcccctggccctccaaagcacattttcttgtgattctgaaggcgcttcctccttctttagcaacgcctctgatgctgatggatacgtggctgcagaactactggccaaagatgttccagatgatgccatggagatacctataggagacaggctgtactatggggaatattataatgcacccttgaaaagagggagtgattactgcattatattacgaatcacaagtgaatggaataaggtgagaagacactcctgtgcagtttgggctcaggtgaaagattcgtcactcatgctgctgcagatggcgggtgttggactgggttccctggctgttgtgatcattctcacattcctctccttctcagcggtgtgatggcagatggacactgagtggggaggatgcactgctgctgggcaggtgttctggcagcttctcaggtgcccgcacagaggctccgtgtgacttccgtccagggagcatgtgggcctgcaactttctccattcccagctgggccccattcctggatttaagatggtggctatccctgaggagtcaccataaggagaaaactcaggaattctgagtcttccctgctacaggaccagttctgtgcaatgaacttgagactcctgatgtacactgtgatattgaccgaaggctacatacagatctgtgaatcttggctgggacttcctctgagtgatgcctgagggtcagctcctctagacattgactgcaagagaatctctgcaacctcctatataaaagcatttctgttaattcattcagaatccattctttacaatatggcagtgagatgggcttaagtttgggctagagtttgactttatgaaggaggtcattgaaaaagagaacagtgacgtaggcaaatgtttcaagcactttagaaacagtacttttcctataattagttgatatacttaatgaggaaaatatacttagcctgggccatgccaattaagtttcctgctgtgtctgtttagggcagcattgctttgatgcaatttctattgtcctatatattcaaaagttatggccaccatcccgttaaaattatcccgtaattaaa

SEQ ID NO: 73418 - DNA, 2394 bp, Homo sapiens; identical to SEQ ID NO: 63702

SEQ ID NO: 73419 - DNA, 1391 bp, Homo sapiens
ctcttcaaattaatcaccatatttttaccatacagctgcacaaaagctttagaaaaaaatttcacagaagcatcgaaagcaagcaatatatgtaaaaaatttttttttactaaatcagcataacagactaaagctgcagcatctgctttcatgttacatttggcaaaaacaaaacaaaaagcacccccaaacccccaaaataacaaaaatctcaagcaagtagagacgataaacttcataacacaaaagaaagattcaaaacctgttccctcagtgattggctgttgtcagtttgggcatgcaggcaaatttgttataaccatgatgggaaatgaaaatattttaaggaatccaggacagtatttctatttaaccactaattcaaaaaccaagaaggaagaaaaaataacacaaggggacaccatacatacataaacatgaaaagctagcttacataattacataattagaaaagttaaataatttagtaaaaataaattcccagtataaacccaaaaaagcatagctataaatgcaatccaaaacaaccaattagtaagctggtcatgtttttactggaaaacaacctttctcatttttgttcttacacaagcaagtaactggagaagcaggccagagtgcatacgaggatttaaacatggttgtatctgtggtactttagatgcaactttaccctgttcatttgaaagtttaaatagacctgtctgctacacagactcggatgggccaaataagtcatctgatatgctgctgaatggctgagagtctattagttggcttatttcattatcaaggtcttcttctgtatcatctgtgtacttgcttatttttttggagtgctggtctaaagacagactttctaaagtttctatatcttcaatgcctgctctgtagtgaatcataagaagtgttagagcttgtagcctttcacctgatttagctaaggcagcagaaagaagtgattttttccttgtatcagttgtctctttttcttctctaacaagggaattattgtgttccaactcctgatcaatttcattctgtagcttatccaacatgaactctagtttctggatcctttcctctgtaggcaagcccctgtacagatcacgaccaatttctttaactgcaatgaaaacactgtcatccagaccaccctcttttctcactaactttattcctgtgctgtttccccgtttagaaggactgtttggaccacagacctccgtgtcactgccttcgttgtctgacgtgttgggtgtgtgttttggtgaaggttctacgagatcggttcctggttcagaaaggcgagttttagagacttgacgcaaatttaataaacgagaactagtattgatcccacgcgtccg

SEQ ID NO: 73420 - DNA, 1025 bp, Homo sapiens; identical to SEQ ID NO: 63704

SEQ ID NO: 73421 - DNA, 945 bp, Homo sapiens; identical to SEQ ID NO: 63705

SEQ ID NO: 73422 - DNA, 1267 bp, Homo sapiens; identical to SEQ ID NO: 63706

SEQ ID NO: 73423 - DNA, 940 bp, Homo sapiens; identical to SEQ ID NO: 63707

SEQ ID NO: 73424 - DNA, 3821 bp, Homo sapiens; identical to SEQ ID NO: 63708

SEQ ID NO: 73425 - DNA, 474 bp, Homo sapiens; identical to SEQ ID NO: 63709

SEQ ID NO: 73426 - DNA, 1837 bp, Homo sapiens; identical to SEQ ID NO: 63710

SEQ ID NO: 73427 - DNA, 780 bp, Homo sapiens
tcccggggctgctgctgaccaaggtggtaagccagcaacccttcgtgggctaccgcggcccccgagagctgtcggaacggaagctggtgcgcaacgtgcggcaatcgggcgacgtttactacaacaccggggacgtactggccatggaccgcgaaggcttcctctacttccgcgaccgcctcggggacaccttccgatggaagggcgagaacgtgtccacgcacgaggtggagggcgtgttgtcgcaggtggacttcttgcaacaggttaacgtgtatggcgtgtgcgtgccaggttgtgagggtaaggtgggcatggctgctgtgcagctagcccccggccagactttcgacggggagaagttgtaccagcacgttcgcgcttggctccctgcctacgctaccccccatttcatccgcatccaggacgccatggaggtcaccagcacgttcaaactgatgaagacccggttggtgcgtgagggcttcaatgtggggatcgtggttgaccctctgtttgtactggacaaccgggcccagtccttccggcccctgacggcagaaatgtaccaggctgtgtgtgagggaacctggaggctctgatcacctggccaacccactggggtagggatcaaagccagccacccccaccccaacacactcggtgtccctttcatcctgggcctgtgtgaatcccagcctggccataccctcaacctcagtgggctggaaatgacagtgggccctgtagcagtggcagaataaactcagatgtgttcaa

SEQ ID NO: 73428 - DNA, 1009 bp, Homo sapiens; identical to SEQ ID NO: 63712

SEQ ID NO: 73429 - DNA, 1536 bp, Homo sapiens; identical to SEQ ID NO: 63713

SEQ ID NO: 73430 - DNA, 3105 bp, Homo sapiens; identical to SEQ ID NO: 63714

SEQ ID NO: 73431 - DNA, 1860 bp, Homo sapiens; identical to SEQ ID NO: 63715
  misc_feature (1)...(1860): n = a,t,c or g

SEQ ID NO: 73432 - DNA, 1389 bp, Homo sapiens; identical to SEQ ID NO: 63716

SEQ ID NO: 73433 - DNA, 1523 bp, Homo sapiens
ttttttttttttgaaaaataaatgattttattgcagggccaatgataggtagtcacaagggcatgaaatggcagatctcttgtctgaagcagagaaggcacactggcagactccatgtgtgtcaaacgctgtgcatgaatcaggtttttagaaggaaggtaggagaggaaaactactcactagcagaactgaactgctgtaaaataggttaaattctttgaaaagtgaaaaatgatagtagcaaaatcatgaagttgtatctgaaccagagccgtgatgtaaccaagtaagatggaagtttccatccagacgagttaattcccgaacaaggtcacaggaaaggtgagacgctgccggttccggcacgcctgtcttctggagtgccagtgaccgggcaagaaattttgattctttcctttgatactcttgggaaagaacacatttcccaagcccctggagacccacagggtttggcactgtccgtgaggctgtgctcctgaggacggacgttcaggaggccgtggaggagcagcgctgcaggagcagggtgtggcagctgtcgcacactcgcaccggcttggggtaggagggcagggccagctcgttgctggagcaggtgttgcagaagatgtggccacagttccggcagtggtgctttctccgggaaatggagaactccttctcacactgcctacagtgtgtcgcttcgtcatctttcagccaggcgtggcccttcagtgcctggttcacttcttttatatcttccatcttcagcttggactggctgaggtgcaggcccatttcctggagggcttgttcctgctcctcgcagatcttctgcagctctgccttctcgtcctgaagctcccgcaactcctttttcagtccttccacttgttgcagctccatcctgagtagagaggaagtgtctttctcgtgctgtaattcgcgctgaagagcctgtctttgctctttttctgatttcaattctttctccaggcttgagcattgctcgtgcagctgggagagctgcagctgcagggcgccgatcctcccgcccagctcctgctgcagcttgtggctccgctcctcagccccctgcctcgcccgctccgagtgctgcaacctttcttccatttgtttcatgctggacataacttggttggtttttccttcaaaggatgtgatggcttcattcttctgctgcaaactgctctctgcattctgagctttgtgaaacatctgtaaattaatcgctttgacttcttccagctgctggcggagggcaactagtgtgtcctgcttctcgtgggtgtccttttccagtaacttcattgcaatttccatttcggttttcattccaatttgtaactccagttctttttccagttccaaccggactttcttctcctcttttagctgcttccacacatcactgtacatttcatccagaccttgccgagtttgcttgtaagtctccagctcaactttggtatcctgttttgttatctctacactctttt

SEQ ID NO: 73434 - DNA, 1838 bp, Homo sapiens; identical to SEQ ID NO: 63718

SEQ ID NO: 73435 - DNA, 1356 bp, Homo sapiens; identical to SEQ ID NO: 63719

SEQ ID NO: 73436 - DNA, 2008 bp, Homo sapiens; identical to SEQ ID NO: 63720
  misc_feature (1)...(2008): n = a,t,c or g

SEQ ID NO: 73437 - DNA, 1475 bp, Homo sapiens; identical to SEQ ID NO: 63721

SEQ ID NO: 73438 - DNA, 1092 bp, Homo sapiens
aatagaaaatcgatcgccctcggtaccggcccggaattcccggggggtgatatccatggaccgggattatcactttgagtgctaccactgtgaggactgccggatgcagctgagtgatgaggaaggctgctgctgtttccctctggatgggcacttgctctgccatggttgccacatgcagcggctcaatgcccgacaaccccctgccaactatatctgagctgcaatcactgctgctgctgtcaccctgcagacaaactgctgtggccagtgggcccctctgaggccagccaaggcaaagaatgcactctgcaggcctggcagaagagtcctctggggaggaccccaagggccggagacccaaagatcatgatattccaaatggattgtggaagagaaaccttatatttaccagggtgggggcgactggcctttttcccatgtgtgcagtctgagcttaggcacacacaggagggttccaggactttctgaacatctgattctgtatcttcagtatatatattttgtttgttttagagatgggatctcaccatgttggacaggctggtctccaactcctgacctcaggtgatccacccaccttggcctcccaaagtgctgggattataggcgtaagcacttgtgtctggcctagtgtatgattatgcatgagtcacgcaatgttctggtcctggattccaggagtagaggacctagctttaaatcaattagtttcagctaagctgactagaaccgggtcaaagtgtaattctccctccagctcccccaaaccccagagttttggggttgtggttgatgcagtgtgggatgtccctgagaggtagcaagtctagggtggtgagttcctgctaggcaaccaaatttaagctcctcactttttgtgacacatggtgtcagatatggggtcccgcacctatatctggatgaagaggtagaaactctggacctcattaatgagttatttcttggccttcttctaaggactaggagagctccttatctgtctgagaatggggaccagctctgagtggggttgctgcctgtattccctgtttctcaggaacttacatg

SEQ ID NO: 73439 - DNA, 2009 bp, Homo sapiens; identical to SEQ ID NO: 63725

SEQ ID NO: 73440 - DNA, 1699 bp, Homo sapiens; identical to SEQ ID NO: 63726

SEQ ID NO: 73441 - DNA, 408 bp, Homo sapiens; identical to SEQ ID NO: 63727

SEQ ID NO: 73442 - DNA, 1232 bp, Homo sapiens; identical to SEQ ID NO: 63728

SEQ ID NO: 73443 - DNA, 2617 bp, Homo sapiens
ctgggagcacgctgctggtcactctatggccgctgctacgtccgccacttcaacgagctggagcacgagctgcagtcccgcctcaaccgtggctacaagcccgcctccaagtacatgaattgcttcttgtcacctcttttgacactgctggccaagaatggagccttcttcgctggctccatcctggctgtgcttattgccctcaccatttatgacgaagatgtgttggctgtggaacatgtgctgaccaccgtcacactcctgggggtcaccgtgaccgtgtgcaggtcctttatcccggaccagcacatggtgttctgccctgagcagctgctccgcgtgatcctcgctcacatccactacatgcctgaccactggcagggtaatgcccatcgctcgcagacccgggacgagtttgcccagctcttccagtacaaggcagtgttcattttggaagagttgttgagccccattgtcacacccctcatcctcatcttctgcctgcgcccacgggccctggagattatagacttcttccgaaacttcaccgtggaggtcgttggtgtgggagatacctgctcctttgctcagatggatgttcgccagcatggtcatccccagtggctatctgctgggcagacagaggcctcagtgtaccagcaagctgaggatggaaagacagagttgtcactcatgcactttgccatcaccaaccctggctggcagccaccacgtgagagcacagccttcctaggcttcctcaaggagcaggttcagcgggatggagcagctgctagcctcgcccaagggggtctgctccctgaaaatgccctctttacgtctatccagtccttacaatctgagtctgagcccctgagccttatcgcaaatgtggtagctggctcatcctgccggggccctccactgcccagagacctgcagggctccaggcacagggctgaagtcgcctctgccctgcgctccttctccccgctgcaacccgggcaggcgcccacaggccgggctcacagcaccatgacaggctctggggtggatgccaggacagccagctccgggagcagcgtgtgggaaggacagctgcagagcctggtgctgtcagaatatgcatccacagagatgagcctgcatgccctctatatgcaccagctccacaagcagcaggcccaggctgaacctgagcggcatgtatggcaccgccgggagagtgatgagagtggagaaagcgcccctgatgaagggggagagggcgcccgggccccccagtctatccctcgctctgctagctatccctgtgcagcaccccggcctggagctcctgagaccaccgccctgcatgggggcttccagaggcgctacggtggcatcacagatcctggcacagtgcccagggttccctctcatttctctcggctgcctcttggagggtgggcagaagatgggcagtcggcatcaaggcaccctgagcccgtgcccgaagagggctcggaggatgagctaccccctcaggtgcacaaggtatagacaaggctgagcagggttcctgtggcccaggatggaggccaccgctgccctgccatcccgtctgcctgccatgggacggctcctctgagtgttccctggccccacgtgtgtggtgtttgtgtgtctgtgcctggccaagggaggtgccaacactgggcttgccacagccccaggagaggaatttggggcctaggaaccgagggcacacgggactctagcctcatccccagaacccccttggctcagagtgtggtgctagaaactggtccccagcccagccccagtactgccacctttacacctacccctgcaagtccccagagggctgcccacgatagaagctgccaagcagggagaacctgtgccaactgtggagtggggaggttgggcctggaccctcaacccctgcaaccttccctagccccctcaatagatgagcaggtcaggctgtggcccttacctcacccgcagttctcgcccagtgctgcagccggctcacctctctccgcttcttgcacatcactggcctgtgtgtgctgcttgctcctgttctgttcgcttgctcccgttccgttcggcttttgctttgcgttagggtgaagaccctagcgtccagctcccctcaacgctatattttgacactaaaaaagaaggtttctaaattgtaggagcaggatggaaatactttgctgcccttgccatcttttaggatgggcccccaggagactgaggtcttcctgggccctcattgctgcttatcgtaccccccatcacctgcacatgggacagaccgggctggagggtgaccttggctgtgtacgtcccagcaaaagagctctggcccgcatctcgctgtgccctgaagggggatgaagggcgatgcctcgcccgaggctttgggctgctgcactgcatgctgggactgctcctactctctgtcccacccctcacccagctgtggtccggctttgggagagtggtgaattgcgctgcccgaactcggagcggagcagggtagggaccgtgtacagcttgataacccttaataaaaagggagtttgaccgaaaaaaaaaa

SEQ ID NO: 73444 - DNA, 382 bp, Homo sapiens; identical to SEQ ID NO: 63730

SEQ ID NO: 73445 - DNA, 1790 bp, Homo sapiens; identical to SEQ ID NO: 63731

SEQ ID NO: 73446 - DNA, 900 bp, Homo sapiens; identical to SEQ ID NO: 63732
  misc_feature (1)...(900): n = a,t,c or g

SEQ ID NO: 73447 - DNA, 367 bp, Homo sapiens; identical to SEQ ID NO: 63733

SEQ ID NO: 73448 - DNA, 1293 bp, Homo sapiens; identical to SEQ ID NO: 63734
  misc_feature (1)...(1293): n = a,t,c or g

SEQ ID NO: 73449 - DNA, 511 bp, Homo sapiens; identical to SEQ ID NO: 63735

SEQ ID NO: 73450 - DNA, 1810 bp, Homo sapiens
ttttttttttttgtgagcaacaaggctgtttatttcacctgggcgcaggtgggctgagtccgaaaagggagtcagtgaagggagataggcgtgaggccgttttataagatttgggtaggtaaaggaaaattacagtcaaaggggggttgttctctggcagacaggagtggaggtcacaaggtgctcagtaggggagcttttgagccaggatgagccaggagaaggaatttcacaagatagtgtcatcagttaaggcaggaacaggccattttcacttcttttgtggtggaatgtcatcagttaaggcaggaaccggccatctggatgtgtacgtgcaggttacagaggacatgatggcttagcttgggctcagaggcccttggctccagcaatgctgatgatgaggtgctggggtccccgaggacaggaggcctccaggaaggaaccggcctcagtccacgccgtccagggactgtggctctgccctctcgagctgtagcacctgattttctatgcaccgaaactgccaaggccagcttgtgttgtacagaaatggtcgcagatcaaacctgttgtcctcagggctgtagttctcggcgtggtacgcgggtgtgagcgtggtcatcttgtgtctgttcatggagtacttggagaaaaaccgcttcactttgtcagcgacctgtctcggggtgcagatgtgtctccacatgccgaggagtttgcagaacatgctgtagggccccatcttggccaccttcctgagtttcccatagaccgagagctccgcatatgtcatccccatatcttcctcgtcggtctgggacacctgtccatcagccaagggctccagctctgcggtggccggcgccaacaggatgctctgcagggcaggaagctggaagcgctggatgcagaactggacgaaggccctgaggtccgtcttgctgatcccgcctatggggttgatgtccgcactggagcagtcgtacttggtcaggtagcccaggagactctcatccacgttggcggatcccagcacgaggagcccaccgtggacaccccgagaccagaggctcaactgagcaaacagataggcgaggaccatccgtattcgagcctgcacattttgcagcgccaggttttccctgctgcttcctccatgagctgcaaacagagggctcttccccgtcaccaggctgaagatgcccatgacggccttcacggctggatcgatgttgagactgatgtggtggcttccaatctgctgggccaactctctggcccgggtgcacgtctcctgggaggagttcttgctggccatgtagcaggtggtcagtatgcgtccacagaggtctcggggatcctggggggtgtagctgatctggttcacgatggtgcggacatcagccagcacttcctcatttccactcctcacggcctcgcagacctggcagcacatggagtagatgaggcaggcggtggctgcgctgtccaccccgccactcaagggcagcaaaaaccctgcctgttgacttcgtcttaaaaaatcccagagccagcaggcaggtccaaggcttatctcctcctcagggctgtggtatttccactcgatgggctcagagatgggtgccagcaagtcctcgtggcacgagagggcaaagtccaccttcactctggggtaggggctcgccctgctggcttgaatctacgaggcagaggttgtgctgagctgggattgcgccattgtactccagcctatggtagttcacagcaagggtgaaactccgtctcaaaaaacaaacaaaaaacc

SEQ ID NO: 73451 - DNA, 1216 bp, Homo sapiens; identical to SEQ ID NO: 63737
  misc_feature (1)...(1216): n = a,t,c or g

SEQ ID NO: 73452 - DNA, 1095 bp, Homo sapiens; identical to SEQ ID NO: 63738

SEQ ID NO: 73453 - DNA, 962 bp, Homo sapiens; identical to SEQ ID NO: 63739

SEQ ID NO: 73454 - DNA, 1952 bp, Homo sapiens; identical to SEQ ID NO: 63740

SEQ ID NO: 73455 - DNA, 928 bp, Homo sapiens; identical to SEQ ID NO: 63741

SEQ ID NO: 73456 - DNA, 737 bp, Homo sapiens
atggagatagttgtgctgtgtgcattgaattgtataaaccaaatgatttggtacgcatcttaacgtgcaaccatattttccataagacatgtgttgacccatggctgttagaacacaggacttgccccatgtgcaaatgtgacatactcaaagctttgggaattgaggtggatgttgaagatggatcagtgtctttacaagtccctgtatccaatgaaatatttaatagtgcctcctcccatgaagaggataatcgcagcgagaccgcatcatctggatatgcttcagtacagggaacatatgaaccgcctctggaggaacacgtgcagtcaacaaatgaaagtctacagctggtaaaccatgaagcaaattctgtggcagtggatgttattcctcatgttgacaacccaacctttgaagaagacgaaactcctaatcaagagactgctgttcgagaaattaaatcttaaaatctgtgtaaatagaaaacttgaaccattagtaataacagaactgccaatcagggcctagtttctattaataaattggataaatttaataaaataagagtgatactgaaagtgctcagatgactaatattatgctatagttaaatggcttaaaatatttaacctgttaacttttttccacaaactcattataatatttttcataggcaagtttcctctcagtagtgataaccacatttttagacaattcaaaactgtccttcaaga

SEQ ID NO: 73457 - DNA, 663 bp, Homo sapiens; identical to SEQ ID NO: 63743

SEQ ID NO: 73458 - DNA, 2839 bp, Homo sapiens; identical to SEQ ID NO: 63744

SEQ ID NO: 73459 - DNA, 1125 bp, Homo sapiens; identical to SEQ ID NO: 63745

SEQ ID NO: 73460 - DNA, 1939 bp, Homo sapiens; identical to SEQ ID NO: 63746

SEQ ID NO: 73461 - DNA, 1468 bp, Homo sapiens; identical to SEQ ID NO: 63747

SEQ ID NO: 73462 - DNA, 746 bp, Homo sapiens
ttttttttttttccggggccatgtggtcggtttctttattgagaccacagacggtagcgcaggtccctgctgtccacatgccccttgtagggacaggaggcccttcccgagtccaagtccgaatgccgggtccgggccgagcccacggccccgagtacaagtccgggttccgggtccgggccaagcccatggccccgagtccaagtccggatgccaggtccgggccgagcccacggccctactggctactactgggaggggctgcttttgctttttggtgaccagatcttggacaagcggaacttggacttcttcctctggaggcccagcttctcaatcatgtcccgcagcatctgatcctcctcttgttcccggagccggtcctcgtccagcgagtccacgatgtcactgcggtcgttcacggtgctcacgtactgctccagcagctcctgctcccgccgccgctcctgcagtgacttcagagcctcgggcttggccatgagccggcgcagctcgccctcgatgtccagctgctgctcctccagacgctgggccttggacttgtacatcagctctgactcctgtctcagcagaagctgcttctcgtgaatgagccagaaccagtcccccatgaggctatcctcagcgtcatctccctcggccgcccgcagtcgcttctccagctccacgccgcggagctccagggcgtccagccgcctctcgatgtcctgcagctgcctctgtat

SEQ ID NO: 73463 - DNA, 3507 bp, Homo sapiens; identical to SEQ ID NO: 63749

SEQ ID NO: 73464 - DNA, 2521 bp, Homo sapiens; identical to SEQ ID NO: 63750

SEQ ID NO: 73465 - DNA, 1146 bp, Homo sapiens; identical to SEQ ID NO: 63751

SEQ ID NO: 73466 - DNA, 747 bp, Homo sapiens; identical to SEQ ID NO: 63752

SEQ ID NO: 73467 - DNA, 1912 bp, Homo sapiens; identical to SEQ ID NO: 63753

SEQ ID NO: 73468 - DNA, 1740 bp, Homo sapiens; identical to SEQ ID NO: 63754

SEQ ID NO: 73469 - DNA, 4013 bp, Homo sapiens
cagacagagctgctcctgcgggacatcgccgccttctgtttcctgggcatcctgtgtaggcgctccgctttccttctggatgtctttgggccgaagcatcctgctctgaagatcactcgtcgctatgccttcgcccatatcctaacggttctgcagtgtgccaccgtcattggcttttcttattgggcttctgaactcatcttggcccagcagcagcagcataagaagtaccatggatcccaggtctatgtcaccttcgccgttagcttctacctggtggcaggagctggtggagcctcaatcctggccacggcagccaacctcctgcgccactaccccacagaggaagaggagcaggcgctggagctgctctcagagatggaagagaacgagccctacccggcggaatatgaggtcatcaaccagttccagccaccccctgcttacacaccctaatgccagccctgggctctcttcctcggcagcccctccctcaactctgcagctcctctcgcacccagaggagctcctttccccagcaggcctcactggtaggatcctgaccatcttctccaaaccttccccaggagagactctgcctttagggtcatccaagtatccctgctctcagaaccggaggtccactggttttctataatgtactctttccctcctgccacatcctgcccccttcacattcacgagtcattaccagccagggaaggtcatccaagtttcctccagcatgggcgatatctttgggaccgagactttccttggagagctgctgagagcggacagtcccaaaaacaagtgtcaaagggcccaagggaaaggggactgtgccctggaggctcacttcacagggatcagtgtttgctccacagctgtagctctgggctgacgccccccagaccccttccttctcggagtgacccgcccccaggccacctgctccggggagttctgtgcactttactctttggacttctcctcacgtgtgccctgggttttatggggagagggaattcgctgttgggaaaggcagagcaagttgcaaccctctctgcccttgcttcatgtgggctggagcccaggcaaggagaagcaggagccagcgtgagactgaggccccctggtgcctatcaaggaccagagtgaaggggactacatctcccagcccttcaccttttaaatatgagtggttttaaaaggaaaaaaatgaaaccaggcaacagcaacaatattctgtttttaaaatagggacaagactgttgtcactttttagacatgtatcccattccttttggctctgcaatatttggggctgtagctccttccaagcccatggtagtccctccccgagtctctcccagtagaatgcagcctcccttccctggccccttccctctcagtgacggtgactccctggggccttctcgtggaacccagaggggctgaggactgtggcctggctggcgggccagcgtggtgctcctcaggactgcagcactgagatggaacctggcctcagtttaggaacaggggccacaacagggcaggaacccaccaccctccacataggaatacaaccagtggggccacatcatgtgaggcatcagacccacactgtcagcccagcaggccgggctgtgtccttcagacccagtgctgccctagactctgactcgggactccagcttgccacgtgccctctcccctcttgaatgtactctggtcttgcagtgtgctgctgggactttcttgctcagccatcactctggtcaccttgtttgctctgggtctggctgaattttctgccctgagatctgggcataaagtggatgaaacttgaaagaccttcagtgtagatccagatggccaacctgtccttgttaagttacttgcttcttgggaatcagtgtcccctgctgagctgaaaaggaaatggattccaatctcttccaacctttaaggtgatagatagtttgagcaagactggagaatggacaacactatgaagctgtggctagaaagggactgtcatgtcccatcctttggccagattgactggggatgtccggacagatgcctgcatgggtggtgagggccacatctgcacacgagccagtggctgcttgcagttcactgctgtgatgccagagtgtgttcaaaggtgactctcctgctcttctggactcttctctcaggcaagaaaggctgcaggctgcctgctatgtgatgcctgagcacaaagccaaggaactgaactaagtctttctgttaagtcctgagtttgtcattggcaggtttacttgtggccagctctctctgcccttgggtgtctgagcaggcagaccagaagaccaggcactggacctgcatgccaaagggactggtcatctcctgaggacctgtaaatgaccctgtggactgttccgcacgatccggaacccactttttattcactccccatgtctttggccttcctcttctttctctttccctctgccatcctgacactgatagtttgtcatataaattccccgggttgtgtttttttttctagaaaaaaattaaaagggaaaacaaaaccaaaaaaaccagaaaccacgaataagaatggaaatgacaatggctgcctgtcatttttctgtcacgattttcctgatttggtttgttccctttgtctcagagaagcaggagatgttgatgaggctgtatttttttttctttttcttgtttttgagacaagagtctcgctctgtcacccgggctggagtgtaacgtggcatgatctcagctcactgcaacctctgcctcctgggttcaagcgattatcctgcctcagcctcctgagtagctgggattacaggcatgcgccactatgcccagataatttttttgtatttttagtagagacagggtttcaccatgttggccaggctggtctggaactcctaacctcaggttatccacccaccttggcctcccaaagtgctgggattataggcatgaaccaccgtgcctggccaaagatgtaatttaaaatagttagaagggacttggcatgggccagctccgtgcatggcattttcacccccagagcttcctaatcctgttttcacacaggaagtttctaggtctttctagaacagctagaaatagtagctgactcccgcccaaggcccaaccttcaaaccctgagctcttcaggctgcatcctctggtgagctatagaggagaacgtggctcctaaactctagccatcctgtgggaggaaatagacttctttgggctgtggcttgcagaacaaactacactttttttccctctattgtttaaattttatttaataatttgtgtgtttttctgtctttattttctgtatttcacgtgttccttcactccctagaaactgcactttctttgaaaccataggtaatgaatcttactaggagaggcatggggatagagacagttctgggagtgtgacctgtaagcctcctgtagggcagtgccaggccttgattgcccacgttctctccgttccttcttccttcatacatttgatcacacagcctacacccagccccgagtgtgcatcacggtaaaagagctgagggctctcttcagggagcagcccatttaggtctcttttgttgttgttagggagaatacacatctttcttggaagctgggagtgtgttctcatttcatgtccattcagacaaagcaccattaggcaccatgaaatatacagtgacggacaggaccctgtctgcaaggattttatgtccttagttcaggagatggacttgtccacacaaaggcaaagtgaagtgggcggccggctcggaaaagtcctgtgcccagaagggagccagttctgacctgagtgataatgaaaggcttcctggaggacgcagcttgagccacacttgatgtgggagtgaactgggatagggacactcctgctgagagaatggcaagagcaaaagcacactggtggt

SEQ ID NO: 73470 - DNA, 1617 bp, Homo sapiens
ttttttttttttacaaaagattattttattaattcaatttttgcataaaagactgttaaaagaacttgctaacttgaaaacaattttgagtatttatgatctttccaacttgaaaacacctgaaccttatagaacagattgtgtaaagcagccagggccacaggagtgaaagaagatggagacccgccgtctggtcatgatatgagaggcctggacagtgacctcacgaacaaaaagaaatgatcctcttcagtccaaagtgtgtttgtgagactaatgactccatgccctcacatggccactcctcttacagcagacagcttcactccgctccagccccggtactgcggtctgtggtaatttacatgggaatgggatgagatctagtagttttagatccaacgcaattctgggaagggttggtaataaaccaaaactcaatctatgcagtatttaaaaaataattgagagttgtgacaacttcgattcttttcaggaggtgctgtcttaagatagaagaaagggatcaagctcttatcttagaaagcacagacacgtttagctcagggtagtgcaattcaatgctaagtggctgctccatgaaatctaagggccgggtaaggggaagaggcccagggacttcttccttgtctgacactctcgggactagcattctggcaggtcttacaagttataatacaaaaccatcagataaattctaatcacgactgtgtagttcctccccaaaataattttcctcttagaagtaaaatcaggaaaggggctgagttctgaaaagaaacatcggggctgtggccccaggccctctgagtgtggacgctgtcccccgtgtctccatgtttactgccttatcgtctcctttgtatgaaagtataatttacgtaattcgtccttggagaatcacagtggtgttcaagaaccttttgaggccatccaagtttttgtccttcagtaccttgaaatcagataatctcaacatccagaaatagcctttgatttgttctttctctgatgtcttgtgtccttgggatcaaagcctctttcactggcaccaaataatgcccagtgaggagttctggccatataatcctttgcgctgaacgtttttgatccaccactatcttcatattcctggatgagctcctggaagcggttataattgatccatgtccaccattcaccaccaattttaaactttctgtgtgctatcaggaggcaattagagtgttcgtgttcacatgcaatttcatattcggggatcagatccaccagctcgcggacaaactgtaccacttcctcatgccagggcacgtgggccatggtaagactgcttgctgaactttctccgcagtaggtaacgcccttcacttcgatgaagtcaggatttcccagggacacgagctgcgcgtaggcctggagctcgtccacattccatgctttcacgagcgtcagtctgtagacagttcgttgttgcttgactgccaaggcttttaaactgtcaaggaattgctgccagaaatccttgaagagtgggcggtcgattttcttcaggctgtctttggtactggcatccacactgacatacagctgagtaac

SEQ ID NO: 73471 - DNA, 749 bp, Homo sapiens; identical to SEQ ID NO: 63757

SEQ ID NO: 73472 - DNA, 926 bp, Homo sapiens; identical to SEQ ID NO: 63758

SEQ ID NO: 73473 - DNA, 602 bp, Homo sapiens; identical to SEQ ID NO: 63759

SEQ ID NO: 73474 - DNA, 1773 bp, Homo sapiens; identical to SEQ ID NO: 63760

SEQ ID NO: 73475 - DNA, 684 bp, Homo sapiens; identical to SEQ ID NO: 63761

SEQ ID NO: 73476 - DNA, 1157 bp, Homo sapiens; identical to SEQ ID NO: 63762

SEQ ID NO: 73477 - DNA, 1107 bp, Homo sapiens; identical to SEQ ID NO: 63763

SEQ ID NO: 73478 - DNA, 7853 bp, Homo sapiens; identical to SEQ ID NO: 63764

SEQ ID NO: 73479 - DNA, 1155 bp, Homo sapiens; identical to SEQ ID NO: 63765

SEQ ID NO: 73480 - DNA, 6179 bp, Homo sapiens; identical to SEQ ID NO: 63766

SEQ ID NO: 73481 - DNA, 1369 bp, Homo sapiens; identical to SEQ ID NO: 63767

SEQ ID NO: 73482 - DNA, 1297 bp, Homo sapiens; identical to SEQ ID NO: 63769

SEQ ID NO: 73483 - DNA, 3425 bp, Homo sapiens
ccgctgtcctcccctccaggcgggcccccggcaggcgtgcgatctatcatgaaacggaaagaggaggttgcagaccccacggcccaccggaggagcctccagttcgtgggggtcaacggcgggtatgagtcgtcatccgaggactccagcacagcagagaacatctcagacaacgacagcacagagaacgaggccccagagccgagggagagggttccgagtgtggccgaagccccccagctcaggcctgcagggacggcagcggccaagaccagccggcaggagtgtcagctgtctcgagaatctcagcacatacccactgctgagggggcatcaggatcaaacacggaggaggagatcaggatggagctaagccctgacctcatctcagcctgcttggccctggaaaagtacctggacaatcccaacgccctcacagagcgggagctgaaagtggcctacaccacagtgctgcaggagtggctgcgcctggcctgccgcagcgacgcacaccccgagctggtgcggcggcacctggtcacgttccgggccatgtctgcgcggctgctggactacgtggtcaacatcgccgacagcaacggcaacacagccctgcactactccgtgtctcatgccaacttccccgtggtgcagcagctgctcgacagcggtgtctgcaaggtggacaaacagaaccgtgctggctacagccctattatgctcaccgccctggccaccctgaagacccaggacgacatcgagactgtccttcagctcttccggcttggcaacatcaatgccaaagccagccaggcaggacagacggccctgatgctggccgtcagccacgggcgggtggacgttgtcaaagccctgctggcctgtgaggcagatgtcaacgtgcaagaagatgacggctccacggccctcatgtgcgcctgtgagcacggccacaaggagatcgcggggctgctgctggccgcgcccagctgtgacatctcactcacagatcgcgatgggagcacagctctgatggtggccttggacgcagggcagagtgagattgcgtccatgctgtattcccgcatgaacatcaagtgctcgtttgccccaatgtcagatgacgagagccctacatcatcctcggcagaagagtagctgtgagggaggcggggaccagccagaccgggagcaaaccgtcccttgtccccgtctcctccctgttcccgttcctccctggcccaccccactcacactccccaaggcccacggctcaaaggcaagcgagctctccctctgcttccctgggggagccccgacggccacaggactccagctccaagtgggttttcttggctcccctgttcaaagtggccacagcgcagaccgaagcaaaattcttgtatacattggcgccagggctgatgctggggtgtgggttttatgaagaacattgagaacaatcagctggtaattatggatggaggaagagggagaggaaaaaaatattgtatttttgaatcattgttgcaggagggggtgggaatcttaggatttgttgccagatttgaaagtcactggaacttgcatattttcattttaatcctaagtgttattacgcaccagttggggttcacccttcatccctcacatttaattgtctgatatagaatagtgttgtgtccactgccccgctagacggctttcttaggggaattttcttctggttgtttcacaagacagattctgtccttgtcacccgggacagaaaactcagtcttttcaccctcattcagatgaagggactcaggacaggctctgtgacttacagggacccaatcaattcacaatgagaaattaccggccaggcgtggtgactcacgtctgtaatcccagcactttgggagggcaaggcaagagcttgagcttgagcctagacgttaaagaccagcctgggcaacacagcaagacccatctctacaagaaatttaaaaactagccaggcgtggtggtgcgcgcctgtagtcccagctacttgggaggctgagccctggaggtcgaggctacagtgagctatgatcacaccattgcacttcagcctgggcgacacagcgagaccctgtctcaagaaagaaaagaaaaagagacaaattacccagaaacccctcccttccccacatggaggccttggcaaatgttaattttcctagaaaatccttcagacctgaagacgcaggaaaagaatctggctctcagggtggcttctgcgtccccgccgccaggccccagactatggtcacagggccgtcctgttcctccccgggactccagaatttctctcctcaaaggaaagaaaacagggcatgcgcttgttggcaaaacgcagggccggctcccaaaaaccccatgtgtgtacgattaaaagttggccgtccccaggcctcccagcgcaaacttaaagagacagggctttgctgaaaaccaaacatgggccagctgggctttttaacaacctagagactttccggagctgcctggaacagagcctgcgggaaacggggcttgccagagacactcacagtttccttcatggcctgttttggtcccctaagaatctccacatcattgtctttcttgtgccttttccttggtgagcaacagaaagggaagggttccaagcctctaaaaatgtgctttgtgatcaggagtgcgctccaaaccaaatacgcgcgctgccctttcgaggccagtgagctcagcctccaaggctttaaagccacatttcagcaagagaaagcgctgagagctcgcaggttcattaaagaaggcaaagcactggtttctctccttagaaaagtaggtttcttggcttgatgtagactggcttgctttgatttttagtgaagggaatgtacgtaaaaacaaaatagggcttggctggtcaaaggagacaagcaggatggatggatggatggatgaatagatagatggtgtttgcatgtaaattgcagagaaaacaaaaccaaagctgattggaaacaattaattgtgggtgtctgagggggaaggtcgcagctttgggcagctttgagaagcggtacaagagctctgtgcctgtgtgtccagccctggagccagccagtgcatttattttaagctcttagaagcaactccttggcccaggaatgcgtgacccctgagatgggtccacgcatctctctacacgtccttctctccgtgggatactggactcgtgcctctgcgcccattctcttctcacgcatatccatgagctttaatttcactttctgatcacggtacgtccataaagccagtattacacttaaatgaagtattcttttttgtaatcgttttttttagaaggtaaacaaatttaataaagctaccaataatgaaaaaaaaaa

SEQ ID NO: 73484 - DNA, 2490 bp, Homo sapiens; identical to SEQ ID NO: 63771
  misc_feature (1)...(2490): n = a,t,c or g

SEQ ID NO: 73485 - DNA, 2238 bp, Homo sapiens; identical to SEQ ID NO: 63772

SEQ ID NO: 73486 - DNA, 1014 bp, Homo sapiens; identical to SEQ ID NO: 63773

SEQ ID NO: 73487 - DNA, 1187 bp, Homo sapiens; identical to SEQ ID NO: 63774

SEQ ID NO: 73488 - DNA, 1117 bp, Homo sapiens; identical to SEQ ID NO: 63775

SEQ ID NO: 73489 - DNA, 1162 bp, Homo sapiens; identical to SEQ ID NO: 63776

SEQ ID NO: 73490 - DNA, 1833 bp, Homo sapiens
ttttttttttttttctgtctgtgggagaaaaactatctccatttattttgtttcatatacatccatagttgaattttaatacaaaagaaaaaaattagaatctgacaaatgtttacaaacaagataccttcaaatagattttactcactttagcctggtgcagagtaattgacaaattgtactgttatattcaaggcaacagagtctgtagtccaggaccacttagcccaacctttatgcaagcttaattttaatctaccatgaacaataaactcattgttgattcccagttgtgtgtgtgtgcacatgtgtacatagcagctcctttcatagaaagaaaagacatctagaggtcgtcttgtacttttacctacaggaatcatgataagatacagatgattatatgtaaccggggctggattttataagaaaaaatacttagctgacaaatgagggcagcaataaaaaagcgtcttttttgcaacaataaataaatacagtcaaaagttttctgtgagactctaaaccagcttcttcactgaagagcagacgtggcatttccatggagttacacttgaccccatagtatctttttttcttgctttctttttctttttttttcaataaacaaagttttctcgcttctgccacaatagtaaaaccatctgatcttgacaagataatggtgtcgttgactttgcttttttcttgtccgttggacaaaattggccaagaatataattggactgttatgaccaataaaaacgaagtttaggtcaagtcttgtcaggatagcctgactaaaaacatctggctccttaatttaaaatagttcagacaaccagattcttgctgtgttttatgttaggttaacacgctgaactttaagaagctgtagactgcagtttgttgttatgagacctgctagctttgaagcctttcaatttctgtacaaagaatgattcgagaacttctgcacactggtaaaatggggagtcacttggattgtagtaacgacagttatcaaaaattttggtcatatctgccacaaattccgtcagcttttcataatatcgtctttgtactctttcttccatggtggcaaggtccataggttccttaataacaccataataatctggtgcatcattagggtctactggttcaaggaaaggccaggccatcttatgggcctgtaaggaacggagcaccctcttcaacccctcataatccttctctgttagtggcgtgagcactgtcatggcatcctctgttgactggcactgtggacagacatactcatcaatgagctctgcctcactttgcaagatgccaacgcagcgcccatggtaccaattctgacaccgatcacagccaatataaaatttagattcatcataaggcgttttacagatacagtaaagctttgtgtccttcttagtttcctttgaggtagtagagatcattttctttttcttggactttgagctggagtctttttcctcttcccgcttcctcttctgggaagcagcaggtaaggtgggcgtggacagaaggcctgtgtgttgcacagcaggtggagggggaggtgaaggtggaggggctggaggggctggaggagctggtgtcactggggggcagggtgcagctactgctgtggcctgagccaactgcatcaggtctttttctttcttaattttcaggtctctcttcagctcttcctgttgtcaattaaagacaatacaagactatcattagagtcatgtaaatgtgtgatctggccagaagatggtacaccccacgcgtccgcccacgcgtccgcccacgcgtccg

SEQ ID NO: 73491 - DNA, 732 bp, Homo sapiens; identical to SEQ ID NO: 63778
  misc_feature (1)...(732): n = a,t,c or g

SEQ ID NO: 73492 - DNA, 1452 bp, Homo sapiens; identical to SEQ ID NO: 63779

SEQ ID NO: 73493 - DNA, 957 bp, Homo sapiens; identical to SEQ ID NO: 63780

SEQ ID NO: 73494 - DNA, 938 bp, Homo sapiens; identical to SEQ ID NO: 63781

SEQ ID NO: 73495 - DNA, 555 bp, Homo sapiens; identical to SEQ ID NO: 63782
  misc_feature (1)...(555): n = a,t,c or g

SEQ ID NO: 73496 - DNA, 830 bp, Homo sapiens; identical to SEQ ID NO: 63783

SEQ ID NO: 73497 - DNA, 2223 bp, Homo sapiens; identical to SEQ ID NO: 63784

SEQ ID NO: 73498 - DNA, 925 bp, Homo sapiens; identical to SEQ ID NO: 63785

SEQ ID NO: 73499 - DNA, 777 bp, Homo sapiens; identical to SEQ ID NO: 63786

SEQ ID NO: 73500 - DNA, 1635 bp, Homo sapiens; identical to SEQ ID NO: 63787

SEQ ID NO: 73501 - DNA, 6018 bp, Homo sapiens; identical to SEQ ID NO: 63788

SEQ ID NO: 73502 - DNA, 840 bp, Homo sapiens; identical to SEQ ID NO: 63789

SEQ ID NO: 73503 - DNA, 2602 bp, Homo sapiens; identical to SEQ ID NO: 63790

SEQ ID NO: 73504 - DNA, 2402 bp, Homo sapiens
aaaaaattttttttttgagaggggggtttactctttttgcccaagaaagagggcaaaggggttttttgggggcaatgcaacccccggggccccctgggtaaaaagattttcccgccccagccccccaaaaaaggggggatacagggaggggcccccccccccgggtaatttttttttggtttccggaaagacggggttttccccaggggggggggggggtttggaaaccccgccccccggggtgcccccccccccccccccctaaaaagggggggttaaaggggggaacccccgggccccacccccaaaaaatttattagttttggtttttgcttttttttttgaacttaacagatactttattgctcacctttcacacaaagcacacctccagccattttctttcacagcttgacaatgtttacatgtacaaaaacccagcaagaagcatcatgtcatgtagatttcagtaagggagaatgtaaaacatcaactcagccaggcttttgttttctgcagcaataataaagggcctcctgcacttagcaaaaatctgtcttaactttgtagtgcatttcttccattacaaaaaaagttacctgcttaaagcaaactaacttgtatttgctgagccagtggtattaactcatgcataaaacaaatttcggtttgctatttcttctagcaaatttcaagtaaaaataaggttgaaggaggaatttgttttggatggatgcaggtcagtttgaattgctatacttaactaaatgcctacatgtactatagcttcacaacttagtttgcttttataatctttatggattttggccgtgttcaaggttttcagagttgagcatatgatacagtattccatcaacaaaataaggctactgaatgtgctatctgcagaagagctcatttaataggaactgacctaaaagttccatcatgaagcacacgtggcataaaagtcaaccggggggcagaactgtgcttggaaaataggcattggaatactttaagcaaaacacatataaatggttattcatatgaggaaggtttcctagtagtaaatctaaaaaagtctaggtgaatcctcattttcaaaactgcatattgaaaacatgaaaactacttattcaagtaatttcttcaaaaaagtttgcatgttctgactgtggaattagtctactgggcaattaaaggcaattttaaccaccttttaaaaaatttttcatagaaaggagagatgttatgtgtttctcaaataaacggcattatgtaagtccaataaaaaaatctaacagaattgaatgaagacctacaaatgcttatgccaagcaggaatctgcctgccacctgtggtctcacattaattcaaaataggtgctgaattcaggattctgaaactaagtttctattacttgagctctagcaaaatgtaaggttcggtagcctcaactagtgtaatgtcttccctgtccaaatccagaatgattatactgataacctccatgctggaaatgctgttcaaattgacccccttggtgataattctggctccctcttcctccccagcctcctccctggcctgcacgaccacctcggcctccacgaccacctcgcccaccacgaccaccaccacgatcaccatggtgcccgccatcttggtatctattgtcctgctggtagccaccaccctggtatccacttcctgtatatgaagaagatgtttggaagccaccataacctccgccttgatagccaccactgctgtggccaccatgatagccacctggctggaaacctgaatctcgataaccaccatcttggtagccacctcctccaccactccctccatctgtccagcctccttgatgcttatttcctcttcctccccctcggccaccatggtcatagccaccacgtccacctctcccgcctccttgttcatgacctcctcgtcctccgtatgaggaatgttcatagccacctctccctcctcctcggcctcctgtttgctgctgggggccatcttgcctcttctgccacggtggcatctctgggggtggaggttcgatttcattgggtctaccacctctgtcaggcaccctgcccatcaacaccttattgatggcacaggcagtcttttctcttatagagccgctgcttgtccttaaaatctttgacaagtcctgccttgcagccaaaagatgggcaacagaaatagtagttttaggggataagactgaacgtttcggctggtaaaccttggctaatttttctgtctggctcttagctctgtcagaccagccaaaggattgtacagtgacatccaaacgttttattagcagctttctccggacttcatattcattggctatggcttggttaattgccca

SEQ ID NO: 73505 - DNA, 1418 bp, Homo sapiens; identical to SEQ ID NO: 63792

SEQ ID NO: 73506 - DNA, 466 bp, Homo sapiens; identical to SEQ ID NO: 63793

SEQ ID NO: 73507 - DNA, 717 bp, Homo sapiens; identical to SEQ ID NO: 63794

SEQ ID NO: 73508 - DNA, 1382 bp, Homo sapiens; identical to SEQ ID NO: 63795

SEQ ID NO: 73509 - DNA, 903 bp, Homo sapiens; identical to SEQ ID NO: 63796

SEQ ID NO: 73510 - DNA, 971 bp, Homo sapiens; identical to SEQ ID NO: 63798

SEQ ID NO: 73511 - DNA, 1975 bp, Homo sapiens; identical to SEQ ID NO: 63799

SEQ ID NO: 73512 - DNA, 1919 bp, Homo sapiens; identical to SEQ ID NO: 63800

SEQ ID NO: 73513 - DNA, 716 bp, Homo sapiens; identical to SEQ ID NO: 63801

SEQ ID NO: 73514 - DNA, 1412 bp, Homo sapiens
ttttttttttttagtgtaaacattcacatatttaatagtacctttaaaataagcattactacatttaaaatggttccaaaatgaatctataaatggtaatataaattaaaaaatacgaacttaaagtgaataaatttttaaccttagctatggtataaataatggtaaatgtatagtgtacctttgagtcattaaaatgtcttaaaagataacagcttgttaccagaacattagaaaccatagccatgattctcaagcgttaacaatctacatttgatattttcttggccactgcattcttcaatgaataataatttccagaattccattccatgttgttttccaatagatcttttcacactcgatgttgaatacatggctctttgcagatgaataaaacaagtgcattcagtttagagatccattttgcgaaggctcattcgactgaaggaatctctgtgggcaggtgacaggcaatactgccttgtataactgagggatctttctgttgatcagtggctgtagggcctctttaaggcgatgatagtttctctccagttccctttgatactccttttgatccggcccaattaagctcttattttttcttaaggcatcttcacaccttttagtaaaatctttaaagcagagtcgcagtttattatgatgtctgaagagctttgggtcactaggtatttcagacagaaaaacctgggcaacttccaaaggcccctgattcactgtggtgcctacagatccctggagtaccatctgaagcattttggggtctgcgggatcctgatgtgttgcaaatgccaactcctgtgtctttttctgcatgtcctcaatagcaacttcaattggtgttaagatgatctcttctttatgagtgacattgacccttgttttaatataaggaaaggcatgagacgtagtcagaatggtcttccttttgaattgttcatgaagttccccatgggcacggccatctaaagtaaagggtgtacagtacatgaatcgacgaagattgtaatttttgtcgaaataggtgattctgtccttcatctcatatgtgtcaaagtatggctccacataggtaatctgaatatatgccttgttaggatctaatttacacttgtctacaggattagagtctttgattacttcaaccacatcctctccaaatctttctccgtaaaatccctccaatctgtgagatatctctgcaagtttggttattgcaggctccttgtaaacaaattcttgttcatccaaatccccgaacttggttccataaaaaccaacacgaaaataggtgccaaacatccgctcccagccagtactctgatgaacaattttgctgaatgcttcttgaagtttaccatgaattgtggatagtttctttgatcccg

SEQ ID NO: 73515 - DNA, 1887 bp, Homo sapiens
ttttttttttttaaaaatcaaaaatgaaatatttattaccgctttttgtgacttaacacctttttttttttaacataacgtcacagtcctcatacaagtattttaatgtaaatttgacaaagcttaaaggtaacagcattttcttctagtgaggaacacgttgctgagaaaagaagaattcatgggacatacaataccaattccacaggcagatctgatactaggcaaaaacattcttttttttttcaattgagggtaaacacataggaatatctaacatgaaacaattaatagaccgaactctgtacggagttttgttacagtattctctttgctcctttttatccccccaagctttgagtttctgataaagtcctagttatggttcaatgaccattaataacttttttttgtgttgaggaaagctgcccaacttaagattgttttgtccacaaccaaggctcagaactcctggaagaagctcctgctctgtctttaaatcttcattggcaagctctttgaagaagagtcccccaaaaataataataagaattggcttatggaagcacggaactataaaggatctgtttgaaactaaaggccacatttatggggggaacaaaggccgggcatgaaaacacattcttgaagctggagttcggagtgatgaggttcagccaaaagttcatcatgatctccagtgtggttcttttctcattggcccaaccaggtttaaaatatataccacagtctcgtcctggatggtgaattcactgatgaaccaaaacagtcattcttttggggaccaacacacataggtgtggaaaacaaggatatatttttttttctcttctaaaactatttgaggcaaccataacggcgtgatcaacagaaatgtaccaagtttaaccttagttccctatattttatacctaccagtagttataactctcggagtctttttccagaggatctttacatggacagaattgtctcagtcagcccatgatttcacatttgtgttcttgttgcattggtcctctgttgcttgatgaaaaatgacaaaagtaaaaaataatcacagctgtctggaatttcatattaagtgtcaacatctggtcaaagttcagaaagtcttaaaatagtttttgcgtgtgtttccttttcccttgagttcccttatactattgggcatgaatgtccataacctgtccgccaacattgggatctacagaatttaacattgtggggctctgtgcctaacataatcaatcccaggtgggtaaggggtccccccgtgcatcatcatggctgggtggtggggatggcttggcaaatatgaatgcattgggggtccatgtcttaattgagtagggtgtggggtcatctggggaggagtgtaacttggctgtgccatactcattcccataggaccaccctgagaaacgtagtcccctggcatgctctgcaaacttcccccttgctttgcgattgctttacatgatgaaggttacatgtagtgccattgcccatccatgcccatattcatgcccattccactcataggtcctgcaggccggatccccatgtgttgctgaccatccaacacaaagctccccatgggctgaccctctggactatatgctgctccttggctcactgctcgatttgactggtcaatcatgggctgtactattattcttctggcattaataaaccagttgtttacttggagaattgtaagtcctgtgtcttgcgctaactgtttcttctgctcttcggaagggtacggatgtgtgagatgctggaagagccatgctctcatgatatttgttgctactttggggaaaatgcctcttttcttctggcgttttttgtccttatccg

SEQ ID NO: 73516 - DNA, 1152 bp, Homo sapiens
gcggccggctgccggaaagagaactcacttgaccttcgctctcagtttccaaggggcagggattccgaggactttaatgtaaaagaggaggctaatgctgctgctgaagagatccgttatacccacattctcaatcgggtactccctccagacatccgtatattggcctgggcccctgtagaaccaagcttcagtgctaggttcagctgccttgagcggacttaccgctattttttccctcgtgctgatttagatattgtaaccatggattatgcagctcagaagtatgttggcacccatgatttcaggaacttgtgtaaaatggatgtagccaacggtgtgattaattttcagaggactattctatctgctcaagtacagctagtgggccagagcccaggtgaggggagatggcaagaacctttccagttatgtcagtttgaagtgactggccaggcattcctttatcatcaagtccgatgtatgatggctatcctctttctgattggccaaggaatggagaagccagagattattgatgagctgctgaatatagagaaaaatccccaaaagcctcaatatagtatggctgtagaatttcctctagtcttatatgactgtaagtttgaaaatgtcaagtggatctatgaccaggaggctcaggagttcaatattacccacctacaacaactgtgggctaatcatgctgtcaaaactcacatgttgtatagtatgctacaaggactggacactgttccagtaccctgtggaataggaccaaagatggatggaatgacagaatggggaaatgttaagccctctgtcataaagcagaccagtgcctttgtagaaggagtgaagatgcgcacatataagcccctcatggaccgtcctaaatgccaaggactggaatcccggatccagcattttgtacgtaggggacgaattgagcacccacatttattccatgaggaagaaacaaaagccaaaagggactgtaatgacacactagaggaagacaatactaatttggagacaccaacgaagagggtctgtgttgacacagaaattaaaagcatcatttaaccatagacaatttgccaggatctaggaaccacctaatggtaggtggacagaaaaggaaaaaaaaaa

SEQ ID NO: 73517 - DNA, 3086 bp, Homo sapiens; identical to SEQ ID NO: 63804

SEQ ID NO: 73518 - DNA, 549 bp, Homo sapiens; identical to SEQ ID NO: 63805

SEQ ID NO: 73519 - DNA, 2431 bp, Homo sapiens; identical to SEQ ID NO: 63806

SEQ ID NO: 73520 - DNA, 2447 bp, Homo sapiens; identical to SEQ ID NO: 63807

SEQ ID NO: 73521 - DNA, 1785 bp, Homo sapiens; identical to SEQ ID NO: 63808
  misc_feature (1)...(1785): n = a,t,c or g

SEQ ID NO: 73522 - DNA, 2186 bp, Homo sapiens; identical to SEQ ID NO: 63809

SEQ ID NO: 73523 - DNA, 5264 bp, Homo sapiens
ttttttttttttgccatgtcagaagggctttatttctacttcatcacggtctcatacagacccagaggcatcatcatgtgtttccatttggtatccttgtgactttttgtagtgttttcccttaagaaaactttgagtaaactctgtacattgccagttaatcttttcacaataatttaaaaatggtgttgctgttggatcatcgatgcaagaagaccaacaataaaagtacagtacaaggaaattcacaacatattacagtggaacagactgagtcacatttaggtgatggcgaggacacagtagcggtatatacatgcacccgaagacgtgcaagccaagtaggataatataaggatcatacagtgaattttctaagcccactgaggactttgtaccttttcaaaatcatcctgtatcccctccagcatacagaatatctgtcttgtctactggcttcatggctttttcactacaaaaagttcactgaatcagacagtctgaagcattaaaaaattcataaaaaacagtaacactgacaaaataaaattaacttaatccactctaattcaacatggaaataaactgaaccaaaatgtaacagtgcaaatttaacagaggcagtcaggtattgacagcgagggtgttcagaatctcttaaaatgtacattttttaaaacttttattttttaaatctatttataccttatttacgttttcgtttaatatactgtgtgtaaaaaagatggagacaaaaatagttttctgagctatgaaaaaaattaagttattacaggcacatttactgtttcattctagaaacatctcagtttcacaggttgaacattcagcagctttgtgtttttaaaaaacattctttgaccttgagaaaactagatctctcctgttgggcagagttttgttcatggtgatggtgtggttatgcaaattacagtgaattatactgtgataatccatgcaagcttgcatctcggtgtggctgctcctcgggcggctcctcgccaccatgctcctccaaggacgtcgggtctccgggtgactgaggctgtgaggcagtgggggaatgtggggcccaacgggacggagggcgacggtttgctggtctctcgggcctggagaagcagggctctagggatggagctagtgcagaacaaggtagttcagcgtgaggcaggcagggctagagtccccagggggcagttagcaagacagtttggttctccatgggccctggctcggctgtgtcccccagcgagtggctgtcactgtggagacccgggggcccgtgggcagcctgcctcctctcctcctttaaggcatgttccagcagcttcttgttgaggatccgggccacgttctcagtgagggtgtagccagggggagcagataagtcctgcttcactggcgtgccctctcccccttcctccctgcacatctctgaccccaccccaatggggctaggcgaccttcctcgggaattggtgcctgtttcctggcctgggcccagctctggtcggggctctgctgagcgagaccgactgccggcccgcagccccttctggaaggggtcctgcaccacggggctgtggtcaatgatgttgaagaggctggagaggccatcattaatggtggtgtgcacggggctctcccttgtggtggtggagcgggcccaggctgactcactgtaccctttctgggccatccctggtgacgtcctgttatttggctggtcggctttggggaggggcttcctctgcagcttgggagaaccatacttgggggagcagcatgtgcgttcaaacttggcctgcaccttctcgatggcaggggccacctgtctgctcctaaggctccgggaaggagacgacacgggtgtagcaccgcccccagcctttggagtgagacacttgtgggggctgctggtgacaccgctgccacgcagggcttcagtctgcaagcccacactgatggtctgaacagtctgggtccccatcgtccgggacccattggtctggcaggccatgtccttgacttgcagctcgccagggccggagcagatggcattcctgacagagaaggccacctccttcatgtcatcactcaagttcttggacatctccaggctgtgcagtggggaggcaaaccccagggaggtacagaggggactatcaagggggcgccgtgccccctccacatagtcccgggagtgcctgggggaggtgcaaggccacctgctgagcatgggttctggagggccccccttggtgtctcccgggctccctctggctctgcttgtgggaaagggaccctcaccacctgccgccgtgatgctgtcgaccctgcgcacggcaggcgggctgtgtaacacgcgcaaccccgactgctcggtgaggacgtggctccgcagtggctgcttctggcagtgctctgggctggtcatggtgtccgtggtcatggtgacacttgtggttaggtaccaggaggagtcggggaaaggctctgtgctgtcctcgtgccctgcccgccccacctcggtcctgtcggcccaaaggtccggccccccaccattgtggcccctgttgggtgtgtagtcccagctcttgttgaactcctcgatgtacttgaggtcgtctggagacaggggtggggtgacatcctccttgctgctggtggacggcaggcccttctcaggcaggaagggggagatgtccattagacgctggaactcagacatggaggacacggacaccgccctttgaagatttcctttgtgattttcttcttcctcagggaggcggttcctgaactccctctcgggcctgtgggctggtggctcttctggctcgtcatccagggacaaggcatccaggtagagattctcactggccgagcacctgtccgactccttcagcttggacagcggccggtcttcaaacgggatggagtcagcatctgcacaaggccacatggccactggacggggcatgcggaggcttccctggtggggaaaggggcgaacgttgccgtctttttgatcacagaggaaactgccacctctccggggactgttctctttctgcaactgctctatcctccacaagaattccttcttctgccgctcccactcctgccgatctctgtccaggcggtcgagaagttccaccttctcccggttccagttcttctcgctgtgatggatctgccagcgcaggtccatgaccaggctgtgactgtctgccaggagcttctggtgcacctctctctccttcttcaaggcccccttgctctcagcggaggagcctagttctcccaacttgttctcagtcttctcttccagctgttccagacggcacttgagcacggcccactccacgtcccaggccgccttgtcgctggcatattgctgctgcagccgtagtcgggcacgctcatcctcccgcagctccgcacggaagtcctccagcaaggccttgaaggcgctgaacagctgctggttttccaccacctgtttgtggggctgtcccctgtccgcggtctgcagccgcaagctgtgatctccaatctgcacccgggagtgtggggagtgctcccccactggaaagccacagcctcggtcactgtcgtggtctgggccatccgcctggtgacccccctggactccaagctccccgagcctggagagggtctctggatgttcaccctcagtgaactcctctccttcctcctccatctgcttcccttgccgccagtgtttcagcagccacctgagtttgacgtagaagaggaaaatgttctgcttcaaggaccggagctcctgctgcatcagattcttctcatcactccaggttcgctcatggagggtgttttgcaaagccaggctgtgcatttccagttctttccacctcaaggcatagaggtgctcctcctccatctccaggctgaagcaggtctggcctcccagcccgtggctcccggtgtccccgtctgcgcggcggtgcagctcccgcgcggctcggaggcgcaggctctcccgctcgtcccctcgggccggcccgagctgccactccagctgctctttcagtctggactgcaagtctgggcccagctccttccccaggttcccgatgggggagtcccgggacacggaagtcacagtggagaggaagctagaggactctgtgaggtggggcaagggggataggccatccccaatgcggttcacctgctccaggaaggcctgcagctctttcttgaaagccttcatcttggcgttgatggtccccagcagctggggctcctgctggtccccctcaccctgctcctcttcgccctggaggccaggccccggtaagggcgcaccaccccgcagccccgcatcatggaggaagctgtcggtgtccgtgatgaggcgctccaccgtccgctctagccgctgggcctcgtgttttagggtcactaggtactcagagtcctcccgggccttcaggagctccgtggggcatggctcgctggcctccgatggcttcccgctcccgaagcccgacgtcttctcaaacatctcctccgagtcactctccccgccaacaggcccttcccgcttgggctggggcaggcggctctcctccccatcactctccttcttgcccgcatcactctcggcatcgctgtcccggggactgggggcacgcagccccaggtgggctgccaggtcgcagcgctggatgttggacagcagcgcgtggttctcgtgctgcagtttgagcaccttgccgctgagctcgctgatctgcagcctggctgacttcagctcctcctgcaggggggccccacccccggcaccaggacttgcaccctctcctagccagcccggctcccggggaggctcaaacttaaacttgctgagctcgtgggtcagttgccggttgtggtcttcgatctcggagatggacctccggagcaactccgcttcctcttctacaaactgcaggtggcggcggagctcagtggaggactccagggagtcaccgaagggtgaggtaggaatgctgggtgcgtggtcccgacccgggccctcccgctcctgctggccccgcgtgtcctccatctctgccttgaggccacggttctccacctccagctccacgatcttccggcccaagatgttggcttcctcctccaccagctttagccgcagcttcagctcggcctcccgggtgctggggggcccgcctgcttcccccgtg

SEQ ID NO: 73524 - DNA, 2216 bp, Homo sapiens; identical to SEQ ID NO: 63811

SEQ ID NO: 73525 - DNA, 660 bp, Homo sapiens; identical to SEQ ID NO: 63812

SEQ ID NO: 73526 - DNA, 3311 bp, Homo sapiens; identical to SEQ ID NO: 63813

SEQ ID NO: 73527 - DNA, 551 bp, Homo sapiens; identical to SEQ ID NO: 63814
  misc_feature (1)...(551): n = a,t,c or g

SEQ ID NO: 73528 - DNA, 641 bp, Homo sapiens; identical to SEQ ID NO: 63815
  misc_feature (1)...(641): n = a,t,c or g

SEQ ID NO: 73529 - DNA, 5662 bp, Homo sapiens
gttggctgatagttcaccttcaaatcttcaaattattataaaagaactgctttctatgcatcaccagcctgaccctgctcttaccaaggagtttgattaccttcccccagtggatagcaggtccagttcagggtttgtggggctgagaaatggtggtgcaacttgttatatgaatgcagtcttccagcagctgtatatgcaacctgggctccctgagtcattactttcagtggatgatgacacagacaatccagatgatagcgtgttttaccaagtgcagtctctctttggacatttaatggaaagcaagctgcagtactatgtacctgagaatttttggaagattttcaagatgtggaataaagaactttatgtgagagaacagcaggatgcatatgaattctttactagtctcattgatcagatggatgaatacctcaagaaaatggggagagaccaaatttttaagaatacatttcagggcatctactctgatcagaagatctgtaaagactgtcctcacagatatgagcgtgaagaagctttcatggctctcaatctaggagtgacttcttgtcagagtttggaaatttctttggaccaatttgttagaggagaagttctagaaggaagtaatgcgtactactgtgaaaagtgtaaagaaaagagaataacagtgaaaaggacctgtattaaatctttacctagcgtcttggtaattcacctaatgagatttgggtttgactgggaaagcggacgctccattaaatatgatgaacaaataaggtttccctggatgctaaacatggagccttacacagtttcaggaatggctcgccaagattcttcttctgaagttggggaaaatgggcgaagtgtggatcagggcggtggaggatccccacgaaaaaaggttgccctcacagaaaactatgaacttgtcggtgtcatcgtacacagtgggcaggcacacgcaggccactactattccttcattaaggacaggcgagggtgtggaaaaggaaagtggtataaatttaatgacacagttatagaagaatttgacctaaatgacgagaccctggagtatgaatgctttggaggagaatatagaccaaaagtttatgatcaaacaaacccatacactgatgtgcgccgaagatactggaatgcctatatgcttttctaccaaagggtgtctgatcagaactccccagtattaccaaagaaaagtcgagtcagcgttgtacggcaggaagctgaggatctctctctgtcagctccatcttcaccagaaatttcacctcagtcatcccctcggccccataggccgaacaatgaccggctgtctattcttaccaagctggttaaaaaaggcgagaagaaaggactgtttgtggagaaaatgcctgctcgaatataccagatggtgagagatgagaacctcaagtttatgaagaatagagatgtatacagtagtgattatttcagttttgttttgtctttagcttcattgaatgctactaaattaaagcatccatattatccttgcatggcaaaggtgagcttacagcttgctattcaattcctttttcaaacttatctacggacaaagaagaaactcagggttgatactgaagaatggattgctaccattgaagcattgctttcaaaaagttttgatgcttgtcagtggttagttgaatattttattagttctgaaggacgagaattgataaagattttcttactggagtgcaatgtgagagaagtacgagttgctgtggccaccattctggagaaaaccctagacagtgccttgttttatcaggataagttaaaaagccttcatcagttactggaggtactacttgctctgttggacaaagacgtcccagaaaattgtaaaaactgtgctcagtactttttcctgttcaacacttttgtacaaaagcaaggaattagggctggagatcttcttctgaggcattcagctctgcggcacatgatcagcttcctcctaggggccagtcggcaaaacaatcagatacgtcgatggagttcagcacaagcacgagaatttgggaatcttcacaatacagtggcgttacttgttttgcattcagatgtctcatcccaaaggaatgttgctcctggcatatttaagcaacgaccacccattagcattgctccctcaagccctctgttgcccctccatgaggaggtagaagccttgttgttcatgtctgaagggaaaccttacctgttagaggtaatgtttgctttgcgggagctgacaggctcgctcttggcactcattgagatggtagtgtactgctgtttctgtaatgagcatttttccttcacaatgctgcatttcattaagaaccaactagaaacggctccacctcatgagttaaagaatacgttccaactacttcatgaaatattggttattgaagatcctatacaagtagagcgagtcaaatttgtgtttgagacagaaaatggattactagctttgatgcaccacagtaatcatgtggacagtagtcgctgctaccagtgtgtcaaatttcttgtcactcttgctcaaaagtgtcctgcagctaaggagtactttaaggagaattcccaccactggagctgggctgtgcagtggctacagaagaagatgtcagaacattactggacactacagagtaatgtctctaatgaaacatcaactggaaaaacctttcagcgaaccatttcagctcaggacacgttagcgtatgccacagctttgttgaatgaaaaagagcaatcaggaagcagtaatgggtcggagagtagtcctgccaatgagaacggagacaggcatctacagcagggttcagaatctcccatgatgattggtgagttgagaagtgaccttgatgatgttgatccctagaggaacatgcccagcctgagaggagtcaagacacaatactggatgctcagcaccttcttggaatcagaatctcgaaccctttggaagagcctggagattggactgggaaagctgctgtgacttgggcggatcgtgtatttctcaaggaaagcatttttaagccactagaaggtttgggagctgtttggcagtgggagaactccggcatgtggatcagctgtcccgggagcgtggtctatatgtggattcacatttctgtggagattttcggaaatagagccagtggcagacttttttgttacacgaacatacaagagtgagcataaagctgttgctttctctacgatgctacaaaagaaattcctttggtttttatattttaagaaaaagcaagctgcttttagatatgtgggggcaaatttttaatcttgcagtaatattaaacaggaatatccaatttaaaatgatgtaaagatgtaataaaattcctttttcattgtaaaatagtaattaaagtcaatttacacagacctttgtatttaatatgtctccctatttgtatagaatttcagatgggtctagatgagaaccctatgcataagcttggatcttgatgaaaggttaccaggatcaggatcaaaaattgggaaatactaagctcttgaagatatttttctgatataattagattgaaaagagcaattttgaaaatgctgtgttctccagaagtacagggtgcattatttgacatcaattacttaaagaagttatgagttgttccccaaacagattttaaaaacagcaaaataaaagcactttaagatataattttactgagtttaacttcacagaattatctttttaatgcttggagacatattgaataaactgtagtcttaaatcatgtgatctgcaatcgtttgcttttgcttaaaacataattactgaaacccttggtattggttgtatatgaagttaactatttgagttggtacacactgcttgtgagtttcatagttattgtaatgcagagaaggaatttgagaatttgtttctcctcaacatgactaattaacactgaaaagtcagtcaaggtttaagatttattttcccagaaataaatataaagcaattgaataaccatccatttagtcgtatttccaaagtatagcaccattcactcatttataccagctcccttttatggtgtgggggagaggtttacacccacatatttcatatatattttgtacattttgtattttgaattgctcacattttcggccctgttttgcctttagttacaggtcctgccttattttcatctcaccatgcacagaactagggagccttaggaagtgccaggttttcactgtcagatttgccaagtcacagaggcgcagccagccctgaagtgcctgtctggctgctgtggcattgtgtgggcatgtggccaggcagatggcatctcattactgtgctctcgccatggcccagtcttttcattctctggcagtgagggtttctgtgctgtcagacttcattgttattctgtgacttgctggaggttggcagtggcctttgtcaaacacactgagaagatggaagggccagcacttaagagcagaactgtacccttagagaaacggacagaggcgagtggcaaacttcagacggttccaatggtcttgcagtttgaaatgtgatgttctaccattggttttgagtacgtgaatacttcctgtcctactgtttcccctaccctattctcaccttctctccgcccacatcctcaccaagagattgtgtgggacatgaccttgaaatgctggcgatgatccacactgggatatcatcgctggcgactgcactctcaggagcccaaaatcaggagtgaaattgccacttctagtccccttatttcctatggaaacaacgccttccgcacccctagcacctgccgtcctcactgtaaaggttcatcaggatcgtccaccgtgtatattatacgcttcagatcatgttgcttatattgttgctgcaatgaccatcgttttcactttgctggtaaccacttgattgctgacagctacagtcaatgaacctgctgatgactttttttaatgtagtacaacagtgacagttatgacaggcttaccttggaagagttgtcatttttactgccaattttttggatgaagatgtttttataaacctttcaaaatggtctgcaaacagagcaggaattgcacaattaactcaataatgctgtgtgtttctcaagaagctccccttagtgaaggccgatcctttaagatgggcccgatttctgccccgttgaaagggcacccctgggaaaagaaaacaagcatcccccagcggggccatcctcaccccacgaccttccccccggagtccctcacacgggtcacttgacaacctacagtcagttttaggaacttagagtgcccgtatccatcagacgttaccctgtccctgaccccaccttaccctgcctaacatccgaggtgtgtgcagttaccttcctgagcttggaacaagcagactggaattttcctctgctacctccttggtgtataaaatcttgtttataaaatttcaaaaggaagtagatacacttagggaagaaccttaattctaaatttggttcatgtgtggcaaaggttcttagcttctaaggaggtataaaataaatttttcaaaaac

SEQ ID NO: 73530 - DNA, 1857 bp, Homo sapiens; identical to SEQ ID NO: 63817

SEQ ID NO: 73531 - DNA, 1063 bp, Homo sapiens; identical to SEQ ID NO: 63818

SEQ ID NO: 73532 - DNA, 5286 bp, Homo sapiens; identical to SEQ ID NO: 63819
  misc_feature (1)...(5286): n = a,t,c or g

SEQ ID NO: 73533 - DNA, 1569 bp, Homo sapiens; identical to SEQ ID NO: 63820

SEQ ID NO: 73534 - DNA, 2858 bp, Homo sapiens
  misc_feature (1)...(2858): n = a,t,c or g
tgaaggatgtagtgaggatggctttgtagccttaggactgggcagtgatcaacgcagtaaatgaaagctgcgattgccaggtgagggccccggtgctctgtactcattttattgtgcccctatctgaacaggattccgtagaaatgacttagatgcttatctagtatttgacattgagatatttattttgtgaaacaatcgcaagcgattttaaatccccacatactatttgattaagtgcaacatggtacagtcatgtgtaatctctttacacgatagtgcatctagtccttagcctttagttattgcacaacaattataaagaccagtgaccaggacacgtggactctgacaggcagatcggcctacacaacgaaaaatcagaacagtacaccaactggaatggtcaaacaatttaagtcaaatgttttaatggtgcaattaaaataagggttcaaacatgttttcaatatattaatttctttaaagtcatgttcaggcaaggtgctgtttaaaaaaccactattagctttgtccacacatgtaagttatcaaaagttacccaaggtaattttgacgttgaatgcagctttaaacaataaaaaaatggtattaggtttacttctcgaagcaaagagagcccccaaccttgtaaactaaacattctgacacaaatgcacaaaattaagttggcaacattaattttgagatgtagtgtgatgctgagcaaacttttggtcttgactcttgaaataattaaagagagcagttctccgttttggccttcaggaagggaaatctgcccatggaactctcccaatcagattaacaaactgtttcgattcccatataaacctggaggacacaggaaacgccagatggaaaaactggctctggctttctaaccccatcccatctgtatgagaggacccatcctgtcatgtgcagtgtttgatgttttcacatacgctcctgtctcaggaaaacattcaagattagctagcccccaggtggttgtacctcattggtgaaaggcttgggatggtttgatctcatggctttgcctgatgttcacataaatcccactgtccttacccaagctgatagcgtgttgtgtgtgtactatggctacttgcttcccaaatgcacaatttaatgtggaaaataagttgctctgcccatctcttctgtcaccgaaatgaaaaggctcacagaattcctctccccaccctccagacacattgcacactgacattctctggaagtgtggaaggccgcatacaaagtatagaagtgaaaaagtccactgtgcaccggctgcctgaagaaaagctttggaggagtagaggaggcaagttgttcagctttgctcttactgtgctcatttgctgccacaaacatgggtagacttttaaaagccatggtgtgggtcacgtataacttctggatccaccatgattcttccatggtctcctttgccaaatcaaagctttgcagcaggcaatccagacagttgtcactagatgcagggaatgacacctcacagtggaatgggcactggcaggcagagggcagaagcagtcctttaagaaacagtagctgtggcacagaggcccagtgcctacagtacagatggcggccaagaaccccacacatccagctcgatgtcacaatatggggaacatctgacatcacccatcatggctgatcagcagcctccacaggtgggtctttcaggaggcaggaagtagagcgagggtccatggctgagtgcattatagtgatataaacatcatccatgtttggcatgacaaaaactttctgaaactcttgctccagtttcttctctatccagtctgtcacatgaactaaagtcacttctctctctccaagttttggccgagctttcagctccacatgtggtggctttcggaaaccataccatactcggtcagtcgggggtggtggaatgttgaccgccaaggttcctctacattcttgtacttcaacagtgagcagcaggggtgtgttggagacttcttcgatcttctttttaataaactctgtctctgttgctttttggaaatattttgacttggtaattttatcaacaaacctcataatcttacttgttcgatgacctccaacgtacccttcagcccctgggaggagctgtttgtctcccccgctgggctctggggcatcgtcttcctcggaggagccagcgctggaggattcctcatcgctgtccgccagacagaatgcccggggcctgcaaccttctttgccaatttctccaaccttcagggcttcaacaagaggctctttacctagtttggtcaaattcattttggtctcgagagtcatcagaaaggacccattgtaggacatttccaaatcaatccagagtccttggtgatcaacgtatggcttgaaggcctggaggatttttggcacagccacgcccatgtcaagttccgtcagagtgagctcattcataaagtaggggagctttattttgctgagtttcatttggatcttcttagacaccagatcagaccagtatttctctcctaagaagtcccaaaatattcttccaagcaaggcattcacccaggcttcctgttcttcctcctcagagggtggaacctctggcaacttcttcccagctgtggggctgctctccgcactctgcagggggctcctctgggggcttcggctttcctgggggacacacctgcccatgtacacgctgtagtcgagaagcatcttctgccgaacgaagcctgccagctccttctgctttggctgtgacatgatcctcgtgccaancttggcgtantcgtcgtacgcctgcg

SEQ ID NO: 73535 - DNA, 1123 bp, Homo sapiens; identical to SEQ ID NO: 63822

SEQ ID NO: 73536 - DNA, 2133 bp, Homo sapiens; identical to SEQ ID NO: 63823

SEQ ID NO: 73537 - DNA, 595 bp, Homo sapiens; identical to SEQ ID NO: 63824

SEQ ID NO: 73538 - DNA, 2078 bp, Homo sapiens; identical to SEQ ID NO: 63825

SEQ ID NO: 73539 - DNA, 417 bp, Homo sapiens; identical to SEQ ID NO: 63826

SEQ ID NO: 73540 - DNA, 2378 bp, Homo sapiens; identical to SEQ ID NO: 63827

SEQ ID NO: 73541 - DNA, 1820 bp, Homo sapiens
tttttttttttttgggggaagaataagacccacacacgtttatatatattgggattaagaaaatgaatcacaagccatataaaattgagataaattggaaaactctaaggtaagtaccatgtctattcccagctgcctagaacaaagatccattaaaaatccatggtgtgaatttccaccatgggtcagaaggatgggaagactaaggttttcctggcaactttcccaaccgcctcccaccaggtgcagcgaggtgctcccctgggctgaggaattcaaatacagggtgtgtttctaaacgctgggaacgaggcagatcttgctgccacaccgagtgggagcccgggagctagggattctggaaatccaaacccagggcctggccattcaccaggctgcgttgaagaatgaagacaaggagccaggcaagacggtttctccgtgcatccatcttaagatgcagccatgggaaggaaactgactggggatgggagttgtgttcctccccaaaactcatttctttgggttgcccgatgtcaactcctgccttagacacccatcccaaaccctccttctccttcatttttatcccttcatgttacaatgaagcagtgaatgctgcttcattgtcttaaaactgaaacagaaacggggaggtaggtagcatggatgggggagtgcacgaactctataggtacaggatgaggatgccccgcactagctgctatgaaacctgagtcctctgttcactctgcacacacatcacagagggctgctggccggtggccaaggcatttggtgagggccccatctcatggaccctccagatgccccttcatcctctctgagcttgaacactggggcttgaaaggtggccaaagagctggcgaggacacaaatatggggcattcaaactcctaggaaagatcacaattttgctcccactcccaaggggactaggagtggggtgaaagagcccatcgtactagagcgaatgtgaatccttatccccagaggtagaatcattttacccagtaccggaaacacgagcttccagttcttgtttttacagtaactcctgatagcagaccttgcctcctcccacttccagtaccctctgccccttgcaaaggggccacaaagtgcatgcacggctaaccgtgtggatgctgcccacagccacggccactcacccctcgctcgtgtgcacagcctccccacatatacacgggtacacgtaacgcatggtggccagagagacatttacagtgtgagtgtgaggcccggcttaggcctgcatccttgggcagggtctgcccttggtcccagggtcctaaggctgctctgcagccagccccgtgccttagtgtttgatctcgaggatggagggattgtggtccaggatggcgaggataatcttgtccatgtactgcctcagccggaagttgatctcctcctgctccttcagggcttccattagctcatcgcgcgaggcggtgtctatctccgcagccagagactgggctttagtctgggcagcaaagaggttttttgcttcgtagaggctgaggctcaaaatctgcccattcaagtcgtcgttctgatcccgcagcttataattctcctacagagagaaggacgaaggcgacatcaaccccaagaggcatccacagcccactggaacccacttctccacatccaccatccccgacctgccgccagcgccattcccacagatcctgcacaggaaacccacgtggtgggcccgggcaccctgccccactggacacagagactgctagacccacctgcttgagccg

SEQ ID NO: 73542 - DNA, 3734 bp, Homo sapiens; identical to SEQ ID NO: 63829

SEQ ID NO: 73543 - DNA, 1262 bp, Homo sapiens; identical to SEQ ID NO: 63830

SEQ ID NO: 73544 - DNA, 746 bp, Homo sapiens; identical to SEQ ID NO: 63831

SEQ ID NO: 73545 - DNA, 1774 bp, Homo sapiens; identical to SEQ ID NO: 63832

SEQ ID NO: 73546 - DNA, 1729 bp, Homo sapiens
cgctgcgcagttttgttctgctccagctgttcgaaggtgatccaggttggccaggttcatggcggcttgatgggaattattcagagagctatggtcaaggcttgtcctcatgtctggtttgaacgctcagaaatgaaggatcgacacctggttactaagagactaaaagaacatattgctgataagaagaaactacccatactaatttttcctgaaggaacttgcatcaacaatacttcagtcatgatgtttaaaaaggggagctttgaaattggaggaaccatacatccagttgcaattaagtataaccctcagttcggtgatgcattttggaacagtagtaaatacaacatggtgagctacctgcttcgaatgatgaccagctgggccatcgtctgtgacgtgtggtacatgccccccatgaccagagaggaaggagaagatgcagtccagtttgctaacagggttaagtctgctattgctatacaaggaggcctgactgaacttccctgggatggaggactaaagagagcaaaggtgaaggacatctttaaggaagagcagcagaaaaattacagcaagatgattgtgggcaatggatctctcagctaagaggacggatgacagcctttagatctagaactagcccttagaaatggaatggctttttttgttttgttttgttttattgttttgtttttattattgttaatcttttctacagaatgattgtctctacctctttatgccagaggcagaacctacaggtgccctttttggcttttgttgttgttgtaacattagccccatggattgtaaggtggtttactgagttaaaacagattctgcttttgtaaaatgatggcatcactgtggactgaatgaaatatttgtatagaaaaaagtgcttgaaaagtgtgtttggaactcatcgatagggtaattctccaaaaatgcccaaactctctttctgtaattagccttgccactttcttcagtcacttaaatggtgagattacacatcagtgcaagatgaccattatggttatggtctactgcaaggttgaaaggaaaaatggaggattgtatttaggaaaagggacaactttgtggccacctgctctgaaagtcaaaaggaaatgtaaattagtgtcattagtgtgttggaagagaaatactattcagtaagcttcgccaaagaaaagtgagtcaaagttaatgtgtgtgtgcatttatatgtaggcagctcgtagaccacattttagccagcaactggtaacaaagagcttagttttccttgtttgaatgctgtagatctgtacctagtacccctcccatctactgatttgtttgtttttgtaaccaaacacattttcagatagaaggagccttaaaaaaaaaaaaaatcacattgagtaacttcagtataaatgaatgaaaggggggggagctacccctcatcctccacccctttgggctttttattcccgaattttcccagtcttttaaacaaaaaaaggactgatataattattttttggaaactgagccttaattttttttagagggggaaataagttttccccaactcacacagcataagcaatgtttgacagcaatataatgccgttgtaaactactgagagtattgtatctgttctggtaaccatgtacagaatgtgaaactgtcttatgaatataaataaattctatatttctaaaaaaaaaa

SEQ ID NO: 73547 - DNA, 2049 bp, Homo sapiens; identical to SEQ ID NO: 63834

SEQ ID NO: 73548 - DNA, 1771 bp, Homo sapiens; identical to SEQ ID NO: 63835

SEQ ID NO: 73549 - DNA, 2283 bp, Homo sapiens; identical to SEQ ID NO: 63836

SEQ ID NO: 73550 - DNA, 1498 bp, Homo sapiens; identical to SEQ ID NO: 63839

SEQ ID NO: 73551 - DNA, 778 bp, Homo sapiens; identical to SEQ ID NO: 63840

SEQ ID NO: 73552 - DNA, 1278 bp, Homo sapiens; identical to SEQ ID NO: 63841

SEQ ID NO: 73553 - DNA, 1343 bp, Homo sapiens; identical to SEQ ID NO: 63842

SEQ ID NO: 73554 - DNA, 916 bp, Homo sapiens; identical to SEQ ID NO: 63843

SEQ ID NO: 73555 - DNA, 3957 bp, Homo sapiens; identical to SEQ ID NO: 63844

SEQ ID NO: 73556 - DNA, 1368 bp, Homo sapiens; identical to SEQ ID NO: 63845

SEQ ID NO: 73557 - DNA, 2173 bp, Homo sapiens; identical to SEQ ID NO: 63846

SEQ ID NO: 73558 - DNA, 2003 bp, Homo sapiens
  misc_feature (1)...(2003): n = a,t,c or g
cttcgtactaaaaccaaaacacccacattcaacatcacccttatttctgaatgggtgatacccattaggagctgtgtcaaacccccttacatgctgttggttggaaatataattatgatgcctgatgcacaaactatagaatgtcataactgtaagctgttcacttgcattgatgcaacttttaatcccactacaagtattctcttggtaagggctagggagggggtatggataccagtttctctacatcgtccatgggagtcttccccctctattcacatagtcaatgaagttcttaaagacatcctcaaaagaacaaagagatttatttttactcttattgcagtccttgcaggactacttgcggttactgcaacagcagcaactgctggagttgccatccgcagttctgttcaaactgctcactatgttgaagcatgccagaaaaattcctccagactttggaattctcaggcgcaaattgatcaaaaattagctaatcagattaatgatctccgccaaagtgtaacctggctgggagatagagttatgaacttgcaacaccgtatgcaattacagtgtgattggaatacttctgattattgcataacgccttatgcttataatcaagatcaacatagctgggaaaatgtctcaagacatttaaaagcctgggatgataacttaaccttggatatttcacaacttaaagagcaaatctttgaggcttcacaagcccatttatccacagttcctggctcacacatttttgaaggcataactaaacaattacctgattttaatcccttcaaatggctcaaacccgtcagaggatcattgttgttactggcattattaatattggtatgcttatgttgtctccttttagtctgcagatgcctccaaggagtccgaaaccaagtccgaagtcaacgacaagcaatgatggcgatggcgatcctagttaataaaaaggggggagatgtgggctgcaagccacccaggtgccgaggcaagagaccgaggacatgagctgttccagtataataaaatataaaacaagaatagttataccagatatagatcttagatatgattatatatgaatataattaatcattagtttgtagcaattactctttattccaatattataataatcctcactctataatcataacctacgaaaaaccaggccatacagagataggagctgaggggacatagtgaggtgtgaccagaagacaagtgtgagccttctgttatgcctggacagggccaccagagggctncttggtctagcagtgatgccagcgtctgggaagacgcccgttgccaggcggaccgtggtctatcggtagcgaaaanngnnagggaacacccactacttagcagaccgggaaagggagtctccttttcccctggggagtttagagaagactgctcctccacctcttgtggagggcctgacatcagtcaggcttgcctgcaattatccagaggcctaaccgtctccctatggtgctgtgcttcagtggtcacgctcctagtctgccttcatgttccatcctgtacacctggctctgccttctagctagcagtagtcaattagtgaaagtactaaaagtctctgatatgcagaaataatggcataagctatctttctctctgtctcctctccctctctgcctcggctgccaggcagggaagggccccctgtccagtggacacgtgacccacgtgaccttacctatcattggagatgactcacactctttaccctgccccttttgctttgtatccaataaataacagcgcagccagacattcggggccactaccggtctccgcgcattggtggtagtggtcccccgggcccagctgccttttatctctttgtcttgtgtctttatttctacactctctcgtcgccgcatacagggagagacccaccgaccctgtggggctggtccgtacactcttgatagtggcggacgcgtggg

SEQ ID NO: 73559 - DNA, 857 bp, Homo sapiens
tccagataccaaaagctcctcgtccgcctcagtgacgtttacaacaggtcgtttctggagaacctgaaagtgaacacggagaatctgctgcaagttgaaaacacagggaaggtgaaagggcttattcttacccttaaaggagagcctggtgggcagacccaagcatttgacttttactcaagatattttgcaccgtgggttggtgtggctgaagacccagtgacagggtctgcacacgctgttctcagcagctactggtcccagcatctggggaagaaagaaatgcatgcttttcagtgttcccaccgaggaggagagctgggaatttcccttcgtccagacggaagggttgacattagaggaggtgcagctgttgttttagagggcacactgacagcctagaggtggttatgctgtgacgctgctgtctctaaccaccaagtattttctgcttaaaaagaaatgtaaggggctgcctttagcaaatgtgcgtagtagtctacttaatcctcatgttaaaaatcgaaaaatgggccaggcgcagtggctcatgcctgtaatcgtagcactttgagaggccaaggtgggtggatcacctgaggtcaggggttcgacaccagcctggccaacatggtgaaacctcgtctctactacaaatacaaaaattagctgggtgtggtgccacatgcctgtaattccagctacttgggaggctgaggcatggagaatcgcttgaacccaggaggcagaagttgcagtgagcaaagatcgcaccactgcactccagcctgggcaacagagtaagactccattcacacacacacacacacacacaaaattgaaaagtgaagacattt

SEQ ID NO: 73560 - DNA, 878 bp, Homo sapiens; identical to SEQ ID NO: 63849

SEQ ID NO: 73561 - DNA, 1263 bp, Homo sapiens; identical to SEQ ID NO: 63850
  misc_feature (1)...(1263): n = a,t,c or g

SEQ ID NO: 73562 - DNA, 2300 bp, Homo sapiens; identical to SEQ ID NO: 63851

SEQ ID NO: 73563 - DNA, 1929 bp, Homo sapiens
tgactgtgtatatatatcatataatccatataaatgcagaaacatttattgaaagacatttcgaagccatcgtgtttgtatttcatgttcatgacaataaaacttgtaaacttcagtaacagttaaaccttctttaattatggattagccattaacatttttgaaacgtggaccatttaacctcggcctaccccctccaactgtcctggtgatgagttcattagctaagttaaaattaatttgaactttgatctaaaccaaaacaaatcgggaaaaataaagctgtaaaggaactttatcaagctttccaaaaccaactaaaaattacttgaagttttccgagtgagcattgcctgtgccagtattcttcattataggattataaactcgtttttttcccaaagccgcatgtctacgccaggcagaggagtaattattcagccaatttcatggatggtaaacgatggatataaataattgatagcacctagaggcttccagtttgggtggaaggctaaaagtagaggggaactcactcacttgagaaatgatatttaagtgaataaatagttctcttctatgaaactattactatttagttctctggaaaacttaagtgtattaatgattagaacatcaaatcctaagtaaagaaatgacattttaaatataaaaagccaaactttaaataaatcatagagacctcagacataatataggaaagaattcttttgtccttgtttacactgtgtacatagtacaaatataattttaaagctacatcctataacatttaagaaataacagtagtttcaaaatgcttaagatgaggagaaaaatgccttagaagactaggtttctaaaagtcagaaataaaagtacaagttatttttcttctatccagcaactttataaagcaacttgagtcctgaagaaaagaccgttgttcttttaagaaatgggtcttctcgaattataaactttaacaccattttgcatcgaagaatgagaatatttagtgagtaatgcacctatggtttgcttctctccacacaaatcttgaatatatggagcaatatcttcttctgtccacttctcccttagagagaaaaggctattaaaacgttcctgattatcctcaggtaaatcatctactttcagcaaaaatatgatttctggtctcgagtgtctatccaccagcgctaaacccttaagctgatcaagactagttaccattccttcaggaacactctgctgccacacttcttgaaactcagcgagattgaatttcaccgcattctgaagtagcattcgtgctgctgctctacatattttatcagcatccaactcaaaataaacttcgccttcatctacatatttcttcccataacatttaagacagtgttctatcatttcctctggctccaatggtccgagttcctgaaggcatgtgttcaaaggaactttaccaaaagaccatgattcagaatccacaagctgagttacatgattcagaagtttcatctcataatcaaattcaagaatcctccaataacctccaatcttacaggcatttagaacttgtaattgggtcattatttcttcctcacttgcctgaatttgatcaagcaaatcttcagttgtatattttgagctatttgaatccttctctttttgactgtcaggtccttcatatggattttccatcaaaagtttctttagcttctttaacttgggtctacgtcttcttaattcccaataattattagaaaaaccaaagatctcagtgtgaataatgttacagtgtgaatcttccttcttcaactggtccggagttttacaaccaggaatgaaaagcaacatattggaagtgtctgctatcttcaagtcgtatgttttgtctttactgcacagcacagcttgctcgtc

SEQ ID NO: 73564 - DNA, 2017 bp, Homo sapiens; identical to SEQ ID NO: 63853

SEQ ID NO: 73565 - DNA, 1562 bp, Homo sapiens; identical to SEQ ID NO: 63854

SEQ ID NO: 73566 - DNA, 2931 bp, Homo sapiens
caccagatcatctagtcaatatatagaatcattttggcagtcatcacaaagtcaaaacttcacagctcatgataagcaacgttcagtgctaagctcaggatatcaaaaaactccccaggaatgggccccacaaactgcaagaataaggaccaggatgcaaaatgacagcattctgaaatcagagcttggaaaccagtcaccatcaacctccagccgacaagtgactggacaaccccaaaatgcatcttttgtcaagaggaaccggtggtggctacttcctctgatagctgctcttgcctctgggagtttttggttctttagtactcctgaggtagaaaccactgctgttcaagagttccagaaccagatgaatcaacttaagaataagtaccaaggtcaagatgagaagctgtggaaaaggagccaaacattcctggaaaaacatcttaatagctcccatcctcggtctcagcctgctatcttactgctcactgctgcccgagatgctgaagaagcacttaggtgtctgagtgaacaaattgctgatgcctattcttcttttcgtagtgtccgtgccatccggattgatgggacagataaagctactcaagacagtgatactgtcaaactagaggtagaccaagaactgagcaatggatttaagaatggccagaatgcagctgtggtacaccgctttgagtcatttcccgcaggctctactttgatcttctacaaatattgtgaccatgaaaacgcagccttcaaagatgtagccttagtcctgactgtcttattggaggaagagacacttggaacaagtctaggcctaaaggaagttgaagaaaaagtaagagattttcttaaagtcaagttcaccaattctaacacacccaactcctacaatcatatggacccagacaaactgaatggcctctggagccgtatttctcacttagttctgcctgtgcaacctgaaaatgccctgaaaaggggcatctgcttataagaagtgagagagaagaaaaatcatgtcccaagttctgagaattgttcacactttctaaccagagacagaattcagagctctttttgaaagaactagtttctttttaaagaagttaagtgcttacataaacatggaacatataaatcattcattcaacctaattatctgtgatatgagagaatcatttcagtttccattgagagctctgttaaaggtatcttaggagtgcagattatatgcagttccttagagaatctgttttgattctgggctgagttattacagttatggtatgaccagtgagagggatttgtgtcctttcttatgaaccttcctgattttttaacttagatttctcactaagtttcctgagttattagtaagattgctccctaaatgtaaccagggatttttccattatgttcccttttataccatttaggtgtgagttccttagcttctgcctataggaacataagtaatgaaaggtcatctaggtgtgtgtttggaatttttttcttttgttttttggaaaatggaaagaacaaggcaaggaaggaaaattaatggggaagctgaagggaggaaatgttacagtaatccactgagatgtagtttagtcaaacataggtatatgaactgttaatcttggtggattccgttgggatttgttttttacatctcctttttccttccttgaagaaaaattcttggctgtcccaaggattcttcatgtatattgcaaaatttaatatatttgttcacttgagtcttaagagtaggtcaggccaaggcaggtggatcacctgaggtcagaagttcaagaccagcctggccaacatggtgaaaccccctctctactaaaaatacaaaaattagctgggcgtggtggtgcatgcctgaaatcccagctacttgggaggctgaggcaggagaattgcttgaacccgggaggcggaggttgcagtaagccgagaccatgcttattgccctccagtctgggcaacaaaaatgaaactccgtctcaaaaaaaaaaaagtaggtcaattcgaaacagtttatttgggacacaccctgaagcttttgttttgaattaaaaaatgagtttcaggaattgacaaaccatttgttaaccagctgtcctgggctattgaagaagatttcattttccgcgcatccacttgttgcagtccaagtcctctagtgcaacgccatagcaaatataaagatttactatgcacgtgatacattttatggagtgcctcaagccaagatagtgaatttatatgaagggtgtgaaatgtatttctttactactatagtagtttagttataactttgcatctataattgagctttctcatctgtcaaatgctatggttttcttaaaatgttacaattctagatctatccaccttgtttttttattgtctacaaaccattaaatgtaaatattgtttttagagtcagtcattggctttgtcatttaccctttgagagttccacaagtggtagtagagtggtttaacgtctttcctctagtactaccagtattcataaatgtataccccttactgtaatttgttcctcttagaagtcagatcatctgatttatagaggattatgaaaaccagagtttttgaaaaggcttattttatacatacgtattatatagagaaacaaatgtttttattaaatgtttcattgacccaagtaatttaaaagtaatatgttacctatgtctttcaggaaaaataattatagcagctgatctgtaaatgactttaaaagctattttagtaatttaaataaatttactttcttggtttatactctctatgtgttataaacttaatgatttatcatctttaaaaaaagaaatccaagtattttccttgaacaattgtagcaactctggctaggag

SEQ ID NO: 73567 - DNA, 1310 bp, Homo sapiens
ggaattccagagaggcgtgttggacaccatgactttccgtttctgttggctgcgcctggtcactgctatggcagaataaagcctggagagagacatagcctttcaactcatgcttgtctgatctttacctggttttacagaaaagcacagtagtgaggttattttgatttagagctgttccccatctgatgccaggatcccttcaacagtggtggaggaggtttagacacagtgttgagtttgattccctctgtcttttctcgtagtttggcctgtcactgctcctcatcctcctgagccgtggtgaagacctacagagttcagaccctgctacagaatcaacacaaaataatcagtggtcagtgcggactgtttcttctcttattttaagttctttgaggtaatcttttaaatttttttctcctgatattattatgggtcttccctgtcaggacggaggtgatgttcatggcaacacgagaacttctgcggattccccaagcagccctggccaagccaatctctatacctacaaacctagtgtccctcttttctcgctatgttgaccggcagaaactgaacttgctggagacaaaactgcagctagttcaggggatacgataaaagatctccaaatgtgtcctgtacctccttttggctgccacctgcactgctgccatcaccaatggagtgtttttaatgagggaaggaaggtagctttttccccaaagcaaagtcttgtgggatcgattcctgtttacaggggttgtctctctaaatgtcagatatttccccactgctctatgaaatttggctgggtgatacttctgctggtttctttaccttctgtgttacagttctgcatgtcctacttttactcagttctgttttgcattttctttgccctagagacacaagtgtaatctctccctttatccctccacttactccacctcagagtagattgtagcctgccaaaggattccttccctcatcctattgaagttgttttttcgttgcccccatattaatatgactatagaagagccaattaagtagaaatcaagatatacacacacacatagatacacacacacacaccccatacatgtatttatgtggtcttcagagggtccttaaagaatgaattttagattgaaaaatatttagttgtctcattacctcttctaaacacaaaccagctgatgtattttaatctgtttctgttctatcttgtaattaatttggtgggttccacctgttttaacataaataaagagtatggcaggcacgtttaataaaaaaaaaaa

SEQ ID NO: 73568 - DNA, 908 bp, Homo sapiens; identical to SEQ ID NO: 63856

SEQ ID NO: 73569 - DNA, 1364 bp, Homo sapiens; identical to SEQ ID NO: 63857

SEQ ID NO: 73570 - DNA, 1816 bp, Homo sapiens; identical to SEQ ID NO: 63858

SEQ ID NO: 73571 - DNA, 673 bp, Homo sapiens; identical to SEQ ID NO: 63859
  misc_feature (1)...(673): n = a,t,c or g

SEQ ID NO: 73572 - DNA, 1520 bp, Homo sapiens
gaaacttatctccataagttaaaacaaataggttgaccttatatggtttactttttcccaggagtaaagaaaattgtgttgtggataacatcaaagtgtgcagtaatgacactgggagtggaaaattcaagtgtgtttgcatcactatgagagtgcctcggaacccaactatcggagataaatttgccagtcgccatgggcagaagggcattttaagcagattgtggccggctgaggacatgccttttactgagagtgggatggtcccagacattctgttcaatccccatggttttccatcccgcatgaccattgggatgttaattgagagtatggccgggaagtctgcagctttgcatggtctctgccatgatgctacacccttcatcttctcagaggagaactcggccttagaatactttggtgagatgttaaaggctgctggctacaatttctatggcaccgagaggttatatagtggcatcagtgggctagaactggaagcagacatcttcataggagtggtttattatcagcgcttacgccatatggtctcagacaaatttcaagtaaggacaactggagcccgagacagagtcaccaaccagcctattgggggaagaaatgtccagggtggaatccgttttggggagatggaacgggatgcgcttttagctcatggtacatcttttctccttcatgaccgcctcttcaactgctcagatcggtcggtagcccatgtgtgtgtgaagtgtggcagtttactctctccactgttggagaagccacccccttcttggtctgccatgcgcaacagaaaatacaactgtactctgtgtagtcgcagtgacactatcgatactgtttctgtgccttatgtttttcggtattttgtagctgaactggcagctatgaacatcaaagtgaaactggatgttgtttaacttgatgttgaccttttggattaagaggactatcagattaaagcaaaatgtaattttaattcaatgaagatatcattaccaggttactcttgagatttttcaacggtgttagaactctcaaccaagacctgaaaaccaagtatgcaaggtttctgaatctctctggtagattaactattgacaatgattttctgttatctttgttcaaaaagttcatgtcttctcaaaatatgaaatattgataaatggaagagcatacggtgacaagtctcctttccaaccccaggttccctacaccctgctctcagcaggcagtgagtgtcacacacctgttaatccatcttgagcaggacagtactatacaaatagaatgcaagctgtaatgtaattttatattttcttatagccacgttgaagtaaaaacaaacaggtacagtgttttttaccagctttatagaagtacagttgttacatatttaatgaatacaatttgatgggtctgactatatgcacacacctttgataccatcaccacaatcagggtaataaacatacctgtcatctccaaaaaaaaaa

SEQ ID NO: 73573 - DNA, 598 bp, Homo sapiens; identical to SEQ ID NO: 63862

SEQ ID NO: 73574 - DNA, 367 bp, Homo sapiens; identical to SEQ ID NO: 63863

SEQ ID NO: 73575 - DNA, 1688 bp, Homo sapiens; identical to SEQ ID NO: 63864

SEQ ID NO: 73576 - DNA, 1575 bp, Homo sapiens
ggatttcgtttcctccggctgggagtggccgctctaggcagcgttgaggtcgcggggttgaggggggttgtgaaaggagagcggcctctcctctatggtcacggggccggggcacgcttcccccactctgtcttgttacttccggtagcgaagcctctccctcttcctctgctcccgcggggtctgtgctgagaataatggcccggttggcccgggacgagtggaatgattaatgatgttttgcagcagttttctacgtctgaaattttttatgtctctggaacccagaatttgctaagagatggaggaacctcagaaaagctatgtgaacacaatggaccttgagagagatgaacctctcaaaagcaccggccctcagatttctgttagtgaattttcttgccactgctgctacgacatcctggttaaccccaccaccttgaactgtgggcacagcttctgccgtcactgccttgctttatggtgggcatcttcaaagaaaacagaatgtccagaatgcagagaaaaatgggaaggtttccccaaagtcagtattctcctcagggatgccattgaaaagttatttcctgatgccattagactgagatttgaagacattcagcagaataatgacatagtccaaagtcttgcagcctttcagaaatatgggaatgatcagattcctttagctcctaacacaggccgagcgaatcagcagatgggagggggattcttttccggtgtgctcacagctttaactggagtggcagtggtcctgctcgtctatcactggagcagcagggaatctgaacacgacctcctggtccacaaggctgtggccaaatggacggcggaagaagttgtcctctggctggagcagctgggcccttgggcatctctttacagggaaaggtttttatctgaacgagtaaatggaaggttgcttttaactttgacagaggaagaattttccaagacgccctataccatagaaaacagcagccacaggagagccatcctcatggagctagaacgtgtcaaagcattaggcgtgaagcccccccagaatctctgggaatataaggctgtgaacccaggcaggtccctgttcctgctatacgccctcaagagctcccccaggctgagtctgctctacctgtacctgtttgactacaccgacaccttcctacctttcatccacaccatctgccctctgcaagaagacagctctggggaggacatcgtcaccaagcttctggatcttaaggagcctacgtggaagcagtggagagagttcctggtcaaatactccttccttccataccagctgattgctgagtttgcttgggactggttggaggtccattactggacatcacggtttctcatcatcaatgctatgttactctcagttctggaattattctccttttggagaatctggtcgagaagtgaactgaagtaagtatgttttaatggttgtcacaacaggggatgggaaagaaataccaagtgagagaaagatcctcttttatttctcacacttgaaataaatcctccatccacccagaaaaa

SEQ ID NO: 73577 - DNA, 1719 bp, Homo sapiens; identical to SEQ ID NO: 63866
  misc_feature (1)...(1719): n = a,t,c or g

SEQ ID NO: 73578 - DNA, 820 bp, Homo sapiens; identical to SEQ ID NO: 63867

SEQ ID NO: 73579 - DNA, 1220 bp, Homo sapiens; identical to SEQ ID NO: 63868

SEQ ID NO: 73580 - DNA, 930 bp, Homo sapiens; identical to SEQ ID NO: 63869

SEQ ID NO: 73581 - DNA, 493 bp, Homo sapiens; identical to SEQ ID NO: 63870

SEQ ID NO: 73582 - DNA, 1917 bp, Homo sapiens; identical to SEQ ID NO: 63871

SEQ ID NO: 73583 - DNA, 870 bp, Homo sapiens; identical to SEQ ID NO: 63872
  misc_feature (1)...(870): n = a,t,c or g

SEQ ID NO: 73584 - DNA, 6336 bp, Homo sapiens; identical to SEQ ID NO: 63873

SEQ ID NO: 73585 - DNA, 1572 bp, Homo sapiens; identical to SEQ ID NO: 63874

SEQ ID NO: 73586 - DNA, 1927 bp, Homo sapiens; identical to SEQ ID NO: 63875

SEQ ID NO: 73587 - DNA, 1770 bp, Homo sapiens; identical to SEQ ID NO: 63876

SEQ ID NO: 73588 - DNA, 1836 bp, Homo sapiens; identical to SEQ ID NO: 63877

SEQ ID NO: 73589 - DNA, 1245 bp, Homo sapiens; identical to SEQ ID NO: 63878

SEQ ID NO: 73590 - DNA, 1105 bp, Homo sapiens; identical to SEQ ID NO: 63879
  misc_feature (1)...(1105): n = a,t,c or g

SEQ ID NO: 73591 - DNA, 1013 bp, Homo sapiens; identical to SEQ ID NO: 63880

SEQ ID NO: 73592 - DNA, 1658 bp, Homo sapiens
ttttttttttttggctgcaccagtgtattttcccatccaaaacatacacaggggaggcttgatgccaccccaggaaacagaataaccccttctagggacttcttagcagagactgatctccatctgcccgcaagggctgggtgtccaatttgtcctgcttcccagagctgcatggtgggtagaggagtaagtggaacataagaacaggcttgcatgactgtgtttatttgaaccaccagatctgttccaataaagagctctccagaccctgcctcaccttacagggaagggcttagagtcagggaagaggggcctgttgctcctgtccctgaaaaaggaggtcaagatggagcccgggcttcctggtgaccattcagactcctcccactgcttgtccctgtggaggacacaggacgggctaccccatctcaggtttggggtgggatcgctcacagtcacccccggaacagccccaactgagggtggggggcctggccctggacacctcatgtctctgggccgggaagccacgatccctcatccatcaggcctgctgccgctctccaccccagcgggggatggacatctgtgctccctcgcagtacactgcggacccaggaggtcccctgcatgacattcctctccttggcctcaggccagcaggcggctgtactctgccagagcagaggactttctcaccccatcccagatccgggcagcgtagtggaaccagttcttctcggtgaggatcgtgtgtgacagctgtggccgggccatggacatcacttggctccggagcttgctcaccaaggactggaaactggggtggccacgatacccaggcagcagggagaagagtgggctggaaccaggtcctgctcttggtgggttttcactctctgcttcactgtccatgaagggtaccaggaataagttgacctcagagtccaggaagtcaggtggaagccccgggaagacattgcattgtaacatggacagagttcccttgtaacgcaggtgggagtgggccatgagctggtcaatcatcaggtgcatctgccgcagcttccgaggacagaagtcctctcggcgagctttgttctgcaagaagactaggtgggggtagtactcggtgccttcatcggagcccgatgagctgctggactcgtggctgggggatggggtggagggcttcaccatctctgctgtctgcaggaacctgtagagactgaggtctgtgaaccagtcctggacaacaatcaccacatggcagaccgtgaaaaggaaggcagcaatctggagtgactgcatttcaacgtaagtgtggggaaggttgtactctggaggcagtttgcggtcattattgatgagatggtctaggatagaagggctcaggatgggctgtgtgtccaggaaaacaatccgttcttgggtaataaagaagtcgatgccactggtctggttgccccctcgttccttcatttcagcgctctgggcccggaaaacataagtcctctggtcctcctctggagtgttggctgacaacaatgacatgaccatggacttgcctgtcccctggaggcccaggacaccaaccaccaacacatcagtctgatccaacaggtactcgatgccactgtcacgaattccacgtctgg

SEQ ID NO: 73593 - DNA, 2108 bp, Homo sapiens; identical to SEQ ID NO: 63882

SEQ ID NO: 73594 - DNA, 2017 bp, Homo sapiens
tgcaaggaaaagtcacctacctccccaagctggtgcccacagagggggaggcacctccacctgacgcagggtgtctgagcagcagtcccagaagaggtttactcaggggatttggggagcgccccctttggaacaaaagtacaggtatgtgcccgaatcctgcctcgtgatgggccttcatgatacgaaccccccagcccttaaaaaaaaggttttatatgaaaggttccattttgtttctgtataaaggcttttatcctgtaaggaaaaaaaaaaaacccaaaaccctagacataataaatgcctgttttctacaaaaacaatgtctaactctgggtggactgatctcttctcaacagcccagggcagggctggtccctcattcacctgtgtccacagggccgaagacactgcacacactaggacaggatttgattgaatttaaatcctgccacccaccaaggagacctggggatatttaatgtttgagggccacactaaacgatcactgcagagaaccacctcttttctttactgtagtttaagtatgataagtgggctttgctattacttattggaaaaaccagtaagaaaagctaatcttcaggcttcaatgtgatttgacatgcaaacgggaagttttgccaggggttaataaaggttgtgaattccaaattcctagccgaatatggctttgctggtaagccccctggaagggaggttgggagggctgaccagatggtcatcggggcactgggatggaggcacgctggggcctgactgcctgctctgctggagactgcagaatggatggcagatccacagtgcatcccccttccaaacccaggaggcatctgtcgccttctctttggtagacagtctggagacagcagaaaccctctgctctatttttttgccactctaaatatagcagaaaacaaaataaaataaataagataatctttgctgcctccaggtgccctctgagggacagacagctgctccagagttgttcatgaggacaaaaagcccaggcagcctggagacccagctgctttgggtgagccttagctcacttcctgtggttcctgggacttaccaggcccacccccatgcgcatttctccaggcaggttctgaggactctttggacaatttctctttcttctcaacccttcaatctcctaatccacccccctacccccaatattttcatagaaactaagggaattttggaggtgaaagaagtcatctagtttccagtgtccaccctccccattctacagatggggaaaccaaggcacagagagggcagtgccttgcccaaggtcattcggtgagtcagtggtggagcaggcctgaggcccaggtcccccagttcccaccccgttctgcagcccacccctcagtcggccttgggcagggacttcctgtgcgaggggggcacgaggtgggggggcaggctgctgggcagctcgtagccgtcgagcttgatcttgatgaggtgcttggccagcgcgaactcctcctcatcaagcatgccgtcgcagtcgcagtcggccagcttccagatcttgcccaggacgctgttgggcagcttggaggtcaccatctccttcttggcgttgacacctgatatcttgccattgatgggcgacagagtgtagaagagctcgtcgtagacgggcttgtctttggccacgacccactcctcctcgtcggcgccctccttggcaccctccccgtagccctggttgaaggggccctcggtggtgccatcgaaggcgccgccctgcaccagctgcgtgggcgtgctcgtctcctcctggctgatgaggttcatgaggggcgagatcttgttgctcagcatgttgtccactgcctcgatcagcttgggcttcagcgagtggaatttggtgaagtcatagttctcaagctgttcctgcatagccttgacctcagggaagtcccctgcagaaatctggtattctcgctgtagctgaatgtagatttccgcc

SEQ ID NO: 73595 - DNA, 1790 bp, Homo sapiens; identical to SEQ ID NO: 63884

SEQ ID NO: 73596 - DNA, 1543 bp, Homo sapiens; identical to SEQ ID NO: 63885

SEQ ID NO: 73597 - DNA, 2636 bp, Homo sapiens
tttttttaaaattccactgataatttatttcagcttttaatatattttctactataaaaccaagctgtcaagacaggaaaatattactagctttgttattacaaaacaagtgagaatttttaattcacaaaggatgaaaacgcaagacattaatctcactgtacatacaatattacaataaactcgattagctgtagactaataaaacatttaagacttcacacacacacacacacacacacacacacacacacacacgtaccttgaaacaagaaacacaggacaattttaatctttgatatatgttcatgaacaccaagaacaagaacatcactgatttgagtctaattgttttcctgggtatacaatcactaaataagcaagatctaaagcatactgtattattaaggacatctttaggcaaatataaacattctggatttagggctttttctccccacccgaaaacaatctgctttagctatcaagtagtttggtttgttatcaatttaacacgctcacaacaacaaatacagactttctaccacaaaattcacggtgagaggtttttagacagatcatacaaaaaaatacttgttcccaaggaaggcaatctgtaaattataaatgcaaccctaagaaaaaaaaatcctggtcacaaatcactcgctttcaaatattgatggagaaataaaaagtgtacgttgtgggtggagaaatgttggcatggaagagaggagaaaaggtatgaaatgaggaaagtgttatttgccacaggaaatattggattcagttgatttttaaaaatgaggtataacagtatgccagtaaatgaaaaaacaaaaaaattagaaaccaaaatgcacatttccaatggaaaaatctctaaacctcttatagttttattagacatttcatgtacagaagttaatctagaaaaatacattttaaaaatcttcaacagaccatgctccctgtaacaaaacctttccaaaccctgtgttttattatacaaagcaatctacattagtaggtaaaaagaaattctcaaatttagcaatgtcattttccatccaacatccatctaatttacagatgggtttccactattcatactggaattagaatttctgtaataaatttttttctaatgttttctggtacatattaaataacccaaaaggttcctcttgtagtgcatgtgccatttagcaagtctattcagtatttttccagtaccattctcattacagtgatttgcctgtaaatgtagttaatatctaaaagtgcacacagttaactttcccaaataacggaccatttctggaggaaacttaatattcacagaaaagattgccaataacaatgattagaaatgtagggttagaatgtactctgagactatacaacacaattatatacacaagctaaaggacattaagtctttagcctatatttacataaaataatgtgtgtttccacagggtcataccaataactcagtatggtactagatataattaggattgttagctacaattcagtatagcaagacagccctaaaatgccctgaactgacttccgctaactaaaactccagtatatcacagtgttttaagtaatattagtgtgctgcccaaacaagcaactaagatatccagtaaggatgctgtgtaacacagtaaaagacagcaagccttcatcaaggggttattttggggttataatgaattttggcacttaagactgccactgcatgcagaaaccccgaaaaagaaatacacaggtttcaaaatggatatacttcattttgtttaaaatgcccaagagcctttgcaacataactgaaagtattgttctatcaagtcatgaatcttgagaagaaagtacattatccaatttcagggaaaaaaaatacagttttcttaccaaattatccagtgtatatgactggttagaattttaagttttgatttttactgaaattcagagtatgaaatgcaaacattcaggataaaatgaattcataattacacgcagttatatcaacttgcaacaaagcagcaaatatgagggcctaacacacatctcgactctccccttcccttctgatccctcaaaaaaaaagtgcaaaatcaaagagtcactgcttggtccaaaaaataaaatacattgtgtataaacatttgaaatctgatggaatccagcttctattccacaggttgtcttcagtaagaatcaacgtccgaagatggaactcagttccagaagaattaattctacaatctgattctggtacacagtatgaactgctatattaccagtctctttttctggttttaatagagtgggaccaaaaacaattgctatactctgataggtcattcgatttttctctccattttctataactcttctgagatgtcggaaaagaatctgcattgtgtcttggtttggctttggcaactgtctgattaggtccttaacagcagcgactcgctgtcttggttcttgcttaattgcattaacaaaatcattaaaatgattaaatgtaaaaagaggttctggtaattctcgaaaaaacattttgagggctccagtaatgacatgaatatcttcccatttactgtcattcc

SEQ ID NO: 73598 - DNA, 2593 bp, Homo sapiens
cttttttaagtatctgtaatagtttattttaaagactttacatttacaagtagaaacaacatgtgttatctgtgggtaaggtagagcaggaactctaatccaagggtgggggagatcagttggttccttcacagaaaataagcctgttgtgtgggcatcttgcttgcctgtagatctttgttcccagttcaggaggtttttattcagtgcttgcttcatttactggaaaagttcactgggcccacctgtcaactccttcccccacagcttccagctcagcagcaaactgtagggaacagatttactccccagttccttctgtaaataatgctttaagaacagcattccttttggacaatatgtcatagacccaatttttaatactcccaagtcagatatctaactagagagtttaggaaatgtttggtatgatcaaacttttcccttcagtacacaatttaatttacgcagaagagcatcggagacatttgtctcatagatatgattgacatgagtgataggctaaaactaaaattttagtggtttgtggagtggctagaaaacatgaattgtaagcagtttttcagaatttaaaaatctcgttagtttgaacagtagaagatgtaaataagcatagagactgttggcaagttatgtttatcacaaaacaaagaagaaggcacagagggtccctttgacccttgaacttgtggttactaatagtattaaggttggtaatcatgaggaaggacacagaacataaactgggatcttgaagacaggcatgttgataaaagtagccctgaagccttaatattagcaacatcgaagatgggaaagacaggattgatttatttgggaactaagtttacacattatatgtctcaatataaaacaaaagctatggctttagagtttaacaggttaaaaaaaaaaataggaggaaaggcaaaaacaaatgtaagaatagtttttaatccattttctcacaagcagtgcacagtgggccggcaggtacttaagtaccttatcctaatcctggatgtgctcatacaggctgtcaatttgggtccgaaagtatttggaaagctctcctcgctttgctttcaatgttggtgtcaagagcccattttcaatggaaaatggctctggatgaagaaaaatggctttgacctgttcaaaagttttaaggccactttctttcccaattttctgcaagtcttctaaaatggcttcccttacaacttggttttggcacagttcctcaaaggagcccttcaccccaagcttggctgcaaatgagggaagtacatctgtgtcaggaaccaccactcctactaaggatgaccgtaagctctccccgtgtacaaaaatttgtaacactggttgactcctgttgtagatattttctatcttctctggtgcaatgtattctccttgggccagcttgaaaatgttctttttacggtcgatgatcttcagagttccattcgggagccagcgaccaatgtctcctgtgtgaagccagccatcactgtccagggcttcctgtgtcttctcagggtccttcaggtatcctttgaacacgtttgtacccttgatgcagacctctccttcattattcactgtaaagtagttcatgtcagccacatcttccagcttcacgtaattgcaagccaggggcaccccaacgtgacctgatgtccagtccccaggtaatgtaaatgtacagccacctgtgcattctgtttgaccataagcttcatacacctgacatcccattgctgcccggaagaatgtcatgactgaagtggacatgggggcagctccagtgacaattacacgaacccttccgcccaggctgtcctggatctttgcaaagatgagcttgtcccagaaactatcatgcctgatgatacccttttgaagctctttgaatttactggaaacagccagcttcaacaagaacttcttcaagggtgtcttggcctcattttgtaccttatcgtagatcctgttaaggagtcgaggcaccgcgggaaacaatgtgggcttcaaagtcttcatgtcgtcagccagcaaccgaatatccccttggaagaatccaactctggctccacagctgtacacaacagcctgtacaatcctctcaaacatatgagccagagggaggtaggatatggccacatcatcaggagtgggctcataagcatgctccacacatttgagaaaggcagcagcatttgaaacaatattttgatgggttatcatggctcctttggggtcacctgtggtcccactggtgaagcagatgacgctcaggtcttctgggctaggaggcacaggttttctgaagtgctctttgcctaggttctcagcatcatatagggataagatctcaattccactcttctcccctctttgcttcaggtcatcatcaaaggggtccataaggatgatcaccttcaggctcggggtgaagcctttctctacattccctatcagcaccaatgccttttggggtgtgtcacagatcaccatggcgatatcagccttgttgacaatatgtacgatggcttctggtcccacgaaa

SEQ ID NO: 73599 - DNA, 783 bp, Homo sapiens; identical to SEQ ID NO: 63888

SEQ ID NO: 73600 - DNA, 1834 bp, Homo sapiens; identical to SEQ ID NO: 63889

SEQ ID NO: 73601 - DNA, 6815 bp, Homo sapiens
cagctccgaggggagtcggaccggagcaaacagccacccccggcttcgtcccccacgaagaggaagggcaggagccgtgccctcgaggccgtgcccgccccgcccgccagcggcccccgggctcccgccaaggagtccccacccaagagggtgcccgatcccagcccagtcaccaagggcactgcggccgagagcggggaggaggcggcgcgggccatcccccgcgagctcccggtcaagagcagctcgctgctgccggagatcaagcccgagcacaagaggggcccgctccccaaccacttcaacggccgggcagagggaggtcgaagcagagagctgggcagagcggccggagcgcctggagcttctgacgccgacggcttgaagcccaggaaccatttcggcgtgggcaggtcgacagtgaccactaaagtgaccctccctgccaagcccaaacatgtggaactaaatcttaaaacccctaagaatcttgacagtttgggaaatgagcacaatccatttagccagccagttcacaaaggcaacactgccaccaaaatctccttatttgaaaacaaacggacaaacagtagcccaagacacactgacattcgaggcccaaggaatactcctgcctctagtaaaacgtttgttgggagggcaaagctgaatttagccaaaaaagccaaagaaatggagcaacctgaaaagaaagtaatgccaaacagtccccagaatggtgtgctggttaaggaaactgctatagaaaccaaagttaccgtctcggaagaagagattctgccagcaaccagaggaatgaatggagactcttctgagaatcaagctcttggtcctcagcctaaccaagatgataaagcagatgtacaaacagatgctggctgcctttcagaaccagtggcttctgctctgattcctgtcaaggatcataagctcttagagaaggaggactcagaggctgcagacagcaaaagccttgtacttgaaaatgtaaccgatacagcacaagacatccccaccactgtggataccaaagatttacctccaacggccatgccaaagccacagcatacattttctgactcacagtcccctgctgagtcatctcctgggccttctctttcactgtctgcacccgctcctggggatgttcccaaagacacatgtgttcaatcacccataagcagtttcccatgcactgatctaaaagtgtcagaaaaccataaaggatgtgttttgcctgtgtctcgtcagaacaatgagaaaatgccacttttagaacttggaggagaaacaacccctcctttgtccacagagcgtagtccagaagctgtgggaagtgagtgtccatccagagtcctcgtccaggtcaggtccttcgtgctccccgtggagagcacccaggatgtgagctcccaggtcatcccagagagctctgaagttagagaagtgcagttgccaacttgtcacagtaatgaacctgaagtggtttccgttgcaagttgtgctcccccacaagaggaagtactgggcaatgaacactctcattgcacagcagagctcgcggcaaaatctggcccacaagtcataccgccagcatcagagaaaactctgcctattcaggctcaaagtcagggcagcagaacacccctgatggctgaatccagtcccaccaactctcccagcagcggaaatcacttagccactcctcaaaggccagatcagactgttacaaatggccaggatagccctgccagccttttgaacatttctgctggtagtgatgatagtgtatttgattcttcttctgatatggaaaaattcactgaaattataaaacagatggatagcgcagtttgtatgcccatgaaaagaaagaaggccaggatgccaaactctcctgctcctcactttgccatgcctcctattcacgaagaccatttagaaaaggtgtttgatcccaaagtgtttacctttggtttggggaagaagaaggaaagtcagccagaaatgtcaccggctttacatttgatgcagaaccttgacacaaaatccaaactgagacccaaacgtgcatctgctgaacagagcgtcctcttcaagtccctgcacaccaacactaatgggaacagtgagcctctggtgatgccggaaatcaatgacaaagagaacagggacgtcacaaatggtggcattaagagatcgagactagaaaaaagtgcacttttctcaagcttgttatcttctttaccacaagacaaaatcttttctccttctgtgacatcagtcaacactatgaccacggctttcagtacttctcagaacggttccctatctcagtcttcagtgtcacagcccacgactgagggtgccccgccctgtggtttgaacaaagaacagtcaaatcttctgcccgacaactccttaaaggtcttcaatttcaactcgtcaagtacatcacactccagtttgaaaagtccaagccacatggaaaaatacccgcaaaaagagaaaaccaaagaagatctggattcacgaagcaacctacacttgccagaaactaaattttctgaattgtcaaaactgaagaatgatgatatggaaaaggctaatcatattgaaagtgttattaaatcaaacttgccaaactgtgcaaacagtgacaccgacttcatgggtcttttcaaatcaagccggtatgacccaagcatttctttttctggaatgtcattatcagacacaatgacacttagaggaagtgtccaaaataaactcaatccccgacctggaaaggtagtgatatatagtgaacccgacgtctctgagaagtgcattgaagttttcagtgacattcaggattgcagttcttggagcctctctccagtgatactcataaaagttgttagaggatgttggattttgtatgagcaaccaaattttgaagggcactccatccccttagaagaaggagaattggaactctctggtctctggggtatagaagacattttggaaaggcacgaagaagcagagtctgataagccagtggtgattggttccatcagacatgtggttcaggattacagagttagtcacattgacttatttactgaaccagaagggttaggaatcctaagttcctactttgatgatactgaagaaatgcagggatttggtgtaatgcagaagacttgttccatgaaagtacattggggcacgtggctgatttatgaagaacctggatttcagggtgttcctttcatcctggaacctggtgaataccctgacttgtccttctgggatacagaagcagcgtacattggatccatgcggcctctgaaaatgggtggccgtaaagttgaattccctacagatccaaaggtagttgtttatgaaaagcctttctttgaaggaaaatgtgtggaactagaaacaggaatgtgtagttttgtcatggagggaggtgaaacagaagaggcgactggagacgatcatttgccgtttacgtcagtggggtctatgaaagttctaagaggcatttgggttgcatatgagaagcctggatttaccggtcatcagtatttgctagaagaaggagaatacagggactggaaagcctggggaggttacaatggagagcttcagtctttacgacctatattaggtgatttttcaaatgctcacatgataatgtacagtgaaaaaaactttggatccaaaggttccagtattgatgtattgggaattgttgctaatttaaaggagactggatatggagtgaagacacagtctattaatgtactgagtggagtatgggtagcctatgaaaatcctgacttcacaggagaacagtatatactggataaaggattttataccagttttgaggactggggaggcaaaaattataagatctcttctgttcaacctatatgtttggattctttcactggcccaaggagacgaaatcagattcacttgttttcagaaccacagtttcaaggtcacagtcaaagttttgaagaaacaacaagtcaaattgatgattcattttctaccaagtcttgcagagtttcaggaggcagctgggttgtatatgatggagaaaatttcactggtaatcaatacgtgttggaagaaggccattatccttgtctgtctgcaatgggatgcccgcctggagcaactttcaagtctcttcgttttatagatgttgaattttctgaaccaacaattattctctttgaaagagaagacttcaaaggaaaaaagattgaacttaatgcagaaactgtcaatctccgatccctgggattcaacacacaaatacgctctgttcaggttattggtggcatatgggttacttatgaatatggcagttacagagggcgacagttcctattgtcacctgcagaagtacctaattggtatgaattcagtggctgtcgccaaataggttctctacgaccttttgttcagaagcgaatttatttcagacttcgaaacaaagcaacagggttattcatgtcaaccaatggaaacttagaggatctgaagcttctgaggatacaggtcatggaggatgtcggggccgatgatcagatttggatctatcaagaaggatgtatcaaatgcaggatagcagaagactgctgcctgacgattgtgggcagcctggtaacatctggctccaagctaggcctggccctggaccagaatgctgacagccagttctggagcttgaagtccgatggcaggatttacagcaagttgaagccaaatttagttttagacattaaagggggcacacagtatgatcaaaatcacattatcctcaacactgtcagcaaagagaagtttacacaagtgtgggaagccatggtcctatatacctgaacaaagaaggaagaagaatcttctggaggtccttccagccaccttatttcttaaaaaggacaatgctgatggaagaccagactggaaagtggatcgactcctccttcattgattctaaattcaaccttaaatcatgctgccatgactcagagaacttactcatcgtttcaaaagactatcatagctttaaaccaataatttgtcctcctttcatttcttgcctttcatttttggtagctgcttaaacaggttgcctaattagcagcttttgggtgattttgtaaaatgttatatcaagatttcaagactgtgtacattttaaattatttccaaagatagtgacaggagagaactggaacaaatttaccaactttgtggacctacaaagcccttacactttaaagggtaagacaaaggcttaagtttgaaaggtagagaactgtttagcatctgagaagaaatactttattaggcctgtaattttggttcttggccttaaacactttctggaacctttaaatatgctgcatagcacaatgggaaagccttaggtattcacacatttaaggaactctaaacaaaatactattttcctttagttcatattaaaaattaatacattttaaaaatttaatgtcaaagtctggtaacatttgttagtaggatttgagttattattttttgagacaggatctcaggctggagtgcagtggcacaatcacggctcactgcagcctctacctccccgggcttcaggtgatcctcccacctcagcctcccaagtaggctggggactattagggcacacatcacccaggcccaggccaaatttttgttttttttttgtaggagatggggtttcatcacgttgcccaggctgatctcgaacctctgggctcaagcaattcactcgcctcggcctcccaaaatgctgggattacaggcctgagccactgcgcccagccaggatttgaattattttaactcatccatgggctgccctagaatgtcacaaatgagggttgtttaatgcctttcttatagctgctactggaacactattatgacctaatttatgagccatccttactcatctacaagtgctgaagcaatgttacatacttttttgctaaactcagattttttagcctaatttcttgtcctcctatccacctgcatccacacatggcctgcatggggctgccttccctgcagtgttctgcagccatgcttcagggtatagctgttggtggacagcctcaggtcttgggggcactatagccactaaacgaggtgtgaaaggctcaagaggatgaccagcaattaattatccccagaaagtgaaggaaaagagacctttagggatgttgctggtcaagtcttgatttgaccggagtcaaatcaatcttcaagcaatcttggaatcctcaactgcagtaagcatttcaaaatgcaaacaaactgcttaacaactgacaagacaccagcccatatgctgctcttccaacagtgggttctagctttgaacaaaagtgctaaacatttccttgaatatattcttcctctttttgtcctcatcactcaatactggtgctcttgtcacaggtagaacagcttgtttcttttccatctattcaagtgtgtttctaattctaaaatgctgatcttctctggagtctatggtaggcaattatggtcactggaatagtttgtcttgttttaaaatattattggtgcatgtacaacagcatccaacatatctgtcttgttcctagatatatagctctgattttaggccttttgtgcataccattacaatatggtggggtaagacattctacagtagcctgtgctgaactgatctcttaaataaacttgcttctggttaactaaaaaaaaaa

SEQ ID NO: 73602 - DNA, 1157 bp, Homo sapiens; identical to SEQ ID NO: 63891

SEQ ID NO: 73603 - DNA, 3149 bp, Homo sapiens
tgcggccgccgaaacacaaccccctctgttccctctcttcgcggagcggcgccgcgtagcttccatccgccagctgccatgagcgagcgcctccgtcccaggaaaaggagaaggaatggcaacgaagaagacaaccatcttcccccccagaccaaaagaagtagcagaaaccctgtctttcaggattcctgggacacagagtcttcaggcagtgacagtggtgggagcagcagcagcagcagcagcagcatcaacagcccggacagggccagcgggccggaaggcagcttgagccagaccatggccggatccagccctaacacgcctcagcccgtgcccgagcagtccgcgctgtgccaaggcctctacttccacatcaaccagaccctgagggaggcccacttccacagcctacagcaccgagggcggcctctgacatgatgtgccggcagtttcttgccttctgtgaagggacagcgctgtgcagatttgatatttcaacttacaacttgttttaaaagaaaaattgcacacgaaaaatgcctgttggcttttcagtctatatttgaaataacaggttaacaggcagttgtttacttgtggttttgctgcactattgcaatttcaaaggggctttgaagcaattttttataggattcttttgagggagggtatcaaatctatgtcaaggtagtggtttgaggaaaactcattctgtgtgttgaatccatagtatgtcccattcagactgatttccaaatctgtcaactagaaactctactttatgtaaagggccttttaaaaatgcgggatcttcaattttttttattcaataaactagtaaagagtatctagtttccatgaaaaaacataagtttttttccaaaatataggaagcttgattcagtcttgcactgaaattaactgccatactacctctcagtatgtagatgttctattgaaagtactctctcctgtgtaacaggagaacaatcagatccaattcagactgtcagtgaagcacactccctaataatagtctctactctttgttatatatttgtatttccagggagaatgtcttttagattcttgtatacccagataacttctgtgtcactattccaccagagtctgcacctcagactttagtaggaaacatggcacagttctgcaagtaaagtaatatgtaatgactttttgtcctacaaacttggtcagtcagcagcttacatgatctcattgacaattccaccttgtagtgtcaacaattaaggtgttgttgaacgctgataaaatgtaagctacctgaactgatgtctaaagcaacaagtattgtgaaattttgggacaaggattaacttgatgcttaaagtaacccccaacagtaactagggggccacattccatcagtgaaactggaaagattggtgtggctgagaatcagatgagcagaggcacctttagaagaaataatgtggtagtatttatttagggagagacagatgtgttgccatgttacttagtcatactagagagccagccaagtttgaataatgaaggtgcagacgtgttgtcttcttcactgacaagctgtctgaacaaggagccaggaactgtcgggtcaccagctgtggagcgtgccggggggacaacctgccattggatgtagagaaaagtgccttagagttggcctgagccctcctgcccactcgccctccgcgcgacgccactcggagtccacacggcacacacaagcggagctgagaagcacgatggctctagtcagaggactttgctgtcggtccagatttgaagaggacacggaacagcatgagcctttgtgacaaaactagaatttggaaatgaggactgtcttgggaaaagggtagacacaggcacttctctccacagcctgctaacctaatgtgggcagaactgaaagatcactgcagtggaaactgttctggaagaggctgcaacatagcccatgcttagggactggatggtttttgcaagagctttttttttttttaaactaccatctcccaacttttaaagccagatacttgacagggattttaaattttagggggttcaagggaagggaatacggaagggatcccctgctaatattgggtcaaacaaaaaagcaaacacctcaatgctgtaaaaaaacaacctgtttgagcttttaaacccccttgcccccagcacatttcaaaaaaccccaggaggattcctgcaggcttaacagttggcatcgtactgagcttttgtttcgatgtttctggttgatttagcctttcgagtgcttgtcatgctcagtgggagaagtccaaacctgatctgactggatgccagtggcaggatgttatggggttcttgggagttgaacgtactgctccggggggcgagctgattctctgtaccagtcaccaatccaaacagaacagaagttcgctgcaccaggcgatgaaggttgctgttgaggtgtggcgtgaaaacgtccaggtcaaatggatcaatgagggcttccaggtggtcagtcactttctcaattctggagtctggcttgctccggccactcttcacctcgtcacccttggctgtcagaacaatgttgaggtaacgcagatcataaagcagctgcagcgcccggttctgggtgactggaaatgcaccttctttctgcaaatgaattcccggtccccacccatgaagagagaggacttggtatgtgagcgtaataaacagcttcaagttttggttgagtttcagcttgctatttcagaagcagatggttttaatgctcatatggccagtttaatctcacggcaacaaaacaaatttttgttagaaacttgaccttaaaattaaaaacctaacagcagggaagagacctggcccttaaaaaaggcctcagatgctgtaaatggttgttctaaaggggaaaaaaaggctccttgcctgaaggagaagtgttttgaggaggctcattagagaagacttactgaattctttccaaaatcaggatttgttccttcttgggtttttgtttgtttgtttgtttgtttgttttgagatagagtctcgccctgttgcccaggctggagtgcagtgacacaatctgggctcactctcgtgcc

SEQ ID NO: 73604 - DNA, 2946 bp, Homo sapiens; identical to SEQ ID NO: 63894
  misc_feature (1)...(2946): n = a,t,c or g

SEQ ID NO: 73605 - DNA, 1258 bp, Homo sapiens; identical to SEQ ID NO: 63895

SEQ ID NO: 73606 - DNA, 2130 bp, Homo sapiens; identical to SEQ ID NO: 63896

SEQ ID NO: 73607 - DNA, 1341 bp, Homo sapiens; identical to SEQ ID NO: 63897

SEQ ID NO: 73608 - DNA, 428 bp, Homo sapiens; identical to SEQ ID NO: 63580

SEQ ID NO: 73609 - DNA, 1218 bp, Homo sapiens; identical to SEQ ID NO: 63898

SEQ ID NO: 73610 - DNA, 1873 bp, Homo sapiens; identical to SEQ ID NO: 63899

SEQ ID NO: 73611 - DNA, 1474 bp, Homo sapiens; identical to SEQ ID NO: 63900
  misc_feature (1)...(1474): n = a,t,c or g

SEQ ID NO: 73612 - DNA, 2958 bp, Homo sapiens
agtgactgaaaagactgcggaagacaagtcgagtagccatgatgtgaaaacagacactttagctgaggacaagcctggtccaggtccattttctgatcagtctgaacctgcaataactactagtagtcctgtggcttttaacccatttctcatcccaggagtatctcctggactcatttacccatccatgttcctctcccctggtatgggcatggctctgccagccatgcagcaggccagacactcggaaatagtaggtctggagagccagaagaggaagaagaagaagacaaagggggacaaccccaactcccacccagagcctgctcccagctgtgaaagggagcccagcggtgatgagaactgtgccgaacccagtgcccctttgcccgcagagagagaacatggggcacaggctggggagggggcactcaaagactccaacaacgacaccaattagaacttttttcatttaagaaattattgtgacttgtaagtttcttatcccataaaggtttggtacttccctcacttcacctccataagaacctgtgtttccataagtaagattacgtacctgatttcctgtctgagaactatggtaacagatgttaatagttgcagggtctcaccacttcattagataagtgttgtctacctagtctaggaggcacagaattctcattctgttatccagttcattccagcaatcatagttaatacagtacttggtgacacgccctacccccttctcttccaagtttcccactcacttgaggaggaaaaatggcaaaagaaagctgtctagggttttaccattgaagggtggaagaacagagacaaagaggagctctttttctgtgagctgggttgcacaggaagaatgtcacagggaaccaaaaagcacagaaaaaggaagtgctggtgcatatttttgagttaaaatatttccctattttatcatgattactaagtgagtagtatagacagaagtatataactaatggttgaaaatacatatattcatttctttataaaaaacaaaaaccttaccggtagtaatataatttcccccttggtggtttttcagacacctgcagcaagaagaaatactgactgactaggcattattttctatacatccctctcaccagtgaaaagattcctcttgctgcgagaaagctttacccaccatgagttattgctgtcgacgggggtggggcaaggacccgcgctccgtagagctacacgctgcttcacaagcacacggctagcgctctgctctcacctggttcgcttacagatttctctagccattaatttgcctctctgtgtttaaagagcaccaggaccgaatggattttcacttcaggctttccttcaccaagaataaggttctttctggagcctgcaagaagacagttgcccaacactttgacacttgctagtaggtcctttgatcaagagtgtctgaggctgtcaaatgtgtgccaccctttataatacagctatgaaaagttacttctccattaatttctccattctgtttatatcttacagttggacccaaattccaaattatcagttaatcgaaactacattgcaagtcaacattattttctcttcttcctcagcttctccatgtttaggaactgagaaagaacctgcctaagcagcacttccccatgtcctttcaccttcatgttaacgtcccttctgatggtctcactcttcacaggtagttcacactctgagacttgaagtaagctcatggttcagtactctgggggcgcagggctgcgcagggacccttggaaatgttgcaagtgttactagtaccagtttcactttttgttgtcacaatttactgtattttttactttttctgttacagttttgctaatttatcagaaggtccaaaagtctgacataactatttcattttgcattatttatttatgatgcttttttcattgtcttttatacatttgggattataaattatgtaaatgttaaaatgagcatctcaaagaagtctgttaaatcatgactgaaaaaaatcaatcagatgtatcttcaaaaagtggagtcccagttttatgaatcagagatataaaccagaaattctataactgatcatagaagaagaatccagtaattgaacaaatcctatttaatgacatccttgtagcatagatggtctataatgctgaccacagatttcttagaaatgctgctctctctatttaactaacattttgttcagttttgcctccagtggaagcagaaagggttttttcagctgttaaatcctaaaaatcaatataatttatttatgtaagaaaaataactcaatcaatatatttttgaaccttttaagtactaattttctttttatcaagtagaaaaaaaaatgtatttgccctaaatccttaaaatacaaatgctataaaaattcctgtatcttgaaagccttactgcaaatgagtattatagacatccagcagagtctggttttctttgttgtcgttgtgttgttgttgttttgtatggaaaagctgctttccccgggttccacttataacctccggtaggtcacagggttcaatgtggatctgacttaaaaacccaccagcatgctcaatcccttgttatccttatggaatctgtatgttaactctctgggtgttcaggcttctatttgactgctgttgtgaccctgtttgcaaaatgaatatgacactctgtggattatttgctctgtaaggcacaagtgcttcttatgattattttgacgtttccaagagcaaaagccaaatttaaactctcttcagcaaacttgagccttttcatctaattccatgtcactcacggccataactttccttgaccattcttcaccccatgtcttacataataaattgtggtcttgatcctggatttaaaaacaaaaaaaaa

SEQ ID NO: 73613 - DNA, 1154 bp, Homo sapiens; identical to SEQ ID NO: 63902

SEQ ID NO: 73614 - DNA, 430 bp, Homo sapiens; identical to SEQ ID NO: 63903

SEQ ID NO: 73615 - DNA, 1888 bp, Homo sapiens; identical to SEQ ID NO: 63904

SEQ ID NO: 73616 - DNA, 1607 bp, Homo sapiens; identical to SEQ ID NO: 63905
  misc_feature (1)...(1607): n = a,t,c or g

SEQ ID NO: 73617 - DNA, 1369 bp, Homo sapiens
ctaccatcccccatgaggaggaaatcaacacaactgataaaagaagctgatgaaaaacatcagagagagagagagtttttattaaaagaagcgacagaatcgaggcacaaatacgaacaaatgaaacagcaagaagtacaactaaaacagcagctttctctttatatggataagtttgaagaattccagactaccatggcaaaaagcaatgaactgtttacaaccttcagacaggaaatggaaaagatgacaaagaaaattaaaaaactggaaaaagaaacaataatttggcgtaccaaatgggaaaacaataataaagcacttctgcaaatggctgaagagaaaacagtccgtgataaagagtacaaggcccttcaaataaaactggaacggttagagaagctgtgcagggctcttcaaacagaaaggaatgagctcaatgagaaggtggaagtcctgaaagagcaggtatccatcaaagcggccatcaaagcggcgaacagggatttagcaacacctgtgatgcaaccctgtactgccctggattctcacaaggagctgaacacttcctcgaaaagagccctgggagcgcacctggaggctgagcccaagagtcagagaagcgctgtgcaaaagccccccgtccccaggctttgctccggccaatcgagtcggttgactaagatgaggtgtgatcactgtattgagagatatattttgtgtataactttctctgttagtagttaactattggttttgtggtgaaaattttcttactttttctaccatatctgtattttcttagaacctactggacttatgtggtacaggaggctgcttagcagttttgaatagtttaatctataaattttcctcagctgtgttgcacatcagcctcgttctccctccactggaatgcatgtgttcactgccttgtcctttctctccctgctccttgcacattatcatcctaatgaaaatttcactgacagggccgaccattacaagggaactttgttctgacgatggttccttgatgtgaaaacaatattaatttaaacgtcttagcccccccccccataatattattcagaaaaacaaaataccaaggcgattagttttgtctaataacccatttaaatgccaagtaaaaataaaactcctagtgttgggtcagaagcatatttgattgaaattagctttttgaaaacatttatatctcgggacaaattgagatggccacatgcctagaatcctaagtttcggcagaatatgtatataaagatgtcacttgtggacaaaatagtacatagaggcaaatcactagacaaataagcttagtgtttacgtgactggaacagtcatcctg

SEQ ID NO: 73618 - DNA, 1098 bp, Homo sapiens; identical to SEQ ID NO: 63907

SEQ ID NO: 73619 - DNA, 1046 bp, Homo sapiens; identical to SEQ ID NO: 63908

SEQ ID NO: 73620 - DNA, 5202 bp, Homo sapiens; identical to SEQ ID NO: 63909

SEQ ID NO: 73621 - DNA, 1214 bp, Homo sapiens; identical to SEQ ID NO: 63910

SEQ ID NO: 73622 - DNA, 2359 bp, Homo sapiens; identical to SEQ ID NO: 63911

SEQ ID NO: 73623 - DNA, 1727 bp, Homo sapiens
  misc_feature (1)...(1727): n = a,t,c or g
cgacccacgcgtgcggcatgtggatcccgctctacctgcaccgcgcccttgttgtgcataagacagcagagacgtgcaacagcccgccctgtggggccaaggacagcctcatctttggggccatcacctgctttacgggatttctgggcgtggacacgggggcaggagccacgcgctggtgccgcctgaagacccagcgggccgacccactggtgtgtgccgtgggcatgctgggctctgccatcttcatctgcctgatcttcgtggctgccaagagcagcatcgtaggagcctatatctgtatcttcgtcggggagacgctgctgttttctaactgggccatcactgcagacatcctcatgtacgtggtcatccccacgcggcgcgccactgccgtggccttgcagagcttcacctcccacctgctgggggacgccgggagcccctacctcattggctttatctcagacctgatccgccagagcactaaggactccccgctctgggagttcctgagcctgggctacgcgctcatgctctgccctttcgtcgtggtcctgggcggcatgttcttcctcgccactgcgctcttcttcgtcagcgaccgcgccagggctgaacagcaggtgaaccagctggcgatgccgcccgcatctgtgaaagtctgaggtggtgccattgggacaatgaagaacccacactcccaccttcgttctgggaggtgtcctacagcgtccgggaccggctgggctgccccaaagctttctgtgtgatccacggctaggcacccaccctctctggcccaggcctgctgagtggccctggcatcaagaggaggctgtgtcctcagttaccctggaaggatgtgtgtgttggagccacacggttggacaggttcccagccctaggtttgggccgcagggcccctggggccaaggaagaagacagccccaagtgggtgtccggggagagcctggcctgccaccagcttatgtgatcttgggcaagtccctgccctccctggaacgaagggccagggggctggactttcccacacaacttgctgggcaaagcacgatctgcagctttgaagactcaacagaccctggaccatacggagagcaggtggcccaggcctcagggcggcagtcccggctttgaggctcacgcgagggcctggtatgcagggaccactgctcagctgggcctcggaccttggggatattggacgcaacctggcaaatgaagctgggcgcccaagtctctgggtactccctggaggacactgtctcactgtctcgggttggctcccagcctggaggtcccagatggggactgttctgacaagctggcatcaccaggggtgaaggccctggctgcagctgtacaccacctgtgcccccaggctcaaggtctctggcaggtgcacaccagcccaactctgcagggcttctctccctgccaccaccccccaagccaggaccccactccttccccgaggctgagctgagccttttccaggggcagggcccaggagaccattcccagaatccatggggcagtagccagggctccggctgctggaggaagcagctatccacaaagcttcctgccccagagctgaggctgaggccccgggagaggcggtccctacccaaacactggctgctggcattccaccaagtgaccccaggngccaggccttcgatcacccacctcccatccag

SEQ ID NO: 73624 - DNA, 865 bp, Homo sapiens; identical to SEQ ID NO: 63913

SEQ ID NO: 73625 - DNA, 1534 bp, Homo sapiens; identical to SEQ ID NO: 63914

SEQ ID NO: 73626 - DNA, 1979 bp, Homo sapiens; identical to SEQ ID NO: 63915

SEQ ID NO: 73627 - DNA, 1205 bp, Homo sapiens; identical to SEQ ID NO: 63916

SEQ ID NO: 73628 - DNA, 1534 bp, Homo sapiens; identical to SEQ ID NO: 63917

SEQ ID NO: 73629 - DNA, 1900 bp, Homo sapiens; identical to SEQ ID NO: 63918

SEQ ID NO: 73630 - DNA, 1170 bp, Homo sapiens; identical to SEQ ID NO: 63919

SEQ ID NO: 73631 - DNA, 916 bp, Homo sapiens; identical to SEQ ID NO: 63920

SEQ ID NO: 73632 - DNA, 842 bp, Homo sapiens; identical to SEQ ID NO: 63921

SEQ ID NO: 73633 - DNA, 1742 bp, Homo sapiens; identical to SEQ ID NO: 63922

SEQ ID NO: 73634 - DNA, 595 bp, Homo sapiens; identical to SEQ ID NO: 63923

SEQ ID NO: 73635 - DNA, 1892 bp, Homo sapiens; identical to SEQ ID NO: 63924
  misc_feature (1)...(1892): n = a,t,c or g

SEQ ID NO: 73636 - DNA, 1784 bp, Homo sapiens; identical to SEQ ID NO: 63925
  misc_feature (1)...(1784): n = a,t,c or g

SEQ ID NO: 73637 - DNA, 1977 bp, Homo sapiens; identical to SEQ ID NO: 63926

SEQ ID NO: 73638 - DNA, 1308 bp, Homo sapiens; identical to SEQ ID NO: 63927

SEQ ID NO: 73639 - DNA, 1430 bp, Homo sapiens; identical to SEQ ID NO: 63928

SEQ ID NO: 73640 - DNA, 1313 bp, Homo sapiens; identical to SEQ ID NO: 63929

SEQ ID NO: 73641 - DNA, 4715 bp, Homo sapiens; identical to SEQ ID NO: 63930

SEQ ID NO: 73642 - DNA, 1540 bp, Homo sapiens
ttttttttttttgaatgttctcaccaaatgtaaaacaggcccagtcaatgccatttattatacatgtcaaacagcttctaagaccgacgggctcccataataaggttttggggattttttgttttgtttttcattttcttttttgcatcaaacaggttcttccaaaagcctgctcacaaggtagacaaaaacataaatcttcaggaaaatgaaacaagagaagctgaaacaatctacacctgaatgttaaaaaactcatcagacacaaaccacaccaaacactcatcccatttaatttcctgttacatgctctgaggaagccaagaacatcaggccccagggcagcaatgctctaggattccagctcggaccccctctatatgacagattcatgcacacacatccacacaccatagaaccaggcagaaatacacatgcatgcacaggtggctagagaaccatagggcaggatgggaaaaagggctgatcaaggatatgcaatcaactggaaactgggacctagagaatgcttctgttgcaggatgaacatgagttaaaattaaaacaaaggcagaacacaggataaaggtgggatgttcagacaagaggtgggatagatgaagagataaagatgcagggggagttttgggaaagcagcctcagaaggggaggtttttctttattgggaactcaggtgggcagggtcctgtgactccagtgatacactgaggcagaagcaatatgccacagcattacctctgcaatctgtgccctctcccaaagtagagggaaaccatgagcccccaccctctatccctccccattgacactcttaagaactttcccattacccaaaaaaaaatgaccccctactacacacacacacacgcaaagttaggtccagcataggccaaagtcaggccaagcacagaaagcctcagtaactcttcttggtggaaccaaagccagagaagcccatcacagctgccatctcatcgtcctcctcaaatgtcaagtcctcctcagccctccttttcttctccttctgtttctctttcttgtacgctttggccttttcctcctcttctctgagctccttcatcctttcctcaaaatcataatccttctgcttctcttccatcttcttcttgttgacctcaaaacgtttcttcacctgatccagggtggaacgttccacacgcatagacatgcccaggtttctctgatgtttctttccattaatgtgatccagaaagttgatggagtccttcaccacacagtcacagacattgcagtaatatcctcccatctcagattgaggggttgtcttggtaatgacaattgtcttcccaagcttggattccaagtccaccttgtagtccctatgccgtaaaagctctcgcttgacaggctgcactggttttccatctttcttttctctctcttccgtgagcctcttctcggcgagtttctcatattcatctttgtcccactttcggcgaaagtccaagttttttgtcccgctgcccgacgccatctt

SEQ ID NO: 73643 - DNA, 2233 bp, Homo sapiens; identical to SEQ ID NO: 63932

SEQ ID NO: 73644 - DNA, 766 bp, Homo sapiens; identical to SEQ ID NO: 63933

SEQ ID NO: 73645 - DNA, 1741 bp, Homo sapiens
ttttttttttttccatcattgaaaatgtttattaatttttatgtaattcttctaatcctaaaagactgaaaacattgctctttatagtttgcgggaatttttaatgccctaaacagaaactccaacagcctcatggcttgctttaaagcagagcctgaatacagggggaacacaggtttgcctgagggttaagaagcatccaagagtaagggaagactgggtaagcaaagcaaaataaaggggcaaacaaaacaaaccacacagcacaagacaccctagcaaaggcttcccacagtgcccccacacgggtaggcacccaggccttttgttcttataaaatatgtttttattggtctttgcagtctcacgtcacaaaataacaaaatgaacacaaggcagatagagctggttggggagcacagacatgtggtggccttgaaagcagcttttccccttaagtctctagaacctgccatgagtaattaagacagtctttgaggatggggctgtcaggtgggggcgtttcagcaggtgccgacgagcgccttacaaacgactggctgaacacctttcctcccaggcctctctgccccagcatcactcaatctgctcagtcctcgactgctgcaggggaatgcgtgctcagagagagatgacacttctgaggtggcccccagctctgggtgcagaggagccggggtggggtattcaggccacacttccctgtggccacaggggaaaggaccaggggaaaaaatggggcagggatggccagctaacaaggggcctttggctttgtcctggaaaaaaacaacagagaaggaccaagtgagggcccccaactcccccatccccaccgcaatacacatgcatattcagagtacagagaaaggcacccagtacattctgtccttaaagacaatgtttcaacagtcccaaaagaacctaagttgttctagagtcctttatgtaaccaggtaatgcacatttaaaattaatttctttaatggattcttacttgatttacaaaagactcccccactccccaacaaagaccccaccatgctggtggctgctgatgtcccctgtaaaatacattataaaaagaaataaaaaattatcatatgtgaatcgaagggttgctttcatatagcaattttggggacattctgtaacagcaaagggcttgggctaatcagcacaggcctcccactcctgcattccatctgactcaacgctgctccccggcctacctaattacccgggcttctggtttcctggaggacaaaaagcaggcggcaagtattctgggtaaaatcctcccaaagtcttcccccaccgtccccccagtgggggactatgggttactgtgatcaagagacacctgaacataaaacacaactacacttctaccaaaatcaaactcaaatccacacaacaaaacagaattgagcaatcttaccagggattgaaaactgagggtgtgagatgctgggctgagggccaggaggaggagaaggaggagagggagggaaagcacagagtgggagggagtgagggctccagggatggctgccagggccttccatggccacgatctctcacatctcctcgccagtgtggcaacccctccagcagctgggacttacctttgtactggggagtgaatttgcgcatctcagcagggagggtctcgtagaactgatgttcccttgggaccaggggcttgcacagggttgtc

SEQ ID NO: 73646 - DNA, 2379 bp, Homo sapiens
actgattccaaggtttgagacatgcagtgtccacagttactagtggtgatgatgtacattcttattaagctgttggatctaactgcttaataaacacaagtattagatatttcttttggaccaggtatgctgtgaaaaaagtactgaggcactaaatagtgtcatgagctgagaaagtttgagaatatctgtgctataggcaagaaaaatacaaaacatcatttagtttttcacctagaaattttctaaataaatagtcatacaaaaaagggaaaatatatacaaacgtacatacaaagtttggatttttattgaaatcttgttaggtatcaaacaaattctgctttcttcagataaaaatattctctcagatgtctccagataactgctaagtctaaattggtccttcaatgtcttatttttattgtcctcgtgaaatgttcatatacagttaagatgttcccaaaaggatttttatcgtgtaaaggagcgtacatgacgacctctaccactgcctccactaacaaactttcctcttgagcctccactgccgctatttgcactagcccaggaaggtccaagtcccccacgacctctagaagcacggtcccgaggacttgggcggtaacctgtagaactaaggggtcgtaatggtggaagagggcctctgttaaaattgctctggcctccacgactttcattgtaatttcctcgaggagtattctgagcactccaactggagcctcttgttccttcccgacgactgtagtttccttttgaagcaggtggtgtgaaaaacctattctgactgtggaaagcaccccgtcctcctctattgcctgaaaacccaccacgggaagaaatcttctgtgatactttgagtggccgttttggtggaggtattccatcttgaggaaccacttctttactttcagcagcaacaaagtcatccacatgcatagatggtggtctacttgtgttctgttttctctgacgaaaaatatcatgaggtcgtataccctgtccaaatcctcccctgccccttcctcttggtggtggcacaacatgagctcttttggcaggttcaatgtattcagattttccacttgacgttataaaggtctcatgcttgtgcttcccaagtttgaatcctttagtagtcttggttcttcctggagatgatggttctgacaaaaatgagcgctctaattctgagtgcaaatcaaagtcactacagcatttttcagagagttcaattaagtcaacctttaccaaatccagatctgtatctatctcttcagcctgaaatggagtgaaccacatagatttcaactgatcatccatgacatcagcaagcacataggcagtcctattgttaaacagattctgaagagattctggagctgaaagtactggttctacatcctggtcactgagaggtaaagggtcacctgatgactccagcatctgcttaagtccaactacactgtccaacaaagaatccagattgtcatcatcttttgaatgttccaaaacaagcttctctagttcaaggaacaaattttctggactttcttctttgctttgtagaagctgttttaactctgcagcattaatactcatcgtccgtgatgtatgagctccctctacttccatgagaccattatcatctccacagcatccaattgtgtcagagttaagaatttgtctcataaattctaaaaatgaagatgcaagctctcctgtgtccttactaaatgtgctgaccactcgtttcagtaaactatgcagagcactactgtttttccttaaagaactttttaaatgaaataatccataatcatgctctgcaagaaacatcattgttctgacacatgtcagtaaacagttgtaactgctctcagagttagctagcgtagccaacagacagtcacagattgaggtcatcaattctttatttggtagagaattggagagctgctccagttcagaaatagaaccttcagaagagcttggtaagataagtgcaatgtcctgatcacagagagactgcaaaatggatgtgacatattcaacacactgttggcgaataacactgtctccaggagaccgcaccaaagctaaaagatcctggaatatctctgcatatctttcatcacctttaatagttccattaattagatgcaaaatagctaatttacaagctttgtgtgaagccagagcataaagaagagcaagcaacctggtggtttggctagtatactgttgttctttatcttctgaagtgctttgcaagtcttctacaatcaaatccaacacagttctcataatcagaagtgcagttggtgaggcaaggtcacacaattcaacatatgttac

SEQ ID NO: 73647 - DNA, 1431 bp, Homo sapiens; identical to SEQ ID NO: 63935

SEQ ID NO: 73648 - DNA, 1374 bp, Homo sapiens
gcacgagaaaagatggattcttgtattgaagcctttggtaccaccaaacagaagcgagctctgaacaccaggagaatgaacagagttggcaatgaatctttgaatcgtgcagtggctaaagctgcagagactatcattgatacgaagggtgtgactgctctggtcagcgatgctatccacaatgacttgcaagatgactccctctaccttcctccctgctatgatgatgcagccaagcctgaagacgtgtataaatttgaagatcttctttcccctgcggagtatgaagctcttcagagcccatctgaagctttcaggaacgtcacgtcagaagaaatactgaagatgattgaggagaacagccattgcacctttgtcatagaagcgttgaagtctttgccatcagatgtggagagccgagaccgccaggcccgatgcatatggtttctggataccctcatcaaatttcgagctcatagggtagttaagcggaaaagtgctctgggacctggagttccccacatcatcaacaccaaactgctgaagcactttacttgcttgacctacaacaatggcagattacggaacttaatttcggattctatgaaggcgaagattactgcatatgtgatcatacttgccttgcacatacatgacttccaaattgacctgacagtgttacagagggacttgaagctcagtgagaaaaggatgatggagatagccaaagccatgaggctgaagatctccaaaagaagggtgtctgtggccgccggcagtgaagaagatcacaaactgggcaccctgtccctcccgctgcctccagcccagacctcagaccgcctggcaaagcggaggaagattacctagacgcatgctttccagacagggcgttttggctgcatcacagccactggctggtcctattcatttccatttttatgtatgttttgaaaagaaaaggtccggggatggtggctcacacctgaaatcccagcactttgggaggccgaggcaggaagatcattgagctcaggagtttgaaaccagtctggacaacatagggagaccccatctctaccggaggaaaaaaaaaagagtcaggcctggtggtgtgcgcctgtaatcccagctactcgggaggctgaggcaggacgattacttgagcttgggaaatcaaggttgcagtgagctatgattgtgtggccacactccatcctgggtcacagagtgagaccttgtctcaaaaaagtaacataaggaaaaaagaagccttgctttagcacaggtatgaagccagaagccagcatctcaactgtgcttgtcttatgcagaaatataaagcgatggccaggttggacttcaaaaaaaaaa

SEQ ID NO: 73649 - DNA, 3076 bp, Homo sapiens
cctgtctctcttcgggtctcgggcccttgggcgcagcggggcgcgcgccatggcgaaggcgaagaaggtcggggcgcgaaggaaggcctccggggcgccggcgggagcgcgagggggcccggcgaaggccaactccaatccgttcgaggtgaaagttaacaggcagaagttccagatcctgggccggaagacgcgccacgacgtgggactgcccggggtgtctcgcgcacgggccctcaggaagcgtacacagactttactaaaagagtacaaagaaagggataaatccaatgtattcagagataaacgcttcggagaatacaacagcaacatgagccccgaggagaagatgatgaagaggtttgctctggaacagcagcgacatcatgagaaaaaaagcatctacaatctaaatgaagatgaagaattgactcattatggccagtctttggcagacatcgagaagcataatgacattgtggacagtgacagcgatgctgaggatcgaggaacgttgtctggtgagctgactgctgcccactttggaggaggcggtgggctccttcacaagaagactcaacaggaaggcgaggagcgggagaaaccgaagtcccggaaagagctgattgaagagctcattgccaagtcaaaacaagagaagagggagagacaagctcaacgagaagatgccctcgagctcacggagaagctagaccaagactggaaagaaattcagactctcctgtcccacaaaactcccaagtcagagaacagagacaaaaaggaaaaacccaagcccgatgcatatgacatgatggttcgcgagcttggctttgaaatgaaggcgcagccctctaacaggatgaagacggaggcagaattggcaaaggaagagcaggagcacctcaggaagctggaggctgagagacttcgaagaatgcttggaaaggatgaggatgaaaatgttaagaaaccaaaacatatgtcagcagatgatctgaatgatggcttcgtgctagataaagatgacaggcgtttgctttcctacaaagatggaaagatgaatgtcgaggaagatgtccaggaagagcaaagcaaggaagccagtgaccctgagagcaacgaggaagaaggtgacagttcaggcggggaggacacagaggagagcgacagcccagatagccacttggacctggaatccaacgtggagagtgaggaagaaaacgagaagccagcaaaagagcagaggcagactcctgggaaagggttgataagcggcaaggaaagagctggaaaagctaccagagacgagctgccctacacgttcgcagcccctgaatcctatgaggaactgagatctctgttgttaggaagatcgatggaagagcagcttttggtggtggagagaattcagaagtgcaaccacccgagtctcgcagaaggaaacaaagcaaaattagaaaaactgtttggctttcttttggaatacgttggcgatttggctacagatgacccaccagacctcacagtcattgataagttggttgtgcacttatatcatctttgccagatgtttcctgaatctgcaagtgacgctatcaaatttgttctccgagatgcgatgcatgagatggaagaaatgattgagaccaaaggccgggcggcattgccagggttggatgtgctcatttatttgaaaatcactgggctgctatttccaacttccgacttctggcacccagtggtgacccctgccctcgtgtgcctcagtcagctgctcaccaagtgccccatcctgtccctccaggacgtggtgaagggcctgttcgtgtgctgcctgttcctggagtatgtggctttgtcccagaggtttatacctgagcttattaattttcttcttgggattctttacatagcaactccaaacaaagcaagccaaggttccactctggtgcaccctttcagagcgcttgggaagaactcggaactgctcgtggtgtctgctagagaggatgtggccacgtggcagcagagcagcctctccctccgctgggcgagtagactgagggccccaacttcgacagaggccaatcacatccgactgtcctgcctggctgtgggcctggccctgctgaagcgctgcgtgctcatgtacgggtccctgccatccttccacgccatcatggggcctctccgagccctcctcacggatcacctggcggactgcagccacccgcaggagctccaggagctgtgtcagagcacactgaccgaaatggaaagccagaagcagctctgccggccgctgacctgtgagaagagcaagcctgtcccactgaagcttttcacaccccggctggtcaaagtcctcgagtttggaagaaaacaaggcagtagtaaggaggaacaggaaaggaagaggctgatccacaaacacaagcgtgaatttaaaggggccgttcgagaaatccgcaaggacaatcagttcctggcgaggatgcaactctcagaaatcatggaacgggatgcggaaagaaagcggaaagtaaagcagctttttaacagcctggctacacaggaaggcgaatggaaggctctgaagaggaaaaagttcaaaaaataaattacattttataaataaggcaaggaactggacattacctcacatctgcaattccaaccctctggtctcgaattcccgacctcaggtaatccacctgccttggccccccaattataggtgtgagccacagcacccagccaaaaaagtaattttttttagagtaataatgctataatgttggtgtgattccaacctccagctccccccacccgctgcctgcggttttgtttctgttaaaacgtcacctgatgaaatagaatgaatcctgaaatgcacctctgggatcgggaatggtctgtgtgttatcagctgcgactggttcactgcgtctggacaagcctcatggggactggggattctggccagtgtaatttctgtcaaccacggacgtttgccttcatgtgtagaatttactgttgttatgcaaattatattttcaattataaatgaaaa

SEQ ID NO: 73650 - DNA, 1225 bp, Homo sapiens
agccgcgtggggcccgcacctctgggcagcagcggcagccgagactcacggtcaagctaaggcgaagagtgggtggctgaagccatactattttatagaattaatggaaagcagaaaagacatcacaaaccaagaagaactttggaaaatgaagcctaggagaaatttagaagaagacgattatttgcataaggacacgggagagaccagcatgctaaaaagacctgtgcttttgcatttgcaccaaacagcccatgctgatgaatttgactgcccttcagaacttcagcacacacaggaactctttccacagtggcacttgccaattaaaatagctgctattatagcatctctgacttttctttacactcttctgagggaagtaattcaccctttagcaacttcccatcaacaatatttttataaaattccaatcctggtcatcaacaaagtcttgccaatggtttccatcactctcttggcattggtttacctgccaggtgtgatagcagcaattgtccaacttcataatggaaccaagtataagaagtttccacattggttggataagtggatgttaacaagaaagcagtttgggcttctcagtttcttttttgctgtactgcatgcaatttatagtctgtcttacccaatgaggcgatcctacagatacaagttgctaaactgggcatatcaacaggtccaacaaaataaagaagatgcctggattgagcatgatgtttggagaatggagatttatgtgtctctgggaattgtgggattggcaatactggctctgttggctgtgacatctattccatctgtgagtgactctttgacatggagagaatttcactatattcagagcaagctaggaattgtttcccttctactgggcacaatacacgcattgatttttgcctggaataagtggatagatataaaacaatttgtatggtatacacctccaacttttatgatagctgttttccttccaattgttgtcctgatatttaaaagcatactattcctgccatgcttgaggaagaagatactgaagattagacatggttgggaagacgtcaccaaaattaacaaaactgagatatgttcccagttgtagaattactgtttacacacatttttgttcaatattgatatattttatcaccaacatttcaagtttgtatttgttaataaaatgattattcaaggaaaaaaaaaa

SEQ ID NO: 73651 - DNA, 1165 bp, Homo sapiens; identical to SEQ ID NO: 63937

SEQ ID NO: 73652 - DNA, 1289 bp, Homo sapiens; identical to SEQ ID NO: 63938

SEQ ID NO: 73653 - DNA, 2076 bp, Homo sapiens
ggcaatattgtcatccagaagaaaaaatataacaaacaacatattattcccctggaaaatgtcactattgattccatcaaagatgagggagacttaaggaatggatggctaatcaagacaccaactaaatcttttgcagtttatgctgccactgctacggagaaatcagaatggatgaatcatataaataaatgtgttactgatttactctccaaaagtgggaagacacccagtaatgaacatgctgctgtctgggttcctgactctgaggcaactgtatgtatgcgttgtcagaaagcaaaattcacacctgttaatcgtcgccaccattgccgcaaatgtggttttgttgtctgtgggccctgctctgaaaagagatttcttcttcccagccagtcctctaagcctgtgcggatttgtgacttctgctatgacctgctttctgctggggacatggccacatgccagcctgctagatcagactcttacagccagtcattgaagtctcctttaaatgatatgtctgatgatgatgacgatgatgatagcagtgactaaggacacatttgggagtatttaatcaggtgtggctatctgagaaatcaactttgggggaaatgtaagattctgagctctctctctgttttgttctagccatgaatttgcctgagaaacttgtaacctatgtgcctcaatatattccatagaaagtaggtccccctgccttctcccactcctcacactcttctacagggataggcttttgcaaatatatcagataaattttttgtttcttgtttatttttaggttattttcttggaaggttgggaaaagatgtttgttttaacaggtcatgtactacgttgttgttttcatttctgttataagtaaaactaaaagcacagaatggtgggaaaggggctataatgtggttcattaataatgttagcagcttttttctaaccatcctgtctaatggttaagacaccagtaacaaaaacacatgatttggaaatactttggctttttcatatacctagtggtgccttatcataatagcactgttacatgaaataagcccctaccttcttactttctggtttgttgaaaaaatacactggtgctctttgaagtgataaaatgagtgtttatgaatgggtgtaattaggaaatacttctcatctgacagctacaaataactaagtttggaggtattttcactctatatgaataaatatttttccataaaatagttgtgattatatttttgttttatataggtcccaaattataattgtcaaatatatattttaaattaataaaagttgtcattcttaggaatttggtttgaaatttatcagttatacagaattgtcatactgcattagcttctacctttagtaagacatattttttaggtataaattcttatgctttaacattatttctggattgaaaatcttataaaacccttgaaaataaacagtctcttttttacaaagcctgtgttagagcacagatttacctaggcttgaagatttggaagaaataatatgtaagaatggcctcaaggcagaccactttaagtttggctagacttcatatcgtggaagtattgtctatttcagtgtgaaactatcttgaatttgcaaatatagtgttatattttataaagttttgtaaaatcccaaacaatatttctatttttgtaaaacaattgtatgtataatctgtatttgaaatcattttgcaatctatggaaatagagtagcaattgctatttctaaattgtgaactttaagtcaatctagatttattttgagaagtaattgttcactctttacttttgaggcagccattaggttgaaagtatatatttatcatataaaacttgatgcgttttgcactactctttccatttatatgctgcaaacaactacagtctttgaaatatggaaaatcagcagtctaaagtttgttttaaattctaaatttaaaaaatcttcaaatctgaatataccgcaaatgtcatgagaagtttgattcagtaacttgtgatggaggattctttggtt

SEQ ID NO: 73654 - DNA, 1104 bp, Homo sapiens; identical to SEQ ID NO: 63940

SEQ ID NO: 73655 - DNA, 1525 bp, Homo sapiens; identical to SEQ ID NO: 63941

SEQ ID NO: 73656 - DNA, 840 bp, Homo sapiens; identical to SEQ ID NO: 63942

SEQ ID NO: 73657 - DNA, 395 bp, Homo sapiens; identical to SEQ ID NO: 63943
  misc_feature (1)...(395): n = a,t,c or g

SEQ ID NO: 73658 - DNA, 3113 bp, Homo sapiens
ccacgcgtgcgctgaggcaggagaatcgcttgaacccaggaggcggaggttacagtgagccaagattgcgccattgcactccagcctagggaacaagagtgaaactccgtctcaaaaaacaaaaacaaaagaaataatgtcagttttgaataattaatttatattgaaccctcaagtaaaatattcatctgtttgacttgtacccagaagtttcaaattatgtttaagttcatgggtaatttgacttctttttgtctaaatgaatagaaattattttatcgtgtacagtggaccaatgaatcacaacgttctccagtctcaggcaagctggtgactttctgctcttttcccacagcgggacgaccctgggacagtctccactggggcagatccagctgaccatccggcacagctcgcagagaaacaagcttatcgtggtcgtgcatgcctgcagaaacctcattgccttctctgaagacggctctgacccctatgtccgcatgtatttattaccagacaagaggcggtcaggaaggaggaaaacacacgtgtcaaagaaaacattaaatccagtgtttgatcaaagctttgatttcagtgtttcgttaccagaagtgcagaggagaacgctcgacgttgccgtgaagaacagcggcggcttcctgtccaaagacaaagggctccttggcaaagtattggttgctctggcatctgaagaacttgccaaaggctggacccagtggtatgacctcacggaagatgggacgaggcctcaggcgatgacatagccgcagcaggcaggaggcgtcctcttcagcgtagctctccacctctacccggaacacaccctctcacagacgtaccaatgttatttttataatttcatggatttagttatacataccttaatagttttataaaattgttgacatttcaggcaaatttggccaatattatcattgaattttctgtgttggatttcctctaggatttcgccagttcctacaacgtgcagtagggcggcggtagctcttgtgtctgtggactctgctcagctgtgtccgtaggagtcggatgtgtctgtgctttattatggccttgtttatatatcactgaggtatactatgccatgtaaatagactattttttataatctttacatgctggtttaaattcagaaggaaatagatcaaggaaatatatatattttcttctaaaacttattaaattcgtgtgacaaataatcattttcatcttggcagcaaaaagttctcagtgacctattttgtggtgtttctttttgaaaagaaaagctgaaatattattaaatgttagtatgtttctgcccattatgaaagatgaaataaagtattcaaaatattaacattttcataaatataaggatgtattattgagaagtaagttgaagggcttataaggaaaaatgttttataactgagtaatatattaagagaattgtcatggttcataaatcacattgtgctaatctgaaatttcttacataaaaatgaagtgtcttatgtttattttaattgctgttgtaacttactcatgaaacagtatacagacaccttgtacttttcctcaactgtaagagcagactttcaatgttagcaattaagctgttgtcaaacaatcagtcatgagctttgttaattttcaatgttttcccagcctataaaaaaaggaaggtacacgttgtccttttaaaggttgtgaggtagattggagtgagtagacaggatattgcattaaaaattgaaagctcgatctgattattgtcaggaacccccagtgtgacctcacacataggatgtgggacctttgagccgatgtgcactggccaccaccagggttgggggcgccacagctgcgagcccggcccctgctgttctcagcagccacttcccaggctgcctcactttatgccatgactgaccttaatattgggatattgttatgcaatttttatcctgtttagactgttaaaagcaggtttctgtacttaagagtcccccagacctcctgtgaggtgaggctctgttgcagtgtcgtaggctgtgtgtgtctgtaaagaaagaatgcacatatgtagacgattaagtgtatattataagctatatgctgaaaatggcttccatagccatgagaacatcttaaaactatgtgtaaatatattaaggaaagtatagctttgtaatttaaattggagcttttagcttgtttcatggaactatacaacttgtgggtaactcacatgaccaaacaaaccaaagtgcctgtgacggggcgggtggcgtctacccaccctcccttctagcagattcttattttgtttgaatttataaacaaggctggtggctgtctacccaccctcccttctagcagattttgattttgtttcaatttataacttacactttgaaccatgggtttacttataatggagtctgtagcttcacagcatatttcatgtaatcataaagaccagtatattctctcctgctgaatgacatgcgactgtaaagcctctttataaaccatttccaatgttagtatataggattatttgggaagcgtatcaatacctttatagacaaatacgaacatgtatgcacacaaaacatttaactatggtatttatggaagacaggtaacaacattaaatctagttgctttcccttagtattagatttgttgagggttttttaaaaatcaggtctgttgaaagtcttctgtcataatctataaagcagcagcactcatggaaattgtagcatgccagtaatttttaccaacatcccatacatctgagttctgcagtccagtgtgtaatccgctccatgtgtattttgcttaatggaatgctttatttaagcacttaggcagagtagacacaattaaaggtacaaagcccagaggaagtggtagagcagcaccgtgcctgccctgaggcagtggagtcagtagcgctgtccccagggccttgagtgcctggaggtgcttggcctccagtagctgcctccattctcttttaaaaaaagggggtgattctgaggcactgaagtgcctcccagatgtggaggagtgaa

SEQ ID NO: 73659 - DNA, 817 bp, Homo sapiens
acgcgtccgggcatggttgataacatgaccaaacttgtgctagtaaatgccatctatttcaagggaaactggaaggataaattcatgaaagaagccacgacgaatgcaccattcagattgaataagaaagacagaaaaactgtgaaaatgatgtatcagaagaaaaaatttgcatatggctacatcgaggaccttaagtgccgtgtgctggaactgccttaccaaggcgaggagctcagcatggtcatcctgctgccggatgacattgaggacgagtccacgggcctgaagaagattgaggaacagttgactttggaaaagttgcatgagtggactaaacctgagaatctcgatttcattgaagttaatgtcagcttgcccaggttcaaactggaagagagttacactctcaactccgacctcgcccgcctaggtgtgcaggatctctttaacagtagcaaggctgatctgtctggcatgtcaggagccagagatatttttatatcaaaaattgtccacaagtcatttgtggaagtgaatgaagagggaacagaggcggcagctgccacagcaggcatcgcaactttctgcatgttgatgcccgaagaaaatttcactgccgaccatccattccttttctttattcggcataattcctcaggtagcatcctattcttggggagattttcttccccttagaagaaagagactgtagcaatacaaaaatcaagcttagtgctttattacctgagtttttaatagagccaatatgttttatatcttttccaataaaacccctgttcagacaaaaaaaaaa

SEQ ID NO: 73660 - DNA, 803 bp, Homo sapiens; identical to SEQ ID NO: 63944

SEQ ID NO: 73661 - DNA, 1200 bp, Homo sapiens; identical to SEQ ID NO: 63945

SEQ ID NO: 73662 - DNA, 919 bp, Homo sapiens; identical to SEQ ID NO: 63946

SEQ ID NO: 73663 - DNA, 1420 bp, Homo sapiens; identical to SEQ ID NO: 63947

SEQ ID NO: 73664 - DNA, 1684 bp, Homo sapiens; identical to SEQ ID NO: 63948

SEQ ID NO: 73665 - DNA, 3652 bp, Homo sapiens
ttttttttgacataatcatttttatttgatttaattgataaataaatacaagagaactgttgtgaaaccacttggcaatatagtaaattttaaagattttatttcaacttcactcacttatatttcttgggaatggggatatatacattattcaccaataaatcgctaatgctttaaatttacaattaccctatttgtagaaacctgaaagatcattccaattaaatgaaaaaaaaattgtacaaaaacgttcttttgctcttacaattcaaaatacattcaaattcacattcttaccagcagccaaaacctttaacccaaaattcagaaactgcagtcctacaagtgaacaaactagtgttttaatttaattatcatgattgttgttaacactgaaaaaaaaacatgatggctcctgaaacaagacaggttagcaactggtacagctttcccttctgggcactcaaagctttgcccttgattattatttttatttcatcttttcaaacacagacaattgctccaacttgaaagtttcaatggaattttggcatttaatattgctaatgcttgctaagatttaagatctcccaatgatgagaatcagaaaatgacgcacgactaaattaaaatcatcctaaaagacttactacatagtggtatctggtattcaatatcaatagtgtttttgaattacatgatatgtttttcacaaacatagcacctcatcaaatatctggtaaacactttgcaatcacaataagtgttgggagaccaagttccaaagacaattatgtgattcacttaaaggtaacattgtaagacaagtctcaggcataatgaagattaggaatgcagtctgctggttcccatgatctaaagggatgctcacctatatgggcaccatcctattaagacgtggtaatatgtttccaaaccaaaaaaagtcggtaagtgttaaaatggactcctgctttataaatgatctgttaaatgtacttgtaaaattaaaaaaatttccaaaatgtcaaaagagatatgattattgtatctccattattcccaagtaattctgttaaaaagatactaaatgaagtccaattttatcttgtaaagttttagtgtaaaaactaatgtactgaaattcagtaaagtttaactttcatctaaatgtaacgaaacaactattcattttggtgagttttcacaagctgtactcctgacctgaagaatcactttttttatgccgaggagatggagtagtctttgtaggagatggggacgcagtaccaggtgagtcagttcctccatcggaagtacttggtgatgatgccagatagggaactttctttcttccaaggaatcctcccccttcaaatcctcctttcttcctaaactctattttattttcattttcatcttctgatgaccttttcttggattctgaaaaaccttcagctattttatgcacttccaatccactatccaattctctcaaactttttatttctactccaggagactttctctcagatatattacattcccctgttgcccctttcacttcagcttgtattggacccaagttaccattttcagggacagctctttctacatttctgttcaaattaatagtctggaagtccctataactgtgaaagctctcagtccttcttgcccttgctaataaaggactttctctgtaaggcctcatggaaccgtaagtagctgcttcatgggtggtatcatggtgctgaagctgaaggctagaatttgattctcgtaagtggctatgctgaactacggaagttgctggactgatgttaggagtagcacagcgagatgtgctcaaatcacattgatcgagtaatttgagtagctcttcttcggttggaccacctacatccttatcttcacttttgttaaccatatccatagcagtggtcagatcccacatttgaatactgccatttgtatggcctgtgaacaagtagcgccttggtcttgagcccatcctactggatccctcacattccctccctgtaaatgaggatattgtagtacagtcaacagcctggatctcacatattctttttccagtcgatgagagtcttacaaatagtttgttggtgatgggaacaactttctggataaacacctgttgatcgtctcgctctccaaaaggtcctatgtcatttccagaggaatagctaccatgactttctgtctcctccagggatagtatcttgaatgacgctaaaggagtagaacctggctgagtagagatcattcctctgaatcgtgttactgtccacgtccggacatgattattatctgcacagactgatacaagatgcttctctgatagcatgatttttgttacgggacttcggtgaactgtgaaagtctgaaaaagctgaggacctgacccaactgtctctgggtgttgtacaatcactcgtactgctccagagctcgtaccataggcgatctcgatccagttaccactgacacttgttttgggtgtgaggtaaacactcagagcagtaatagcatcatttgaaggatcatgatacagttcagttacaagaagatcattatctttcattcgcaaggggaacttctgcatatctatgtaatatattgatccattgttacatccaagcagaaggaatgatccagcagtgtcataactagttataggaacaacatcttgaacctgccagtgctgagtgacagcattccacactcccactttccctgtatgactcgtggccaccaactggttaccaataaagaagagagcatctacaggaacacccaggctgaacactccaatttcacttccacttcccccatcctgaacactccacaagatgatgctactctctgaggcaacagcaaccattttgtctttgtctccatgtggccctccaaccacctttgcatttaaagctactcgttcgatagtccaatccaaatatgggctcgtaaacacttgctgccatcctgaagattctttgattctgtaacacacagcaaaatgggcatatgcagctacaatccagttgtgatggccagctactattagcacctttcgtggatccacaggaaatcctagcctaacagtttcttctcccgttccagagagaacaggctgtgtaccatttccccgggcttcaccttctgtagaatttagaccattcctagaatcagcagatctgactgtgttgtttattttacgactaggaatacctggtgggggcaagtaaccatgaaaaaggacactgccacaagaggaacgctccaattcttcacataagagaagccttcttactaatggagtgatcccgtaaaattctgcttcatgcctgagaacattaatactcactccccttaagtctagttcttttgtccgaagaaaatttaaaatgggtgcaaatgctgctggatctctatcaataaatatagcaccagtttcatctcgaagtgttgaaattctcccactcagcaaactggaaaaaaaagaatctggaatccacataagagtttgtcttgaggtactaaatctggtcccccctacgttcagttggacgatctcgccgctgccggccgccgccgcggggaagctgccgcagtgccctcccgccat

SEQ ID NO: 73666 - DNA, 6639 bp, Homo sapiens; identical to SEQ ID NO: 63950

SEQ ID NO: 73667 - DNA, 642 bp, Homo sapiens; identical to SEQ ID NO: 63951

SEQ ID NO: 73668 - DNA, 1972 bp, Homo sapiens; identical to SEQ ID NO: 63952
  misc_feature (1)...(1972): n = a,t,c or g

SEQ ID NO: 73669 - DNA, 1892 bp, Homo sapiens; identical to SEQ ID NO: 63953

SEQ ID NO: 73670 - DNA, 3511 bp, Homo sapiens; identical to SEQ ID NO: 63954

SEQ ID NO: 73671 - DNA, 2218 bp, Homo sapiens
ttttttttttttgtagagatggggttttgccatgttgcctaggctgatctcaaatccctgggctcaagcaatccacccacctcagccttccaaagtgctgggattacagatgtgagccaccacctacagcctggccaagaacccttttctctcccacattcccctgggagcagaggataggcctgatgattgttttaaacagtagaaagggttcagctaagaactacagtccactctcagccctgtcatgtactataggacaagtcttcattcacaacaaatggatagcaacaccaatctcgtaacactgggaaaactgcatacaatatttagaaggaacactaatacagcagaatctgcacacaacggagtcaaagatctgaggccaaatcctactacactttacgactttgagttggtcacttttctgaaccttagcttctccatcagtgtaaaactgatgtaaaataatataaagctatatgaaagctgatgtgatgtacttgtgaaatagtatgtgcaaaaggactttgtaaaatgtaaagcactatgctggttattgtgatatctgagatatttttaaagttgcaattcaattcaacaagcattcatttagagtcatgtgcaaggcactgtgctaagagatgggaaaatactacataaatacaaaattctgctgaaaactaacttattggcagagttccaaataatgaaacggatacatttaacaaatcagagtattgctacacctgagatttttcacttcaaccacctggaaggagaaaacctaataacagcatgaattttatcatactgttaccattcatagcagcttaataagtatttcacttcaacgtggtcagccaagttttataatttggcaatagtgtaaagaagcgtgaagagaaaaggaagaggaggaagagcttcagtctttgtatctcccagggttataatataaaactgaacatcaaataagccacccccaccccttatacttatgatttattatttcttaaagagcgtataatacattgtgggagaagggtagaagattcatttttcctgctcactcaactacacactcaaaagtgaaagccctcttccttgaaaagtgactgtcttagaaaagtttaacaatacatttcttaaaccaggaaaaaattacaccatctattcttttaacagcaggtagtttagagttcttaaaataactttataaatatataatatagtaacatagataaccaaagtggaaaaatttcaagccagggtaccagtgtataaaatgaaacttttcaagccatcttaacaacagttaagtgagcaaaccaccaactctgaactctcaagctgtgttttaaaatacaaagcagcccgcagcaagttctctcttgtccaggcattctgtatgtaaggccaggaggcttctgcttctttcctgggttttgcttgctaggcacagctggaagggcagaaggccacagctgagctgaactcgctgtcaaatttgaacttcctagaaaaatcactgcagaggaaaccacatcaacctactgaagatttcagatcttcagaaatgtcacggaaagtccgctgaggctgagcaggccatggggtctggtttggcgtgggaactgaattcgtgggactcactagcatggcactatagatattggaagcaaccacaagtatgcagagaagaataggaccgatgattgctccttccaggcctaggtagtatgctccaccggccactgccaagcctgtcaggtaaggatggccacctcctgatatgtcagagtagattgcagtatctacaaagtatgttggcaagagatgaaaaatcaacagtaaaatggccttgcatcctaacccttgtgtcagccacaggtcaagaactgcaggtactgctgcccagtatgtccccaggaatggcactgctccaaggattgctgctaatgctgatggtatgaagacaatattgatgccaaacatagtatgagtcagccaggtatacaatccatagaagccagccattttgagggaagcatcaaacacccctctgatagcttcttccacagactggccaataatattagaagaaggacctggctgagatagtggagtcaggcttatcacccacttcactggcttgtagtactcatcactggaacttaatagataaaatagtgtggtcaggaaaattatcagagag

SEQ ID NO: 73672 - DNA, 470 bp, Homo sapiens; identical to SEQ ID NO: 63956

SEQ ID NO: 73673 - DNA, 4623 bp, Homo sapiens; identical to SEQ ID NO: 63957

SEQ ID NO: 73674 - DNA, 2121 bp, Homo sapiens
ttttttttttttaaggttctcaagaattttattataaaacagaacaatgacacaatataagcttacacattaatatttacattatattcaaaatatattacagctttaatttatgaacagaaatatcctgtcttttcttctttttcttttctgttttctttgcatcattgatttgcatttttacttgatcttgtaatttagaaaagaatgcttgagaggactttaaggccttgtctttaccttcatcctttatgaaggaagctttgccagttttggtcagctgttttaacttctccgaagctactgttttgctgtatttccctgcttgatctacactgctcttttcaagcagttttctccgcttctccttctcttttattttcatacgcttttgatatttctttttccttcgctctcgtttcttgtctgtagctgttttttcagcagctgtttttatatctccagctttatttttctccttgatctcctctggggccaggagagctgcatcactaacactcactggggctacttcctccatggttatggctggcagatttgacacaactttaatctctggtacaggcggtttagggataaagtggaagtttgagagggcatccaattttaagaagagggaatccatcatcttctgaatttctacatgttctggattttcttcttctgctgttttttgctggttgagtttgatgtactcctgttcataaatttcagcaaggctcaatttactcttctcatggtctaaggttaaacgctttttatattcatatgcatcctctttaggtttttctttacgtactacatcatcccaagcctgatctcttatcctctgtttaatgatatcttccatttgaagggtggtttcctctgtaatcacaggtgccatccggacagcatggtcaaagtgtagggtctcctccaggaggctgttctctggcctcttctgtgctgtcacttccccctgaagctgccacggctttttttctaacaactctttttctaaagatgcaattttttcattcatcttttcctgtcttttttcaaaggaggatttaacttcatcagaatttttctttacatttaaaacacctgtatcttcagtttccgcatcatctggtaaagcaaaggtcactcttttcaagctttctttatgttgtttattgtcttcattttcttgaaggtcatcatcttcatccgtttccgaaatacttagttcttctgcttcttcttcagcaatttcatcatcttctttgtttgaatccagctcatcatcatgaacatttgttatgtcttcatcactttcaactggatcaaaaaaatctttgtatttcagatttctggaacttttacctgacttaagttttttacttccaaacagtcccccttcatcttcatcagaatcaatatcttcaaaaaaatcaatatcttcctcctcctcatcatcattatcatcttttcgttcctcttctttttctatgttttctaaataggcctccatttcagagagtttgaagaatttatcatctactatggacttttctcttggttttccctgtcctttgttttgcaccttgctctgctgttccaatttgctgatatcaaagtcaaggtcagaatcctcatcactgaaaacggggcttttcctcagatcagatttgcttgagttttcagctctctcacccatttcaggatcatcattacccatgtcggacacttcctcctcctctaaatcttctaggtcctccttgtcatcagcctctatctctgaaccatcctcttcacgttcctgttcttcactctctgggagaagactgatatcttcatcattaattgtttcactaactgcattctcgaagtattgtaaaattggttcattttgcgattccagttgttgccaaatctgctcatcatcaaaatttgctatcacaagttttttgcaggggcttccatggatcctaccattctctaatattttattaaagtcataaagcacttttgttaaagaagtgaactttgatgccaatccctcttgaatcgtgaggaagcactcgggccgacccgtggctttgccgacttccgtcagacaccgctccagggtcc

SEQ ID NO: 73675 - DNA, 1070 bp, Homo sapiens; identical to SEQ ID NO: 63958

SEQ ID NO: 73676 - DNA, 1231 bp, Homo sapiens; identical to SEQ ID NO: 63959

SEQ ID NO: 73677 - DNA, 1680 bp, Homo sapiens; identical to SEQ ID NO: 63960

SEQ ID NO: 73678 - DNA, 1598 bp, Homo sapiens; identical to SEQ ID NO: 63961
  misc_feature (1)...(1598): n = a,t,c or g

SEQ ID NO: 73679 - DNA, 2148 bp, Homo sapiens; identical to SEQ ID NO: 63962

SEQ ID NO: 73680 - DNA, 372 bp, Homo sapiens; identical to SEQ ID NO: 63963

SEQ ID NO: 73681 - DNA, 579 bp, Homo sapiens; identical to SEQ ID NO: 63964

SEQ ID NO: 73682 - DNA, 5203 bp, Homo sapiens
gtgctgcccacgcagagcccactttggctctctccacatctttagtttttccatcctcactaatttacatcactattttattttttttttaattaaacaggaaagagccagacttctcagaggtcagtctgttcaacaagtgggaccccagggccttctgtatgttcagcaaagagagcttgcagtgacctccccaaaggatggctccatctccattctgggttctgatgatgccactacttgtcacattgtggtcctgaggcacacaggtaatggggccacctgcttgacacattgtgacggaaccgacaccaaagctgaggtccccttgatcatgaactccataaaatccttttctgaccacgctcaatgtggaaggtgagatctacgctgctctcataggctggaagtacaccttgttggaggcttcagtgacgacaggcagttgtcacaaaaactcactcatcaacttcttagtgaatttgacaggcaagaagatgacattcacttagtgacattatgtgtgacagaattaaatgaccgggaagaaaacgaaaaccactttccagtaatatatggcattgctgtcaacattaagactgcagagatttacagagcatcctttcaagatcggggtccggaggagcagcttcgtgctgcgcgaactttagcaggaggaccaatgattagcatttatgatgcagagacagaacaacttcgtataggaccgtactcctggacaccatttccacatgtggatttctggttgcaccaagatgacaagcaaatactagagaatctttccacttcgcctctgggctgagccaccccactttgttgaacatattagatctaccttgatgtttttaaaaaaacacccatctccagctaacacactgtttcctggaaataaagccctactctacaaaaaaaatgaagatggcttgtgggaaaagatctcttctccaggaagttaaaaaacatgaattaccaaagaaagcaccttcttggcctgacagaccattggtggggctggcacgaatccagatctggatcctacatctgttgggtcttaggcctccttccctcctcagtgtctttcaaatgatgactttcatcaaatgactttcaaaataaaaccttattttggcaaaggcatttgttgagacttattttttggtttactaaaaaattgatgtccagtttttttttttggtcggtaataacgggcagaggagaacctacctctcactggtctatcggcagctatttcaggtacgtgggtaagtcttttgtaataagatttataaactgaattcactggtaacaatttcaagaccctttattgaacccaccattcaaataatatctcaagggtgaaatgtttcagcaaaaccaatttaacaattccaaatatatataaaaacatgtaattttcttgaaggtgataatttacccctcccccattttatctgctatacttcattgcaccaaatagggaagactgtttaatcatttgcaccaaaaaaaaaccccctgcattttgacaagtgtaaatgtcaaaaatcccatcaaatcagagtataattataggcttaatatactataactaaggcttccaatactacagtccagaaacccagtgtgaattttcccattttcaggtctcccaaaagcttgactgctggattaagaaggcacaggggccattacttacgacaaagtgacgcagtacttcggaaaagtaggaacgggcagtgccagcgagcttctactgacttaagcagggtgcccggctggatcagcgtgagagagtgctctgctggctcctgtttctgagttgggcccaggcgagctgccagggcagtagaagcttcagtgggagacaggtcaaaggggtacttgttttcagattttaaccaggtgggtgctacgtagcacacggaagagcaagctcttaagggtagcatctatcaggttttcagatactaaacagaaatgagcacagtctgtacttgtgtgccaattttaaaagctttgccagtatttaaaaatatatggtcaggaggagactttacagtttctctttacaaacggtatataatgggagaaatggccttgtggcagaggacagtcccagacagcagccttgccacagctcaagtagacacagtccttactaagtctccacgaagagcagtagctggggagggcttctgatgctcttatttacaatcccacaatcactgctctccttcaagtctagcagtcccactgtatattgcaacttgatcgtactaaagaccgacagcaaaggatacagccagtctcgcctctgtgaagtgttgcagagaacctggagagtgctaatgaaaagctgttttaccaaaaagttgccacgggcaacctcatatacttaggcttatgtttagaaagagcaagggtgctactggtagacacttgaaattcgaagtgttttttgtgaataaaatgtgtttatggtaacttagggaaaagtcgtagtaggacagcaaacatgtggttctacatgtacatgaagttagacaagctgactcccctcctagaaagcctacctttcaggcacatatttgtgccaaaatcccagtgaagcacaaacaacagtaatttatattagtatgtggcacagttcacatttccaatagaacttcatcttccctgaaacaatactcagtacagtctcaaaccacacaatgagtctcatcttaagctctccggtccttctacctgtgagtggtcatcttctgggtgtgggacccctttctggaaggcctcggtctggtcggtgtgctgagggctgggagcccctgggtgtccctcagtgctgctggcctcgagggtgatctgctccggcccactggataggcgctccaccttttctaagtcttcaatatgactgactgagctggtctcactcaaagcatctgaacctcgcagggaccttttaaaaggcttctggcctggaagcctctgcttggtgcgactgcccgagggcgttggaggcagcgtgactcctgcaccttgtgctttgtagacatatatgggttctgtggactccagagagcctgctgtcaagttaaaagttcttcccttctgtaaagcctggaccggagaaaaccaattcagcacggagcccactacagggatctgccgcaacaccccctcttccagaagccgttcttcacttgccttctgcagctccacttgagcttcctgaatgcctttccgaaccacttctgtcatgttttccaaaagcctcgagttatcctctatctcccgggctgtggccgcaatggtctccacgagctcagcagcatggacgttgtcgcttgccatgccgacataaaggcagctcttcatgctcttatactcagggcctattttaaaggttaggtcagattccagttcatttaacttcttcaggagtccagcatggatgttttccccttggggatatgatttcaaactgctcttatcatcattagcatgttcatacctgacaacccctattccagaccagttagggtcatcaacatataggagacctgctgttgcttccacttcctgcttgaactcttcacgcaactggagcgtacagcacagcactggcagtttgctttctatgcaggctacgagctgatccacatcctctccccgagttcctaaaactgctgcggtcatcaaagggctgaaccgcaaacacgtgccctcagcttccagatccatgactgtgaggccgcttgcaggcaccagctgcttcagctgttctcccagccagcgattcagcgcgtcacacgagtgcctctcccggccgactcctgaaggtgtcatgttgggcactgggacggctttaaacaccggatctgagcctggtaattcctggaaaaatctgaacaccaccactggggagctgagctcatcttccaccaagattttgatgtaattcactttcttcaaactttcctgcaaccgttgactcagttgacaggcatgcttgatcctctccacaaacccatcaagtcccaagtattgtaaagataaccacagaggcagggcacggagtttgtctgtgggcttatttgatgtaagaccagcaactaaagtcaaggcagggtcatcgtgtttatacagtgtcaccgcaggaacagctggcaaacccagccacgggccaggagtcatcgtcatgctatcacatttggctgcagccagcactgatgaggagacataacccagagccaatgttgccagattcacaccctccacatgaagccatatgccatactgctcacagagttctttcaatctcccaatcttgtctgtgtgtcctactgctgccgttcctgcatttgcgacaagcaacaggggcagtcttcctcgctctatatcatctttaatcagtttctccaggaaggcaacatccatctgatgctgggatccaaacacagtgttacagggtacacggcacaagcaggggaagggcaagccgagctgattacaaaggtattggcccaggccaggtctagcagcagcactaagatatatgacaggcttcttgttatataacacattgaagccatccactacgaagtcttcatatcgagaatgaatggcaagcctacatatctttgcaagtccttctctttcctcttcgtggaaataagcacacccattttcatatctgaaaattctgcatagccataaggtggtatctgaaagtatcctagttgtaagttttctcagcttctctttgtccagagttgaaatataagctcccagactatgtcccaacaaagccatatgaccttgttctccaatattttggattctggggctctggggctcctcatcttcatctccatgcatgagattctgaactaactggaggatgctcaccatatcttgcccactgccctggagtgggcctggaatatctccggatatgagcttctttccattttcctcttctgttcttctctgactgtcctccagcatcttcactgcctccttcaagttttttcccatttcagctaacgtggggtctgctatcttctccagggacgcgtccatggctgaggcggccggtggtggcctggcggtcccgggctctacttcctcctcccgcgccccgcagctccttccacgctggcagcgctgacgtcccccg

SEQ ID NO: 73683 - DNA, 1117 bp, Homo sapiens; identical to SEQ ID NO: 63966

SEQ ID NO: 73684 - DNA, 370 bp, Homo sapiens; identical to SEQ ID NO: 63967

SEQ ID NO: 73685 - DNA, 1980 bp, Homo sapiens; identical to SEQ ID NO: 63968

SEQ ID NO: 73686 - DNA, 449 bp, Homo sapiens; identical to SEQ ID NO: 63969

SEQ ID NO: 73687 - DNA, 2886 bp, Homo sapiens; identical to SEQ ID NO: 63970

SEQ ID NO: 73688 - DNA, 6583 bp, Homo sapiens; identical to SEQ ID NO: 63971

SEQ ID NO: 73689 - DNA, 927 bp, Homo sapiens; identical to SEQ ID NO: 63972

SEQ ID NO: 73690 - DNA, 5564 bp, Homo sapiens; identical to SEQ ID NO: 63973

SEQ ID NO: 73691 - DNA, 1485 bp, Homo sapiens; identical to SEQ ID NO: 63974

SEQ ID NO: 73692 - DNA, 1586 bp, Homo sapiens; identical to SEQ ID NO: 63975

SEQ ID NO: 73693 - DNA, 1887 bp, Homo sapiens; identical to SEQ ID NO: 63976

SEQ ID NO: 73694 - DNA, 1621 bp, Homo sapiens; identical to SEQ ID NO: 63977

SEQ ID NO: 73695 - DNA, 411 bp, Homo sapiens; identical to SEQ ID NO: 63978

SEQ ID NO: 73696 - DNA, 1473 bp, Homo sapiens; identical to SEQ ID NO: 63979

SEQ ID NO: 73697 - DNA, 227 bp, Homo sapiens; identical to SEQ ID NO: 63980

SEQ ID NO: 73698 - DNA, 1251 bp, Homo sapiens; identical to SEQ ID NO: 63981

SEQ ID NO: 73699 - DNA, 1149 bp, Homo sapiens; identical to SEQ ID NO: 63982

SEQ ID NO: 73700 - DNA, 943 bp, Homo sapiens; identical to SEQ ID NO: 63983

SEQ ID NO: 73701 - DNA, 1398 bp, Homo sapiens; identical to SEQ ID NO: 63984

SEQ ID NO: 73702 - DNA, 1024 bp, Homo sapiens; identical to SEQ ID NO: 63985

SEQ ID NO: 73703 - DNA, 696 bp, Homo sapiens; identical to SEQ ID NO: 63986

SEQ ID NO: 73704 - DNA, 1799 bp, Homo sapiens; identical to SEQ ID NO: 63987

SEQ ID NO: 73705 - DNA, 2549 bp, Homo sapiens; identical to SEQ ID NO: 63988

SEQ ID NO: 73706 - DNA, 480 bp, Homo sapiens; identical to SEQ ID NO: 63989

SEQ ID NO: 73707 - DNA, 2477 bp, Homo sapiens; identical to SEQ ID NO: 63990
  misc_feature (1)...(2477): n = a,t,c or g

SEQ ID NO: 73708 - DNA, 1297 bp, Homo sapiens; identical to SEQ ID NO: 63991

SEQ ID NO: 73709 - DNA, 889 bp, Homo sapiens; identical to SEQ ID NO: 63992

SEQ ID NO: 73710 - DNA, 386 bp, Homo sapiens; identical to SEQ ID NO: 63993

SEQ ID NO: 73711 - DNA, 791 bp, Homo sapiens; identical to SEQ ID NO: 63994

SEQ ID NO: 73712 - DNA, 2403 bp, Homo sapiens
taactttttgataggttaaaaacttacaaaaaacgtggatagagggggtctgtcttgcccactagaccgatatggttaggttaggttaggttaggttaggttaggttagaacccgacattgtgctctgtacttcctagccattcattcgcttcaagtgctctgaaatttaatttaaaaaatcatagttggaatcctttcggtcactttctctttctcccttcgttcctccctttccctcttgattcttccttgaggcgcaaacacctgagagaggcttctgtccctcggcggtctccgtaagtaagtgaaccgttattggctggagggcgctgacgtctgattgttgcgcggtcgcatttttccggggagcgcggattcgcattcccaattttaggtggcagtcgcaacccatactattcggacagatggcacagaaaccgctgcgcctgtgagtgaccgtgaatggaagcctctctccctgtgtctctttcgtgtgtcttggcttgtggagatgttgaaggaaagtttgatattttattcaatagagttcaagcaattcagaagaaaagtggaaactttgatctgctgttgtgtgtaggaaatttctttggctccacccaagatgctgaatgggaggagtataagactggcatcaagaaagctcctattcagacatatgtgcttggtgctaataaccaggaaacagtaaaatatttccaggatgctgatggatgtgaattagctgaaaacattacttatctgggtcgtaaaggtatcttcactggaagctcggggctgcagattgtgtacctcagtgggacagaatccttaaatgagccagtaccaggttatagttttagtcccaaggatgtgtcttctctgagaatgatgctgtgtacaacctcccagtttaagggtgttgatatcttgctcacatccccatggcccaagtgtgtggggaactttgggaattcttctggagaagtggataccaaaaaatgtggttctgctttggtttccagtcttgccacgggcttgaaaccaagataccattttgctgctttggaaaagacctattatgagaggcttccatatcgaaaccatatcattctacaggaaaatgcacagcatgccacccggtttatagctctggcaaatgttggaaatccagaaaagaaaaagtatctttacgcgttcagtattgttcccatgaagctaatggatgcagcagaactggtaaaacagcctccggatgtcactgaaaacccttacagaaaatctgggcaggaagcatccataggaaagcaaattcttgcccctgtggaagaatcagcctgtcagtttttctttgatttaaatgaaaagcagggaaggaagcgttcatccacaggtagagatagcaaatcttctcctcatccaaagcagcctcgcaaacctcctcagcctccaggaccctgctggttttgccttgctagccctgaagtggaaaaacatttggtggtcaacatcggcacacattgctaccttgccctggccaaaggaggcttatctgatgaccatgtcctcatcctgcctattggacactaccagtcagtggtggagctttcagcagaggtggtagaagaggtggagaagtataaggccactctgagacggttctttaagagtcgagggaaatggtgtgttgtatttgagagaaattataagagccatcacctccagctacaggtcattcctgtcccaatcagctgctctactactgatgacattaaagatgccttcattacccaggcacaggagcagcagatagagctgttggaaatcccagagcactctgacatcaagcagattgcacagccaggagcagcatatttttatgttgaacttgacacaggagaaaagcttttccacagaattaaaaagaattttcctttgcagtttggaagggaggtcctggccagtgaagccatccttaatgttcctgataagtctgactggaggcagtgtcagatcagcaaggaagacgaggagaccctggctcgccgcttccggaaagactttgagccctatgactttactctggatgactaaaacaaagggaagaactttttatgaactccacaggaagtagtaaagcttttttttttttttaattaaaaaaattttttttgagacaaagtctcgctctgtcacccaagcaggattgcagtgagccaagatcgctccattgcaacccaacctgggttgaacagtgaaactccatctcaaaaataaaagaataaaagtatgtctgtcatccagctcctatgtctgttatccagctccaagtacagcttgtgtatatcaacattttcaaaaacctttaaactaccaaatgaaatccagatgtttttccatggtta

SEQ ID NO: 73713 - DNA, 479 bp, Homo sapiens; identical to SEQ ID NO: 63996

SEQ ID NO: 73714 - DNA, 943 bp, Homo sapiens; identical to SEQ ID NO: 63997

SEQ ID NO: 73715 - DNA, 666 bp, Homo sapiens; identical to SEQ ID NO: 63998

SEQ ID NO: 73716 - DNA, 569 bp, Homo sapiens; identical to SEQ ID NO: 64000

SEQ ID NO: 73717 - DNA, 2797 bp, Homo sapiens; identical to SEQ ID NO: 64001

SEQ ID NO: 73718 - DNA, 2112 bp, Homo sapiens; identical to SEQ ID NO: 64002

SEQ ID NO: 73719 - DNA, 1513 bp, Homo sapiens; identical to SEQ ID NO: 64003

SEQ ID NO: 73720 - DNA, 1085 bp, Homo sapiens; identical to SEQ ID NO: 64004
  misc_feature (1)...(1085): n = a,t,c or g

SEQ ID NO: 73721 - DNA, 1061 bp, Homo sapiens; identical to SEQ ID NO: 64005

SEQ ID NO: 73722 - DNA, 1096 bp, Homo sapiens; identical to SEQ ID NO: 64007

SEQ ID NO: 73723 - DNA, 1490 bp, Homo sapiens; identical to SEQ ID NO: 64008

SEQ ID NO: 73724 - DNA, 2030 bp, Homo sapiens
  misc_feature (1)...(2030): n = a,t,c or g
gtgacattttttcatacaatatgtaatgtaatcatattaaacatttagacaccctcacataattatttaagggcctagtagatgaaattgtatttcacagaaacaaggataagttgagatggagacacagtgcctatgctcagaagtcactggaaagcacctgatcaccatagtaaagatggccaagggcttctgacctgattaaaataaggagtcatataagaaatggctttattagaaaaaatgtagtgtacatgtggctaatttccatcatcgatatacctcttggctattttatcattaaaattggatacagggtttgaacttctttagaagttagtggcatatcttcctattctgatatgtgacttagggaaggcgttatcttcatatgatagacaccctttatttcttttcataattacaagtaatcagtagtttagcactggcacaaaacagagagagaattacttaggtagtgctttatgtgtaagaagtcacacttccaaccccagaagcaggcacaggtatgccatctgtagagttttaaaatcccctattatcactcaagtctcccattattattacctagtagtaattaaattaatgtgataatctgtaacctaacaaaacctctgaatgaagtttctttcttctccctcttttcctgttagatgtgcaattctgagcaaatgtgcagtgtgcagtattgatttccagcctccttttaaactccttcaagtctgtgctattaaacggagacaaccacatcaagatagagtctgtcataggattccctgaagcacagaatgaggaggagactgagcaaacacgacccgggaaggcaccagttgaaccaagacaactctgtatgataaaatgtgagaaaaaataaaagtactcccataaacatattacttaaaaaagtgacaactccacaagtaattccttctggaactgggtagacagtttccacaaaaagctcaaaaaatataggcacgctgctattcaagaacactcccaggagaatacaggaggcatacaatgtcactgtggttaaaggtaggtgtgtgatgctgttcaaacaggtcagggtgaaccacgtggatgacagtgtagctcccgaaaacaggaggagaagaattagtttcagcatacccctgataaaatctgcaaaccttgccatagctattccaacaacacagcctccaactatggaccaaaatccaatccagccagcatctacttggctgacatgcgctggtgttaaaattaagtccagaactccagaccagccagcaaatacaccaagtggtatggcatatgctaaagcaatcatcaaaaatcgaaaattgcttaataatctacaaacgcttctccgataactcagccgctggctagctgcagcaacactgggaggaagaggaggtcggggtgggaaataagctagtgttgcagaaaatattaagcagacaactccaaattctgcatataacacagcctctatgcgatctttaatatgcgccctgctgctctctgcagcaagaagaggtgatgtcccattgggagctggaacaacaagtggtccaactaaaaatgcacatgctcccccaagataactgagcattgatgcaatagctgtggctgtggccctttcatctgcagaaaaccacgtcgtagagagaaatggtgctgcattcattacagttggacctgccaatccatttaacatctgtcctccatgaattaatcttcttttaaggattaagtctgatataggtatgcatcttagaccagttcccaaaaccataaggaaggatgtcaggagcacagttatccggagacctctcttgtccaggagccacatgaacgcgaagcagggcaggaagccgatgggcccccacagcacgagcagcgcgatgtcccagctggagaagccgtaggcaaggcgcgcagagttctggatgggaccccaggtgttccagtccaggccctaccgaacgccagcagtnnnntttccacactcatct

SEQ ID NO: 73725 - DNA, 816 bp, Homo sapiens; identical to SEQ ID NO: 64010

SEQ ID NO: 73726 - DNA, 3775 bp, Homo sapiens; identical to SEQ ID NO: 64012

SEQ ID NO: 73727 - DNA, 622 bp, Homo sapiens; identical to SEQ ID NO: 64013

SEQ ID NO: 73728 - DNA, 1117 bp, Homo sapiens
gtcaggtcccgtcagcagcctggctcatggctgtgtgcggcctggggagccgtcttggcctggggagccgtcttggcctgcaagggtgcttcggcgccgccaggctcctgtatccccgtttccagagccgcggccctcagggcgtggaagacggggacaggccacagccttcctcgaagacacccaggatccccaagatttacaccaaaacgggagacaaagggttttctagtaccttcacaggagaaaggagacccaaagatgaccaagtgtttgaagccgtgggaactacagatgaattaagttcagctattgggtttgctctggaattagtcacagaaaagggccatacatttgccgaagagcttcagaaaatccagtgcacattgcaggacgtcggctcggccctggcgacaccatgctcctcggcccgggaggctcacttaaagtataccacgttcaaggcggggcccatcctggagctggagcagtggatcgacaagtacaccagccagctcccaccactcacggccttcatcctgccttcgggaggcaagatcagctcggcgctgcatttctgccgggccgtgtgccgccgggccgagagacgtgtggtgcctcttgtccagatgggagagaccgatgcgaacgtggccaagttcttaaacagactcagtgactatctcttcacgctagccagatatgcagccatgaaggaggggaatcaagagaaaatatacaagaaaaatgacccatcggccgagtctgagggactctgaaatcacagaaagtgggagcttggaggatccctccatggcgatggccgtggagagaggagcttgcccttctggggtcctggttcctgaagagctcacccagagaggctcaaagcagccttttgtcccagctcagctttgatctacacctcttgccaccttcctcaagggactgtgaccctttggggattctgcccctgaccctgcttccccaagctctcctgggtcttggagggatgtgggaatgaattggcattgcaggaaagacaggtaaagtgattgctgcaatgagaaggagctgtgcggaaaaggaataaaagttggaaaggctaaaaaaaaaa

SEQ ID NO: 73729 - DNA, 966 bp, Homo sapiens; identical to SEQ ID NO: 64015

SEQ ID NO: 73730 - DNA, 1138 bp, Homo sapiens; identical to SEQ ID NO: 64016

SEQ ID NO: 73731 - DNA, 1460 bp, Homo sapiens
ttttttttttttctctcataaagtagttttatttagatttcaaacaaaccaaagcagggaaaagagtcggccacggtgaatccgtccactctgtgctggacgtggctccaggacctggagctgacaggcaggaccgggcccctcggaccgctacacctgggcctcccaggctggtagtgtcaggaaacggccccccgcccacgttcccagcagcgcccccgtggctcctccggggtgcggccagtccggaagctgggggaccccggtagaagtcgggctcagctcccctcccgaggggacaggtgggccggccgctcccaccctgggcccgtccaccgagccccgaagtgaacgtgagttgggcgggtggggggcaagccccttctttcttcttgaaagcaacgttgaaaacccagaacagacatggggaaggagaaaaagccaaaacgaaacaaccagaggagacggggaccagcacaaaacctccgtgaggtagtctgtcgtctaaggagccacgggtccggccctagtgaggtaaactcggcaagtttattctggtggtgtcaggactcctccgtgccagagtcatcctcatcgtccccgaagcagctgtcggcctcctcctccacctcgccgtcctcgtagtagtcgtcgtagaagaggtttgagccctcgtcgggcgccggcgccttggtcttcacgcagtactcggccagcgtggtgggcaccttcacgccgtcacgctccgcgtccaccttggtccccaggacctgcttccggatgatgtctgtgtactcccgatccttccccttgctctctttccacttcctgtacatcacggaggcgtccacgtttgcgggcgagaaggtgttgggctcgttcaggagggagatcacactcaggagaatggtcctgacgttctgcgtggggttccacctctctgagggcagctccccgctctgggggtcgtccaccggcgggtggaggatggagatacacacgtcccccgtctcgtagatgttagggtgccacatcttggtcaggaaccgaaaggctggtggagagtatgggtagtcgatggggaacttgaggcgcgccttgaagtagccgccctcgtagtaggtgttggggggcccgaagatggccacctcccagttgtatagatcgccctcgtccaccagtgtcacgcggaatccctcgaccggctcttcctgcagccccttgagctccagcagcagcgccttctgcgagctgggcactagcggccgagccatggcggcggcggaggggcccggggtcggagcagcgcggggccgcgcgaccaccgcgagttcgcgagacgggccgggccgcgcaccgtccgggggggagccaccggggccgccgcctgcctcctcctctgcgccgccgccgccgcccggggaccccgagcgctccagcagctctggcgccgccgcaat

SEQ ID NO: 73732 - DNA, 578 bp, Homo sapiens; identical to SEQ ID NO: 64018

SEQ ID NO: 73733 - DNA, 1200 bp, Homo sapiens; identical to SEQ ID NO: 64019

SEQ ID NO: 73734 - DNA, 1943 bp, Homo sapiens
ttttttttttttgtttttcataaagctatgtattttttcaacttaaatgagaagcctttattctgagattacattcttcctaattttaggggctaaaatatattttcttttacataatgatgctgatagcagatggctatttgtttttgtttgtttatttttgttttatgtccttagctggcaaaattaaaagccagaagctaaggccccattttttttcttttaatacaaatctactggtgcttaaaactcagagcttaggaaacacagcctaggtaaagaccaatcttcttgctgcatatttcacagtattgaattctttcttggtgagttctccatacaagttatgaagcaggataaaagtcagtcttatattaagtcattgtaaatacggccttaatttcaatcaccaaagaaatgtatttttgttgtataccatggttgcagcatgttttattaaaactaattatatcaatagctacctgtagagtatcaacttaaaaattataatgccatttctatgaagtcattacttttataggactagcctgtgtcatatgtgtgatcaatattggtttaatgcagaaacaaaggcagctgggtgtccaagcaagccacttttctgggtcagggtttcagtggtaccatagatggctgccagtctcaatgtacactttggcccatttatctttataaatcataccatatagcttcgatatttacatacatttaaactgagaagaaatatgcattataagaaagcatagtttagtgggcttcatgtgtcagaaataattccatatttcacaattattttcatgtcattagctacccttgataaagaacaattccatataaatgtacaaactggaagataattttataaaaccgtaaagagatctttgtaaattgcagtgtgtctgcttataaacaaatcaaatcgatctccatttcttcaagtgtcaaaaacaaaagagtagctggacattggtttttataatcagtttcagagaaaatacaggaataatgatcaatggcattttgaagcagataaaactgccaagttttatgcttgagtctatcattctgtgatttgctataatagtattcctttctattaggtgttcccgacaatattagttctatattcatttgatatgagcatttatattaaacttcaaaattacctcggatagtatccagaatatatgtcagaaacccctaaaagcaacttctattttcctcttaattaagataatatttagtcatgttaataactattgaaatgacaaggtcagattttcaaaaccagtagggtgctttgcagtgaacgtgcatatgctggagcatctggccaagttacaatgcagttatcaatgcttagttcttcttggttttcttcagatagtgagcccgtgtagacttgttcatattcatgactattttcaaataaatccaagaaggcaggtttgagattatcaagcccataagagcatggatcaggtatccattggttcgggattgcaggccgactgttttaattgcagacttcacaaacgtctccggagagggcttatccaaagttggcttccggattttagccagttttgtagctacgaagtatggcaggacactctgcacaaagacgcccttgctcctatactcctcatggaggcactgagagaagaaatctacaaaagtcttggttgcagaatagatggtcaagagtgggacagggagcatgccactgccagatgaaatgttcagaatagcccctttggatctttccaccatgccaggcagtaccaattgtgtcatcttacaaacagaaagaatattaatatttatcattttcttgatcacattgtccaagtcaggaacatccaaaaagtattcaggatactcatacgacattctcacgttgttcactaagatgccgattt

SEQ ID NO: 73735 - DNA, 2272 bp, Homo sapiens; identical to SEQ ID NO: 64021

SEQ ID NO: 73736 - DNA, 2174 bp, Homo sapiens; identical to SEQ ID NO: 64022

SEQ ID NO: 73737 - DNA, 1266 bp, Homo sapiens; identical to SEQ ID NO: 64024
  misc_feature (1)...(1266): n = a,t,c or g

SEQ ID NO: 73738 - DNA, 1954 bp, Homo sapiens; identical to SEQ ID NO: 64025

SEQ ID NO: 73739 - DNA, 1095 bp, Homo sapiens; identical to SEQ ID NO: 64027

SEQ ID NO: 73740 - DNA, 2414 bp, Homo sapiens; identical to SEQ ID NO: 64029

SEQ ID NO: 73741 - DNA, 3183 bp, Homo sapiens
tgaaatcgaattgccgtgctcagaggatttgaatttggaaactttgtcccaagcacatgtctacataattgcaggagcctgcttgtctctgggttttcgatttgctggctcagaaaacttatcagcatttaactgtttgcataaatttgccaaagattttatgacttatttgtccgcacctaatgcttctgttacaggtcctcataacctagaaacttgtctgagcgtggtgctgctgtctctcgccatggtcatggctggctcaggaaacctaaaggttttgcagctttgtcgcttcttacacatgaaaacgggtggtgaaatgaactatggttttcacttagcccaccacatggcccttggacttctatttttgggaggaggaaggtactctttgagcacatcaaattcttccattgccgctcttctctgtgccctttatccgcacttcccagctcacagcactgacaaccggtatcatctccaggctctccggcacctctatgtgctggccgcggagcccaggcttctagtgcctgtggatgtggacacaaacacgccctgctatgccctcttagaagttacctacaagggcactcagtggtatgaacaaaccaaagaagaattgatggctcctacccttcttccagaactccatcttttaaagcagattaaagtaaaaggcccaagatactgggaactgctcatagatttaagcaaaggaacacaacacttgaagtccatcctttccaaggatggggttttatatgttaaactccgggcgggtcagctctcctacaaagaagatccaatgggatggcaaagtttgttggctcagactgttgctaacaggaactctgaagcccgggctttcaagccagaaacaatctcagcattcacttctgatccagcacttctgtcatttgctgaatatttctgcaagccaactgtgaacatgggtcagaaacaggaaattctggatctcttttcttcagtactctatgaatgtgttacccaggagaccccagagatgttgcctgcatacatagcaatggatcaggctataagaagacttgggagaagagaaatgtctgagacttctgaactttggcagataaagttggtgttagagtttttcagctcccgaagccatcaggagcggctgcagaaccaccctaagcgggggctctttatgaactcggaattcctccctgttgtgaagtgcaccattgataataccctggaccagtggctacaagtcgggggtgatatgtgtgtgcacgcctacctcagcgggcagcccttggaggaatcacagctgagcatgctggcctgcttcctcgtctaccactctgtgccagctccacagcacctgccacctataggactagaagggagcacaagctttgctgaactgctcttcaaatttaagcagctaaaaatgccagtgcgagctttgctgagattggctcctttgcttcttggaaatccacagccaatggtgatgtgaccgtgtctggcggtgaacctaccctgaaacgtgacttctgcacaacaaacgtgaccaaacatcaaagctaaagcaatgtttataaagttttatggtataactagggggaaatgagctgcacaaacctcaatgtattttaaatctgttgctgtcatcattaacggtatatgacatataaaagcaagttaaaatttacttttgtaaataaagtttttggtttgtttccaaaactcttgatgattgctttagttttggacttatagaatagagcaggggttgctggagtgaatattgatttttaaagtctttgaactgtggtggtataggtgaagtgactatgcccaaaaatgccaagttttaaaagaagctatgtcataaagttttactttctgtgggcaaaagagcgctttagccatttcctcagatgtcacagttgtcctgtctaaaataagtttgtacttctggtgacaatgccagacactcttatgatgtgatcaccttaaacaggagaaggagatttttgccctcagttgctcaacatgaagtactgtggactgaattgtgtcctcccagaattatatattgaggccctaatccctgtgtgactgtattaggcaatagggcatataggagattactaaggttaagtgaggtcatcataagggtggggccttaattcagtagaattggtggcctcctaagcagaggaagagagatttttctttctctctctgccatgtgaagacagtgaggagtcggccgtctgcaagccaagaagagcccttatcaggaacagacttggctagcaccttcatcgtggacctccagcctccagaattgccaagaaaatacattttccgtcgttgaaacccacccagtctgtggtattttgttatggcagcccaggcagactaatacgtgaagcctgctctaaatagataaaataagaaattactacagagggctctttagaaattgtatttaaaaacaagacaatccatatttacctaagatttacagaatgtatgtctataaaaggagggatttctggactagatgatgatgaaaaatgttcatataaaggcacctccagcttcgagttgccaacacaggaggaagaatgctccctgctgttcagatgctgatatgtgtcctgtgcttcctggaatggccagtgggatcataagctggtagaagcaagaccttcatccactgacttcatatttcttccacatcctgaactgtggtgtttgactttaaaaataaattaaagcaaatagaaatgtttcccattgagattttggcaaaaacccacatgacatttgcgtctgccagagtagacttggaaggcatgcaccctggaggccaagtggtattctctggactctctgtccttgcatttgcgtggctgccccgaggactcgcttcttcctggatgtgaagcagaggcacgatggggctgactgagaggctgaaatgtgcttctcttcacagttacatagttttcttctaattaaaaataaattttaagtggtagattatgaaaattccatttgaatcaagattttaaaaattcaatatcaaaccagttgttactgtcttcactctccgttgtttacgattgtgtgcttttccctgaataaagaatgactggagagacattaaaaaaaaaa

SEQ ID NO: 73742 - DNA, 1633 bp, Homo sapiens; identical to SEQ ID NO: 64031

SEQ ID NO: 73743 - DNA, 2214 bp, Homo sapiens; identical to SEQ ID NO: 64032
  misc_feature (1)...(2214): n = a,t,c or g

SEQ ID NO: 73744 - DNA, 435 bp, Homo sapiens; identical to SEQ ID NO: 64033

SEQ ID NO: 73745 - DNA, 473 bp, Homo sapiens; identical to SEQ ID NO: 64034

SEQ ID NO: 73746 - DNA, 1722 bp, Homo sapiens; identical to SEQ ID NO: 64036
  misc_feature (1)...(1722): n = a,t,c or g

SEQ ID NO: 73747 - DNA, 1812 bp, Homo sapiens; identical to SEQ ID NO: 64037

SEQ ID NO: 73748 - DNA, 4602 bp, Homo sapiens; identical to SEQ ID NO: 64038

SEQ ID NO: 73749 - DNA, 1643 bp, Homo sapiens
ttaccgcgggccctcaccagatgaggacccaaaacttggcccgcccacctccgcttaagccaaaaaccgccgctttcaaatcgccaatcaaattcttccttggcttcgagtctctcagccggccgcgctctccgatgcccagccctcctggaaccacctcgcctgtgacgtaggtggagcgcgcactgcctccgggtccgtctttctcaattgggaccggaaaacgttgtcgctcatcctatgacgcgaaagtaaccgagactatcaggatccggagacggaaatgtccgaaggccgcagtacttgaccctgtattttgggagtcgaacggagtaagttacaagcggcctatagggtcgcacagcttgggcgaagtctaattaactctccgtcctttttcttgcgggccactctatcatctatcgtccttcttaccccgcccccccgtcctgcacacccatcagttccttggcctagttatctatgcgcacgcgcaaaagtcttcggcagcacttgtagttcccgttttcagacagtaggggcgcataggggcccggcgtggggaggtttggggcgcgcccggcctatgacggcgtccttgcggaagtacgggtgccgagagaagcagtagtcaataaagagagtgccgtatttcgcagattggagctgagctgtggctgccagaagatagcgaacgaatggaaactgaaagtggaaatcaggaaaaggtaatggaagaagaaagcactgaaaagaaaaaagaagttgaaaaaaagaaacggtcacgagttaaacaggtgcttgcagatattgctaagcaagtggacttctggtttggggatgcaaatcttcacaaggatagatttcttcgagaacagatagaaaaatctagagatggatatgttgatatatcactacttgtgtcttttaacaaaatgaaaaaattgactactgatgggaagttaattgccagagcattgagaagttcagctgttgtagagcttgatttggaaggcaccagaatccggaggaaaaaacctctgggggaaagaccaaaggatgaggatgaacgcacagtgtatgtggagttacttcccaaaaatgttaatcacagctggattgaaagagtatttgggaaatgtggcaatgttgtttatataagtataccacattataagtctactggagatccaaagggatttgcgtttgtggaatttgaaacaaaagaacaagcagcaaaagcaattgagtttcttaacaacccaccagaagaagcaccaagaaaacctggcatatttcctaaaacagtgaaaaataagcccattccagccttaagagttgtggaagagaagaaaaagaaaaagaagaagaaaggccgaatgaaaaaggaagacaatatccaagccaaagaagaaaacatggacacaagcaacaccagcatcagtaaaatgaaaagatccagacccacatctgagggctctgacattgagtccactgaaccccaaaagcagtgctcaaagaaaaagaaaaaacgggacagagttgaagcatctagcttacctgaagtcagaacagggaagaggaagagaagcctgggccccgtaactcagctcctctttgtggctttcttcatggcttttttt

SEQ ID NO: 73750 - DNA, 1297 bp, Homo sapiens; identical to SEQ ID NO: 64039
  misc_feature (1)...(1297): n = a,t,c or g

SEQ ID NO: 73751 - DNA, 2071 bp, Homo sapiens; identical to SEQ ID NO: 64040

SEQ ID NO: 73752 - DNA, 6774 bp, Homo sapiens; identical to SEQ ID NO: 64041

SEQ ID NO: 73753 - DNA, 2384 bp, Homo sapiens; identical to SEQ ID NO: 64042
  misc_feature (1)...(2384): n = a,t,c or g

SEQ ID NO: 73754 - DNA, 1531 bp, Homo sapiens; identical to SEQ ID NO: 64043

SEQ ID NO: 73755 - DNA, 799 bp, Homo sapiens; identical to SEQ ID NO: 64044

SEQ ID NO: 73756 - DNA, 1159 bp, Homo sapiens; identical to SEQ ID NO: 64045
  misc_feature (1)...(1159): n = a,t,c or g

SEQ ID NO: 73757 - DNA, 663 bp, Homo sapiens; identical to SEQ ID NO: 64046

SEQ ID NO: 73758 - DNA, 1959 bp, Homo sapiens
actgactttaaggggcttgcttttggtgtgtggctttcaaaattaatttaaaacgggaaatgataaattagaaatactcttgtggtattagatatatctctgaatgagtagtagagagaaattagcttgccttgtacctattgtatgcttaacaaaatagccgatttatcatgctttattaagcattaatgagcatatatttttcatgtttgcaatttttagacaaattgatgtactttttatcttgtacgtggatataatgaatagaatatacataaaattcatactttacatatgtgtgtatatatatatatatatctagggctggaagaaagaaagaattctggctgaataccctgatggcaggataataatggttcttcctgaagacccaaagtatgccctgaaaaaggttgacgagattagagagatggttgacaatgatttaggttttcaacaggctccactaatgtgctattccagaactaaaacacttctcttcatttccaatgacaaaaaagtagttggctgcctaattgcggaacatatccaatggggctacagagttatagaagagaaacttccagttatcaggtcagaagaagaaaaagtcagatttgaaaggcaaaaagcctggtgctgctcaacattaccagagcctgcaatctgcgggatcagtcgaatatgggtattcagcatgatgcgtcggaagaaaattgcttctcgcatgattgaatgcctaaggagtaactttatatatggctcatatttgagcaaagaagaaattgctttctcagatcccactcctgatggaaagctgtttgcaacacagtactgtggcactggtcaatttctggtatataattttattaatggacagaatagcacgtaaaacaaattcttgcctacaccactagaagacatctattgaagagaatggattggttgctgactttaaccaggaactagggccatttttattacaatgaactcaggactggcaacaaccatatggttgttccattttcataaaattggaaacaatgcagtaatagcttattgttttgttttttaaagaagatattttattatcttttacagaaatttatgattgatgtattttatctatagttatttagacatgtttacatgcagcagataattgttcatagtggactgaaaactaatgcaaggactatggtctcagtgataagtatattttgaagttcttaatatggaaatataccagtgtagcttggtactgtatttttttatattgatctgctgataccagtgataggcttaaagattgtattttcacagagtggaaaccaatttttttagttattgttcaaggagggtgcaatattaagtgttttggaatttgaagctaatttttaaaaggcctgaactatactttgaagaaacccctatagaaaaggaaagctccagctaaataggaagaattagaatattgagcttttttttcctgatttttctctttcctatctttgatggaaggaggaagtagaaagtggtaaagaattgaggctttccttcttggagagctgtaaatgacaagcattaggaaaggtaccctcctagattcattattctttcattctggtttcacttttaaaataaatggcaacttggcacacctaggctgttaacaaatctcaaagaggtttataaaaacgtatagaatacttggaagcaaagtatggatgactcggtatctgctttgttattcctcagaaatactgcactgagtatatgccctcattactggacttcattttgatacttgtctatccttcatagtgccctctacttttaaagggtttatatgttgaaaaactgctgtggccttttatgacctgtatataatgtagaataaaaataataaaatacttgatagctttttctaagtgaccaatgtactaactaaaaaaaaaa

SEQ ID NO: 73759 - DNA, 1531 bp, Homo sapiens; identical to SEQ ID NO: 64048

SEQ ID NO: 73760 - DNA, 838 bp, Homo sapiens; identical to SEQ ID NO: 64049
  misc_feature (1)...(838): n = a,t,c or g

SEQ ID NO: 73761 - DNA, 1570 bp, Homo sapiens; identical to SEQ ID NO: 64050

SEQ ID NO: 73762 - DNA, 1264 bp, Homo sapiens; identical to SEQ ID NO: 64051

SEQ ID NO: 73763 - DNA, 480 bp, Homo sapiens
ttttttttttttttgattaaatgttctttatttgatgcttttgtgtgcacaacacttataaggagttgcccaattcaccaagtcagcccgttcacacccttagttaaggtggccattaaggggccagggggtggcaatcagtaagttgcctcctgcctaactctctttctccaaccattctctataggctccagcgtagttgcgagccccagtgtatccaagactccgggccagctgcgtggcctggaggccccgcttgcccatctgacagaagaaaacgagatgctcatcttccagctttggcttctcagcagaatataaagcctggaaggcagctggctccatctgcagagcactctccaactcggacactccagccatggtgcgcgtagcaaccgcgagtctccggagtgcggccgtggcccgccctctcggcgcatgcaacatctcccgttccctcccagagctgagaccacgaaa

SEQ ID NO: 73764 - DNA, 1774 bp, Homo sapiens; identical to SEQ ID NO: 64052

SEQ ID NO: 73765 - DNA, 767 bp, Homo sapiens; identical to SEQ ID NO: 64053
  misc_feature (1)...(767): n = a,t,c or g

SEQ ID NO: 73766 - DNA, 769 bp, Homo sapiens; identical to SEQ ID NO: 64054

SEQ ID NO: 73767 - DNA, 1999 bp, Homo sapiens
cctagtccgtgtggtggaattccatgcagaatatattggcagttctcttgagtcagctgatgaaaacccaagagccagcaggcagtctggaggaaaacaacagtgacaagaacagtgggccacaggggccccgaagaactcccacaatgccacaggaggaggcagcagagaaaaggccccctgagccccccggacctccaccgccgccacctccaccccctctggttgaaggcgatctttccagcgccccccaggagttgaacccagccgtgacagccgccttgctgcaacttttatcccagcctgaagcagagcctcctggccacctgccacatgagcaccaggccttgagaccaatggagtactccacccgaccccgtccaaacaggacttatggaaacactgatgggcctgaaacagggttcagtgccattgacactgatgaacgaaactctggtccagccttgacagaatccttggtccagaccctggtgaagaacaggaccttctcaggctctctgagccaccttggggagtccagcagttaccagggcacagggtcagtgcagtttccaggggaccaggacctccgttttgccagggtccccttagcgttacacccggtggtcgggcaaccattcctgaaggctgagggaagcagcaattctgtggtacatgcagagaccaaattgcaaaactatggggagctggggccaggaaccactggggccagcagctcaggagcaggccttcactgggggggcccaactcagtcttctgcttatggaaaactctatcgggggcctacaagagtcccaccaagagggggaagagggagaggagttccttactaacccagagacttcagtgtcctgaaagattcctttcctatccatccttccatccagttctctgaatctttaatgaaatcatttgccagagcgaggtaatcatctgcatttggctactgcaaagctgtccgttgtattccttgctcacttgctactagcaggcgacttacgaaataatgatgttggcaccagttccccctggatgggctatagccagaacatttacttcaactctaccttagtagatacaagtagagaatatggagaggatcattacattgaaaagtaaatgttttattagttcattgcctgcacttactgatcggaagagagaaagaacagtttcagtattgagatggctcaggagaggctctttgatttttaaagttttggggtggggggttgtgtgtggtttctttcttttgaattttaatttaggtgttttgggtttttttcctttaaagagaatagtgttcacaaaatttgagctgctctttggcttttgctataagggaaacagagtggcctggctgatttgaataaatgtttctttcctctccaccatctcacattttgcttttaagtgaacactttttccccattgagcatcttgaacatactttttttccaaataaattactcatccttaaagtttactccactttgacaaaagatacgcccttctccctgcacataaagcaggttgtagaacgtggcattcttgggcaagtaggtagactttacccagtctctttccttttttgctgatgtgtgctctctctctctctttctctctctctctctctctctctctctctctctctctctctgtctcgcttgctcgctctcgctgtttctctctctttgaggcatttgtttggaaaaaatcgttgagatgcccaagaacctgggataattctttactttttttgaaataaaggaaaggaaattcagactcttacattgttctctgtaactcttcaattctaaaatgttttgttttttaaaccatgttctgatggggaagttgatttgtaagtgtggacagcttggacattgctgctgagctgtggttagagatgatgcctccattcctagagggctaataacagcatttagcatattgtttacacatatatttatatgtc

SEQ ID NO: 73768 - DNA, 740 bp, Homo sapiens; identical to SEQ ID NO: 64056

SEQ ID NO: 73769 - DNA, 2815 bp, Homo sapiens; identical to SEQ ID NO: 64057

SEQ ID NO: 73770 - DNA, 1069 bp, Homo sapiens; identical to SEQ ID NO: 64058

SEQ ID NO: 73771 - DNA, 1170 bp, Homo sapiens; identical to SEQ ID NO: 64059

SEQ ID NO: 73772 - DNA, 3093 bp, Homo sapiens; identical to SEQ ID NO: 64060

SEQ ID NO: 73773 - DNA, 2092 bp, Homo sapiens; identical to SEQ ID NO: 64061

SEQ ID NO: 73774 - DNA, 1169 bp, Homo sapiens; identical to SEQ ID NO: 64062

SEQ ID NO: 73775 - DNA, 548 bp, Homo sapiens; identical to SEQ ID NO: 64063

SEQ ID NO: 73776 - DNA, 1167 bp, Homo sapiens; identical to SEQ ID NO: 64064

SEQ ID NO: 73777 - DNA, 3024 bp, Homo sapiens; identical to SEQ ID NO: 64065

SEQ ID NO: 73778 - DNA, 935 bp, Homo sapiens; identical to SEQ ID NO: 64066

SEQ ID NO: 73779 - DNA, 6229 bp, Homo sapiens; identical to SEQ ID NO: 64067

SEQ ID NO: 73780 - DNA, 1707 bp, Homo sapiens; identical to SEQ ID NO: 64068
  misc_feature (1)...(1707): n = a,t,c or g

SEQ ID NO: 73781 - DNA, 1144 bp, Homo sapiens; identical to SEQ ID NO: 64069

SEQ ID NO: 73782 - DNA, 346 bp, Homo sapiens; identical to SEQ ID NO: 64071

SEQ ID NO: 73783 - DNA, 2428 bp, Homo sapiens; identical to SEQ ID NO: 64072
  misc_feature (1)...(2428): n = a,t,c or g

SEQ ID NO: 73784 - DNA, 885 bp, Homo sapiens
  misc_feature (1)...(885): n = a,t,c or g
ttttttttttttcaattctactccaaaaatcagcatgtttaatggggcccctgtgcactgccctctgccccctctgaggttcgcacaccgtgggcacggactcgatacaagcacgtgaaacgggggtggccccagttgcttagaatctggatcttcaccttgggaaaggcagctggggggtcattctgcaggtggaaagtctgaatctccgatttctcaacatcgaaggtgaatttccccaaggaaacttcagtttcatcataaacctggaggccctggtgggtgaagaatgaaaggaggaaaaagaccgcgaaatcgcggggggcgctgttggctcctccggtgtgctccacgctgggcggtggatgctgcagagtgatgtcgctcagctgcactcggcccggcagttggatcaccacctggccttggtcgccttcaaaagcccagcaattcccagggaacacgtggggctccaggataaccgtgggcggccgtgcgtagttccagaagctgaagcgattccagaagtaggcagtgttcctgtctgcgtaatcgtgggatgtcttctgcaggtcgatggaggctcccacagagctcaaagcatagtcgggcttccgcacaaaatcctcattcagcctctggaacacgagcttggccactctctcgctgttggctgcccgaacagtggacacctccttgtggagtttatccagctcggcctggagctgctgcagctgctgcccctgggagcgcacgcgctcgtggtactcacttagagtcagcatctccttaggttcctgttggatgaagggacaaaacacagagccgctcagctcccgtcgtccttgcgnngtccngcncnaatggtacgcaattcgattcccc

SEQ ID NO: 73785 - DNA, 1370 bp, Homo sapiens
  misc_feature (1)...(1370): n = a,t,c or g
ttttttttttttcaatgtcaaatgcactttactgggcccctgggcctcccaacactgtcctcaccaaggctggggcaccccattcccagcaccaccagctgcccaggaagcaggacggatagagggaacacatgtggaatggctgttctcctaccccagagggtgccggatgatgttgacagcacggctgcttccctctcccctgcagcttctgtccccacccagcagcttggcctttcccatagcagggaagggggatacctggggcttcaaaccagccacctgctcctgcttaaaatggggcaaggggccatttgcaaaattcttcgaggggcagtggtgaggtagaaggggtggcagcctgctcctgtctgggagagggctgggcagacactgggagccgggcagacactgggagccgggctggctcttgcttcaggcccagagccctgggccctgctcgctgaggaagctggtggttggagcggcgaggttcaaccagctgaggctggagggagtactgggtggccaggaggggtagccagtccaactcggctctcctcagcacccccagccatgggtcaccagtcccgctcagcaggttctcggtaggggaggcctaagagcctgaagacatccttctcagtgggagtgggcagcactcggccaggccccaccttgcagccatgggtgttccggaccacagcagtgctgagggcatgttctgacagactcatgcccttggttttggccagggctcgcatggagcggttgaagtgtgcagagccggtgaagtagagcagggcacaggcaaactcgctatagggcaccacgatgatgtccaggcgccggtgccgccgccctggccctgggagccggcacacccccaagtacttctgttgctgaccattctcctcttggctcaccaagtcatctgtgaggaacccttcctgccgaagactgtcaaggaggcggctgaagataccccggtgggaccggccatctgggtgagtgatgagcacgtcgacatcaccacaggtcgcctttccccgtcggtatgaaccacatgccacacacagcagcccagagttaaaggcctgggctgctttctggactgtctgctcaatctctgtagcctcctccctgggcatacgttccaggaagtcactgtaatgcttcaggccgatggcctgctgggttgtcagggaggcctggctgcggatgtcttccagacttcggaagccctgttggtaccacatctgggcagtcttggtcccagctccccagatgttggagaagagctccaagacaggcacgctcgnnttccncgncnctgccagtgctctcattggtctcattnnggnaccgag

SEQ ID NO: 73786 - DNA, 1389 bp, Homo sapiens; identical to SEQ ID NO: 64073

SEQ ID NO: 73787 - DNA, 1203 bp, Homo sapiens; identical to SEQ ID NO: 64074
  misc_feature (1)...(1203): n = a,t,c or g

SEQ ID NO: 73788 - DNA, 935 bp, Homo sapiens
ttttttttttttaactgaagagtttattatactttcaacttttctgcagatgtaacattttttaaataaaaagttgagaataaaaaaatcacaaaaatagttttgctgaagaaaataccacacattcctttttactataatatttaatataataatatacacttatacattggtattatttacacttcattaaaaaaaacccattcaacctggaaattaactaccttaaacacactatttaactttcaggtgctaatgtatttaatttctttaaatattaaatccaaaatgggctcaatatcctaaattactgataactagatgcagatgtaaggatcatgaatcaatacttccattaagttaaaaatatcaataattttttgcaacatttcttctttgtttttcttctttgtctaggaataggctgttttaagctcaaagtagcatcttgaaatccaggatttaagtctaagaccttcttgaaatcttccaaagcatcatcaaaatatcccagcctatacagtatcaaccctctgttgtaatatggaacttcaaaattgggttggacttctatggcagatgtgtagtcatccatggcttcataaaaatcaaccctgaagtacttgatttgccccctgttgttatatgcagtagccaaatcctcagggctgcatttgctcccgggactctcgtcgctggaggccgcgcaagcgcaccggcgaatgtaagcggagtacagtgcctcggcctccgcgtactctccattgttgaaatgagcctgggcgagtgttagggttgcgtggctttcttgccgctgtccttccatagcagccaaggcctagttttcggtgtagaatgggggttgacctccgagcggttagaggtggcaccacaaagccacttccacaccctggaatctaccttgacagccaacc

SEQ ID NO: 73789 - DNA, 1908 bp, Homo sapiens
cgccacgcgctgtctgatgggccactcggagatcgttgtgcagggattgtccggcgaggacgtgctggcccggccgcagcgctttgctcagctagagctctcccgcgccggcttggagcaggagctggaggccggagtgggcgggcgcttccgctgcagctgctatggctcggcgcccatgcatggctttgccatctggttccaggtgaccttccctggaggggagtcggagaaacccctggtgctgtccacctcgccttttcacccggccactcactggaaacaggcgctcctctacctgaacgagccggtgcaagtggagcaagacacggacgtttcaggagagatcacgctgctgccctcccgggacaacccccgtcgcctgcgcgtgctgctgcgctacaaagtgggagaccaggaggagaagaccaaagactttgccatggaggactgagcgttgccttttctcccagctacctcccaaagcagcctgacctgcgtgggagaggcgtagcgaggtcggaggggaaagggagatcccacgtgcaagtagggggaatatctcccccttttccctcatagcctctagggagggagagtgacttcattctccatttgaagagattcttctggtgatgtttacttaaaaagtgatccccctcaacaacggatacagcgtgcttattattgggcatttagcctcaaaagcatgtagtaccaagcacttgtatttccgtatattttgtttcgcgggggagtgagggggaagaacacggatgaaaatgtcagtttttgaagggtccatgcacatccctgacacctcacaccttatctaagtctgaagctggggagaaaggagttcatttagacttcatacatttccagtacgactttagtatctctccagagccatattttctcagtccgaattaattccccctccctaggtgcctgtaggctatggtacttcttcctcattgttttctaggtaaacttcactactggtaattaaggggaaggatatgaggaagcagtttaaatagccctgttctcattactctgaccacatacatcatagggtgctaaagttgatgaacacattaatccgttaagtaaaatggactttgtaattgtacagcatacctaagaaactcagaaggtgcatttaagagagagacctgaaagaaatagtatggatttttaaaaattcttgtctctactattataaccaaaaaaatatttcttgtatgtcccataaaaatatttgtgtaattcttatgaaacaggctggtagaggaggtttctgagcctagcccaagggctttattcatcaccatgggtaaattatttaaactcacttaattaaggaaaatattttcccagctagaaaaggtatactcccttctctttttaaactctctcatttggagggatcatgtgagttggcctacttacaagtagtgaaagttcccttttcagttttgttttgttttgttttgtttttctctttcactcagccaaatgtgaaagttgtgaatttaggaaaatcacttgtaatgaagtgtgaatcttgttatcaaatttatttctctgatgtttccttccttatccttgtagccaataaaacattgacattctcacgttttatagatgaggtaaaaagtcttgtgtgctgtgagttataatgcttttgcctttttaatattattagttcttaagtgttacagccccttcagaatataacttcaggacaattcaaactatgcttaatgtatgattttcgagcttctgtatgctaagaaaataggtgtgaaaaactggtgttctgaaatagcctaacatttattgtaattctgaattttctgcccttttattcattgcatattaaagtattagagtataaaaact

SEQ ID NO: 73790 - DNA, 792 bp, Homo sapiens; identical to SEQ ID NO: 64076

SEQ ID NO: 73791 - DNA, 2223 bp, Homo sapiens
  misc_feature (1)...(2223): n = a,t,c or g
ggtggtttacacagcacgcagaggaggctttacagtatgttgttggggagctggtgcttaggtgttgtgccatctctgcctagaatctgcctaggagctgtgaggtagaggaagctttccttggtagctgtggagaggacacgtttcttgcgagtatggctggagaagcccccacctccggtcccaacacaacggaacacatggagttttgctgtggtgtctggaggatcctgtcttgagcttgcctttgcttaggctggactgtgtaagacaagcactgtgaagtgttccaactttatttaaaaccagacagccctgctaccatgcccccgctcctcagcattgctctaggggaggagctggatgaactatggcccttctgccaagcccaggtgctaggggaggaaccccttgcttgagatgtacaggatggactcctcacttcttctgggcttgtgccctggcccgttgaatcttgtcagctgtggccccatctgtggctcccgtgcagtgggacaatacgaggctcagctcagcctcattccggtgttcgatggccacatctgcagcctgagccacatcgccaacaagaagcaaagccttgaccttctgctcgggacccacgcgggaagcatacttcttggcttcgtatttgttatgttgtttcatgcagatctccacaaaaggcaggtagccaatgggtgatttcttgctcttggaaaacttctctagctcttcccaatcttccaaatctgccagggcagtcagcttcagccaccagagcctcttgtcagggatgcggaagtcacgtgccagctgctctgcacgcttgttgtgaccgccaagaatgagggtggtaactgtgtcatgtagagacaggtctaggaactggccccccagctcgtcttctaggcgccgctgcagccgtaggagccgcatttgatcctctgtagccttggctgcaaactcattcttggccttgtagaaggcatcggcggctgtctgcagagctgctactcgcccctcaatacgctcttctgcagcatagctggctcggatgtggaagctgcccaattcctggtgattgtcatcctgattgtaaaggtccttcagcgtctctagctcctgatgcttacagaactgtcggtacaaactgagggccatgggctgattccgaagggtcatgaaaaaatctcctcggttcagctcgttcttcaggtgcagcaacaccgtgaacaccaggtcagtgtccccgctctcgatggccttgcttagtgccagtttgctcctcttcatctttaggagaaggggtacctgctcccctgagcgtggctcatactccagcagcttgatggccagctccgtgcggccacaaccataggctcgtgcagcaatgtcggagtaagagacaccaggcgtgtcccccagcttctggttaatggctcgagccacatcctcatctgagacatccttctgttgcaccttgtagcaggcccagtgggccaggatcctgctgacgccctgtacttcaggaaggcgcaagtactcgcatatctggatggccagggggtaaagtctccgcaacacgagcctgtccagcagcacctggatggtgagctgcttatattggctataggtgagcgggatcccgatgtgatagtcccgaacagcattgagcacacgcaggtcctgacacatgtgcacgaagctgtcgggtggaaatctgtccaggaaacactttccgaaggaggcggccctgagcagactcttctgcatgtctggctggtgctcatgtcctgcagcctcaatgcactgctgcacggcctgggtcagctggcccagctcctggatctcccgcaggtactcgtccgccttctggctctctttctcatactccttctgagcctccaggagcagcgccccgggggccattgaggcaattttgaagatttcctcgctggccgctggaacctcatgcaggaactcgtgggtgctgcgggagaagatgcggaccccatcgagctcaggcaccaggtaggagtcctcatccagcacaaactggatgctctcgggtgcatcgcccaccaccatcagccgcctttcccaggccaccaccacggccctctccttgctacgaggacgaaaacaccagaacatctgctttggaggtgcccggatgttgcagttgagctcncatagcttctaanatttccagaacactac

SEQ ID NO: 73792 - DNA, 1148 bp, Homo sapiens
aagctgaaggtccttgcaagaccttatctctcctgtcctttatagcatcccgccatccagagcactgccaggaacctgcatggtgagcgaatgactcccagcagtgcgcaggtgattgggccttgggaccagagtgaggctgagataaaggggagcccagggccagacccctgtcacccacattcctgtccccttccctttccagccagcccagagaccacagcagcacaagaggtggccagcttaaaaaagtttaattgctgaaaacatccaaggcaggtgcgggccagtccctgcggggctcacaccccccttattggaccatcagctctgtgatgcccccttctcctggctacaaacctgggaagtagggcagctggtcccagggccctgagactggtgctgctctagaaggcctggtggggggccagcccccaaggcccttgaccagaactggaacagcaggcaagatggggcagcgtggggtgaccaaagatcctggatgaggccaatccaggctgggaccagcccaggtcagcagtgagaccaggggagacagggtgcccagggcctgcccagggacatgctgctgaccccccgccaccctgcacccctggccacatgctagcgggcagctgatgagcagcagctgaccccagagacagcagaggtgaaaacagtccctgggaactgccagaggcccagaggatgtggaagtgcccacgggaaggcaggagtgcaggggtgacatgtgccggggccagagaggtatcttccagcttgaggatgagccgtgaggtgtgcactaggaagtggcagcacaggtgaggtggaggtgacgggggcgcaggctagtcccactcgtcctcgtccacgccttcaaaggagtcctgggggagtgggtcctcccggttccccagttttgccaccatggcattcagcagctcctccttcttttgctggtcagacttttcttccaggtactgcgctgaggatggggcccgacgagcaggggcctctcggggggcttggctcactgggctcatgtcaggaggctgcaggctgagaagccagggctgcccattagcgccttgcagccaggcctcggcactgagcacaggctcccagatcacagccgtgtctgggaa

SEQ ID NO: 73793 - DNA, 1872 bp, Homo sapiens; identical to SEQ ID NO: 64080

SEQ ID NO: 73794 - DNA, 1456 bp, Homo sapiens
cgctgaggattatgtggaagaattacacaaatggcggtgtcctgattattatgagaataatgtccacaagatgcagctcccattttccagcaagctcctgggcagcactctgacctctgaggagaaacaagaaaggcggcagcagcaattgcggcggctgcaggagctcaatgcccggcggcgggaggagaagctgcagctggatcaggagcgtctggaccgactgctatatgtgcaggaacttctagaggatggccagatggatcagtttcacaaagctctgatagagctgaatatggactccccagaagagctgcagtcctacatccagaagctcagtatagcagtggagcaggctaagcagaaaatcctccaagcggaagtcaacctcgaggtggatgtggtagacagcaagccagagacccctgacctggagcagctggagccgtctttggaagatgtggaaagcatgaatgattttgatcccttgttttcagaggaaacacctggagtggagaagccggtcaccactgttcagccctgtttaacttggcagcatatcatcagctatttgttgggacagaaagaattcgagctccagagattattttccagccatctctcataggagaagaacaggctgggattgcagagactcttcagtacattctggacaggtacccaaaggacgttcaggaaatgctggttcagaacgttttcctcactggcggcaacacgatgtatcctggcatgaaagccagaatggagaaggaactgttggagatgagacccttccggtcttcttttcaggttcaacttgcctcgaaccctgtgctggatgcctggtacggtgctcgtgactgggccttgaaccacctagatgataatgaagtttggatcaccaggaaagagtatgaagaaaagggaggagagtacctcaaggagcactgtgcttccaacatctatgtccccatccgcctgccgaagcaggcctcccgctcctcagatgcccaggcatccagcaagggctccgctgctggtggaggtggtgctggtgagcaggcatagcagaggccctccagagagactgccctgcacgccatgccttgggccacgttggcagtgtgacaggactgtgattgtgctagatgtacctgcccaagtctgctggtcacatttggcagcaaaatggatttctcctggggagaacaaagttaagggacactgagacctgcccttcagaattcggttcacttgggggcttctgtggtagagactaactggccttctgatgtctttgttcaactgtggccagctgtggcatcagcttcctggagcagtaaatgaagacagagtggaggacacaaatgtacaaaatgcacaagactgatttcttaccacattttagtctttcttgttttaaaaaaaattctttaaaatttaaaaaaaaaaaaaa

SEQ ID NO: 73795 - DNA, 1369 bp, Homo sapiens; identical to SEQ ID NO: 64082
  misc_feature (1)...(1369): n = a,t,c or g

SEQ ID NO: 73796 - DNA, 756 bp, Homo sapiens; identical to SEQ ID NO: 64083
  misc_feature (1)...(756): n = a,t,c or g

SEQ ID NO: 73797 - DNA, 1344 bp, Homo sapiens; identical to SEQ ID NO: 64084

SEQ ID NO: 73798 - DNA, 450 bp, Homo sapiens; identical to SEQ ID NO: 64085

SEQ ID NO: 73799 - DNA, 1420 bp, Homo sapiens
ttttttttttttctgagattttttaaacaaaaacattttatttcaaagggcagataagtattttgctagacacaactgaaaaaaacagccagagaacaattggagtttgtcttaataaataacaaaatgccatttatgtctcttaaacttcatatgacacaatacacatcttaaataaataacccagtctgttgctatgtattaaaaacagtcccaggtgtggtgtgtgttgtggagcgaagccggttgctgggcttggacccgccaatcccagtgccggtggggagaccgcttcccaaacctctgctgtgcccctgtgcctgagctgaacagcagcgccatggccccggagggcggcaggaaggccaggggctgggatgacggtgacttcggggcgctctgtggctggcaagcctgggtgcctccaaccggaggtgcttcctgcctcctcacccttggcttctcgacaattagtttttaggtcagtccgaaacatcatgggtgctggaaaagcctctggggcgatgtggtgggtctgagctccgtcttggtttccaacctggttgtcggccttcttgatgttgtgtggcgctggctctctgcttctctgctggccggcactgtctggtgggctctggtgtcctgtttttccatgtggcacatacaggttctctgaagccacagccagcgcagtactcgctcactttgatgttctgtggctggaatgcctgagagggtcggggctacctgtgcaccccccccaccctcccggccttgttgtcacgcgtgcatttgggtggctgcatgggcacacgcctgtgaggccagggccggccgggtcttcggttctctggcttggctcaggcagcagttcctgcagacttttctcactgctgttcagcaatatgtctcctttaaaatagcaccaggggttctcaggttggcttctgtgtcttttccaggtgcgtgtgcaaaaggcaaagggaggtcactctttccatgcagggccctttgtctgaactgtccttgaaaggcagttgtgaagggtgggcccagaccccctccacgggactggggtggggtgtcactgttccttaaatggaacttggtcccccgtagctgaccctgggcagctcagctccttgtgtatgaggcggatcaggaacagtaaggcacaggcatctgcaaacatcagcatgtaaaacacattgctccagccggacggggagaggagcccagccagcagggggcccagggctgctcctacagagcccgtcccgtcaatgatggccgtcacggtggagagggcgtgcgcgttgcctttcagacttttatgagtccccaggtcggcggagacggcggtggtgatgagtgtgtagggcccactgaccagggctccgctgagcagcagcatgtcgat

SEQ ID NO: 73800 - DNA, 1582 bp, Homo sapiens; identical to SEQ ID NO: 64087
  misc_feature (1)...(1582): n = a,t,c or g

SEQ ID NO: 73801 - DNA, 4118 bp, Homo sapiens; identical to SEQ ID NO: 64088

SEQ ID NO: 73802 - DNA, 2071 bp, Homo sapiens; identical to SEQ ID NO: 64089

SEQ ID NO: 73803 - DNA, 469 bp, Homo sapiens; identical to SEQ ID NO: 64090

SEQ ID NO: 73804 - DNA, 1645 bp, Homo sapiens; identical to SEQ ID NO: 64091

SEQ ID NO: 73805 - DNA, 7196 bp, Homo sapiens; identical to SEQ ID NO: 64092

SEQ ID NO: 73806 - DNA, 2115 bp, Homo sapiens; identical to SEQ ID NO: 64093

SEQ ID NO: 73807 - DNA, 1137 bp, Homo sapiens; identical to SEQ ID NO: 64094

SEQ ID NO: 73808 - DNA, 3437 bp, Homo sapiens
caaaaaggctattacctgtggggaaaaggaaaagcaagatctcattaagagtcttgccatgttgaaggacggcttccgcactgacagggggtctcactcagacctgtggtccagcagcagctctctggagagttcgagtttcccgctaccgaaacagtacctggatgtgagctcccagacagacatctcgggaagcttcggcatcaacagcaacaatcagttggcagagaaggtcagattgcgccttcgatatgaagaggctaagagaaggatcgccaacctgaagatccagctggccaagcttgacagtgaggcctggcctggggtgctggactcagagagggaccggctgatccttatcaacgagaaggaggagctgctgaaggagatgcgcttcatcagcccccgcaagtggacccagggggaggtggagcagctggagatggcccggaagcggctggaaaaggacctgcaggcagcccgggacacccagagcaaggcgctgacggagaggttaaagttaaacagtaagaggaaccagcttgtgagggaactggaagaagccacccggcaggtggcaactctgcactcccagctgaaaagtctctcaagcagcatgcagtccctgtcctcaggcagcagccccggatccctcacgtccagccggggctccctggttgcatccagcctggactcctccacttcagccagcttcactgacctctactatgacccctttgagcagctggactcagagctgcagagcaaggtggagttcctgctcctggagggggccaccggcttccggccctcgggctgcatcaccaccatccacgaggatgaggtggccaagacccagaaggcagagggaggtggccgcctgcaggctctgcgttccctgtctggcaccccaaagtccatgacctccctatccccacgttcctctctctcctccccctccccaccctgttcccctctcatggctgaccccctcctggctggtgatgccttcctcaactccttggagtttgaagacccggagctgagtgccactctttgtgaactgagccttggtaacagcgcccaggaaagataccggctggaggaaccaggaacggagggcaagcagctgggccaagctgtgaatacggcccaggggtgtggcctgaaagtggcctgtgtctcagccgccgtatcggacgagtcagtggctggagacagtggtgtgtacgaggcttccgtgcagagactgggtgcttcagaagctgctgcatttgacagtgacgaatcggaagcagtgggtgcgacccgaattcagattgccctgaagtatgatgagaagaataagcaatttgcaatattaatcatccagctgagtaacctttctgctctgttgcagcaacaagaccagaaagtgaatatccgcgtggctgtccttccttgctctgaaagcacaacctgcctgttccggacccggcctctggacgcctcagacactctagtgttcaatgaggtgttctgggtatccatgtcctatccagcccttcaccagaagaccttaagagtcgatgtctgtaccaccgacaggagccatctggaagagtgcctgggaggcgcccagatcagcctggcggaggtctgccggtctggggagaggtcgactcgctggtacaaccttctcagctacaaatacttgaagaaacagagcagggagctcaagccagtgggagtcatggcccctgcctcagggcctgccagcacggacgctgtgtctgctctgttggaacagacagcagtggagctggagaagaggcaggagggcaggagcagcacacagacactggaagacagctggaggtatgaggagaccagtgagaatgaggcagtagccgaggaagaggaggaggaggtggaggaggaggagggagaagaggatgttttcaccgagaaagcctcacctgatatggatgggtacccagcattaaaggtggacaaagagaccaacacggagaccccggccccatcccccacagtggtgcgacctaaggaccggagagtgggcaccccgtcccaggggccatttcttcgagggagcaccatcatccgctctaagaccttctccccaggaccccagagccagtacgtgtgccggctgaatcggagtgatagtgacagctccactctgtccaaaaagccaccttttgttcgaaactccctggagcgacgcagcgtccggatgaagcggccgtccccacccccacagccttcctcggtcaagtcgctgcgctccgagcgtctgatccgtacctcgctggacctggagttagacctgcaggcgacaagaacctggcacagccaattgacccaggagatctcggtgctgaaggagctcaaggagcagctggaacaagccaagagccacggggagaaggagctgccacagtggttgcgtgaggacgagcgtttccgcctgctgctgaggatgctggagaagcggatggaccgagcggagcacatgggtgagcttcagacagacaagatgatgagggcagctgccaaggatgtgcacaggctccgaggccagagctgtaaggaacccccagaagttcagtctttcagggagaagatggcatttttcacccggcctcggatgaatatcccagctctctctgcagatgacgtctaatcgccagaaaagtatttcctttgttccactgaccaggctgtgaacattgactgtggctaaagttatttatgtggtgttatatgaaggtactgagtcacaagtcctctagtgctcttgttggtttgaagatgaaccgactttttagtttgggtcctactgttgttattaaaaacagaacaaaaacaaaacacacacacacacaaaaacagaaacaaaaaaaaccagcattaaaataataagattgtatagtttgtatatttaggagtgtatttttgggaaagaaaatttaaatgaactaaagcagtattgagttgctgctcttcttaaaatcgtttagattttttttggtttgtacagctccaccttttagaggtcttactgcaataagaagtaatgcctgggggacggtaatcctaataggacgtcccgcacttgtcacagtacagctaatttttcctagttaacatattttgtacaatattaaaaaaatgcacagaaaccattgggggggattcagaggtgcatccacggatcttcttgagctgtgacgtgtttttatgtggctgcccaacgtggagcgggcagtgtgataggctgggtgggctaagcagcctagtctatgtgggtgacaggccacgctggtctcagatgcccagtgaagccactaacatgagtgaggggagggctgtggggaactccattcagttttatctccatcaataaagtggcctttcaaaaagaaaaaaaaaaa

SEQ ID NO: 73809 - DNA, 1373 bp, Homo sapiens; identical to SEQ ID NO: 64096

SEQ ID NO: 73810 - DNA, 1088 bp, Homo sapiens; identical to SEQ ID NO: 64097

SEQ ID NO: 73811 - DNA, 386 bp, Homo sapiens; identical to SEQ ID NO: 64098

SEQ ID NO: 73812 - DNA, 1005 bp, Homo sapiens; identical to SEQ ID NO: 64100
  misc_feature (1)...(1005): n = a,t,c or g

SEQ ID NO: 73813 - DNA, 1729 bp, Homo sapiens; identical to SEQ ID NO: 64101

SEQ ID NO: 73814 - DNA, 1242 bp, Homo sapiens; identical to SEQ ID NO: 64102

SEQ ID NO: 73815 - DNA, 902 bp, Homo sapiens; identical to SEQ ID NO: 64103

SEQ ID NO: 73816 - DNA, 1100 bp, Homo sapiens; identical to SEQ ID NO: 64104

SEQ ID NO: 73817 - DNA, 1921 bp, Homo sapiens
ttttttttttttgtgttcattggtttaatcttttatttggaacaaaggaaaaaaggactgacaccagtttagcctttgagtgtgcagagctctgccctccctcccacccctcagccccaaatccaagatttcatagccctaacacccacccaagcagcttccctcacacatgccctttgttttcttcctctcttctatggttccttagggaaagccttctttagggatgaaaagctaactacagcccagtctggcctccagcagcccagggtcagctcagcctccactggaggcgagggaggagggcaaagggcatgggagaggtagggcttgccctccaggagccttccccttccctaaggagccagtccaggattggggaggaaggcaagagggggtccttagccagctgtcacattagaggaataggggctgggagtggggatgacaagaagtacaaagaaagagaaagttttgggggagatggataacaagctcagcctgtgtcaagtgatgtggaagggaaggtaatggtgggggaacccagccatggccctatcccaaccccaggctccacaggccccaaattggctttgcaaatccaaacattttaaggaagtggtttagggatggaagagaaacacggtagaggtctgtgctgtggattttcatctagggtggtgggaacaccagagatgtctcctctgccattgttttagttggctcctggacctcatcccagcagagggagggtgactgtcagcaggtcagtcccaccgccactgtccccctcgcagtgggcctctgtgtctcaggcctggccaggctccctgcccctcagagctcctcgtggacccgctcctcgtcctcatctgacttcagcttgagctcgtcgactgtgatcttgccgtcctggttgcggtcctggttctggaacatgtctcctatggttttctcagggtcctgcccaggcatgaggcgtcctttgccctcactcacttgagccttgatgaaggtggagaactcctccggagggacctcgccatccttgttgaggtccatgtcttcaaacaggttggcaggagggtccttgtgccacacaaacaggtagcctgtgggcagcccatcctcccgggacaccagctccacctcaaacagcagcacagcactgcctgggactccccgggctccactctccccgtgggccaggtgcgggggcacgatgagctgccgcctctctcccacacacatgccctgcaggcccgtgtccaggccttcgatcaccttgttggccccgagagtcgcctcctggggggccccgtagtcatgcgaggtgaacagctgggtgccgtccagcaaagaacagttgtaatggtatcgaacaaagtccccaagcttggtggtctcattgcaggtctcagatggccgggacagtgtcctgatttccaccacatccgcagggttgtggaagtcaatgacatggacgttgaagattagcacggcagagccagggatcttgtctccagttccattctccccataggcgaggtgcggggggatggtaattctccggcgttcccccatgcaggcaccctgcagcccctggtccatcccggggatgatgtaaccctgcccgatataggtattgtaggtgtggttgcgggagtagctggaatcgaagagggtgccgtccatcaaggagccattgtagtggtagcgcatgaagtccccggccccggctctgcggacacagccgggggggagctccagcgtctctagctggacagcgtccttcgggttgtgcacgtcaatcaggaggacgtgaaagaccagcgaggcctctggggggatcactgtcccatagcctttctcaaaataggccaggaatggagggatgataatcttccttctctctccagga

SEQ ID NO: 73818 - DNA, 1256 bp, Homo sapiens
ttttttttgaaatgaaatgaatcatttaatgagaatcttcaaactgtggcactggctgagtactaagcaaatccaggggaagacgtgaagcccaccaaggcgcacagcctcaactccggtgcctgcccctgatctgaaatacaacatccaagagctcgaggcctttttaccacccgtttgtggagcacctgcacctttctgacaacaactctcaagccaactttcagagagaaaacatgaagggaaaaaatagatttcctttggccagacagctctttcttcctcaataaataggaaccacacttggaacaaagagacagcgtgagctcggtgggggaagcacaagctttattggctgaaagttcttctcaggagcctggtctgctgggactgcatgttcctggatgggctcccccaggcctaagctccaggtttcctctggccttccgaaggattttgtgggttacgaccaattgatcaaagatgactttttcctggcgcttgctcagctgcaaaagcttcatggtgttttgcaacttcttttcttgttcaaacaattttttatgtagtttggtgacctctgccttcatttctccaatctgctcacagtgaagggggcactggccatcctcggggagtgagactctccagagaagcttcagccgcctgtaggcctcttccagggtcagcttggccgtgctcacactgctcacaaacttgctcagtggtgctgggtgtggaccctttgttcccagctcttgacttgtggagctgggagcctcttgggtttgaatgtccatttcagcaaggagcctctgtccctggctgatctgtttgagcagggcctcatagtcctcaatcaggcccaggacatggcggccattcttgctggcccacaggtggtggccagtgaccaggcgggacacacacggagtgctagttgccgaactgccactgtcgcaggagagggagtccgtgtcattcccagagagtggaggagtctctgaaactgtaaaatgagaagtaggatgtaaaatctgtttcaggtaacactctgcgttcaagacgcttatgatgttgaagctagctaggagggctagaagaggccctcgtgcccaaatgccacccaacacaagcccagaggggaaaagaggcacgctcctggacctctgtatattaccccacactgggcttatgagtcatcttgtaggagaggctcaagtcaactcaaccaacacttatcaaccacccactcg

SEQ ID NO: 73819 - DNA, 2255 bp, Homo sapiens; identical to SEQ ID NO: 64107

SEQ ID NO: 73820 - DNA, 1621 bp, Homo sapiens
tttttttttttttgtcacagaacactgtttgcagtagaggaaactggcattgcagtctggtggtataatggcttgtccacataaaccagtacatgttcatcctttagcgcaaaaagccctaatggcgcggtaccctattaaaattcaggacatctccaatattctctctctctgtttttctttgtcatcttttttttttttaaataaacattttcaaggtttgtccaaaagaaggccatataggttcttggctagcggaagacaattcagaacagctgttgcacacttggactgtcaccttctccaggctggcagttgatatcttattttttttccaactcatttttattaaaaaaataaaaaaatgctccaactatcagctttacaaaatctctaagggaaacacaagagcaaggtgctgaggtaaaaacacctgaggtagcttattctgtgtgtttttctcgttaaaaaaatctgtgaatttaacgccctgggccaacaaccttggtaaatttctactttcctccacattttttttttttaaagaaaggaatcattttgctgaatattgatggcttatacaccaaaatgcaaaaagacaaaatacattctttcattgtggaattttttctttgtttggttgattggttggtttggtgggttcctgttttcctcttccaaaacgctaggacaagtaccattgactcttgttcttttgagtaaccaagtgtaagttgaggctggtttgtgtgtttcgcttttgttccttttgtgtgatgtgatactcagagcactgctttgcctggggaggggggggtgcgtagatacgggattgagatggagggatgaggaaattcaaaagaatggagatggagaagaaggggaggggagggaggggagagataaacagagagagacagagaattatatagcagtatgcaaaaaaccagtttaaaacctgtgaagcaaagagaaatgggtgtatgagctagacaggcatgaggagtgacagagtttcctcttcaaggagacggtatcccttctgttgacatacacaggtgatccagaactgccgtgagtgtccttccgacgagatttccctctgggtgaattttgtgcgggtggcctcaaagctcctctctacaccgtgagacctcccaaagaaagactttattctttaaagtctagaaaagcctgctttctctttaaaaagaaaaaaaaattaataattgattaaaaattggagttagttgagttatttgatatattatttctaaaatatattaccgctgcaggcaccctgtgtaacccacaggccacatatcttaacatcttccctttctaatatgtacacacatgtacagagacgatttgccacagaaaaagggtgtgcattttgcttggctttgaacacgttcacctatgttagttcaactaaaagggatagcgtcgtgggagttcaggagagatccgagtggatggtgaagtggattgctgaagcctgcaagacaccctggggggcgcggaggcggggctcggtggttctggcaaacctggctgaccttccccgcccctcctcggcccctggggtttctcagggcctcggcagagtccctggccg

SEQ ID NO: 73821 - DNA, 3114 bp, Homo sapiens; identical to SEQ ID NO: 64108

SEQ ID NO: 73822 - DNA, 1732 bp, Homo sapiens; identical to SEQ ID NO: 64109

SEQ ID NO: 73823 - DNA, 864 bp, Homo sapiens; identical to SEQ ID NO: 64110

SEQ ID NO: 73824 - DNA, 1097 bp, Homo sapiens; identical to SEQ ID NO: 64111
  misc_feature (1)...(1097): n = a,t,c or g

SEQ ID NO: 73825 - DNA, 2061 bp, Homo sapiens; identical to SEQ ID NO: 64112

SEQ ID NO: 73826 - DNA, 2247 bp, Homo sapiens; identical to SEQ ID NO: 64113

SEQ ID NO: 73827 - DNA, 2365 bp, Homo sapiens; identical to SEQ ID NO: 64114

SEQ ID NO: 73828 - DNA, 2547 bp, Homo sapiens; identical to SEQ ID NO: 64115

SEQ ID NO: 73829 - DNA, 1034 bp, Homo sapiens; identical to SEQ ID NO: 64116

SEQ ID NO: 73830 - DNA, 6986 bp, Homo sapiens; identical to SEQ ID NO: 64117

SEQ ID NO: 73831 - DNA, 1364 bp, Homo sapiens; identical to SEQ ID NO: 64118

SEQ ID NO: 73832 - DNA, 1556 bp, Homo sapiens; identical to SEQ ID NO: 64119
  misc_feature (1)...(1556): n = a,t,c or g

SEQ ID NO: 73833 - DNA, 2150 bp, Homo sapiens; identical to SEQ ID NO: 64120

SEQ ID NO: 73834 - DNA, 1011 bp, Homo sapiens; identical to SEQ ID NO: 64121
  misc_feature (1)...(1011): n = a,t,c or g

SEQ ID NO: 73835 - DNA, 2255 bp, Homo sapiens; identical to SEQ ID NO: 64122

SEQ ID NO: 73836 - DNA, 931 bp, Homo sapiens
tctcctggggcgggggcaggcatggacagctgggccatgggaccctggaggcagagctggagccacggctgttggaggcgttgcagggcctagtcatggctgaggtggccgcggggggctggcattctgtgtgtgtgagtgagactggggatatttatatctggggctggaatgaatcagggcagctggccctgcccaccaggaacctggcagaggatggagagactgtcgcaagggaagccacagaactgaatgaagatggttctcaggtgaagagaacgggtggggctgaggatggagcccctgcccccttcatagctgtccagcccttcccggcattactggatctccccatgggctcagatgcagtcaaggccagctgtggatcccggcacacagctgtggtgacacgtgagtggggctgggaggcactccgctccactcgagctggtgcctacggaagggggtgtggtcgacggaaaaacttctgtcttaaggcttctgtggctcatacagagcagctaccttgctcagtggataagccccaacccccgtgttgtttcacagtagttccccagcctgtcaggcccagaagtttcttccttctggtgggaggctgatgctttctgtcctccctgcacggccacagacacattccctgcccgccgccgcctctgacagcagggactgtccagtctggcatggaagactgcggcgctcggtagcatggcacacaggaagatccgccactttttccctcgggatcctctgccatgccacgtgtgatcagccagttgttaagagaatatgttgttccatgccaggcagatctcatgaggattgtaatatgctagctgtgggctatgccaagctgggctggacagatgccttgccaaagaaccgtagtgacaactatcgattgtccttttgg

SEQ ID NO: 73837 - DNA, 997 bp, Homo sapiens; identical to SEQ ID NO: 64124
  misc_feature (1)...(997): n = a,t,c or g

SEQ ID NO: 73838 - DNA, 1986 bp, Homo sapiens; identical to SEQ ID NO: 64125

SEQ ID NO: 73839 - DNA, 3870 bp, Homo sapiens; identical to SEQ ID NO: 64126

SEQ ID NO: 73840 - DNA, 1635 bp, Homo sapiens; identical to SEQ ID NO: 64127

SEQ ID NO: 73841 - DNA, 2507 bp, Homo sapiens; identical to SEQ ID NO: 64128
  misc_feature (1)...(2507): n = a,t,c or g

SEQ ID NO: 73842 - DNA, 2375 bp, Homo sapiens; identical to SEQ ID NO: 64129

SEQ ID NO: 73843 - DNA, 2528 bp, Homo sapiens
ttttttttttttctcatcaaaacatgatttattaattttaagcaagagtaagcatatgtgatagtggccagcttggggatagaactcttcctggttgatgcacagttcagcacctgttgggtcttggctgttgggatgataattcttttgggtgaggggaacagccgtggtcaaggctgcctgcacccccatccaggcacaggaccctgggcaaagtctcaaaagaggtagtgtttttactttcgcaccaacaatacaacataagtattgggtacaaaagaggagatttccttcccctctacctcaacgggcaaaaggccttccatcttcagaagaggcttgtgaggaccatcggttgatgacctcctagtgaattctggctcccattcagagcacagagaaacccacaaaaggggcctgtggctctggttccaggtctcaagggtacagcttggttacatccccaggccccaggctgattctcctgccatcatactgcaagccttcctgtaccactttgacccaggttgaggtctggcggaaaataacctcaaaggcaattaatacaaaaagcttcctgtaagctaagaggggttatcaactatatgtacttatttttccagagattgaagagagaagagaacgagccaaggcttggttttgttttatgttggtggcacatgtagacactttggcataacgaaccccatagagcctgcagcccaatccactctgttttggtttagaatgaagttttttttttaattatttttcttggaagtagggaggatttgaaagcttgaaaatcaagaatcaaaagacagtgaatctagaaggcatctgggagcagaacagagattgaagacgggtgggcacaggagaaagcgccaccatcgatcccggctgctgccctggaaatgtgattttcttaatagctgagttcatggttgcttgaggtcaggcctggctattcatttccagcgatgtctgaccagagaggactcatcattgacgacctcagggtcacgggggcgacgctgacaccggaacggcagcagcagcaggtcgattaagacaaggaggatggctccacagacgctcatgagcgcataggacacaatccacaaaatgggctcgctcaaagactgagcggggacacagttgctggctacatcctctgttgagaaaggcccggaaatttcagacactgcagcacctgcaatttctgcacaggggctcgctgcgaagcccaccctcttctgggctctgtcgaagatgacgtagaagccctccatcaccgtggcaccgatcaccagcgcatttgtggatggggaaatgccgaatcggtaacattcataattcaggccggcccccatcatgggctgaatgtaaagctgaggcaggattgtgatacggaatgacctgctggagttctcatctctcaggtagatggagattttagggaagtaagaccaaggtgtttccgaattcgtccagcacgccagctgggacccagtccagaaaccatcagagaattctggaatcagagatgcgcgggccacagcttccaccaccgcatcaaacaccttctggggcaggcgcagcagcgtggtgccactgtccacgatggccttgtctgcgttatactctctgcagtccagattaaggctttggcctccaatttccaatttcagaatttctatctggtagtaccactcttccttaataggggtataccagatgtctcctttatacaaacttggttcaattccacccaagacaagactacctccgttggtcccagatccagcaacgggcaagccggctccacacatctgcatggagaaaacgttggggatgtttgcttgtgtcaccagggagtcgaagaaggtctccagagaacttgatggcttggcaagtgtggcataagctaggccaagtattccattccatttaatcccaggcaaaaagaaattctctgattcaaaaatagtggcaatgttgacaagaaaagaagtattgaagcctttggggatggtgacgaggtcttccccaacgaagcccgtccagcttccttgtgtgtacttcactgtgacgtcaaagcccttggagcggtatgtgctagacctctctgtgtcaaagtacgtgtctatgtaggagtgcggggttcctgccacggcaaagttactgcttccagtgtcaacgagaatctgtagcttctgcgggggggtcccgatcagcatctccaggtagtagccgcggccagagtccccctgcaggttgtctaccatggccaagaagttggcggcgcccgcgggggacgccagggcaggctccagggcgagcgccaagccgtcggcgtggcgctcggcaggggtcccgggtcccggggtgggcgcaactacgcggttcgtggccgcggccacccggaggggcagcgtgaagggcgcgggggccagctccggggcggcgcgcaggagccactgggccagcagaggcagcagcagcgcccgggccagtgcgcccat

SEQ ID NO: 73844 - DNA, 1734 bp, Homo sapiens; identical to SEQ ID NO: 64131

SEQ ID NO: 73845 - DNA, 3070 bp, Homo sapiens; identical to SEQ ID NO: 64132

SEQ ID NO: 73846 - DNA, 1927 bp, Homo sapiens; identical to SEQ ID NO: 64133
  misc_feature (1)...(1927): n = a,t,c or g

SEQ ID NO: 73847 - DNA, 790 bp, Homo sapiens; identical to SEQ ID NO: 64135

SEQ ID NO: 73848 - DNA, 2007 bp, Homo sapiens; identical to SEQ ID NO: 64136

SEQ ID NO: 73849 - DNA, 1420 bp, Homo sapiens; identical to SEQ ID NO: 64137

SEQ ID NO: 73850 - DNA, 1615 bp, Homo sapiens; identical to SEQ ID NO: 64138

SEQ ID NO: 73851 - DNA, 2209 bp, Homo sapiens
ttttttttttttgtattcaatcgaaataatattttgtcttaatatctacaaagtgtgaacaactggtcttaagaaagcagacaaaaggcacaaaattagtattactacagagaagcattcatgctatttggatttgataaatattggagtggcacagtaaaaaataaattaagcattcagcaaaaaccagatatttcattttttccttgctttgtattttcgtcactcctttgacctcatgtgtaaaggctaaaaactgaaatttaactgaaaccatggaatatttatgcaggcgttatgtatgttttagtcacagtgctttcttgcagagtttgggttaaccagagaggtgcacttgaggaaaaaataatccacaggaaattctcttctctttccccaaactaaatacaagattgaggctgtggttgtgcatgttttcatgtgcatgcatgtatttaacttctaaagccctttttcatcacaaaagaagtctccatatgattgactggttttctgatgtaaaagaagcaacttctcaaaaatgaatgactagcgctgtgaccatgagagacgggtggaaaactccttggtgggccttggctcttagttgtcccagaggtgctccatcctgcaaggctctggcataaatctttaacagcttcctgccaacccccatccagcaggaaatacttgcttatctttcttgggcgcggacagacaaaacactgaggtggggagggaggtgagaatcacaataattttgaaatgataaccacccatacttctaccaggaatgagccactttctcccttatggacagtgatcgggccatgccagttcaccttcattttgacaggagttgactaagtgagaatatctttgtgagtgtaaaacatttttggcaaagtgaaaaatagaaaaacttcaaacttcattgataaaaaggagcttatgattacccactttaaccttggtgagtgcagtatttaaatgtgtaatcatactcagatgtttacatagtgcatgtgtgtgaacgtatacggtgtgtacacacacgtgccccgaatggctcttgaataaattcattcctctagcagagtgtgggggtgcacttttcatagtatataatttctctctctctcatcatttcttggatgctaatacaaggtctcagtgaatgccaacaaaaccctgatactctactactttaatattcctacaaaaacagggctatactggaaagctctgcacctccaaccccatcagtgtgctttccagaggggattgaagtatacccgagccatcgccctcctggataaaatatttgggcttccatggtgtgcggaggttctcgcgcttccgttcctccacccgttgcttctcctccaggtgccgcttctgctcggtggctgcgtcaatgtcccccagccgcaggtatcgggtcacctcccgccagaggttcctggactccatgggtccctgcttctcaagaggtctgatcttcttgggatacactggcagtgtggttgtgtcgatgactttggtttctccattgttgtaggtgaactctaaagtaccattccattccccatgggctttacaaacaatggtgttggttgggttgtgcttcacttctgcggtaaccctgtggactttccctccatagaaaggcttcgtgtggaatatcactgtcgctgagtacccagtcttggcacagttgatgctgacttttcctccgagctccacccacgggatggtgagaatggaccgggcgtaggcactaggcagggtgaatacgtactcctccccgtgttccaggagcctcaacacaccttcccctatcatagagacccccacggacatgcccatgaacttgcttttggtccatacatgagtgttgacgcacagtctcttctcctcgcactcacagtagaagcaggagatgggtgggtgatgggacacttgctcagccacaaaccttagtttgtagcttttggaagggtcatcggccattgggtgttcgtgacagctggcaggagagcgggaagcagtcctcttaggcttgaccctgtccttgggaacttcccaggagcagtgaaatgtctcgcctatgatggggttgtagggcttcttggctaaagcgcccttgcggccctcgtgaaaggctgtgagataatactcaacgaagcaaatgactctctcctctggt

SEQ ID NO: 73852 - DNA, 1314 bp, Homo sapiens
  misc_feature (1)...(1314): n = a,t,c or g
ctctcccaaggggtttaaattgggggccccccgggtttttccccccccccggtgtttaaaccccgcccccggaatttatttttggggcccccttaaaaaaaattttcctttcccccccccgggcgttaaaattggttctttttaaaggcccccccctttttttttttttgctgttaaataactttaatggttgatgtgggagtcacaagggaggtatgtttgctccaagggttcttcagtgccatcctcaaagctggttagtgcagggaggtagggcagagttggttccagttttcttccaggaagggtttagggaggtcccagcgagccccaggaatgagtccctcggtaccatggcaaccacaatttaagaggggcttctgcccacccctgcagcctaccccaggtccagcagaggaacaggaggccagactggccaacttgctatagacagcgccgtatccagagcccaactgcgcatgggtcattttctcttctgggcagatcctatgccagcacctttctctctcacactggtgactggagccaagtgcgaggttggcctttgctgcagaggcctctggtccgtggggatcgctgaggtgggaggggggcaaccgagcgagccctaggggagtggtctggggggacagcatccagggaaaaggttcggggtctcccccagggcagggggtgggtccagtctggggctggggccactgaggcaggcgagcaggggttaggcagggcaggctggtctgtaaacattgccagccagggtgggggtgtctccagccttgcgccctcccgctgggtcaggatgtctgtcaccgctgcgatgtcatccagcggctcaatagccatctcatggtacaaggacccctgctttgccagtgcttggggtggtttccggggagcaggagtttcaattttcatgatttcatcacagcactgcttccattggctcatgtcaaagaaaagctgccacagagcctccatccagctctgcagtgcttcccgactttctgtctgaagggtgtgtgtcacctcatcatccccatactggttactgatgcttagggtgaagggccgtcctagagcctggtccagctcccctgcccggactcgagtctccttgttgacagcaatagtaagcagcggctcttccccagtgtctgcatcctcaggttgccggtaacagaagaggtttgtgcctttcagaactccatgcacttgtgcccagttctgcatctccccagcttgctgcaccctgagggtaccacttgcagtggggaattnnnnnnnctggactag

SEQ ID NO: 73853 - DNA, 804 bp, Homo sapiens; identical to SEQ ID NO: 64140

SEQ ID NO: 73854 - DNA, 1342 bp, Homo sapiens; identical to SEQ ID NO: 64141
  misc_feature (1)...(1342): n = a,t,c or g

SEQ ID NO: 73855 - DNA, 1235 bp, Homo sapiens; identical to SEQ ID NO: 64142

SEQ ID NO: 73856 - DNA, 682 bp, Homo sapiens; identical to SEQ ID NO: 64143
  misc_feature (1)...(682): n = a,t,c or g

SEQ ID NO: 73857 - DNA, 697 bp, Homo sapiens; identical to SEQ ID NO: 64144

SEQ ID NO: 73858 - DNA, 2084 bp, Homo sapiens; identical to SEQ ID NO: 64145

SEQ ID NO: 73859 - DNA, 904 bp, Homo sapiens; identical to SEQ ID NO: 64146

SEQ ID NO: 73860 - DNA, 1333 bp, Homo sapiens
gatgatatgtcagatctctctccagaagagcaatggagggtcgagcacgcacgcatgcatgccaagcaccgtggccatgaagctatgcatgctgaaatggtcctcatcctcatcgcaaccttggtggtggcccagctgctcctggtgcagtggaagcagaggcacccacgctcctacaatatggtgaccctctttcagatgtgggttgttcccctctatttcacagtgaagctgcactggtggaggttcctagtgatctggatcttgttctctgctgtcacagcctttgttaccttccgagccacccgaaaacctctagtacagacaaccccaaggttggtttataagtggttcctgctaatctataaaatcagctatgccactggcattgttggctacatggctgtcatgtttaccctctttggtcttaacttattattcaagatcaaaccagaagatgccatggactttggcatctcccttctcttctatggcctctactatggagttctggaacgggactttgcagaaatgtgtgcagactacatggcatctaccatagggttctacagcgagtcgggcatgcctaccaaacatctttcagacagtgtgtgtgctgtgtgtgggcagcagatctttgtggacgtcagtgaagaggggatcattgagaacacgtataggctgtcctgcaatcatgtcttccacgagttctgcatccgtggctggtgcatcgtgggaaagaagcaaacgtgtccctactgcaaagagaaggtagacctcaagaggatgttcagcaatccctgggagaggcctcacgtcatgtatgggcaactgctggactggcttcgatacttggtagcctggcagcctgtcatcattggtgtagtccaaggcatcaactacatcctgggcctggaatagtgatgaagagcatcagtggaaaacccaccccacacgccatggacctcagggcactctcctccctgcccacaaagacctcctgggtgggaaagactcaaaggggcgcttgggccactcaggacccctccggctgtgtcggactggggagggatatgatggagagccagccagtggggctgtcagcagtggggggctttttaaaagaaaactattttgatgaatatatttaaaaaacctttttttattgtggagcataggaattgcccccctccaggcttcaccctccctgcctaagcagggtgggggcagagccatgacatttttggtttaaaggagccttctcatctctggccgagaacactgctgggctcccaggtagctgaaggcctcagcccacccactcccttcttcc

SEQ ID NO: 73861 - DNA, 1561 bp, Homo sapiens; identical to SEQ ID NO: 64148
  misc_feature (1)...(1561): n = a,t,c or g

SEQ ID NO: 73862 - DNA, 3452 bp, Homo sapiens
ttttttttttttaattagaaacaactattttattcagaaaagtataaacagttagcaattagaatcttcttatatacagacataacttgcagaaggttaagtctgaggacgctgttctgggtaatttttacagtcctttttagctctaagatccatgacactgcatttttatggccaaagggcaatcaattatgcacctggttgtctcaataggcagtaaaacctaatataaataaatgacaaatcatctgccataaaaaaatacgaaaaacttttgaaatgttaatttcaactccaatgaaacaaatacctaattaaaacaattatttattccctgctagaatataaagggaacaacaagcttgagctgcaaggctcaagctttgagagcacagaaagatttttaaactaataatgcattttaagtccaagaaatggagccagcccataatctcatgttggaattccctcaggcaaagctggaaaccccctcctgatattatttgcaatgcgattttttgttatttgggatttttaaaatgaccccaacttttctgtgcttagtttaggagtcccttaaaggaaaaagttgaaaaaaaaaaagatcccacatttcagttctaagtcaacgttagaatcaacttctccctctttttcctcttcctcttcttctcttccaagtggctagtagcatcagcaaaaaacataacttcactttttgcctcgcattccctcttgagataatcaagaccagccatattgaagccgataacatcccggacttggctgacttttgaaatagttgtttcccttaatttttctatcactggcacaagcatttgattgctagtgatctgtccaaagtgaatcctaaggaggaagaagaggcaccggcatataagttcaacatcagagcccagctgaatgaattcgttaaagagtttaagaatgtctgggacataagagaaaggcagcccaagtagagatttttccagctcactcgacttgatccctttaaaaatctctaatacataagctgaaggtgagatactgccataagccattaggatggggttgctgggaagtggaacctctttccctgcagctttacaaatggctttgtgttccttcatttttgcagtttcttctcggtacaactcaatagcctccataatcctctcagctgctttcactgtttcaatagttttctttccagtaaagtaactgtcaccttgagtctctcctggaactgctggttggtcttctttggccacactctcctcatattctgcttctctttccatctccctttcttcctcaagaataagaggctcccttgttctctcccaaagtctcagagatttgtcatgggacgatgatacaacatagtctccactggggcttacagccaaacaccatatttcctggtgatgaccctccagagtctgtatgtgttcaaatttgtctgcatcccactgtttaatcttatgatcttttccggcagtgaagaagaggtgagacttgggtacaaactgtaggtacatcacactgtcatcatgtgcaaagagagacttgtggcagtccccaaagtccaaaccccagattttcacattcctatcagcggagccagttgctatgagtgctccatcatgagagatgtccatgcatataacaggcagtttgtgtccatacagtgacagaaaaaactttaaagtatcaacgtagaaaattttcacagtacagtccagcaaagacacagccaatagcttttgattgggagagtaactgacacacagaacatcttcatctagttgcaaagttcgggtttgcttcacagaaagtctcttttgggtactattttcatctttcactaactcaaaatcccagaatttgacagatttatctgcaccacctgtcacaaagccacgctgatctggagagagggacatggaccacaaagctccatcatgtgcatctattgtctccagcagattccctgaagccaagtcataaagctgcagcttccctgtctttgttcctatgactacctgtctatcaccaggtacaaagaatgagcaaagtgcatattcacaggtcattgtgcgaatacactgcagtgtagacctgttccatattttaatggaatcagctgcagctgaaagaacagcaatattgtctgagctgaatgacaaagtccgcacatcactgcgatgacccccaatagtgattctgcttgtcctgacaggctgaggagtaggcaaggatggattcagtgaatacaattccaccaggttgttctgcagcaggaagacagcctttaactctccgtgaggtgaatgaatcaagtcaaaggacttgattttggcagaagtttttatattagtcacccgctggatttcatcttgcagactcatttcaacattaacctcaggatcttcctcctctcctttgctagaatgtaattttgctttctttctagctttcttcatcttcttatccattttcttctgaatttcctttttggaaaggatacaaaacaattctagcacagagtcagttccatggcaagcaagaatcctgcctgtcttgtcgactgcaaggtttacaactctgtctcttccttcccgcattatggaaccagcttttctgcatgaaaggattcgatcctcaggggcttcatccgtctcaaaggcaccatcctctgcctcaagagtatcttgtattccaggagaagatcctttgattttcttggggtctggttcttccgggtcttcaatctcttgcagataagctatgtcccataccctcagttcactgtctgaggccccagtgatgagtcgcttttcttctgacaacagaaccaacccccatacctcagtccggtggccaaccattgttttaaagcagtgctgagtatcaaggtcccaccatttcaccatggtatctttcccactagtaactagcaggttcttttctcgtagaaacaatgcttgtgtgatggcatccttgtgcccctttagacggtacagaccactttcattgatcacatcccatacaataatatctgtgtccttggacccagatgccagtctgcctcctagctgatcatacttcaaggtagtgatagctgctttgtgaccattgaaggtcacatttccttccccactcaggagactgaagattcggatcgacccatcctcatacccaacagctaagtgtagcccatctggggaggggcataagcaagtaacttcttgtttaagcccctgaaggataagaatcttctctcctttccttaagtcccagatgaaaacgtgttcacaagctggtactgccacataacgtcctttctcaccacgaagtgtcacaaagacaatattacctttttggctgccgataacgccaaagaccgcactagcaacatagcgtaggtactgcttggtgagccccat

SEQ ID NO: 73863 - DNA, 1491 bp, Homo sapiens; identical to SEQ ID NO: 64150

SEQ ID NO: 73864 - DNA, 721 bp, Homo sapiens; identical to SEQ ID NO: 64151

SEQ ID NO: 73865 - DNA, 2234 bp, Homo sapiens; identical to SEQ ID NO: 64152

SEQ ID NO: 73866 - DNA, 2783 bp, Homo sapiens
ggctggaatggttcctggaatgataatttagtggataccagcccgctgaagagagaccctctgcaggacatttgcaggagatacatggaagatctgaaaaagatctgtttttacagggagttaaactcgaagaccaccttgaaatttgtgcacacatcttttcatggggtcggacatgactatgtgcagttggcttttaaagtgtttggttttaagcctccaattccagtaccagaacaaaaagatcctgatccagacttttctaccgttaaatgtccaaatcctgaagaaggagaatctgtgctggaactttccttgagactggcagagaaagaaaatgcccgggtagtgctagccacagatcctgatgcagacagactggcagcagcagaacttcaggagaatggttgttggaaagttttcacagggaatgagttggcagctttgtttggatggtggatgtttgattgctggaagaaaaataaatcaagaaatgctgatgtgaagaacgtttatatgttagccaccacagtctcttctaaaattctgaaggcaattgcacttaaagaaggatttcattttgaagaaacattaccaggttttaaatggattggaagtaggataatagacctcctggaaaatgggaaagaagtcctttttgcatttgaagagtctattggttttctctgtggaacttcagttttggataaagatggggtgagtgcagctgttgtggttgctgagatggcatcttacctggaaaccatgaatataacattgaaacagcaactggttaaggtttatgaaaaatatggttatcatatttcaaaaacttcctatttcttgtgttatgaaccacctaccatcaaaagtatatttgaaaggcttcgtaattttgattctccaaaagaatatccaaaattttgtggaacatttgctatattgcatgtacgggacgttaccactggatatgacagtagccagcctaataagaaatcagtgctgcctgtgagtaaaaacagccaaatgattacatttacttttcaaaatggctgtgttgctacccttcggacaagtggaacagaaccaaagataaagtattatgcagagatgtgtgcgtcacctgaccagagtgacactgctttactggaggaagaactgaagaaactcattgatgctctgatagagaattttcttcagcctagtaagaatgggactggatctggccgttcctgtttaggggtaccccccaataccgtcatgacactgtgtggggcatatgggaacagagcaacccgaagaaactgccatacattggaaccttgtggttagcattctctctcctatctcatctggccgagtatctttttccttttattttctttctttttggtcaactggctagactaaacaaagtataagtttgaaatgaaatggtctagagggaaatgattcaaattttttcataattcaaacaaaagttattacactaaaagtattatagtaacgtattgtccttccgttaacagaaacatcacaattcaaaagtgagttttcttattatagtgtgattaagcctagttctgtatctcgtaattgtgtatagcatggtaaaagaaaaaaaaaaagacaggtaaatgttatataattgtagggttagttaaggaaattagtccataaaattggcaagaaaatggtactttccttgattgttatgaaaaagtgtcattgtgacatcacaggtattaatttacaaattagagtatttgaaataggatatttagcatttctgtagtttaaaacagatgttacagtgtgtggttttggcatgtctgtttcaggtgcccttggtgcagtataaatttactgtatgtatttaaaattctgatgtttactgaacataaaacaatagtggcaacactcctattggctttgttcttatcaaatttctcagtgccttctcagggtctggtatgaacagaaaaaacagtgttcctgcatttaccataatttaatcagtcaatttgcagatagctaaggaaaatcttccaaaatctgtaggtgcttcctctatatcaagtgagtttactgattttaaaatcttaggaatataaataaagatcttaataaaagcaagcttaatgtagttaaggatcttcatattagaattgtgtcatttatcaaaccttttattacagaaaaaaatctgaactgagaaaggagctctgaatttatttgacagtctaacttttgaattacatttttgtaagtagatttattcttttattttatgaagtaatgttaattttactaagaataaaacatccaaattttaagtattatgaaatactaaaactacatgttttaaaacagaggtccagtttattctaacatcttgctgacttctgtagaatttctgattgcatgactattatttatcttcttttagtgtagaaaataattttttacaaaaagtcacttttgggctgggcgcagtggctcacgcctgtaatcccagcactttgggaggctgaggcaggtggatcacaatgtcaggagtttgagactagcctggccaatatggtgaaaccctgtctctactaaaaatacaaaaattagccgggtgtggtggtgggcacctgtagtcccagctactcgggaggctgaggcaggagaattgcttgaacctaggaggctgagattgcagtgagccgaaatcacgccactacactccagcctgtgcaacagagggagactccatctcaaaaaaaaaaaaaagtcac

SEQ ID NO: 73867 - DNA, 1658 bp, Homo sapiens; identical to SEQ ID NO: 64154

SEQ ID NO: 73868 - DNA, 2913 bp, Homo sapiens; identical to SEQ ID NO: 64155

SEQ ID NO: 73869 - DNA, 2796 bp, Homo sapiens
gaattcccgggtcgacgatttcgtcgccacttcagggccggcccgcggaacttttgggcaggtgtcagcgcccgtgtcaccgccacgtcgcggacatggtgatttcagaaagtatggatatactcttcagaataagaggaggccttgatttggcttttcagctagctactcctaatgaaatttttctcaagaaggcactgaaacatgtgttgagtgacctgtcaactaagctgtcttcaaacgcccttgtgttcagaatttgccacagttcagtgtatatatggcctagcagtgacataaacaccattcctggagaactgactgatgcttctgcttgtaagaacatactgcgctttattcaatttgagccagaagaagatataaaaagaaaattcatgagaaagaaggacaaaaagttatcagacatgcatcaaatagtaaatatagatcttatgctggaaatgtcaacctccctggcagctgtaacgcccatcattgaaagggaaagcggaggacaccattatgttaatatgactttacctgtcgatgcagttatatctgttgctccagaagaaacatggggaaaagttcgtaaactcctggttgatgcaattcataatcaactaactgacatggaaaaatgtattttgaaatatatgaaaggaacatctattgtggtccctgaaccactgcactttttattaccagggaaaaaaaatcttgtaacaatttcatatccttcaggaataccagatggccagctgcaggcctataggaaggagttacatgatcttttcaatctgcctcacgacagaccctatttcaaaaggtctaatgcttatcactttccagatgagccatacaaagatggttacattagaaatccacatacttaccttaatccacctaacatggagactggtatgatttatgtggtccagggcatatatggctatcatcattatatgcaggatcgcatagatgacaatggctggggctgtgcttatcgatctctgcagactatctgctcttggttcaaacatcagggatacacagagaggtccattccaacacacagagaaattcagcaggctctagtcgatgccggggacaaaccagcaacatttgtcggatcgcggcaatggattggatctattgaggtgcagctggtactaaaccaattgatcggtataacgtcaaaaatcctgtttgtcagccaaggttcagaaattgcctctcaaggacgggaactggctaatcatttccaaagtgaaggaactccagttatgatcgggggaggagttttggcccacacaatactaggagttgcatggaatgagattacagggcagataaagtttctgattctagatccacattataccggtgctgaagacctgcaagttattttggaaaagggctggtgcggatggaagggcccagatttttggaacaaggatgcatactataacttatgtcttcctcagcgaccaaatatgatttaaaatatcttggagtcaaagactgcagtagagtggtattataaatttttgaataaagaatcagtttaatttttcacattaaatcctggttctagtttgaccatttaaattatgacctttttcaaaggttgtaaatactgcacggagaatgtattttttagacgttcctttaataacttaaaagacaaagcatacacaaccagcatattataggcatgtaaatacatgtgttcttaaatggatcttcacttggaagaaagtttttcgtccttctcagaaggagattagacacaacatatggtaaagccaaaagcaggagcttatagatttgcatgaaatgaaggcgttcttcagacttcttcataacccacgtgacatcagcacttccttttcccactggtattttctacacttccgagactccgtttctgtctgagcacggcaacacaatcattcctgtcagggtgttcacttgcttttattgtctgcatacatttaattgttgtaagaaacttggcacagtctggaaatccacatgaccaagcgagatcttcagctgtttgcccgttcttattacataaatcaatttgggcatcactggctacaagcaggcttaggcactccaggcttccaacttttgctgccttgtgtagtggagcttctcctaaaacatcctgctggttgaggtcagcgcccgtttgcagctgccagagaagaaagcaagcaaggccgcttcctgcggctaagtggacaggcgactgcttgcagggatccgggggtgcgttgaccgaggcccctgtctccagcaaatgcttcagaccatccacctcggggttgcaatccagcaacagcatttcccgcctaaggcagatgacaagagtccttggaagtgcagagaggtgagacactcgccgcaccccgacaggtaagaatgcgcaggctggccctagcacgggagaatttaaagaccgctgggacttccgggccggcccttggcagccgcgccccagctccggttacgcccgagcagcctaatcctcaacgacccggaccctgtccagccccgccacggccgcacgtacacaaacactggcacgtggagcccggcgccgggggcagggggagggggcgggcgcgcgaggccatccgccgattggccagctgtggatgcgtcaggccctcccacctcggggcggggcccgcggcggccccacggagcctcagcgcgcgtgcgcagggtaagtcagtgggcgtgagaggactggagtaggagcgggtggggctccgcggccgc

SEQ ID NO: 73870 - DNA, 1285 bp, Homo sapiens; identical to SEQ ID NO: 64157

SEQ ID NO: 73871 - DNA, 1564 bp, Homo sapiens; identical to SEQ ID NO: 64158

SEQ ID NO: 73872 - DNA, 1932 bp, Homo sapiens; identical to SEQ ID NO: 64159

SEQ ID NO: 73873 - DNA, 971 bp, Homo sapiens
tttttgcaaagtttattggaaaatcaaaatttttttattaatttactggatttcctatacctaacaatccttaaaacaactatcaacacctgcaacacaaaccacaggcaaaatgaaaaacagatgccccagacagcacccacccacattggcacacactaattaaggaacaaaatcttacagggtgctgacataactcgctttaagcatgcaatgattcctgcagtgctccctggcaatcaacctctctgcaccctggggctggatacttcaaagtcctttgttctcttaaacaggttggaagtcaacatgggcaagttaaggacaagttaggatgaggatccccctaggttcataacgtggagttcctccttggctcctccaatggtcatccaccaaggtacaggggccaatccccctattaagagatgggcttaaagcatccccaatgggggaaacaggcctgcccaggccacatgggcagattctatatatttccaagtccccgcaggccacaagactggaaagccatagagaattggacagctcaagcctcacctgaacaatgtgttgaaaggggatctctcaggacagacactttgatttcataagttggcccattttggcccaaatataccaaatagagatgtcatgtaatgtcactgcaaatccagtacaagatactaagagtacccgagaacctggggttctctttcggccatccagaaggtgaggtcagccaggagggtgcccattgctctctgaccaactgatctgccagaggaaaagctgttcagtatccaagatgcatcaggtccaatcccaggggttcctagttctccttctgtgcctgctgtaacctcttggccacagcagtgatcagtgctgccccttttccactgccatcttctgacagcatgaatgtcacatcacatcgaggggctagttccttcacagtttcctgcaatatt

SEQ ID NO: 73874 - DNA, 1480 bp, Homo sapiens; identical to SEQ ID NO: 64161

SEQ ID NO: 73875 - DNA, 3205 bp, Homo sapiens
cttcaagaccgagctgccacggccgcctccccgcccgccccccattctacgcgcctgcccacaccctcctcccctccttccagcgcctttcggtggagcactgcggcactcagcccgagctgccgttttcccctcgcggggaacgctgtgacccccccgcaggagcggcggggcggggtgggggggcccgggagaagatggcgacgccgggaagcgaaccccaacctttcgtcccggccctttcggtagctactctgcacccacttcatcatccccaccaccaccaccaccaccatcagcaccacggaggaaccggcgcccccggcggggcgggtggtggcggcggtggcagcgggggcttcaacctgcccttgaaccggggtctggagcgcgcgcttgaggaggcggccaactccggggggctgaacctgagcgccaggaaattgaaggaatttccccgtaccgcagcccccgggcatgacctctcggacacggtgcaggcagacttatctaaaaacagactggttgaagttccaatggaattgtgccattttgtatcactggaaattcttaatctgtatcacaactgtatcagagtcattcctgaggccatcgttaatctgcagatgctgacttacctgaacttgagtcgaaatcagctgtccgccctgcctgcctgcctgtgtggtctgcctctcaaagtcttaatcgcaagtaacaacaaacttggatcattaccagaagagataggtcagctcaaacagttaatggagctggatgtcagctgcaacgagatcacagcgttgccccagcagataggtcagttgaaatctctacgagaactgaatgtcagaagaaattaccttaaagttttaccacaagaactagtagatcttcccttggtaaagtttgacttttcctgcaacaaagtgctcgtgattccaatttgttttagagagatgaagcagctgcaagtgttactacttgagaataaccctctgcagtctcctccagcacagatttgcacaaagggcaaagttcacatatttaagtatctgagcatacaagcatgccagattaagacagctgactccctttatctccacaccatggagaggccacatttacaccagcacgtggaagatggcaagaaggattctgattcgggagttggaagtgataatggagataagcgattatctgccaccgagccttctgacgaagacactgttagcctcaatgtgccaatgtcaaacatcatggaagaagaacagatcatcaaggaggactcgtgccatcgccttagccccgttaaaggggaatttcatcaggaatttcaaccggagccttcccttttgggtgacagcaccaactcaggagaagaaagagaccagtttactgatagagcagatggtctccattcggaatttatgaactataaggcaagggcagaagactgtgaagagctgttacggatagaagaggatgtgcactggcaaactgagggcataataagttcatccaaagatcaggacatggatatagcaatgatcgagcagctgagagaagcagtagatttgctgcaagatcccaatggattaagcacagatattacagagagaagtgttttaaacctatatcctatgggatcagcagaagccttagaattacaagattctgcactgaatggtcaaatacagctggagacatctccggtgtgtgaggtgcaaagtgatctaacattacagagtaacgggagccagtattctccaaatgagattagagagaactcccctgcagtctctcctaccacaaacagcacagctccatttggcctgaagcctcgatcagtgtttctaagacctcagagaaatttggaatctatagacccgcagtttacaatccggaggaaaatggagcagatgagagaagagaaagagctggtggaacaacttcgtgagagcattgagatgagattgaaggtcagtctacacgaagacctgggggcagccctcatggatggtgtcgtcctctgccatctggtcaaccacatccgcccacggtcggttgcaagcatccatgtcccatcaccagcggttcccaaacttagcatggccaaatgcagaagaaatgtggaaaactttttggaagcgtgccgaaaattaggagtaccagaggaaaagctatgtctcccccaccacatccttgaagaaaaaggcctggtcaaagtgggcattaccattcaagcattactagacatcaccgtaacgaaggctctgttcacatgaaactaccccttctccattgggggctcagactctgctctcatccaggatcctgaactctgctccaggcacctgttcaaccctctctcccacccactgcctgtcacttcactgactccagttacattgaaacaattttcagtctaagggaggattttctacctttcagagctgacctccgactttaagacttgacaggtatttatcttgaaaccagagagggagctggaggaaaaaaaaactgagcagcacatcaatgccttttccaccctccttcatcctttccacactcaccgactgccattaccaaaacgccaagcacaaccgttttgcagcaagacgcattcgttttattaaaaccaaactcattatgtatttagtggggggaggggggcacaatcaggtttttcaccaccaaatttttcgagaggtttcttgagaccattgccttttaaaaaactattttcgacatacaaaatatttatataaatattatttattagtgagttgttattcatcctttggatgcaaattgtaaattaggaaactattttattactgcttttttgtggttaaacactttattttaatataaatgttgagttattttctatcctctttggtgtgcggtagtttaggtctcagtaatgtttctggtatatatgattccaaaaaaaagcgaaaaacaggtgcttttaggacacaacttttctggggaggcaatattgacactttggtttgtggaacgttggtcttatttatatttctgcattccatccagtttcctacattccagcagccctctgtcccccaatataatgaactgactaaaatcaagagagcaccccaaagttatttgtaaatagctgtgatggaaaaaaaaaagacatattaaacttgaagctaaaatgtgaacaatt

SEQ ID NO: 73876 - DNA, 1599 bp, Homo sapiens; identical to SEQ ID NO: 64163

SEQ ID NO: 73877 - DNA, 1617 bp, Homo sapiens
ttttttttttttagatgttttaggactttaatgttctttacatattcaacataaaatactgacaatagataaacaataggggaaagacttttcagcaaagtatcactctcgtagtcatacattacaaagaaaacagtagagaacaaaggatagggtaatttaacagaaatgtttagtttaatggcataattgaaaaacaaccaaccaatcaactttctcttctacctatggaaagaatggtaaaaatgaatcaagaacttctaggtctttttcataaaacagcttaaaaagaggaaggcgaagactggggagggggtacaactcttgctaatggaatgctataatgcacaaggtcaaggatttaataaattctaaaagtgtctacatatatcagtgataactgtattattagaaatataaatgtatagaaatataaagtatatggtattaaaaacagaccttgctaatataaacatatataaagtatgtcacttctcctgtaataacagcataaagatcgatctacagtttgcccttcgcctggcactcttaaaccactcctccaatggtcaatgttgaccttgaatcaacagccgctgaacccaggagaccccacagatgtgtagattcagcacctagagggcccccctaccctctgtgctgtgtgttcccatgactccagaaataattaatcgcaacttgcattattaagtccacaggcaagtttgaaatctaactagaaaaagtagcagcaaaggcaaaatacgcgggaatttgttagaaaagcaacaagatttcttaaaatgcttccagttcaagtcagaattaaggtgacattaggtcccaccagctttacagagttgtggatgttttgctgttgttctttcaaaaaagaagaatctgcaataaacatgttcatttgagaaaaatactgtgttaactttttgtagccatccccaagttactttaaactttgtatgttgttcaagaacagagtatatcctggttaggatgtgttcatagctgatgcatctccaaaaattttttcatgaaggcggccagcttctgaacgtcttcaattgtgacagcattatacagagaggcccggatgcctcccacagacctatgccctttcaaggacaacatattgagttcaagagctttatcaagaaatcttttttctaaagcatcatctcctttggcattgccaatgcggaatggaatattcatcttgcttctattttggggctccactggacaaacgtagaatccttgagaattatcaataatctcataaattgtttgagatttgatggagctaagcttctccatggccgcggcacctccattgtttttaatccactccagaaccaagcccatgacgtagatgctgaaacatggaggcgtgttgtacaaggagctgtttccagcctgcaccttgtattccaggaccgaggggcactctcggagggcaaaccccagcaggtcatcacggacaatcaccacggtgaccccagcagagccaacattcttctgggcaccagcaaaaatcacaccaaacttggaaacatccactggcttggacaggaagtttggtctctctctctctctctctct

SEQ ID NO: 73878 - DNA, 2964 bp, Homo sapiens; identical to SEQ ID NO: 64164

SEQ ID NO: 73879 - DNA, 1589 bp, Homo sapiens; identical to SEQ ID NO: 64165

SEQ ID NO: 73880 - DNA, 1657 bp, Homo sapiens; identical to SEQ ID NO: 64166

SEQ ID NO: 73881 - DNA, 1909 bp, Homo sapiens; identical to SEQ ID NO: 64167

SEQ ID NO: 73882 - DNA, 682 bp, Homo sapiens; identical to SEQ ID NO: 64168

SEQ ID NO: 73883 - DNA, 1299 bp, Homo sapiens; identical to SEQ ID NO: 64169
  misc_feature (1)...(1299): n = a,t,c or g

SEQ ID NO: 73884 - DNA, 687 bp, Homo sapiens; identical to SEQ ID NO: 64170

SEQ ID NO: 73885 - DNA, 659 bp, Homo sapiens; identical to SEQ ID NO: 64171

SEQ ID NO: 73886 - DNA, 1455 bp, Homo sapiens; identical to SEQ ID NO: 64172

SEQ ID NO: 73887 - DNA, 1483 bp, Homo sapiens; identical to SEQ ID NO: 64173

SEQ ID NO: 73888 - DNA, 1431 bp, Homo sapiens; identical to SEQ ID NO: 64174

SEQ ID NO: 73889 - DNA, 585 bp, Homo sapiens; identical to SEQ ID NO: 64175

SEQ ID NO: 73890 - DNA, 2061 bp, Homo sapiens; identical to SEQ ID NO: 64112

SEQ ID NO: 73891 - DNA, 1990 bp, Homo sapiens; identical to SEQ ID NO: 64177

SEQ ID NO: 73892 - DNA, 2963 bp, Homo sapiens; identical to SEQ ID NO: 64178

SEQ ID NO: 73893 - DNA, 1588 bp, Homo sapiens
ttttttttttttgcagaaccttgaaataaaacatgttttacagtaagttcacacacaggcttaatgcaaaccagagtaatgcacagatgattgccaagaccatattgacaaattgtgattagattataacgcatagtagcctgccttacattcagcaagttcaaacaggacacaaaaccagtcaactgaacacagagcagctctcttcagaagcacttccaatgagtgatgcagagatttcaaaaatacaaagcaggcaacttatatacagcaaatcctcacactgcctggacatgtgccacttttttgttgtttttaatatatttttccttcctggttgctaatttagactgaattcttaaggatttatcttgatgacttagaaaaatacacctgtcctttctcactttgtttcaggtagtacagtcatgaaattgagtaagtctcttaaaaaaatgaaagtccacagatcccattgtggaaggtttcaggaacccctccccaggtaatgatcacgggatcttcaacagctcaaggagtgctccaacagctccaaaataaccctcgtgttccgaaaaaagtgctttcaactgccccttggaccaataatccaaagcatatgccaaaagccgcatggcgatcgtattaattctcaagaaatttccaacaaataccacctggttaatgttttcattaagggcacacattcttgctattgagccaatgttgttggtgatggtgatcaaagtcgctctggccaggtcctctttactgacagcctctcgcttctccttgctcatcatgtttccaaagcttgaagccacagcccagcctggcagtccaaacctctcatagtcccctccataaatatctcgtactagtttatccactttggtgctatctccacgagatgccatttcaagagcttcttcaaaagtggtacagccagtaagaagacagcagagaccaaaaaaagttcctcctccaagactagtacctgtgacccgtttgtaattatctttggaatatactgctaagatgctaacccctgagccaatgttcaccagaagcagaggatacggatttttcaaatcaaatggtaacttctgacacttttcagaatcagcagggttttcaaagtaatagcactgtgaccgtccattgaatccgactgagtcaatgtataaaattcctttgatcaagcaatctagttcatccagtttgcaaagctgaagatcacctattgtgagaaaatcctgctcaaatttgtacgctccacctccagtggcacaaaagacagtgtggagactcgagaagtttttatctctgcccatttgaataaaagcaggcatgtcatgagtgggaaagcgtataaagtgcagattgcctttgcgtccacacagagtcaggtccttcagctcgaggtgcacgtcccgaatgcctgtagacccataagccacattggaggtcaggtacttccgaatgcttttaagactttccacttcttcctcttcttcttcagcagtgatgtctttgggttcaaaatataccagcttgaccagagttccaccgatatccagtccaaacc

SEQ ID NO: 73894 - DNA, 58 bp, Homo sapiens
tttaagcaaggtcatgccctggatttcagggaggctttgcaaaaactcaaaaaaaaaa

SEQ ID NO: 73895 - DNA, 1199 bp, Homo sapiens; identical to SEQ ID NO: 64180

SEQ ID NO: 73896 - DNA, 869 bp, Homo sapiens; identical to SEQ ID NO: 64181

SEQ ID NO: 73897 - DNA, 1628 bp, Homo sapiens
ttttttttttttacaacaagtccaacacatatgctttatggttctgtttcaaaaacatgaaaacccaggcccctaggattcaagtgatgttgagaggcagaaaggatggagaagttgttggcgccagcatgtggggcaagcagccagacctcaggccctcactctaggcttcaaggtggctgggcttgacttctggccaagggctgctttttcccgcctgcggcccacctgaggccagaccttgcctgaggaaagggcctgtggtgggggggggaaagctcaggcagaaggaagacgtggccaacggccatctcctgaggaggtaattgagcagctcctggttccggcaagggcggtgggtaaggagccaggcccgaggaagtcttaagggtcccctctccacaagctctggtggggccccctgctcccctagccaactgggttgctcaactgccttctatgctccctcctgaagccagcccctgggagagaacatctgaaggcaagaaggaaagagagccctgcctaagcttcttcctccctgcttggccaagtgggagaagcagctgaggtcctttgtgtaactgaggaagcacggaggagctggaatgcctaccagctcggagagggcacttgagagggtctatgaacaaatctgtctaaaagccacgtttgagctaaaagcatcagtccatccctcagccccagctctgtgcgggccaagaatccagaaggcagcaagcaaggcctatctcccaagcctggaggtggttgtggagctgctctgcctgagtcttcagatgctggaattcctcttgaatgaagtccgtcagggctttccgcatctccacagccgacttgttctccgcccggagccgctcgagtacaggcagggcactgaagggcttcccgatcagcacagtgattttctgtccaaagcgggggaagtagggcggactgttaggaaggacgtcattcattccgacatgccacaggggcaggatgatggggttgagatgacactcagcaatcaggcgcccgattccccacttgaaacgcaggaattcggaactcatgttcactttcccttctgggaagatatgcacccagtccccatggttgagcttctccaaaatgaagtccatccccttctggtagacgccatctcctttctctcttctttttccagcacctggcatgtgcctgcctgtgtctagaacacctttcccctcattctctgcttggaaaaattctgctcctcggcacacaggcacacacttgcccaagctgaagaagtgggagtgtagctccttggtgaagcagatgtctgcagctgcaggggtccaacgcatcaacttcaggttccagatgtggcggagtttcaggatcccccagagatgagggtcgtccatgcaggactggtgattggacacggtgatgaggggcgtggccgggcctcgcttctcgatgagctcgtacagcacctccctgttgtgcacggtcaggtggttcatgtacttggtccagaagcagctgtaggtgcccaccaagcccatgacgacgctgctggccagggtccaggtgagcggcggcaccgcggggaacggccacttcacgtgcagaggcat

SEQ ID NO: 73898 - DNA, 1337 bp, Homo sapiens; identical to SEQ ID NO: 64182

SEQ ID NO: 73899 - DNA, 1609 bp, Homo sapiens
  misc_feature (1)...(1609): n = a,t,c or g
ggcccccaaaaaaaaattttaccccgccaagcccggggacttaaacttggtccccttaaaagggcccccccttttttttttttttgaggcacctgtgggactttattagataaacacacaccagctccagccacaggcttggaccggccagctgacagggcggcctcagacacccctgccgggttccgtggcccctggccatggctggaagcagggttcaggccgccccacttctgtctagtcctggcaggccccccctcacctggctctgctgtgggagccgagaacaaagaccccgcctgccccactccttctgccccaggggctcagccagcacccaccctcacagtggcctgggcaggggctggggtacaaagcctcaccctccccctgtgagccagacggaaaatgcatctcccaagagtgtctcgaggggcaggaaggaggcctgcccctccctagccagtgcctacaacagggggtgccctggggggcagaacggccgaccgccaccacaagacatcctgggggacagaggccctgggcacagcccagtccccatccaggagcatatcctaaatgtgcaggggccggcaaggcaggggtaggaggggtccgtggccaggctccatgaggtgagggtctcgccttggactccggatagggggtgctcgacnccgcgcccaggcccctccgccttcagccagcgcatcttctgtcggtactgctggacagcatcttgcacacaggcgtccatcatggcctcagtgaggaccccgtccttggaggcatatgccgtggcctgccaggacacggccagctgagcgatctcccggcccgacatgccctccgtcagccgagcgacctccgagcacttcctcccgtagtcaaactgggccagcttcaggcgccgttttccttctgtggccggcttaagaacacagttgtcaaaatgcagtctcaccaggcgctcccgctcctcctgctgcggcaggtcgaagtggaccatcacgtcaatgcggctgttgatggcacagtcgaactgctcaggcagattgctggccaggaccagcatgaatctgttgctgtgttggcccatgtggtacaggaaggcgttcagtgtggctctgaggtccttgcttatctcctcagtggctcgcttccgaaggaaggcgtccgcttcatccacaaagagcaggaggccgcgccggctggtattggcccagtcaaagagcttgtgcatggcggtcacgccttcccgccccatgggggccacgtccccgcctgtcatgatggcgtagtccatgcctgagtgcagggcgagtttcttggcaaacagcgtcttcccggtgcctggtggcccgtacatcaggatgttcctgtacaggctgcggttcttcttggtgttccttgttgctatggcgatgtcgcgcacccgtgcttccaggctgggactgagcacaacaccctccagcgcgtcctggggtcgactgaggagccgccggctgacctggatggggtgccgcagcgcctccagcaccgtgatgcgggacgtctccctcactagggacggcttccccagccgagcctcgatgaattccaccgcacg

SEQ ID NO: 73900 - DNA, 1450 bp, Homo sapiens; identical to SEQ ID NO: 64183

SEQ ID NO: 73901 - DNA, 668 bp, Homo sapiens; identical to SEQ ID NO: 64184
  misc_feature (1)...(668): n = a,t,c or g

SEQ ID NO: 73902 - DNA, 2068 bp, Homo sapiens
gagtggcgggggcatttgctggagactgagcctggcgcggaggctatgggcagccaggaggtgctgggccacgcggcccggctggcctcctccggtctcctcctgcagactaacgctgctttactcaaccaccctcttcctggccagagaggccttccgcagagcatgtctcagtgggggcacccagcgagactggagccagaccctcaacctgctgtggctaacagtccccctgggtgtgttttggtccttattcctgggctggatctggttgcagctgcttgaagtgcctgatcctaatgttgtccctcactatgcaactggagtggtgctgtttggtctctcggcagtggtggagcttctaggagagcccttttgggtcttggcacaagcacatatgtttgtgaagctcaaggtgattgcagagagcctgtcggtaattcttaagagcgttctgacagcttttctcgtgctgtggttgcctcactggggattgtacattttctctttggcccagcttttctataccacagttctggtgctctgctatgttatttatttcacaaagttactgggttccccagaatcaaccaagcttcaaactcttcctgtctccagaataacagatctgttacccaatattacaagaaatggagcgtttataaactggaaagaggctaaactgacttggagttttttcaaacagtctttcttgaaacagattttgacagaaggcgagcgatatgtgatgacatttttgaatgtattgaactttggtgatcagggtgtgtatgatatagtgaataatcttggctcccttgtggccagattaattttccagccaatagaggaaagtttttatatattttttgctaaagtgctggagaggggaaaggatgccacacttcagaagcaggaggacgttgctgtggctgctgcagtcttggagtccctgctcaagctggccctgctggccggcctgaccatcactgtttttggctttgcctattctcagctggctctggatatctacggagggaccatgcttagctcaggatccggtcctgttttgctgcgttcctactgtctctatgttctcctgcttgccatcaatggagtgacagagtgtttcacatttgctgccatgagcaaagaggaggtcgacaggtacaattttgtgatgctggccctgtcctcctcattcctggtgttatcctatctcttgacccgttggtgtggcagcgtgggcttcatcttggccaactgctttaacatgggcattcggatcacgcagagcctttgcttcatccaccgctactaccgaaggagcccccacaggcccctggctggcctgcacctatcgccagtcctgctcgggacatttgccctcagtggtggggttactgctgtttcggaggtattcctctgctgtgagcagggctggccagccagactggcacacattgctgtgggggccttctgtctgggagcaactctcgggacagcattcctcacagagaccaagctgatccatttcctcaggactcagttaggtgtgcccagacgcactgacaaaatgacgtgacttcagggaagcctggacacccgaggcacctggaccagctatgggtagttctgtgggtggaacacattctgtgtaagagccccactgagggctctgcagcggagtgacagcaaccccagagatgaggcaccagagagtgccactgcatgagacacctgtgaccattcgaagtctgaaatgcggggggggagtttcatttttaagtgaagaccaaaagccctttaaaaataatagttttttatcattttatagtaatcagcattttctcttttactaatatactcattccttttgcgtatgattggcctttggagctacatgctccaacaaactgtatcttaattgttaactgttaataattatctggcccagaaaaagagatgcagtgattttacccttcacaggaatattgaacttcttctgtaaaagagagagagaaacctctctctttcatgcaccacatggaaacagagtgtggccctg

SEQ ID NO: 73903 - DNA, 1180 bp, Homo sapiens
  misc_feature (1)...(1180): n = a,t,c or g
ttttttttttttaaagtttgttttgtgggtttttttccattttcttttgctacccagtatatgcagcacttgtgaactcccaacaggttcccagctttaaacacattaaacatcttgaaagactattgaattcttcaagaatctaaaaacagaccaaacgtgttttgctgtgaacattctgtagagacgaagtgaggcgggagtttgggttcatattttttaaaaaaagaatcaatatagtgatggaagggtaaagaatgcaagaattcagacattctgtggagggttactctctctccattaaaggtccataaaaaggagcaaactgagatccataaggggagtcagcaggagctgtgtgtgtttccccacccgctgtgaataggtttttgctgaggggccatggccaggtccccacttgctcccctccctttggcctgagatggcagggcagtacaggggcactgaaggagcacgtcacgactcctcattcccagaatcatcatcatcataacagtcggcatcttcctcctcctcatcttcatcatcaatgtcgtcatcatacaagtcgtcgtaaagcaaatctgagctgttgtcattggaaggcactttagttttgatgcagtattccgccagggttgtggggaccttcactccatccttttctgcttcggccttagtggctgaaacttgtttcctaataatttcagcatattctttgtcttttcctttactgtctctccatttcctgaacataactgaagcatcgacattggctggggagaaggtgttgggctcattaagcagtgagattacacttaataggatagtcctcacattctgagtaggattccacctttcagaaggcagttctccactctgtgggtcatctacaggcggatgaagaatcgaaatgcatacatctccattctcataaatgttggggtgccacattttggtcaagaatctgaaggtaggtggtgaataggggtagtcaataggaaatttaatatgcgccttgaagtagccgccttcgtagagggtgttggggggtccgaagatggccacctcccagttgtagaggtcggactcgcggacgcgtgggcggacgcgtgggtcgacccnnnattnnnngcgnttccggttncgaagtttccgggnnnngccggcccggactcct

SEQ ID NO: 73904 - DNA, 1852 bp, Homo sapiens; identical to SEQ ID NO: 64187

SEQ ID NO: 73905 - DNA, 2249 bp, Homo sapiens; identical to SEQ ID NO: 64188

SEQ ID NO: 73906 - DNA, 1278 bp, Homo sapiens; identical to SEQ ID NO: 64189

SEQ ID NO: 73907 - DNA, 1690 bp, Homo sapiens; identical to SEQ ID NO: 64190
  misc_feature (1)...(1690): n = a,t,c or g

SEQ ID NO: 73908 - DNA, 1228 bp, Homo sapiens; identical to SEQ ID NO: 64191
  misc_feature (1)...(1228): n = a,t,c or g

SEQ ID NO: 73909 - DNA, 1387 bp, Homo sapiens; identical to SEQ ID NO: 64192
  misc_feature (1)...(1387): n = a,t,c or g

SEQ ID NO: 73910 - DNA, 2526 bp, Homo sapiens; identical to SEQ ID NO: 64193

SEQ ID NO: 73911 - DNA, 1384 bp, Homo sapiens; identical to SEQ ID NO: 64194

SEQ ID NO: 73912 - DNA, 700 bp, Homo sapiens; identical to SEQ ID NO: 64195

SEQ ID NO: 73913 - DNA, 1410 bp, Homo sapiens; identical to SEQ ID NO: 64196
  misc_feature (1)...(1410): n = a,t,c or g

SEQ ID NO: 73914 - DNA, 382 bp, Homo sapiens; identical to SEQ ID NO: 64197

SEQ ID NO: 73915 - DNA, 1050 bp, Homo sapiens; identical to SEQ ID NO: 64198

SEQ ID NO: 73916 - DNA, 2342 bp, Homo sapiens; identical to SEQ ID NO: 64199
  misc_feature (1)...(2342): n = a,t,c or g

SEQ ID NO: 73917 - DNA, 737 bp, Homo sapiens; identical to SEQ ID NO: 64200

SEQ ID NO: 73918 - DNA, 1096 bp, Homo sapiens; identical to SEQ ID NO: 64201

SEQ ID NO: 73919 - DNA, 1084 bp, Homo sapiens; identical to SEQ ID NO: 64202

SEQ ID NO: 73920 - DNA, 1749 bp, Homo sapiens; identical to SEQ ID NO: 64203

SEQ ID NO: 73921 - DNA, 2301 bp, Homo sapiens
aagaaattggccctccagaaaaatgtattttgtgagaaatgtgaaggtgttggtgggaagaagggatcggtggagaagtgcccgctgtgcaaggggcgggggatgcagatccacatccagcagatcgggccgggcatggtacagcagatccagaccgtgtgcatcgagtgcaagggccagggtgagcgcatcaaccccaaggaccgctgcgagagctgcagcggggccaaggtgatccgtgagaagaagattatcgaggtacatgttgaaaaaggtatgaaagatgggcaaaagatactatttcatggagaaggagatcaggagcctgagctggagcctggtgatgtcataattgtgcttgatcagaaggatcatagtgtctttcagagacgaggccatgacttgatcatgaaaatgaaaattcagctttctgaagctctttgtggcttcaagaagacgataaaaacattggacaatcgaattcttgttattacatccaaagcaggtgaggtgataaagcacggggacctgagatgcgtgcgcgatgaaggaatgcccatctacaaagcacccctggaaaaagggattctgatcatacagtttttagtaatctttcctgaaaaacactggctttctctggaaaagcttcctcagctggaagctttactccctcctcgacagaaagtgaggattacagatgacatggatcaggtggagctgaaggagttttgtcccaatgagcagaactggcgtcagcacagggaggcctacgaggaggacgaagacgggccccaggctggagtgcagtgccagacggcatgacgtggtgcggggcagcgtggccccaccggactagcacatgatgaatgtaaagttggcacaatgaaaatgacatcgctttaatggccttgtgtttgggatgtcctgtgtatgtgttcaacattcttaattgctgagtgtctttttggcttttcttttggttgtaacttaagttatagcttaatttatatttaaatgttttaagtataaatcacctctagtctgcatatggaatctgttcatttctattttcaggatatacttttgagatgtcagtgattgcaccaacactttgtgcttctagtggctttgccataattcagtgtcaccaataaggcacagcccagttagcagcttagcccccctagcaaaccccaaggcacaaagtgggcatcctgactcatctctaggtctgtggtttctcccctcttcccttggcagagttattgagggcatgatctcagggctgctaagataacatttctgaggattctagatgatcctcttaaagaataaaagcacatccgtggatcggacatggctgcatgtgcctgcttaacagggccaacttagttcctactgttctgtgcccttcagtggatggaacgtgagtgtctgatcatctctcttggaagttttctgaaccttccaagctctgtggtgaggacaaaccagtgtttgaatcatatgctgataactgtttgcctgtgaccctcacaccttgttcttcagggttttaatgattttctgttgacaacttttgcaatgctttcccaccaaagtgcttacttgtaaagaaaactaaatccttctgtgtccccggcagcctcagtgcagcaacagaagccaagggagaatgctgctggtttggcccatggcacagccagcttctctgaccagtaatccggggtgacttgagggtctgcaaaggcatagaactccccagtgttttccacctcattctcccagattgagctcccttccaaaggatcgttcctctcattgcacagccatattacaaagggtttcctgctcaagtgatgttttggtaagaacttcgctgagttccactgtggattacagtttgtatggactactactgtaaattatagcttgtttggagggatattagtcattattttattcatgacaggtagactacaattcgaacttagggttacctcagtctttagccattactgcttatttcttttccccaagtcacaaaaaacttgtaagctgctgggttaaagcagaggccacctgtcagatctaccctacccttatttggttacatggcacctgagagtttcactcagaccaggggatcttccttagggaggggtcaaagtggcagatcaggaccatggcagggtaaggtggaaccaggctggcacgggaccaggtttccggcaaaacattggccagctagtgagggcataatttggctcaaagtatagaaacaggccacctggtggccac

SEQ ID NO: 73922 - DNA, 728 bp, Homo sapiens; identical to SEQ ID NO: 64205

SEQ ID NO: 73923 - DNA, 2015 bp, Homo sapiens; identical to SEQ ID NO: 64206

SEQ ID NO: 73924 - DNA, 2501 bp, Homo sapiens; identical to SEQ ID NO: 64207

SEQ ID NO: 73925 - DNA, 1456 bp, Homo sapiens; identical to SEQ ID NO: 64208

SEQ ID NO: 73926 - DNA, 1486 bp, Homo sapiens; identical to SEQ ID NO: 64209

SEQ ID NO: 73927 - DNA, 1736 bp, Homo sapiens; identical to SEQ ID NO: 64210

SEQ ID NO: 73928 - DNA, 1231 bp, Homo sapiens; identical to SEQ ID NO: 64211
  misc_feature (1)...(1231): n = a,t,c or g

SEQ ID NO: 73929 - DNA, 1501 bp, Homo sapiens; identical to SEQ ID NO: 64212

SEQ ID NO: 73930 - DNA, 5532 bp, Homo sapiens; identical to SEQ ID NO: 64213

SEQ ID NO: 73931 - DNA, 1348 bp, Homo sapiens; identical to SEQ ID NO: 64214

SEQ ID NO: 73932 - DNA, 1121 bp, Homo sapiens; identical to SEQ ID NO: 64215

SEQ ID NO: 73933 - DNA, 1926 bp, Homo sapiens; identical to SEQ ID NO: 64216

SEQ ID NO: 73934 - DNA, 903 bp, Homo sapiens; identical to SEQ ID NO: 64217

SEQ ID NO: 73935 - DNA, 1274 bp, Homo sapiens; identical to SEQ ID NO: 64218

SEQ ID NO: 73936 - DNA, 6565 bp, Homo sapiens; identical to SEQ ID NO: 64219

SEQ ID NO: 73937 - DNA, 2273 bp, Homo sapiens; identical to SEQ ID NO: 64220

SEQ ID NO: 73938 - DNA, 936 bp, Homo sapiens; identical to SEQ ID NO: 64221

SEQ ID NO: 73939 - DNA, 2131 bp, Homo sapiens; identical to SEQ ID NO: 64222

SEQ ID NO: 73940 - DNA, 2254 bp, Homo sapiens; identical to SEQ ID NO: 64224

SEQ ID NO: 73941 - DNA, 2322 bp, Homo sapiens; identical to SEQ ID NO: 64225

SEQ ID NO: 73942 - DNA, 1328 bp, Homo sapiens
ttttttttttttacttttaatatttaataggaatttgggttaggtgtaacaatgtgtgtattggatctcaaaacatgttatattttaagcaatggcttggagagaactaatcaattcatattctgcatttccagccaaagggacataggcacaactgactggtggcaccttcctgtgggaagcctcttccatccatctacagcattgatacttttataaagtatgaatttatcttgcttgaagagttaagtctcattttccatggttaatgcaggattgctcataccagctttgcattttcctgggtttatgctgctctccgtccaagactgagaatcagtaagaaggtggctctgggactctctcaatggctttgcaggaaactgatggttttcgagatttttagctgtggaattcagccctgcaggagtagatgcttgttcaggatcctggttaacaaggcaagttggaaaggagcagccatcacctagacttgaaaaaatgggtagcaaccagtacttcttctcatcaccaaaaacttgtcgcatgtttttactgaaacccaagctgaatccattcttatctgttccatgtcgaaatactggacttctgaatgcctctaatgtagatttatttttgctgactagcccaaccaatgatagccaaaacagagaagacaagctgacagaaaacatagctgcagcaaagaataaaaacataatatggaacttggcttgagtatcaggtaggccatttgtccaaaatttgataaaatactgtaaatctgttgccgcaataaaaaggcagtagagcagagaataagccaagaaaaggagaaagaacttataatttgaaaatccaacgcaattgttcacccatggacaatgatgatccatcttcaaaatacatttatcacagacggagcagtgatggcagcgatctggttttataagttggcatctgtcacagtatcggatggctccagacatggtcctggtatagatgggaagatccttggctgctcgcctaagaacttcctgatgggcttctcctcttggctctctctccaacaaatctttctctgcataagagagatggaattcttttgaaggattcattggtaatgtaaagatagttttccagtatgaccagacaaacattgcaaaaagtagatgataggccatcaggcacacaacttgttcgccagtgttttccatggacactatgcacagctggatggcgtaggcgtagtaggaccagccgagcaggagggtgatgaacaccaccgggatccagtacagcacccgccggcaccgccgcctggcgct

SEQ ID NO: 73943 - DNA, 929 bp, Homo sapiens; identical to SEQ ID NO: 64227

SEQ ID NO: 73944 - DNA, 1621 bp, Homo sapiens
ttttttagaacgaactttatccatagtagcagtgtacattcccactagcaacttaggagagtttcagttactctactccacatccttccaacagttgatatcaccagtgtaactgcataagtaatgttaatttaaagatacagcaaatgtttttgtttctttatttcagatgagaaataactttagacattatttcattgaaccttcccaactgaaattattttatgatgttataacatggatagtaactcaagtagcaataagttacacagttgtgccatttgtgcttctttctataaaaccatcactcacgttttacagctcctggtattattgcctgcacattcttggtatcttagtattattgttgttgccagtgaaaaaaactcaaagaagaaagaatacacatgaaaacattcagctctcacaatccaaaaagtttgatgaaggagaaaattctttgggacagaacagtttttctacaacaaacaatgtttgcaatcagaatcaagaaatagcctcgagacattcatcactaaagcagtgatcgggaaggctctgagggctgtttttttttttttggaggtaaacaaaaaccaatcttaggcaccttttcaagggggttgagtttgttgggaaaaggcagtttaactggggggaaatggacagttatagataaggaatttcctgttacaccagattggaaatggagtgaaacaagccctcccatgccatgtccccgtgggccacgccttatgtaagaatatttccatatttcagtgggcactcccaacctcagcacttgtccgtagggtcacacgcgtgccctgttgctgaatgtatgttgcgtatcccaaggcactgaagaggtggaaaaataatcgtgtcaatctggatgatagagagaaattaacttttccaaatgaatgtcttgccttaaaccctctatttcctaaaatattgttcctaaatggtattttcaagtgtaatattgtgagaacgctactgcagtagttgatgttgtgtgctgtaaaggattttaggaggaatttgaaacaggatatttaagagtgtggatatttttaaaatgcaataaacatctcagtatttgaagggttttcttaaagtatgtcaaatgactacaatccatagtgaaactgtaaacagtaatggacgccaaattataggtagctgattttgctggagagtttaattaccttgtgcagtcaaagagcgcttccagaaggaatctcttaaaacataatgagaggtttggtaatgtgatattttaagcttattctttttcttaaaagagagaggtgacgaaggaaggcaggaatgaagaagcactgcgtggcctccggtggaatgcacggggcacagccgcgactctgcaggcagcttcccccccatgccagggctctgcgccgtcatgtgagacttaaaaaaaaagttgaatgacttcgtgatactttggacttctaaattaaatttatcaggcataaattatgtagaattagaggctttgaaaataatactggtaggttgctcaaaggttttgaaagagaaatcgctaggtaggttactatctggctaatccatttcttatccttgacaatta

SEQ ID NO: 73945 - DNA, 4797 bp, Homo sapiens; identical to SEQ ID NO: 64228

SEQ ID NO: 73946 - DNA, 2478 bp, Homo sapiens; identical to SEQ ID NO: 64229

SEQ ID NO: 73947 - DNA, 1321 bp, Homo sapiens
tttcgtcgagcggctccctaacaggcccgcctgtctgctcgtggccagcggcgccgccgaaggtgtgtcggcccagtccttcctccactgtttcacgatggccagcaccgccttcaacctgcaggtggccacccctggggggaaagccatggaatttgtggatgtgactgagagcaatgcacgctgggtgcaagacttccgcctcaaggcttacgccagccccgccaagctcgagtccatcgatggtgcccggtaccatgccctcctgatccccagctgtcctggggccctgaccgacctggccagcagtggctccctggcccgtatcctgcagcacttccactctgagagcaaacccatctgcgccgtcggccacggtgtcgctgccctgtgctgtgccaccaacgaggacagatcctgggtgttcgacagctacagcctgacagggccctctgtgtgtgagctcgtcagggcccccggcttcgcccgcctgccgctcgtggtggaggacttcgtgaaggattcgggcgcctgcttcagtgcaagcgagcctgacgctgtccacgtcgtgctggaccgccacctggtcacaggccagaatgccagctccaccgtcccggccgtgcagaacctgctcttcctctgtggcagccggaaatgaacctgctgggtagatgcaccccctgagacagcccaggtgtctccagaggcagccccgtctcaggcttcagggaccccgcctcttccctcctgacaagggccctggatggcagcctggtctggccctgatgggattgttggaggcctcctggaatcagctctgagcgggtgtcggctctcctggagggtccaaacccccatcctcctgcatgttctctggagcagcagcctcctgccccaaggccgaccggcactggcagcactttcctgttgaagaaatcttcctggcgtgtggtttcaaagttttcagttttggaggctggaagcccaagatgaaagcaccagtagatgcaacctcttttgtaagggtgatggtcccatgatgaggctgtgcccctgccctgtgaccggatgacctcccaaatgccccacctaataccatccccttgcaggtgaggacttaagcaggtgggttttggggggacgtgctcaggccacagcagggtgcatgaagagccagtgagcctcattgagcccctctggtcagccagatctgacattgagcccagcattgaagatcaaagcaggtggggctttgggatgtgaagtgggttctgacgcggggccccacagacctgtctccgcgtgagcttgctgcagg

SEQ ID NO: 73948 - DNA, 3264 bp, Homo sapiens; identical to SEQ ID NO: 64231

SEQ ID NO: 73949 - DNA, 1130 bp, Homo sapiens; identical to SEQ ID NO: 64232

SEQ ID NO: 73950 - DNA, 1523 bp, Homo sapiens; identical to SEQ ID NO: 64233

SEQ ID NO: 73951 - DNA, 2459 bp, Homo sapiens; identical to SEQ ID NO: 64234

SEQ ID NO: 73952 - DNA, 678 bp, Homo sapiens; identical to SEQ ID NO: 64235

SEQ ID NO: 73953 - DNA, 865 bp, Homo sapiens; identical to SEQ ID NO: 64236

SEQ ID NO: 73954 - DNA, 3066 bp, Homo sapiens; identical to SEQ ID NO: 64237

SEQ ID NO: 73955 - DNA, 1462 bp, Homo sapiens
cggacgcgtgggcgcagtgtgagcggcaacatggcgtccaggtctaagcggcgtgccgtggaaagtggggttccgcagccgccggatcccccagtccagcgcgacgaggaagaggaaaaagaagtcgaaaatgaggatgaagacgatgatgacagtgacaaggaaaaggatgaagaggacgaggtcattgacgaggaagtgaatattgaatttgaagcttattccctatcagataatgattatgacggaattaagaaattactgcagcagctttttctaaaggctcctgtgaacactgcagaactaacagatctcttaattcaacagaaccatattgggagtgtgattaagcaaacggatgtttcagaagacagcaatgatgatatggatgaagatgaggtttttggtttcataagccttttaaatttaactgaaagaaagggtacccagtgtgttgaacaaattcaagagttggttctacgcttctgtgagaagaactgtgaaaagagcatggttgaacagctggacaagtttttaaatgacaccaccaagcctgtgggccttctcctaagtgaaagattcattaatgtccctccacagatcgctctgcccatgtaccagcagcttcagaaagaactggcgggggcacacagaaccaataagccatgtgggaagtgctacttttaccttctgattagtaagacatttgtggaagcaggaaaaaacaattccaaaaagaaacctagcaacaaaaagaaagctgcgttaatgtttgcaaatgcagaggaagaatttttctatgaggagcagggaaaacctgaggtgcttggaggtccagacacaagaagaggattggaaccagttccgatacagcacaatggtggttcacgggggcaagtgacagccctggtttctctgaaggctggactaattcaatcaagatcaactctaagtgatttccagggaaccttcatgactgttggaattgctctgtcataataagtcagggatatttaggaggctcatagtctcctggagggataaaacatctcggcacctagtaatggtaaattagtcaatatttgttagtttcgtttgagatctcaaatgttaggattttctgaagtctcagtgtctttcagagtttgagataccttgttttcatttttttctaatttttaatttaaaagtaataaagaatattttgtaatgattaggatgaaaatttttatcgtcaattataagccaaaatttgctaaaattaaagtcagtatacttgaaacaagtttctagtaagttctctggggtaagatactaattactctgataaaggggctatcaaaaaaatccagtaaattgttcataagaagagatcagtttaagagtcaaacaatttgctttgctagtaccttagctaaagaaaaaatactattaaagatgactatcacctttaaaaaaaaaa

SEQ ID NO: 73956 - DNA, 471 bp, Homo sapiens; identical to SEQ ID NO: 64238

SEQ ID NO: 73957 - DNA, 457 bp, Homo sapiens; identical to SEQ ID NO: 64239

SEQ ID NO: 73958 - DNA, 792 bp, Homo sapiens; identical to SEQ ID NO: 64241

SEQ ID NO: 73959 - DNA, 1214 bp, Homo sapiens
  misc_feature (1)...(1214): n = a,t,c or g
ttttttcttaaggaacttataacttattatgggatccagtcctaaagtagattagaccgatgtagaattctgtctggagacgttctccccttcaattcaatgggaaggctcttttctggcatgaactctccgatgtctaatgagctctgagcaccatccataagctttcccacattctttacatataaaaggtttctctccactgtgaattctccgatgctgacttagatatgagctttgactaaaggccttcccacactcattacactcatagggcttctctcctgagtgaatcctctgatgctgaacaagatgagcaccccatctgaaggccttcccacattcattacattcgaagggtttctctcctgtatgaattctctgatgctgaccgaggtttgagctctgtttgaaagttttcccacagtcactacacttatagggtttctctccagaatgaactctctggtggacaacaagatgtgagttataaatgaaggttttaccacattcactacattcatggtctttcttccctgtgggaatttccttatggatgacaaccatctgcctgaaactttcctcctgggcaggggaccacctcagtctctccgctttgggatttctctgctgcagttctaaggtaccctcagaggtagcttcaaatgtagaggtgtcagtagcaagtttttctgagaacacctgtgattccacttcagtaatgggtggttgtggcaatgatcctttgtccttgggctctgggccatcttctgtaacaactgacagaaaatgtaaatatacctgttcactctttgggaaaggctgggtctccttaggctggagctggatgctcagtgcttcctgggctgctcccagagattccttcttctcccatggctcttcctgtgcaggtccatgtgcagggcctgggacaagactgttcctcttcctttggtcccatcatcatcatcttctcttgtccctgtgtaccctgaagggccagagtttcagctgctgttagtgatacagccatcctagtctgcactagctctgcagaaggctcataccagctggaatcttgcaagggccccctcacaggaccaggaggttccatcggggcgctgccgcgactcgcgcccgntcgcgtgggtctacacgcgaatttcgatccggtacagcgggcgtcgatnnnncnnnnnnnnnccccaatccca

SEQ ID NO: 73960 - DNA, 779 bp, Homo sapiens; identical to SEQ ID NO: 64243

SEQ ID NO: 73961 - DNA, 3041 bp, Homo sapiens; identical to SEQ ID NO: 64244
  misc_feature (1)...(3041): n = a,t,c or g

SEQ ID NO: 73962 - DNA, 935 bp, Homo sapiens; identical to SEQ ID NO: 64245
  misc_feature (1)...(935): n = a,t,c or g

SEQ ID NO: 73963 - DNA, 926 bp, Homo sapiens
  misc_feature (1)...(926): n = a,t,c or g
ttttttttttttaaccccagaaatgtgtttattaagttggaactcgtattgctgtgtggggtcccagtgcacgcgtgtgcacccgtctacaagatccaggtaaagatggcacacggcagacgacgacaggaaggacacctgctccccacccttcccgggaccccgccatgtgcaaaattcgagctggggtctgcagctgcttggagagacccagggcctcttgctccacagcctgcaaggtttgagcagggcaacggccctggggcggtgaggcccccgcctgggtcactccccgcgccccccatgcaggcagtggaggggaggacacgcaggaggaccagacgctaaaggtgtaaacggggcagccgtggcactcctcacctctcaataagataaataactaaataaataaacaactaaataaagacatgaaggaatggatgcagagacgtgaacggatggcgcaggacgtccctggtgggggccacggtccccttaaggcatgtgggaggctgcaggcctctggtggtaggtgggtcagaggctggtggaggacacggacagcgtcggggaggatggcggcgggaaattgagcagctccagcaccgccacacccacactgctgcgccgggtgaacatgcaggatgcggccacccacttgttggtcctcgggttgtacttctcgatggagttgaggctggagctaccgtcgttaccccccacggcgtacaaccatccgtccatggccaccaggtcatgcgtgctcctgcggatattcatgggcgccacgctttcccaggctccagcctttggactgtatctctctaccgagttgaggcagctggtgccgtcgttgccccctgccacgtacagggcagaattccnccggactgtacaatggtctcaaaacttttttcctttatttc

SEQ ID NO: 73964 - DNA, 3992 bp, Homo sapiens
ttttttttttttctggagattttttttttaatcctttttagttcaacataaaatgagaaagaaaaaaatatttctgaccattttccaaagaccagaaataggaaagtatgttcatatacattcaacgtatactgcacatattggttactacaatacaaagcaatgagtttttttaaagtgtagtttgcaagatggcacggttagtagggctcactggctttcatctgttgttgctggagggtgcagtctgctctcccatacatacagtaccatgtaaacacatcaggctgagcgcgtggtggtggtagggcaggttgggggcataagagttgggaaccaagcgcagataagtcaacagctttttagggctttcttggggtaaggccccctttctggttgagtaggttgggtgacccccacccaagtgggagggggagactgggggaccatgggaaacatgggacagctcccacgaaggggctccttgcactgcagaattccactcaagggatcttgggtccaggagccgagctgccagtatcagtggagaaggacaaggtgcatggggatcccgccagcaacatcaggatggccatgccgggcacccgctttcctctgtgcaaattcaggatgaaagactaggaggggactagaggacctcttgctctctctctgtttcttgttacacgcctgcctgctccatgctgaaggagacttcggggtgcttgtagctgagcagaatgtctgtaatacacgtagatggatagcaagaggagtttaaatgctggctgccatcactcaggtctgggtgctcatgacctcccaggcttgccccacattcctcattttccccatcctgaaactgctggctgcccatgagcgaagactgactgagaactgcatccgacatccgggcagagctaagtgctttcccagccacgagactcattcctggcaagttatccagctgtacataagcatcgtcgctgttctggatcgtgtggtgataagagtcagcattttgataagataaagcctggcgctctgtcatgctctgtcccccaaggctgggagccagactccccgcatccccttggttcatgtgcctgaacagttcctggtattcttgctgttgctgctgttgctgctgctgctgccgttgttgctgctgccttttaatgagctgtgcaaactctgttgggggcagccggatgtccgagtggccggtgagcgaatgccggggagaaagcagtccttgaaggatgtggggtacctgctggtgtcttgtatagtctggcggcgtgggagacagcagggcctgctgtagtgccgacgtggtatagtgtggcggctgctgatgtgcactgggagggaaggtggggaattggtcaagtggagggactttcagggcttgggttggagagacccccactcctgttgaagggctgtagctgctgggggaaccccggggctggtccgaaaacagatgggggtgtaaatgcgcctggtcgtagttagcaggggagaaccgattcacgttcaagctgtgagcctctgcactgtcagcactcagctgcttggacaagggacggtgcccatagctgagggtggccatcaggttggtacggtgctgcatctgcatctgaccagcactggggctgatggagatgccgcgcccactggagcctgcagctgtgcctggcatgttgctgagcatgtcaacaggctcttggacttggatggtgacctgctgtgactgagcaggctgctgcatacccaagcaggttagtgccacgttgggaggagaggaacagttctcaggttgctgctgaaagattgcactgcgggaaggtaagccttgaaactgggaagaagatgcagccccgtgaggctggatcatggcactgctcatggggggaggactattactgggctgcctgaagagatggttgttggggtggttggggggtgggcttgaaggctgaatccttaacctctggagctgatgggtaaggagggctggctgattttcacatgcagcctgaagaggtggagatggctgaggaggacagatagagtcttgaatttgttgctggagaatttgatggtgctgctcctgctggtataacatatgctgctgctgggtcttctccagggttctttcatcaatctgccccccgtacatcttctgcagctgctcacactcctgctgcagctgtttgatgctgctgttgttgcccattttttccaggtgagctttgaaggcctggatgctcgcagccccatctgagaaccggcgcacaggggagaaacgctccgtagggaggtgcagagtgttggagtccttgtaggtagagctctgcacagcttcctggtctggctccccgtctgagctctcctcgtccacaggggtaactgctggcactgctggtgtcatggtgacaagcggagagggtccccgtgggcgcttcagcagctgctgggcatgcagttggatgttggctcctccatctgatgccctccggccaagggggcccattccattcaacagctgtagcgtgggcggctgtaggagagactgctccttgtactcaagttgcccggttggttgcaagttttgcataggcaacaggttgtgcatgaagttcacattaggggccacctgcaggaatggagcctgggggttgactccaggaaagccaggtaggagcttctgctgatcttccataacttccgtgcgtgggtcagccacacccactgtgtgcctcctcattgacaaatagcgcaccaatgcttcaggggaaggctcttcaccctcatcactgtccaaattcagtgtcccatccggctccacaatttggttctctgggttgatcagctgcacctggggaacgctgatgttcatagcagtacctgcctgctccgcctgcagtgtctgttctttgtccagtcccatgtcctccatggccaagaggacatcctcattcagggggtccacctgtctttcttcctttagttgttggcattcagctattaacctgtcaaagttgggatcggcgtcccctagcttcatccacttgtgcttgcagatctgctccatggagaggcgcttattgggatctaacaccaacatatggcggatcaaatgctcacattctgtggacataaaaaatgggatgcggaactttccactcagcacgcgggcccgcagattctgcagtgtgcttccatcaaatggcagggcaccgcacacaagcacgtagaggacaactccaaggctccagatgtccactttgggcccatcatattcttttccttcaaagagttcaggtgcagcatagggagggctgccacaccaggtcttcagcagctgcccaggagtgaagaggttactgaacccaaaatctgctattttgatattcagattggcatccagaagtaaattttcagcttttaaatcacgatgaacaatgttccgacagtgacaaaaatagacagctgtgacgatctgtttgaacttccgacgtgcctccttttctgccattctaccatgggccaccaggtggtcaaatatttcccctccactagcatattctgtcaccagataaatcatccgttctgtctccataacctggtagagcctgatgatatgggggtggcaaagcatcttcataatttgaacttcccggaaaatcttcttcaagttttcttcatccagctgggtcttatctatgatcttgatagcaaccttggccttggtgacgaggtgcgtggcccgcttgaccaccgcgaagttgcccttgccgatggtgcggtcgatctcgtagtagccgatacgggcgggcatgggtccgcgggaggccggggctgggggacgcggctggccggccgcaggggacacggcagcgggggcggctggggaccccggcgcgggcggaggcagcaggcggcccgcgggcccggctcccccagtcccggccccggcagccccg

SEQ ID NO: 73965 - DNA, 883 bp, Homo sapiens; identical to SEQ ID NO: 64247

SEQ ID NO: 73966 - DNA, 2480 bp, Homo sapiens; identical to SEQ ID NO: 64248

SEQ ID NO: 73967 - DNA, 947 bp, Homo sapiens; identical to SEQ ID NO: 64249
  misc_feature (1)...(947): n = a,t,c or g

SEQ ID NO: 73968 - DNA, 2271 bp, Homo sapiens; identical to SEQ ID NO: 64250

SEQ ID NO: 73969 - DNA, 1857 bp, Homo sapiens; identical to SEQ ID NO: 64251
  misc_feature (1)...(1857): n = a,t,c or g

SEQ ID NO: 73970 - DNA, 2357 bp, Homo sapiens; identical to SEQ ID NO: 64252

SEQ ID NO: 73971 - DNA, 1770 bp, Homo sapiens; identical to SEQ ID NO: 64253

SEQ ID NO: 73972 - DNA, 1345 bp, Homo sapiens; identical to SEQ ID NO: 64254

SEQ ID NO: 73973 - DNA, 1051 bp, Homo sapiens; identical to SEQ ID NO: 64255

SEQ ID NO: 73974 - DNA, 2365 bp, Homo sapiens; identical to SEQ ID NO: 64256

SEQ ID NO: 73975 - DNA, 2449 bp, Homo sapiens; identical to SEQ ID NO: 64257

SEQ ID NO: 73976 - DNA, 729 bp, Homo sapiens; identical to SEQ ID NO: 64258

SEQ ID NO: 73977 - DNA, 398 bp, Homo sapiens
cctggtgaacgctgtcccagtgcacccgataatggcgaagaaaatgtgcctctttcaggaaaagtataggaaatgagagaagactgtgacaactcatgacctgcatccttaatatccagtgacttcatctcccctttcttcaccacaattccaggcaatggcctgtcggaccagacaattctaccactgcaaagagttgtaaccattttctggtatcacatttatttttcaagacatacttttcaagacatcattcactgacccactacctgcattgagtataaatgcctggatgttaaggattccaatttaactttgaaaagaactgtctcattcatttacatttctgttacagtcagcccaggaggttacagtgagctctccactaagaatctggg

SEQ ID NO: 73978 - DNA, 6692 bp, Homo sapiens; identical to SEQ ID NO: 64260

SEQ ID NO: 73979 - DNA, 684 bp, Homo sapiens; identical to SEQ ID NO: 64261

SEQ ID NO: 73980 - DNA, 1893 bp, Homo sapiens; identical to SEQ ID NO: 64262

SEQ ID NO: 73981 - DNA, 1319 bp, Homo sapiens; identical to SEQ ID NO: 64263
  misc_feature (1)...(1319): n = a,t,c or g

SEQ ID NO: 73982 - DNA, 1586 bp, Homo sapiens
tttttttttggtggttctcaaactgtgttcctagaagcatcccatgtgcccccaggccaagaggtccaggttctaccccgacccacatcccctgaatcagagcagcttttttttttttttaaaaattttgatctgtttcacacattatatttgtttgaacttcccatgtttaaaaattttgaagaaaatccctggagtagacaatccctagagcactgacatgctgtggtccaaggttcaccaggaacagtgcctgtgccctgccacatggcggggttccttcaagcctctggtgatgaaggtgctcagggaaaggaggacggaggggcgcggaaggacccagccactgctggccaccctggcctctgctctgtgttcacgggggagcagactctggggaggcgcccctcctcaccacggcctgcaggccgggctggagcctgcgccttcaggggccttgcatctccagctggaccccctggcacaggatgtgctgcagtagcccgttgaccacatccagagtctcgtccttctccagcacgatgtcataggagtccatgtagcgctcccgccgctcctccaccttgtcattcaggaagccaattttgagaatgttctgcacaccaggaaccccatcggccatggtgaggtccccgatagagtctcccagcaggatgacattggttttgccctcaagttgctggaagtaaccacagttctcacacgcagagctgttcttgttgtatgtgtgtatgagctggcccttaaatccctggagaaaaccatcttcattaaaatccatgtagttagacacgatgtggatgttggggtggaacactttcatctgtcggataatttcttccaggatatcaccaatgcccgcagaaaagatgaaaaggggaatgttgttatggtagagtgtgttgaagaaggtcttatatccctccctgagcattgcattggactctctaaccacctgggctatctgaaacttctgaatcttctgctgacataggagattgtgcgctttggtccaccattccaccatatgaggtagcttctccttgacggtccggtgtgggtcgatctcaattgggtaatagtggtgaaggagcgctgtgagctctttccgacactcctcactgatgatcttgctattatccagaatattgtaagaagaagggcatcgctttccattatatgcaaacctgctcaaggtcatgtcaaaatcagaaatcacctgtaaccggtctccgccgcccttgcggagggcgcccacgatctcctgcacccgcccaggctgccgcatcaggaccgtggccttcatcagggtgctcacctgtcccgagacccgagagaaccactgaaccctgcgccacgctgggcccgaggggagcccggggctcgctcgggcgcgcgtgtgaggcggggccggggtgcgcgagggggcggctactggcctgggtgaagcggcggtgcctcggtgaccagctggggggctcgaagcgccccgggggtcggagtccgggcccgccccactccggacgcttcctccctcctcacctccacaaccatcccgttcgagg

SEQ ID NO: 73983 - DNA, 5241 bp, Homo sapiens; identical to SEQ ID NO: 64266

SEQ ID NO: 73984 - DNA, 395 bp, Homo sapiens; identical to SEQ ID NO: 64267
  misc_feature (1)...(395): n = a,t,c or g

SEQ ID NO: 73985 - DNA, 744 bp, Homo sapiens; identical to SEQ ID NO: 64268

SEQ ID NO: 73986 - DNA, 1790 bp, Homo sapiens; identical to SEQ ID NO: 64269

SEQ ID NO: 73987 - DNA, 11 bp, Homo sapiens
gaaaaaaaaaa

SEQ ID NO: 73988 - DNA, 439 bp, Homo sapiens; identical to SEQ ID NO: 64271

SEQ ID NO: 73989 - DNA, 2111 bp, Homo sapiens
  misc_feature (1)...(2111): n = a,t,c or g
cgagtagtgaatcgcatgagccgtttccagaaaagtgctggactggaagagattgaacaagaactgacgtctaagcaaggaggtcgctgtagccctgttccagggctatcaagcagcccttctgggtcacccttgcatgggaaactgaacagccaagactcctataacaattttaccaacaacaaccctggcaaccctcggctctctcctcttcccagcttgatggtagtgatgcctcttgcacaaatcaagcagccaatgacattggggaccatcaccaaacgaaccggcaaagttaaacctcctccacaaatttcacccagcaaatcgatgggcggagaattttgtgtggctgctatcttcggaacatccaggtcatggtttgcaaataatgcaggtctgaaaagagaaaaagatcagtccaaacaagttgtagttgagtccctgtacattatcagttgctatggcaccttagtggaacacatgatggagccgcgacccctcagcactgcacccaagattagtgacgacacaccactggaaatgatgacatcgcctcgagccagctggactctggttagaacccctcaatggaatgaattgcagccaccgtttaatgcaaaccaccctctgctcctcgctgcagatgcagtacagtattatcagttcctgcttgctggcctggttccccctggaagtcctgggcccattactcgacatgggtcttacgacagtttagcttctgaccatagtggacaggaagatgaagaatggctttcccaggttgaaattgtaacacacactggaccccatagacgtctgtggatgggtccacagttccagttcaaaaccatccatccctcaggccaaaccacagttatctcatccagttcatctgtgttgcagtctcatggtccgagtgacacgccacagcctcttttggattttgatacagatgatcttgatctcaacagtctcaggatccagccagtccgctctgaccccgtcagcatgccagggtcatcccgtccagtctctgatcgaaggggagtttccacagtgattgatgctgcctcaggtacctttgacaggagcgtgaccctgctggaggtgtgcgggagctggcctgagggcttcgggctgcggcacatgtcctccatggagcacacggaggagggcctccgggagcgacttgccgacgccatggccgagtcacatntagccgggacgtcgtgggatccggaacagaacttcagcgagagggaagcatcgagactctgagtaacagctcaggctccaccagcggcagcataccaagaaactttgatggctaccgatctccgctgcccaccaatgagagccagcccctcagcctcttcccgactggcttcccgtaggtaccagcaacctgcttctgactggccagccccctcccctgctggaggaggggagaagccccgctctggtcctacccttcagtctctgctcttccttcatcaaccaccttccccaagcttagtgacagcagccgcccatcctacctggatggagaagagacccttctccaagcacctcagcgcacttgccctctgccacacctgtcggtggaggctgtggccaggagagactgtagaagctcggtccctgtgtatgtttgcatatgacatcctgcattggatccgcttttgtattttttaaccatacccacggtggggcgggtggggggagcctggaacagtgaccagatctgggggcctgagtggggacagagttgatcgtccacctggccattttgaccctgagtggacagtcacagcctcagctcatgtctggctgtgacacacactgcccccagcttcccttggtcagccccactccagcacggggtgaacggaggcccagagtactagggaaggaggaagggaggacatgcctcttcttcctcctttctttccccatctgttcctgggaagagtttgtctttcttatctttaagcccctttaccctggtcctgtactgatcagtgaaggaaaccgtggttactgaggccctgttgaaaagtgcacgtcttgtccaataaatcacgctgcagttggtgtccaaaaaaaaa

SEQ ID NO: 73990 - DNA, 1849 bp, Homo sapiens; identical to SEQ ID NO: 64273

SEQ ID NO: 73991 - DNA, 421 bp, Homo sapiens; identical to SEQ ID NO: 64274

SEQ ID NO: 73992 - DNA, 792 bp, Homo sapiens; identical to SEQ ID NO: 64276
  misc_feature (1)...(792): n = a,t,c or g

SEQ ID NO: 73993 - DNA, 3414 bp, Homo sapiens; identical to SEQ ID NO: 64277

SEQ ID NO: 73994 - DNA, 1463 bp, Homo sapiens; identical to SEQ ID NO: 64278

SEQ ID NO: 73995 - DNA, 1330 bp, Homo sapiens; identical to SEQ ID NO: 64279

SEQ ID NO: 73996 - DNA, 738 bp, Homo sapiens; identical to SEQ ID NO: 64280

SEQ ID NO: 73997 - DNA, 2299 bp, Homo sapiens; identical to SEQ ID NO: 64282

SEQ ID NO: 73998 - DNA, 1083 bp, Homo sapiens; identical to SEQ ID NO: 64283

SEQ ID NO: 73999 - DNA, 2723 bp, Homo sapiens; identical to SEQ ID NO: 64284

SEQ ID NO: 74000 - DNA, 2693 bp, Homo sapiens; identical to SEQ ID NO: 64285

SEQ ID NO: 74001 - DNA, 1283 bp, Homo sapiens; identical to SEQ ID NO: 64286

SEQ ID NO: 74002 - DNA, 4159 bp, Homo sapiens; identical to SEQ ID NO: 64287

SEQ ID NO: 74003 - DNA, 1816 bp, Homo sapiens; identical to SEQ ID NO: 64288
  misc_feature (1)...(1816): n = a,t,c or g

SEQ ID NO: 74004 - DNA, 560 bp, Homo sapiens
tttttttttggaagttatgaaagaggcttttaatgaaaatactgtacagtttatgtgaggcaaaggcagggggccttgtccaggaagggaagaggcccaagaggcttcctgtccccttgggggcagcagagccaaatgcttgggctcgggcccaagctgcctgccctgcaggggtccagggaggtcctgatgagtcctgccccttcccttccagagggcctgcctggcagccagcagcagggtgtttggggagcacctgttcccacacaagggtccttttagtccattccaacaggtgactccgagcagccctgaaggcttggggagggctcctgcctggcaagtgggcctggcacgagtagagggcagaggcccgccctgggtgaggaacatcatagccaggcgccgccgccgtgcgagtagctgtgctcctggccggcgacgaagccccgcagcagctcggcctcacccccaaacaccaggctctccacatccacctccagctcctcttggtctgagtctgagcgctcagaggagaggcctgaggagtccagactgtc

SEQ ID NO: 74005 - DNA, 1468 bp, Homo sapiens; identical to SEQ ID NO: 64290

SEQ ID NO: 74006 - DNA, 2144 bp, Homo sapiens; identical to SEQ ID NO: 64291

SEQ ID NO: 74007 - DNA, 2834 bp, Homo sapiens; identical to SEQ ID NO: 64292

SEQ ID NO: 74008 - DNA, 1602 bp, Homo sapiens; identical to SEQ ID NO: 64293

SEQ ID NO: 74009 - DNA, 2671 bp, Homo sapiens
cgcacggaaagtttggaggcttagcaaggagggtggtgccggcctccgcccggtggtggcagaactgcctgtgcgagcacggcttccacgtgggctgcgccgccgggcgtcatgtcgggcctaagagacacgctctacagctgtgaaatctgaagttcaggtttgcatttccttactgctttgtcttgaagacagaacgatgccaaagaaagcaaagcctacagggagtgggaaggaagaggggccggctccctgtaagcagatgaagttagaagcagctggggggccttcagctttaaactttgacagtcccagtagtctctttgaaagtttaatctcgcccatcaagacagagacttttttcaaggaattctgggagcagaagccccttctcattcagagagatgaccctgcactggccacatactatgggtccctgttcaagctaacagatctgaagagtctgtgcagccgggggatgtactatggaagagatgtgaatgtctgccggtgtgtcaatgggaagaagaaggttttaaataaagatggcaaagcacactttcttcagctgagaaaagattttgatcagaaaagggcaacgattcagtttcaccaacctcagagatttaaggatgagctttggaggatccaggagaagctggaatgttactttggctccttggttggctcgaatgtgtacataactcccgcaggatctcagggcctgccgccccattatgatgatgtcgaggttttcatcctgcagctggagggagagaaacactggcgcctctaccaccccactgtgcccctggcacgagagtacagcgtggaggccgaggaaaggatcggcaggccggtgcatgagtttatgctgaagccgggtgatttgttgtactttcccagaggaaccattcatcaagcggacactcctgcggggctggcccactcgactcacgtgaccatcagcacctaccagaacaattcatggggagatttccttttggataccatctcggggcttgtatttgatactgcaaaggaagacgtggagttacggaccggcataccccggcagctgctcctgcaggtggaatccacaactgttgctacaagacgattaagtggcttcctgaggacacttgcagaccggctggagggcaccaaagaactgctttcctcagacatgaagaaggattttattatgcacagactccccccttactctgcgggagatggggcagagctgtcaacaccaggtggaaagttaccgaggctggacagtgtagtgagactgcagtttaaagaccacattgtcctcacagtactgccggatcaagatcaatctgatgaaactcaagaaaagatggtgtacatctatcattccttaaagaatagtagagagacacacatgatgggaaatgaggaggaaacagagtttcatggacttcgcttccctttgtcacatttggatgcactgaagcaaatttggaatagtccagctatttctgtcaaggacctgaaacttactacagatgaggaaaaggaaagcctggtattatccctctggacagaatgtttaattcaagtagtctagtgcctttgcagaatcaaatgcctactattttatatgcatatattaaaagaaaagcaaagacctgagccgaggagaggatgaattcaagtttccttacctgcgtatctactaacaaacatgagacctccctgttacaggtggtcagttggccaaatgtactaacgggcacatgaaagaaagaacagcaaattaccaagtgtctcagaaaatgacaaaaccatattttgacaagtttatttaatccagtgtggtagaaaaggcacaattccaatgtatcatttaaaattgaatgtcattaacctggctttgttctttggaagaaacaacttctttaaagagcttctttggctctagaaaaatttcaaacaattaaaataagaaaaaattttaaactggttttttataatgaaaatatacatacctttgtgtatagacaagcccatgcccattaaaataaagttatcctgtaacataaattttattaaataatacttccccacagatgagaggcacgcaacacctatggacaaaagggagttacagaggctgcttaaaagatggagaaaagcctgagattgaaggaggaaaaaaacccagtatttaaagtctataaaaaatactcaaaatagtggggtcctccgagtttaaaatagtccattggttatttttacattctaaagtgccatgtaggttgatattttttaaaatatcattggagaatttaatcctttcctttataaaaatagagcatttttcctgcctttcctggcaaaagttggggataaaaggaaaaaaagttgtcaaaatgtaattttcagtcccaattcacccaggaaaacatgcttgtgaattgtgcagtaaaaggtggtaatgactactggaagctaagtcaaagggtgatttcccacctgaattttacttacttaaataaaagttacttacaatgggagtgaaaaactgaggtttctgttatttagtagagaaatcaactccacgtttacttaaagagatggtaaggtcaaggttcaaatgctactgtgttttaatttggatatttgaaatttctcttgaggc

SEQ ID NO: 74010 - DNA, 1841 bp, Homo sapiens; identical to SEQ ID NO: 64295

SEQ ID NO: 74011 - DNA, 1307 bp, Homo sapiens; identical to SEQ ID NO: 64296

SEQ ID NO: 74012 - DNA, 2550 bp, Homo sapiens; identical to SEQ ID NO: 64297

SEQ ID NO: 74013 - DNA, 789 bp, Homo sapiens; identical to SEQ ID NO: 64298

SEQ ID NO: 74014 - DNA, 648 bp, Homo sapiens; identical to SEQ ID NO: 64299

SEQ ID NO: 74015 - DNA, 1071 bp, Homo sapiens; identical to SEQ ID NO: 64300
  misc_feature (1)...(1071): n = a,t,c or g

SEQ ID NO: 74016 - DNA, 1738 bp, Homo sapiens
ttttttttttttggggagaaaattaaaccttatttatttttaaaatcaaaccactaggaaaatatatcacagcctggaaacagcaaacggacaggctatattataatttcaagtaataagttggtgaaaattcaacgaagttgctatcaaaacaataaggtgccatgctggggcaggaacactgccagctgcacaagccccaggcaaaaatggtatttggtaatgggggctgtctctcctttgctctaagggagtcagctcatcctagcccaagttgcttactttttctcccttgaatttcctgttgccaggggtttgtctcaattgggctctgttaattcagggggctaagtaggcaatgctaggtgtaggctttcattccatatgttctaataaaaccaggttttcccaaatccagtacttcatttactctgttgtaatcaagtagccaactgctcctcttttactgttcattcctagatactagtatatatcacaatcaaaacccccttctcttcaaggggaaagtgttactgcaagattgtcctgtcattttgttacacacagcctcaggggccatcagccagtaattctgcttcccataattagtgtgtcatcacctctcatgtttctgcacagtctccaggctgaaagatgcagcatgtaataattttaagaaatgtacatccacatcttgatgaccagaaatggggatccacaaggaacatttcaaagttcttatccaaactagtctacctcccagttccacatcttaaaatcaacttgtatgcccttgtataaattaccccaaatcaagaaaacaaagacccagaaaactttctttcccttctaagttagtgacctcattgattttgtttcacagcttatggaagatggtggggtgacacttttggtaaacaggatgttggcaacaaagagaaaatatctctcctcagactccaccaactctaacctgccagcctgttagtacctgtgtagtaagaagagtctggtaccttggagggctctggcttgttacaggggagagccttactgccaggacaagcactggccacaggaaataataagctctaaaactctcctgtaatatctctgactcgatttagcaccacttttttccatttcattttttagggactgaaacataaaataaccagtgtccagaggcaagtgacatatgccttacgcttgtggccatccttcatttcttcattcgtaaactttgcttaaaagactaaaattcccaattccttataaaaaatatattcttgccctcagccctgatggccactggcaaatacttttattttccaattgataagagagcctccttcatcttcttggtcatagttgggatgaggtgcatgtggtcatccacacacttggtcacacaactgtccagctgctgcttcacctgaagctccttactcccagcatctattgaatctttggctttgtcgttgcaatgcatggtgcaccgggccaggcggtcctggaacttctccagctcactggtgaccaaagcctgggcttgagccagaggcacatggcagcgctcgatgcactggtgcacctgcttcatggaggcctggctgtcctcacaacagctggcgctgcaccggaacatgagaccctgcatcttccggatgttctctctttccagactcttcaccatggactccaccgcctcctgcacccggagctgctgcagctcagc

SEQ ID NO: 74017 - DNA, 1349 bp, Homo sapiens; identical to SEQ ID NO: 64301

SEQ ID NO: 74018 - DNA, 1021 bp, Homo sapiens; identical to SEQ ID NO: 64302

SEQ ID NO: 74019 - DNA, 1283 bp, Homo sapiens; identical to SEQ ID NO: 64303

SEQ ID NO: 74020 - DNA, 972 bp, Homo sapiens; identical to SEQ ID NO: 64304

SEQ ID NO: 74021 - DNA, 2002 bp, Homo sapiens; identical to SEQ ID NO: 64305

SEQ ID NO: 74022 - DNA, 1057 bp, Homo sapiens; identical to SEQ ID NO: 64306

SEQ ID NO: 74023 - DNA, 4061 bp, Homo sapiens; identical to SEQ ID NO: 64307

SEQ ID NO: 74024 - DNA, 4741 bp, Homo sapiens; identical to SEQ ID NO: 64308
  misc_feature (1)...(4741): n = a,t,c or g

SEQ ID NO: 74025 - DNA, 3034 bp, Homo sapiens; identical to SEQ ID NO: 64309

SEQ ID NO: 74026 - DNA, 1461 bp, Homo sapiens; identical to SEQ ID NO: 64310

SEQ ID NO: 74027 - DNA, 1065 bp, Homo sapiens; identical to SEQ ID NO: 64311

SEQ ID NO: 74028 - DNA, 1062 bp, Homo sapiens
  misc_feature (1)...(1062): n = a,t,c or g
gcaagggccgcagccagcaccgggcggagagggctaccatggggaaaatcgcgctgcaactcaaagccacgctggagaacatcaccaacctccggcccgtgggcgaggacttccggtggtacctgaagatgaaatgtggcaactgtggtgagatttcggacaagtggcagtacatccggctgatggacagtgtggcactgaaggggggccgtggcagtgcttccatggtccagaagtgcaagctgtgtgcaagagaaaattccatcgagattttaagcagcaccatcaagccttacaatgctgaagacaatgagaacttcaagacaatagtggagtttgagtgccggggccttgaaccagttgatttccagccgcaggctgggtttgctgctgaaggtgtggagtcagggacagccttcagtgacattaatctgcaggagaaggactggactgactatgatgaaaaggcccaggagtctgtgggaatctatgaggtcacccaccagtttgtgaagtgctgatccctcttccttcccagttgcccttaagaactgagaaaggacaaagtactctaagcagcagagcccacagaggctcgttcctttgacccttgtctcctggtggctatacgaaaccttcacaatctgcatgctggactttattacagcttcccaagccccatcaataaagcccctgttcacgctgcactggtgcatgaaggtgaagtaaggaggcagctactccctccacaaataagaattcgtgcagcagcagttcactccttaggaaaatgaagagtatttttaaggagatggtatctccccagtcaagggcaagtttacagagatgaaaccgcgatcccaccatcactcaatgagccagaagccaatggtgacgtactgttacctgaacttactgaacttgctgttggaaagatctttgtgaggattaggaattaggttaaaagaaattaagaaccatcttcaagcaaaaattaaactttatttctgcttaaacaataaatacacctgagttagaggcnnntcaaatgctaatacatct

SEQ ID NO: 74029 - DNA, 5451 bp, Homo sapiens; identical to SEQ ID NO: 64312

SEQ ID NO: 74030 - DNA, 2309 bp, Homo sapiens; identical to SEQ ID NO: 64313

SEQ ID NO: 74031 - DNA, 1035 bp, Homo sapiens; identical to SEQ ID NO: 64314

SEQ ID NO: 74032 - DNA, 2224 bp, Homo sapiens; identical to SEQ ID NO: 64315

SEQ ID NO: 74033 - DNA, 1238 bp, Homo sapiens; identical to SEQ ID NO: 64316

SEQ ID NO: 74034 - DNA, 1375 bp, Homo sapiens; identical to SEQ ID NO: 64317

SEQ ID NO: 74035 - DNA, 747 bp, Homo sapiens; identical to SEQ ID NO: 64318
  misc_feature (1)...(747): n = a,t,c or g

SEQ ID NO: 74036 - DNA, 1641 bp, Homo sapiens; identical to SEQ ID NO: 64319

SEQ ID NO: 74037 - DNA, 1558 bp, Homo sapiens
ccacctcagagcaaccacagctgggcggtgctgttcgacgggcagagcggctgcatctgttaccgccctgaggagcaccaggtctgcttcctccgcctgatggaggacagtgatcgggagaccctgcggctgctggtggatacctccaaggtccaagaggcttgggtccccagccaggacacccaccacacccaggagctgctggcagtgcaggggagcctcgaagtggaccccgcccaggcgggggctttggtgcagcgcctgtgcatgaggacccccatctactgggcccggcgagcagaggggccccggagacagcggctgatttatctctgcatcgacatctgcttcccgagcaacatctgcgtgtcggtctgcttttattacctcccagactgagcccccgacctggcccagcctggcccgtccccaatccagtgggctggccaggccacctgcaccagggaggacagctgctggcagggactaataaacccttccacctggccatggtggtggtgttctctatggaccgaggccctgaaacgcgggcagggaggggcagagaacgcactagcttgggggtgggcaccagcctcagacccctcagcagctttgggccctcggccgactttcccaggcagtgcaggctagcccagtccaggagtgtgcagcctggcttgggtcgagctctgtcacatctggataagcaactgggggctgagagtcccagggcagcctggcccagcaggtcaaggcgccacagggggccatcaggtccagctggcgcaggccggcaggggagggtctgctctgacctgggtgctgcatgggtccctccagctgccaccacctgcaccaggcagtcccgaggggtcacaggctagcccagcacactgtcattgaaggccaggcagacaacagccttctggtggccgccatactctctcttgatctctccagtctccacacaccagagccgggccaggttgtccgaggaagcagtgacgatgtactgggagtcccccgagaaggcgcagccccacatccagccgcgggaggactccccggggttgccgctcttgatgctcagctccgtcatcagggagaagttggacgtcctccagatcttgcacgtctgatcagccgagcaggtggcgaggagcgtggagtcggggctgaagcgacactgcagggcgtagcgcgtgtgggcagggatcttagtcttggggatgagctgggtcacctcgtcaccaatgccccccgtcagattccagacatagcagtttccggtgctattgacagctgccatgtagctggcgtcgggatcgatgtgggcggacgtgatggagacctcgggctcagggatcagctgctcgttgtggtctgttttcaagtcccagatgtggatagccccgctctggtcacccacgatgagctctgcctggttggggtgcagcaccaggactcccaggtgaatgccttggaggtcacaccggaccgcagcatgattgctgctgcaggttaccagcacatgcggatgtatgatctcaactcc

SEQ ID NO: 74038 - DNA, 355 bp, Homo sapiens; identical to SEQ ID NO: 64321

SEQ ID NO: 74039 - DNA, 1918 bp, Homo sapiens; identical to SEQ ID NO: 64322

SEQ ID NO: 74040 - DNA, 491 bp, Homo sapiens; identical to SEQ ID NO: 64323

SEQ ID NO: 74041 - DNA, 1500 bp, Homo sapiens; identical to SEQ ID NO: 64324
  misc_feature (1)...(1500): n = a,t,c or g

SEQ ID NO: 74042 - DNA, 885 bp, Homo sapiens; identical to SEQ ID NO: 64325
  misc_feature (1)...(885): n = a,t,c or g

SEQ ID NO: 74043 - DNA, 1258 bp, Homo sapiens; identical to SEQ ID NO: 64326

SEQ ID NO: 74044 - DNA, 1188 bp, Homo sapiens; identical to SEQ ID NO: 64327

SEQ ID NO: 74045 - DNA, 1251 bp, Homo sapiens; identical to SEQ ID NO: 63981

SEQ ID NO: 74046 - DNA, 1073 bp, Homo sapiens; identical to SEQ ID NO: 64329

SEQ ID NO: 74047 - DNA, 658 bp, Homo sapiens; identical to SEQ ID NO: 64330

SEQ ID NO: 74048 - DNA, 570 bp, Homo sapiens; identical to SEQ ID NO: 64331

SEQ ID NO: 74049 - DNA, 1371 bp, Homo sapiens
ttttttttttttaaaaaggcacataaaaatatttttattttctataaatacattaggaaatgtatttcttcccaacccagtccaccccattaactcaattttttctacataaaaaagatgctaataccaccctcacctgtgactgctaaacagagaaagattgcctggactaggcattatcctcctagttggaaataaaggccctttctgggggcaggaagtgggattttcaggggaccctacagacgtaggcagccaagagtcaaacaaaacaagcatatgcaatagtcataattatgctagtatgacagtatgaattaggtgactcagccaggcacatacaggagttcggagtggggacagtggaagcccacaaaactccatgtttgggccatcagtagacacttggtctgagaaacacagtaaaatgtctgcccgggtagtcacgatcattctagtatgaggtagacaggaagcagagcagggccaggaaatggaaggggccacccaggccctcaggagtccctgacaagggaaggtccctccatgctctctgagggtggcggggctccaaagatcctgggccaggagccctttgttggagcgggccttgtcctgggcagttgccaggcgagcccgttcacgtccccctggccgtgctgctttacgggccctcagttcctgctcagtaggacgctgggcaaatgtccaggagccatctgggcgagcagggtccccatcggccgcaagaaagcgttgtccccgttccacactttgaagatagaagtcggtctcacgcttggcttgagcaacctccgctctcaagcgctgcctgcgcacctggcgctcaaaggcgaggtgctcgctgaggtgggaccaggtgaaacggtgcaagtacttgaggttccaaagatcataacggaaggggctgcgcctgcgggcacccataggcgtgttgtgtagactggccgccacgcgcttggctatgcgcttgtcacggaactccacccatccctcggtgtagtccttggtgtaggaccgcttttttcctccggcagctgctgctgccttcttcttgcgtctcacgaaccggtcctcagcctgaaagaagacgcgtccgacctcgccataggcgctgagaaggttgcggacgtgcaggggccggaagcgcggcgggatatggcccaggtacacaatacctggcactacccgtttcttgctgccacaggccgcttcttcggattcctcctgctcctcctccgcatctagtgtctgttctgtcccttccagcggctcttgctccgttgcggccttctccgattcctctgcctccatgttgactgacacgagcggcctcgtgccgctcgtgcc

SEQ ID NO: 74050 - DNA, 1496 bp, Homo sapiens
ttttttttttttgggtttggtttggttttgttttgttttgtttattgtggtaaaatacaaaatctaccgtcctacaaggagggtggcgttcagtaccttcaccacgccgtgcagccatcccatctgattccagaacattctcatcacccagaaggcagccctgtccccattatgtcacctagtcacccccaggtccccctccccagtcccggcacccacgaatcctctccctggattctgtgggattgggtctgtccggggacattttcataggaagtggggatcacagcggtacccttctgtgtctggtgtctctcactgagcgtgacatcctcaaggtgcatccgcactgtggcctgggtcagagcttcgcacctccttgtggctgagtctcattccagcgcgtgggtgcgtgggtggccgcgccgtgctgatcccctcaccttcactgggtgttcggtgttctccgcctcgggctgtcacaaatcgtgctgctgtgagccactgcgtgcaggtctcatcagcgtcgcaggcgggtcggccacagcaggaggctacagagacacagggcagcggccacgcccacgccgcccgtcacagccaccatcgcccagtggtaaaagctcacgcaggccctgcagcagagctctgaggggcaagggtgcaggctctggatggccatgactgccagcccattggccaccttatccaagaagctcatggagccgtacacgaacgctccgctgttcgtgtggggaccgatgaggtcggccgtcatggccagcgaggtgacgaggatggtggcacagccagcacccagcagcacagccgctgcgtacacggccacacccagtccctccgccagcgccacccaggcggcaaaggccaggatcaccaggaggcctgagaagtaggtcatgttcctcccaatgcacttgttgatgggcttcatgaggaaggaggacaagaagccgctgaggtacatcaccaggggaatggtcgcgatgaacttcttgggcaggtggagcgagtaggtgaggtacatggccatgtaggtctgggacaggttcacgatgagcctggtggtcatgtacagtatgcccacctggtagaaagccggctcccggagccagtgcttccagagcagcaggggctgggccgtggcaggggccaacaggggggtgtgctcgcctggctcctccgcatgcggccggcgcctctcccgggtgcccaggtggaatagcagtgagaacacggcgccgacacccaccaccagcagggacaggttccggaacacgggcacgtcctggccccccagctggtcgctgatgctgatgtcttgggtgggctccacccgcgacgagccctgcaggtgcagcaggagccaggcggcgccgtagacggtgatgttggccaccacggtgaacgcatacctgagtgccgtgagctccaccttctccggacgcgtgggtcgacccggcaaaacggagcggctc

SEQ ID NO: 74051 - DNA, 729 bp, Homo sapiens; identical to SEQ ID NO: 64334

SEQ ID NO: 74052 - DNA, 1618 bp, Homo sapiens; identical to SEQ ID NO: 64335
  misc_feature (1)...(1618): n = a,t,c or g

SEQ ID NO: 74053 - DNA, 2384 bp, Homo sapiens; identical to SEQ ID NO: 64336

SEQ ID NO: 74054 - DNA, 1695 bp, Homo sapiens; identical to SEQ ID NO: 64337
  misc_feature (1)...(1695): n = a,t,c or g

SEQ ID NO: 74055 - DNA, 958 bp, Homo sapiens; identical to SEQ ID NO: 64338

SEQ ID NO: 74056 - DNA, 1004 bp, Homo sapiens; identical to SEQ ID NO: 64340

SEQ ID NO: 74057 - DNA, 1490 bp, Homo sapiens; identical to SEQ ID NO: 64341

SEQ ID NO: 74058 - DNA, 956 bp, Homo sapiens; identical to SEQ ID NO: 64342

SEQ ID NO: 74059 - DNA, 855 bp, Homo sapiens; identical to SEQ ID NO: 64343

SEQ ID NO: 74060 - DNA, 1666 bp, Homo sapiens; identical to SEQ ID NO: 64344
  misc_feature (1)...(1666): n = a,t,c or g

SEQ ID NO: 74061 - DNA, 6506 bp, Homo sapiens; identical to SEQ ID NO: 64345

SEQ ID NO: 74062 - DNA, 7061 bp, Homo sapiens; identical to SEQ ID NO: 64346

SEQ ID NO: 74063 - DNA, 1173 bp, Homo sapiens; identical to SEQ ID NO: 64347

SEQ ID NO: 74064 - DNA, 4413 bp, Homo sapiens; identical to SEQ ID NO: 64348

SEQ ID NO: 74065 - DNA, 1489 bp, Homo sapiens
ggggaacagaggaacattaatggccagaggaacaccgtcccgctgagagagtgacgcggaagcaggcaagctccttggcccctccacactggtgcctgtgaaggtcctaggctctactgttcctttgtctcatttacccccatggccctggtgctcagcacaatccatgtccagcccttattaggtgtttcaggaagtgtttggatgcagagggtctgcacagggagtcaagcctggggagagggaggaaggtgagggtggcacggtcagggctggggagcccgatggtcggggtcttactcccagggatgtcctgagcagtgacgggcttgttcctacaggcgctgatcccgctggccctggaaggcacggacgtggggcagacaaaggcagcccaggcccttgccaagctcaccatcacctccaacccggagatgaccttccctggcgagcggatctatgaggtggtccggcccctcgtctccctgttgcacctcaactgctcaggcctgcagaacttcgaggcgctcatggccctaacaaacctggctgggatcagcgagaggctccggcagaagatcctgaaggagaaggctgtgcccatgatagaaggctacatgtttgaggagcatgagatgatccgccgggcagccacggagtgcatgtgtaacttggccatgagcaaggaggtgcaggacctcttcgaagcccagggcaatgaccgactgaagctgctggtgctgtacagtggagaggatgatgagctgctacagcgggcagctgccgggggcttggccatgcttacctccatgcggcccacgctctgcagccgcattccccaagtgaccacacactggctggagatcctgcaggccctgcttctgagctccaaccaggagctgcagcaccggggtgctgtggtggtgctgaacatggtggaggcctcgagggagattgccagcaccctgatggagagtgagatgatggagatcttgtcagtgctagctaagggtgaccacagccctgtcacaagggctgctgcagcctgcctggacaaagcagtggaatatgggcttatccaacccaaccaagatggagagtgagggggttgtccctgggcccaaggctcatgcacacgctacctattgtggcacggagagtaaggacggaagcagctttggctggtggtggctggcatgcccaatactcttgcccatcctcgcttgctgccctaggatgtcctctgttctgagtcagcggccacgttcagtcacacagccctgcttggccagcactgcctgcagcctcactcagaggggccctttttctgtactactgtagtcagctgggaatggggaaggtgcatcccaacacagcctgtggatcctggggcatctggaagggcgcacacatcagcagcctcaccagctgtgagcctgctatcaggcctgcccctccaataaaagtgtgtagaactccaaaaaaaaaa

SEQ ID NO: 74066 - DNA, 887 bp, Homo sapiens; identical to SEQ ID NO: 64351

SEQ ID NO: 74067 - DNA, 2550 bp, Homo sapiens; identical to SEQ ID NO: 64352

SEQ ID NO: 74068 - DNA, 1100 bp, Homo sapiens; identical to SEQ ID NO: 64353

SEQ ID NO: 74069 - DNA, 885 bp, Homo sapiens; identical to SEQ ID NO: 64354
  misc_feature (1)...(885): n = a,t,c or g

SEQ ID NO: 74070 - DNA, 2467 bp, Homo sapiens; identical to SEQ ID NO: 64355

SEQ ID NO: 74071 - DNA, 1010 bp, Homo sapiens; identical to SEQ ID NO: 64356
  misc_feature (1)...(1010): n = a,t,c or g

SEQ ID NO: 74072 - DNA, 1001 bp, Homo sapiens; identical to SEQ ID NO: 64357

SEQ ID NO: 74073 - DNA, 2745 bp, Homo sapiens; identical to SEQ ID NO: 64358

SEQ ID NO: 74074 - DNA, 1377 bp, Homo sapiens; identical to SEQ ID NO: 64359

SEQ ID NO: 74075 - DNA, 1175 bp, Homo sapiens; identical to SEQ ID NO: 64360

SEQ ID NO: 74076 - DNA, 791 bp, Homo sapiens; identical to SEQ ID NO: 64361

SEQ ID NO: 74077 - DNA, 739 bp, Homo sapiens; identical to SEQ ID NO: 64362

SEQ ID NO: 74078 - DNA, 1212 bp, Homo sapiens
  misc_feature (1)...(1212): n = a,t,c or g
tttttttttttttggaaaagagaaagtaaagatattcctaattcagagccaaaggtacacagcagctgttggcgggaggccacctagagatttatcaaggacgcgccaccccaccaggagcccctcttgatcaccaagtgctttatcttccaagtagtaagtcaatcaagaggtttctaaagataatccatttttgataaattagaatggaaacagtgtctctataatatacatacaaaagtgtcccagttttcaactgtgagcaacacaggtgcacagaccaggtgtcagcgcaggaacccgacggcaggcatgctgatgccccccatttcccgccactcccgacagctccccgggcatggccccgattcccgccactcccgacagctccccgggcatggccccgattcccgccactcccgacagctccccgggcatagcccgtgattgcctggcctcagccctcggccccctgcgtgggcggctcctccccggcctctggtttcttgtgcctgcgcatgtgcctgtacttgtccacgtacgccttcaccaggttggccaccttcacggggttgatctctccactcttgctgtggcagatcttctgcacggccttgcgcaggatgtccttgtactcctccttggtcacctccctcttctggtagaagggcttgatggccagcttcacctcctccacagcacgctcctgcatgtgcagcttcttcatgtactcctccttcttggttttctccgcagctagcctgggggccggggtcttctcctccgagttgctggctgcagtggcttgactggctggctctgaggctggggtcagggcagcgggcactggggccagggtctgtgctgccccacagcccactagcggcaggctcccctgaaggatgaactggaccgtgggctggctgaccagtgcgcagggtgggatgcttgagggctgggccggggcaggcggcaggccggggctgtaaacctgagaggggtctgtgtctgggaacccgggttccggaagcacgtgactgggaaagggcagctcggagaacgcctgcctgacccctgtgggggccacatcctccatgtcccaggctccttctcggggcttctgtggcctgtgaagtggtgcccctgggggcccgacagacagggaggtgggaatacggccactcgagacggtgatcgaggcnnnnagctccc

SEQ ID NO: 74079 - DNA, 2299 bp, Homo sapiens; identical to SEQ ID NO: 64364

SEQ ID NO: 74080 - DNA, 1094 bp, Homo sapiens; identical to SEQ ID NO: 64365

SEQ ID NO: 74081 - DNA, 2632 bp, Homo sapiens; identical to SEQ ID NO: 64366

SEQ ID NO: 74082 - DNA, 997 bp, Homo sapiens; identical to SEQ ID NO: 64367

SEQ ID NO: 74083 - DNA, 2249 bp, Homo sapiens; identical to SEQ ID NO: 64368
  misc_feature (1)...(2249): n = a,t,c or g

SEQ ID NO: 74084 - DNA, 933 bp, Homo sapiens; identical to SEQ ID NO: 64369

SEQ ID NO: 74085 - DNA, 1935 bp, Homo sapiens; identical to SEQ ID NO: 64370

SEQ ID NO: 74086 - DNA, 928 bp, Homo sapiens; identical to SEQ ID NO: 64371

SEQ ID NO: 74087 - DNA, 3675 bp, Homo sapiens; identical to SEQ ID NO: 64372

SEQ ID NO: 74088 - DNA, 2633 bp, Homo sapiens; identical to SEQ ID NO: 64373

SEQ ID NO: 74089 - DNA, 2756 bp, Homo sapiens; identical to SEQ ID NO: 64374

SEQ ID NO: 74090 - DNA, 1380 bp, Homo sapiens; identical to SEQ ID NO: 64375

SEQ ID NO: 74091 - DNA, 1549 bp, Homo sapiens
cgacgatttcgtggcggttcaggcgccagagctggccgatcggcgttggccgccgacatgacgcccgaggacccagaggaaacccagccgcttctggggcctcctggcggcaggtctacatctccgaaatcgcctacccagcagtccgggggttgctcggctcctgtgtgcagctaatggtcgtcgtcggcatcctcctggcctacctggcaggctgggtgctggagtggcgctggctggctgtgctgggctgcgtgcccccctccctcatgctgcttctcatgtgcttcatgcccgagaccccgcgcttcctgctgactcagcacaggcgccaggaggccatggccgccctgcggttcctgtggggctccgagcagggctgggaagacccccccatcggggctgagcagagctttcacctggccctgctgcggcagcccggcatctacaagcccttcatcatcggcgtctccctgatggccttccagcagctgtcgggggtcaacgccgtcatgttctatgcagagaccatctttgaagaggccaagttcaaggacagcagcctggcctcggtcgtcgtgggtgtcatccaggtgctgttcacagctgtggcggctctcatcatggacagagcagggcggaggctgctcctggtcttgtcaggtgtggtcatggtgttcagcacgagtgccttcggcgcctacttcaagctgacccagggtggccctggcaactcctcgcacgtggccatctcggcgcctgtctctgcacagcctgttgatgccagcgtggggctggcctggctggccgtgggcagcatgtgcctcttcatcgccggctttgcggtgggctgggggcccatcccctggctcctcatgtcagagatcttccctctgcatgtcaagggcgtggcgacaggcatctgcgtcctcaccaactggctcatggcctttctcgtgaccaaggagttcagcagcctcatggaggtcctcaggccctatggagccttctggcttgcctccgctttctgcatcttcagtgtccttttcactttgttctgtgtccctgaaactaaaggaaagactctggaacaaatcacagcccattttgaggggcgatgacagccactcactaggggatggagcaagcctgtgactccaagctgggcccaagcccagagcccctgcctgccccaggggagccagaatccagccccttggagccttggtctgcagggtccctccttcctgtcatgctccctccagcccatgacccggggctaggaggctcactgcctcctgttccagctcctgctgctgctctgaggactcaggaacaccttcgagctttgcagacctgcggtcagccctccatgcgcaagactaaagcagcggaagaggaggtgggcctctaggatctttgtcttctggctggaggtgcttttggaggttgggtgctgggcattcagtcgctcctctcacgcggctgccttatcgggaaggaaatttgtttgccaaataaagactgacacagaaaatcaaaaaaaaaa

SEQ ID NO: 74092 - DNA, 2938 bp, Homo sapiens; identical to SEQ ID NO: 64377

SEQ ID NO: 74093 - DNA, 2910 bp, Homo sapiens; identical to SEQ ID NO: 64380

SEQ ID NO: 74094 - DNA, 1448 bp, Homo sapiens; identical to SEQ ID NO: 64381

SEQ ID NO: 74095 - DNA, 1238 bp, Homo sapiens; identical to SEQ ID NO: 64382

SEQ ID NO: 74096 - DNA, 2610 bp, Homo sapiens; identical to SEQ ID NO: 64383

SEQ ID NO: 74097 - DNA, 1415 bp, Homo sapiens; identical to SEQ ID NO: 64384

SEQ ID NO: 74098 - DNA, 988 bp, Homo sapiens
tttttttttttttatttgggttttttttctcttaaaaagatttattatcaaaaagtttgctccctttaaatactgagccaattcatcaatgcagctccattctttttaggattattagggcccaaataatttcagactaaaacaagaaataaaaaactggactataggttcagtaacatattcacagacatgtcagtgtgcactcaggaacactggtttcatttcttgattggaatgcttatcaccataaaatcttctgctagagtcacttcttggagatctaacactgattcagcttgcttttttagttctgcaatgccatctgtttctccttctctggccaaggcaactggtttgtacctctgactgaagtgagtcagaaccagcctctttgcacggcacaactttgcaaatgttgctgccatctgtggtgtgctgtggccatgctcctttgctttgtccatctgggcatcatccagggttgcttcgtggatcaacaggtctgcttcaaagcacagttttactcctccatcacccacaaccccagagcagtcacccaatatgcagatttttcttccaacaataggcttttttaagacatcttggggagaaattgtaaccccattttccagaacaacagaaattccatttttcagcttcccataggcaggacctggtggaacaccaaggtctttaagtttctgtgcattgagtttacctgggcgtttcttttccacgactgaaaacccaaatgagggaattctgctttaagttggcttttcataagctgtgtctgtgttccctccccacagtcaaagagccagcactcgccttcacaccgaaggaccacagcagaggcaccccgggttggagatgggtatgctgcacccgtccccaggaatgtcacatccatagacatcttccacccctctccccgaggcccgcgccaggagccgagggaggcgcaggcccgcaccctggcccagct

SEQ ID NO: 74099 - DNA, 782 bp, Homo sapiens; identical to SEQ ID NO: 64386

SEQ ID NO: 74100 - DNA, 574 bp, Homo sapiens; identical to SEQ ID NO: 64387

SEQ ID NO: 74101 - DNA, 1179 bp, Homo sapiens; identical to SEQ ID NO: 64388
  misc_feature (1)...(1179): n = a,t,c or g

SEQ ID NO: 74102 - DNA, 2872 bp, Homo sapiens; identical to SEQ ID NO: 64389
  misc_feature (1)...(2872): n = a,t,c or g

SEQ ID NO: 74103 - DNA, 1731 bp, Homo sapiens
ggatttcgtgccaagcttcaggaggccaagcggcaacaccagtcagactgtgtggcttttgagggctgctaccctggaaaaggaagtggccgggttgcgggagaagatccaccacttggatgacatgctcaagagccagcagcggaaagtccggcaaatgatagagcagctccagaattcaaaagctgtgatccagtcaaaggacgccaccatccaggagctcaaggagaaaatcgcctatctggaggcagagaatttagagatgcatgaccggatggaacacctgatagaaaaacaaatcagtcatggcaacttcagcacccaggcccgggccaagacagagaacccgggcagtattaggatatccaagccgcctagcccgaagcccatgcctgtcatccgagtggtggaaacctgagctgcctggagatggttgctgccattgctgctgcctctgcctcggagaagcccactgcccctgttggctgttaacactgcctttgacttcctgactgtcccctggctgcacccaggacttcgggctcctgtgtctcaccattcccaagcccctggccactctaagctgggcagacggagcacgagcacctattcaaggcactgcagccctttggaagacattgtcctgcaagcaggagccagggcaatatctatattcctacagtgactattttttttttgtagagagcctcccttctgttgtagactggactctggctgcgccataagccaggccttcatcagattgggagaggtgacaagatttgcctcagccataaaagctggagacacagatgtccagagtgattggagaatgtcctgggggaatgaagttccttccacaaacacagctcagttcttagcaacaaactgtttgtttttctacttgctccatctgcagcctacgctgccctggcctcctgcagacagatagtggggttacctggcaaggcctggtgagagccagtgaacctaagctttgactgggtggcctcgtctttctggggaggagggaatgtacattcagggagtagccttttgcggaaaaattctctagggctacagacagtcatgtgtgacttctctctgctgtgaaaactcccagagtctctttagggattttccctaaggtgtaccaccaggcacacctcagtcttcttgacccagagcctgaaaactgttttcactgggttccaccagtcccagcaaaatcctctttgtatttattttgctaagttattggtggttttgcttacatctcatgattgatataataccaaagttctatagccttctcttgcagtatttggatttgcttgaaaccgggaaaactgttcccattaggcttgttaatgtcagagtgacactattatgaatctttctctccctttcctctgcctgtttcttctctctttctccttcaaacttgctctgcagctaaggaaggtgagtctactttccctgaggctttggggtcagagtatatgttgtttggagaaagagggcaatcaggactcttctgggacccagatgagttcttcactagcccttctgaaccccttgctccataattggtcttttatcctggctctgaatgaccctgcaggtcatcatggttttctttttttattggttttttttttttctgaaacaaagtctcattctgcaacccaggctggagggcaggggcgcgatctcagctcactgcaacct

SEQ ID NO: 74104 - DNA, 1128 bp, Homo sapiens; identical to SEQ ID NO: 64391

SEQ ID NO: 74105 - DNA, 2377 bp, Homo sapiens; identical to SEQ ID NO: 64392

SEQ ID NO: 74106 - DNA, 5122 bp, Homo sapiens; identical to SEQ ID NO: 64393

SEQ ID NO: 74107 - DNA, 866 bp, Homo sapiens; identical to SEQ ID NO: 64394

SEQ ID NO: 74108 - DNA, 5024 bp, Homo sapiens
agtgtggtggaattcgcaagtattatgctaaccagtattttcttaattttagttttctcataagattcaccttgaaactatgtgtgaagtaaagaaaatctaccttcaggatgagtttagaattttgaagaaaaagtccttcacttttccaagagaccataagtcagttacagctgatacagagatgtggcctgtctatgtggaattgaccaatgaaaagatatatggctgcgatttcattgtcagtgctacaggagttacaccaaatgtagaaccttttctccatggtaacagttttgatctaggagaagatggtggcctgaaagtggatgatcatatgcacacatcccttcctgatatctatgctgccggtgacatctgtactacatcctggcagctgagcccagtctggcagcagatgaggctgtggacccaggctagacagatgggatggtatgcagcaaagtgcatggctgcagcgagttcaggagactctattgacatggatttcagctttgaactgtttgctcatgtgacaaaattttttaactataaggttgtactgctgggaaaatacaatgcacagggcttaggttcagatcatgaattaatgctgagatgtaccaaaggacgagaatacatcaaagtcgtcatgcaaaatggacgaatgatgggagctgtcttaattggtgaaaccgatttagaagaaacatttgaaaacctaatcttaaaccaaatgaatctttcatcatatggagaagatctgctagatccaaatattgatatagaagattattttgactaaaaatggaatttcttcaggaatcatataaagttccaaatgacaccagaaaaatcacaagtcaataaaatgaatgactgtattgagttaatgatgaccacactgaaaattacagaagtgataatgatatttgtggaaaaatataaaaacataaattctaagtttgaaatcagttcaaagtttatttatagatatatctttccaacacaacactgaccgcttagataaaaatcttaagttatttatttctgtgttttaaacataaatatgtttacttgtgatttagctttggagcaaatttaggtaagttatctacttagccaaatgtactctagtagactagaaccattctttgtgaaatgtcaaaatatggctatggtttcaggaactttaaaatcggttgtattttactttaaatagagatgtagcaatatctcgtttgctaatatttatattgatgacttactccttttttgttgaattgtacttctggttttataacctgaaatcatttacaagcttgtccaactctagcccacgggtctaatgcagcccagaacagctttgaatgcagcccaacacaaatctgtaaactttcttaaaacatgagatttttcttgcaatttttttttttttaagctcatcagctatcgtcagtgttagcatattttatgtgcggcccaagacaattcttcttccaatgtggctcagggaagccaaaagattggacatccctgatctacatatttaacttaaagtatcactcagggaacctctgtcagtataatattgctttcaaaaagatggttatgtcaaaagaaaaaatatagctaagtatataaaggcataaaaaacttaagacaattacatgaacttattctcaaatattttacattttttgtaaactttcttaaaacatgagatttttcttgcaatttttttttttttttttaagctcatcagctatcgtcagtgttagcatattttatgtgcggcccaagacaattcttcttccaatgtggctcagggaagccaaaagattggacatccctgatctacatatttaacttaaagtatcactcagtgaacctctgtcagtataatattgctttcaaaaagatggttatgtcaaaagaaaaaatatagctaagtatataaaggcataaaaaacttaagacaattacatgaacttattctcaaatattttacattttttgtaaactttcttaaaacatgagatttttcttgcaattttttttttaagctcatcagctatcatcagtgttagcatattttatgtgcggcccaagacaattcttcttccaatgtggctcagggaagccaaaagattggacatccttgatctacatatttaacttaaagtatcactcagtgagcctctgtcagtataatattgctttcaaaaagatagttatgtcaaaagaaaaaatatagctaagtatataaaggcataaaaaacttaagacgattgtatgaacttattctcaaatattttacatttaaagggttttacataaaaatttttcccttgttttatactggaaaattatataattcatgatctctaattttcaaacattctcaaaagtttagatcttcagagataagctctgaaaatatagatccatacatataaaatatctatgaaattcttttaaaaactattgtctaactacaaaaataatggcatatacatgcataaaccatctttaattagaaaatttagtaacattcatatcaggcatcatcgattgttcttttcttagctcctgtattcttagaaccagattgctgaagcatgtttgcagccttcttctggaagttgcctgaattttttttcctccattctttttatcaccttgttcagaatgacaagtttgagacgattcagccctgaaagagttctgcgtggactttgtcacttgcatagtaatagcatgtgcctcattgttcagaagattagctttaggtcctattttcaaatacgaaatggcagcataagctgtaaaactgtagtcttctttaagatactgctgtattagaaagtgtgcaataatcttctccagatcttcacgaggaagtgtgggagccacaacacctgctactctcagttttgctgcaccctttcccatccaagaatcaatcagtttcaatggagtgagtttttcattcagttcctctgcctgcttcaggatcttgattagatctctgcagtactctgttatgttcgttctttcaaatgcactgtctttacagcagttatcgcacattttgttacatgcttctgagttccatacttcatcaaaatgttgagccatcaacacacgacgagatttgcttatgttttgacagtatgataccatctcataaagcttctgctgtcccacattttccatcaccaccattgaacttattctgaatatatctccaaagccgtagtacaaaatacagtctgctttcatgtcatctcgacctgcacgtccactctcttggtaataattttccatggatttactcattgaatgatggataacaaacctcacatctggcttatcaattcccataccaaatgcaacagttgccactactacctgaatttcattggctgaccattttctatgaactgtggtcttatcttctggctccaaattggcatggtaagcacctgcatgaattcccagattctgcaaactaaccgtaacttgttcagagtctttctgagaaaaacaatatatgattcctgattgccctttgtatctcccattaatgagctttacaatatcctcaataaaatcttcagtgtttgagggcttctgccgaacctcataatatagatttggcctattaaaagaagctgtaaaagtaaaacacttttcaatgcacaaaattttctgagcatccgtcaaaacgtgatttgttgcagttgcagtcagcccaattagtgatgcgttagggaactgccgctttaagataccaagtgccttataatcaggtctgaaatcatgtccccactgactacagcagtgaacttcatccacagcaattcgagtaaatctccttgcttcataggctttctctagtcttgacataaacattttgctttttgcaattttctctggagtcacataaatcagctttaactcggagtttttatttaccatttcatcatgaacccatttaacatgctccttagaactagaagcatttaacatggttgctgaaattcctaattgttttaaaaccattaattggtcttccataagagagatcaatgggcaaatgacgagtgtaaaaccatctgaacataatgctggtaactggtaacataagctctttccacctcctgtaggcataacaagaaatacctcctttccagccattgttacgttaatagtttcaagctgaagtggtctgaacttttccagtttaaagacattttgcagaatatctttaactttaccagaccatggaaaatcttctttattccaagcggcaggtgaagaatcatattcattgcttgccccggcatcagaatcctctaaacactgctttattttctttgtcaggactttttttttctgaataagctcttgttgcctttccgtaagttcttgaatttgaatttctactgcatgtagctcactggttatagaatccagttcctcagttagagctgaaacggacgccattctttttctttccaaattgtttctaaaataatccaaatttctttaacaaatggcagctgctaataaacaggctttggtggccaatcctcctgcatggaaaagaatggggagatcagaagaccggtcagcaggcgaacgtgcccctaaaggcccgagttctcagagcagggcagtgattaactttccggtttctcctccgccaatgtgtgggcgaaaggaagtgatccgcatcagaccggcctcgcctgcagcaggaaagggaaggatgaaagaaaaagcgcacacccttgacccttcaaagctgtaacagtagttatcccagagcctgtccccaccgagaagcccagtctaactctccggtgtttgactgtccggtgtccgactgtcctgtgtccgactctccgatctccgactctcggatctccgacaccaaagcacccaggcctcgagcagatcttttcgctactcctacctatctaaaattttatactaataatcttataaaaaaaaaa

SEQ ID NO: 74109 - DNA, 918 bp, Homo sapiens; identical to SEQ ID NO: 64396
  misc_feature (1)...(918): n = a,t,c or g

SEQ ID NO: 74110 - DNA, 1625 bp, Homo sapiens; identical to SEQ ID NO: 64397

SEQ ID NO: 74111 - DNA, 758 bp, Homo sapiens; identical to SEQ ID NO: 64398

SEQ ID NO: 74112 - DNA, 2409 bp, Homo sapiens; identical to SEQ ID NO: 64399

SEQ ID NO: 74113 - DNA, 486 bp, Homo sapiens; identical to SEQ ID NO: 64400

SEQ ID NO: 74114 - DNA, 1590 bp, Homo sapiens; identical to SEQ ID NO: 64401

SEQ ID NO: 74115 - DNA, 1236 bp, Homo sapiens; identical to SEQ ID NO: 64403
  misc_feature (1)...(1236): n = a,t,c or g

SEQ ID NO: 74116 - DNA, 2902 bp, Homo sapiens; identical to SEQ ID NO: 64404

SEQ ID NO: 74117 - DNA, 1113 bp, Homo sapiens; identical to SEQ ID NO: 64405

SEQ ID NO: 74118 - DNA, 1937 bp, Homo sapiens
aaggagccaagaccatggcgaaagccggggataagagcggcagcagcgggaagaaaagtctaaaacggaaagccgctgccgaagaacttcaggaggctgcaggcgctggggatggggcgacggaaaacggggtccaacccccgaaagcggctgcctttccgccaggctttagcatttcggagattaaaaacaaacagcggcgacacttaatgttcacgcggtggaaacagcagcagcggaaggaaaagttggcagctaagaaaaaacttaaaaaagaaagagaggctcttggcgataaggctccaccaaagcctgtacccaagaccattgacaaccagcgagtgtatgatgaaaccacagtagaccctaatgatgaagaggtcgcttatgatgaagctacagatgaatttgcttcttacttcaacaaacagacttctcccaagattctcatcacaacatcagatagacctcatgggagaacagtacgactctgtgaacagctctccacagttataccaaactcacatgtttattacagaagaggactggctctgaaaaaaattattccacagtgcatcgcaagagatttcacagacctgattgttattaatgaagatcgtaaaaccccaaatggacttattttgagtcacttgccaaatggcccaactgctcattttaaaatgagcagtgttcgtcttcgtaaagaaattaagagaagaggcaaggaccccacagaacacatacctgaaataattctgaataattttacaacacggctgggtcattcaattggacgtatgtttgcatctctctttcctcataatcctcaatttatcggaaggcaggttgccacattccacaatcaacgggattacatattcttcagatttcacagatacatattcaggagtgaaaagaaagtgggaattcaggaacttggaccacgttttaccttaaaattaaggtctcttcagaaaggaacctttgattctaaatatggagagtatgaatgggtccataagccccgggaaatggatacaagtagaagaaaattccatttataaagtactgagagaatgatattggattttgctgaacaggcctatcttgaactttggtaaattatttttgacagaatactcttttcaaaatggcatttgctgatttcataaacctttcacgtctggacgaattaccaaatgccatgaattgccactgtgtgtttatgtagaaaatacaaataaaagttattttgatggcttaggtttccttaaacttagttctcttgtttttgggtaactgtgaataattaagttggaatcaagattcagattaactttcctatttgcatagaacacatgagaggaataaaatggttggtaaatattggctaacccttgatttttataccagattaaccttggattcccagtgtctggcacagttttaatagcttaaatggaggccaggtttctggatgttttaacattctcttaagccttcagaagggtaaaaaatttaaagcaaaatgatctaccagggtttaaagcaaagttgcaaattactgaagctaatctttgcttcctgattttgaggtttttggttttttgtgcccacgttgtggggagctcttttttacctcattacatggtgctgtagtactcccattcaggcactgaaaacaaagttaaccctataagtaactcatggatggaaacccgtagaacttaacagcctcctcctgaccttaaaagaataaaggttcacagtttacctttaattccctagcagtcttgccagatgtatggcataaagtcatgtgagaagagtaggtggaaaaaactgtacaaacttaaccccttcaggtgttcagaacagattaatataccatgtatttaataccaataataatgcaaaataaaacgtttcatactaag

SEQ ID NO: 74119 - DNA, 2685 bp, Homo sapiens
gcggccgcggcggcggctggggcgttcgcgggccggcgcgcggcgtgcggggccgtgctgctgacggagctgctggagcgcgccgctttctacggcatcacgtccaacctggtgctattcctgaacggggcgccgttctgctgggagggcgcgcaggccagcgaggcgctgctgctcttcatgggcctcacctacctgggctcgccgttcggaggctggctggccgacgcgcggctgggccgggcgcgcgccatcctgctgagcctggcgctctacctgctgggcatgctggccttcccgctgctggccgcgcccgccacgcgagccgcgctctgcggttccgcgcgcctgctcaactgcacggcgcctggtcccgacgccgccgcccgctgctgctcaccggccaccttcgcggggctggtgctggtgggcctgggcgtggccaccgtcaaggccaacatcacgcccttcggcgccgaccaggttaaagatcgaggtccggaagccactaggagattttttaattggttttattggagcattaacctgggagcgatcctgtcgttaggtggcattgcctatattcagcagaacgtcagctttgtcactggttatgcgatccccactgtctgcgtcggccttgcttttgtggtcttcctctgtggccagagcgttttcatcaccaagcctcctgatggcagtgccttcaccgacatgttcaagatactgacgtattcctgctgttcccagaagcgaagtggagagcgccagagtaatggtgaaggcattggagtctttcagcaatcttctaaacaaagtctgtttgattcatgtaagatgtctcatggtgggccatttacagaagagaaagtggaagatgtgaaagctctggtcaagattgtccctgttttcttggctttgataccttactggacagtgtatttccaaatgcagacaacatatgttttacagagtcttcatttgaggattccagaaatttcaaatattacaaccactcctcacacgctccctgcagcctggctgaccatgtttgatgctgtgctcatcctcctgctcatccctctgaaggacaaactggtcgatcccattttgagaagacatggcctgctcccatcctccctgaagaggatcgccgtgggcatgttctttgtcatgtgctcggcctttgctgcaggaattttggagagtaaaaggctgaaccttgttaaagagaaaaccattaatcagaccatcggcaacgtcgtctaccatgctgccgatctgtcgctgtggtggcaggtgccgcagtacttgctgattgggatcagcgagatctttgcaagtatcgcaggcctggaatttgcatactcagctgcccccaagtccatgcagagtgccataatgggcttgttctttttcttctctggcgtcgggtcgttcgtgggttctggactgctggcactggtgtctatcaaagccatcggatggatgagcagtcacacagactttggtaatattaacggctgctatttgaactattacttttttcttctggctgctattcaaggagctaccctcctgcttttcctcattatttctgtgaaatatgaccatcatcgagaccatcagcgatcaagagccaatggcgtgcccaccagcaggagggcctgaccttcctgaggccatgtgcggtttctgaggctgacatgtcagtaactgactggggtgcactgagaacaggcaagactttaaattcccataaaatgtctgacttcactgaaacttgcatgttgcctggattgatttcttctttccctctatccaaaggagcttggtaagtgccttactgcagcgtgtctcctggcacgctgggccctccgggaggagagctgcagatttcgagtatgtcgcttgtcattcaaggtctctgtgaatcctctagctgggttcccttttttacagaaactcacaaatggagattgcaaagtcttggggaactccacgtgttagttggcatcccagtttcttaaacaaatagtatcacctgcttcccatagccatatctcactgtaaaaaaaaaaattaataaactgttacttatatttaagaaagggaggattttttttttttaaagataaaagcatggtcagatgctgcaaggattttacataaaggccatatttatggtttccttcctgaaaacagtcttgctcttgccatgttctttgatttaggctggtagtaaacacatttcatctgctgcttcaaaaagtacttactttttaaaccatcaacattacttttctttcttaaggcaaggcatgcataagagtcatttgagaccatgtgtcccatctcaagccacagagcaactcacggggtacttcacaccttacctagtcagagtgcttatatatagctttattttggtacgattgagactaaagactgatcatggttgtatgtaaggaaaacattcttttgaacagaaatagtgtaattaaaaataattgaaagtgttaaatgtgaacttgagctgtttgaccagtcacatttttgtattgttactgtacgtgtatctggggcttctccgtttgttaatactttttctgtatttgttgctgtatttttggcataactttattataaaaagcatctcaaatgcgaaatccatgaaaaaaaaaa

SEQ ID NO: 74120 - DNA, 4955 bp, Homo sapiens; identical to SEQ ID NO: 64408

SEQ ID NO: 74121 - DNA, 900 bp, Homo sapiens; identical to SEQ ID NO: 64409

SEQ ID NO: 74122 - DNA, 683 bp, Homo sapiens; identical to SEQ ID NO: 64410

SEQ ID NO: 74123 - DNA, 4235 bp, Homo sapiens; identical to SEQ ID NO: 64411

SEQ ID NO: 74124 - DNA, 4226 bp, Homo sapiens; identical to SEQ ID NO: 64412

SEQ ID NO: 74125 - DNA, 1208 bp, Homo sapiens; identical to SEQ ID NO: 64413

SEQ ID NO: 74126 - DNA, 1959 bp, Homo sapiens; identical to SEQ ID NO: 64414

SEQ ID NO: 74127 - DNA, 498 bp, Homo sapiens; identical to SEQ ID NO: 64415

SEQ ID NO: 74128 - DNA, 1349 bp, Homo sapiens
ggcagtctgctgacccttggaagatgaaggagaaatgggagaaggcagaggggtcaggtgggggctgccagaggaagcggccctgagctgctggttcccagtccctccctcataagcaaagctgaggccctcaggttaccacgggacactgttaagtttattctagggtgagtgggtgcccaaggggggcagtgagtatggccgaggtcacctggtggcagggtgctcagggatggccacaggttctatagggccctgcagggcctgagtctctagtcagttgggatgcttcaccttctgccccaccccaagggggttggggcagtcatggatgtagtagttttcgtaattcgcagggatcagtgatgggcactgagcaggcttgattctcacacacatatgcagtggcctggtcttccaaccgtcggagggtactcaggaaaggcagctggcgggacaggaagctcgaggggtccccatcagccagaatcagcaccttgttaggaatgtagacagagtggacgcactgcaccagggccttggtgtccttggcctgacggtctccacagatcacgatctgcttgagggtctgctgctgggctgagagggcgcggaccatctcgggcaacgccaccgggacacgacgcatgcgctcggaaaaggcggtcaataggcacacacacttgtccatccagtccttgtggcccgtgaagccatgcagccggagcaggttgtgggctgacacggaattggcgctgggctctgctccatcctggtcgtccttcagacgcaggggcaggccagcccccagctcagcctcactgcagaagtagccgccaccctgggagtcccaaaagagcctgtcctgtgtgtcctgcagccgcagagcccactcgagccacgcactctcctgtgaggcctcatacaggtccagcaggccccgcaccacgaaggcgtagtcctccaggaagccccagcagggtgggttgctgtgctccacagtccccccagggccggtgtagcaggtccgcatcaggcggccactggccacatcaaacatgtgccgcttcaggaacttggcaccattggtggcatagttgatcagcctgtcttggcccaggacagccccagtcacagcatagcctgacaccatcaagccattccaggcagccagcatcttgctgtccaggtgcggcttgggccgatgcttccgggcctggaagagcttctccagccctgaattgagcaaggtccgcacggcctccacatccaagccaaagcgggcagcagtcagctccagcgagtaccggacggtcagcacattctggccctgcagctcccccttgggg

SEQ ID NO: 74129 - DNA, 1911 bp, Homo sapiens; identical to SEQ ID NO: 64417

SEQ ID NO: 74130 - DNA, 1976 bp, Homo sapiens; identical to SEQ ID NO: 64418

SEQ ID NO: 74131 - DNA, 418 bp, Homo sapiens; identical to SEQ ID NO: 64419

SEQ ID NO: 74132 - DNA, 1240 bp, Homo sapiens; identical to SEQ ID NO: 64420

SEQ ID NO: 74133 - DNA, 1780 bp, Homo sapiens; identical to SEQ ID NO: 64421

SEQ ID NO: 74134 - DNA, 421 bp, Homo sapiens; identical to SEQ ID NO: 64422

SEQ ID NO: 74135 - DNA, 628 bp, Homo sapiens; identical to SEQ ID NO: 64423

SEQ ID NO: 74136 - DNA, 850 bp, Homo sapiens; identical to SEQ ID NO: 64424

SEQ ID NO: 74137 - DNA, 820 bp, Homo sapiens; identical to SEQ ID NO: 64425

SEQ ID NO: 74138 - DNA, 841 bp, Homo sapiens; identical to SEQ ID NO: 64426
  misc_feature (1)...(841): n = a,t,c or g

SEQ ID NO: 74139 - DNA, 1988 bp, Homo sapiens
agctgcaccactagaaagatggcggagcaagagcaaagaaaaatccctttggttccagaaaatctcctgaaaaagaggaaggcttatcaagccctcaaagccacccaggcaaagcaggcacttttggcaaagaaggagcagaagaaaggaaaagggctcaggtttaagcgactggaatcattcctacatgattcctggcggcagaaacgtgacaaggtgcgtctcagacgactagaagtgaaacctcatgccttggaattgccagataaacattccttggcctttgttgtacgcatcgaaaggattgacggcgtgagtttactggtgcagagaaccattgcaagacttcgcctaaagaaaatttttagtggtgtctttgtaaaagtcaccccccagaatctaaaaatgctgcgtatagtggaaccttatgtgacctggggatttccaaatctgaagtctgtccgagaactcattttgaaacgtggacaagccaaggtcaagaataagaccatccctctgacagacaatacagtgattgaggagcacctggggaagtttggcgtcatttgcttggaagacctcattcatgaaattgccttcccagggaagcatttccaggagatctcatggttcttgtgccctttccacctctcagtggcccgtcatgctaccaaaaatagagtgggcttcctcaaggagatgggcacacctggctatcggggtgaacgcatcaatcagctcatccgtcagctgaactagacccaggtgccaaactgcggtaaattttttatcagtgaagtggaagcatgtgttttgttttggaaatttttatcaagtatcttcagagaagattatttcctgctttatcttcagaaactggaaagggtcaaagaaaagacagtagctggccggtcgtggtggctcatgcctgtaatcccaacacttagggaggctgaggtgggcagatcacctgaggttgggagttcgagaccagcctgaccaacatggagaaatgccatctctactaaaaatacaaaaattagccgggcatggtggcacgtgcctgtaatcccagctactcaggaggctgaggcaggagaatcgcttgaacctgggaggtggaagttgcagtgagctgagatcacgccattgcactccagcctgggcaacaagcgaaactctgtctcaaaaaaaaagaaaagacagtagcatatgttcatgtcaagcacctctcatcacagtcgagttccaaggaaaaattccagcgttttctgcattgggtgctgtgtcatctgaaatcggcacattccatggaggaaggagtcctgctttgttgcatgtatcctagggtttaatgttggtaaatgagtcactctagcatttgtagaaggctccctgagactcctgcagcagtcgaccaagcccaaggacataattgaatctggagagtcctggggccttgttttgaaaaagacttgaaatacacataggaagaaaggcataaaaataaatgttcacttgtctctgctgtgagtatgtgttccaacttttcagtgatggctttgagaattctcaaacttgactggctctaagtgtatctggtggcttttgtatcgtaacctgaaactggcttagtactttttcctaaaagctcaggatttgagaatgaggaccccttcgccaggaaaacatgtatacactcaaaattttgcttgcagttctagggtgtttagacccttctcagatacctgtgcatcttatgggttttgtttttctctttgagacagtctcaccctgttgcccaggctggagcgcagtggcgtgatctcggctcattgcagcctccacctcctgggttcaagtgattctgcctcagccccttgatcagctgggattgcatgcatgtaccaccacacccggctaattcttgtatttttagtagagatggagacagagtttcaccatgtaggtcaggagttcgagaccgg

SEQ ID NO: 74140 - DNA, 1346 bp, Homo sapiens; identical to SEQ ID NO: 64428

SEQ ID NO: 74141 - DNA, 672 bp, Homo sapiens; identical to SEQ ID NO: 64429

SEQ ID NO: 74142 - DNA, 1732 bp, Homo sapiens; identical to SEQ ID NO: 64430

SEQ ID NO: 74143 - DNA, 1223 bp, Homo sapiens; identical to SEQ ID NO: 64431

SEQ ID NO: 74144 - DNA, 2763 bp, Homo sapiens
ccatatccatgtggtggaattcacacaattggtcagctgcttccacagcagatgcaagcattccattctcctaaagcactcttccctgtgggctatgaagccagccggctgtactggagcactcgctatgccaataggcgctgccgctacctgtgctccattgaggagaaggatgggcgcccagtgtttgtcatcaggattgtggaacaaggccatgaagacctggttctaagtgacatctcacctaaaggtgtctgggataagattttggagcctgtggcatgtgtgagaaaaaagtctgaaatgctccagcttttcccagcgtatttaaaaggagaggatctgtttggcctgaccgtctctgcagtggcacgcatagcggaatcacttcctggggttgaggcatgtgaaaattataccttccgatacggccgaaatcctctcatggaacctcctcttgccgttaaccccacaggttgtgcccgttctgaacctaaaatgagtgcccatgtcaagaggtttgtgttaaggcctcacaccttaaacagcaccagcacctcaaagtcatttcagagcacagtcactggagaactgaacgcaccttatagtaaacagtttgttcactccaagtcatcgcagtaccggaagatgaaaactgaatggaaatccaatgtgtatctggcacggtctcggattcaggggctgggcctgtatgctgctcgagacattgagaaacacaccatggtcattgagtacatcgggactatcattcgaaacgaagtagccaacaggaaagagaagctttatgagtctcagaaccgtggtgtgtacatgttccgcatggataacgaccatgtgattgacgcgacgctcacaggagggcccgcaaggtatatcaaccattcgtgtgcacctaattgtgtggctgaagtggtgacttttgagagaggacacaaaattatcatcagctccagtcggagaatccagaaaggagaagagctctgctatgactataagtttgactttgaagatgaccagcacaagattccgtgtcactgtggagctgtgaactgccggaagtggatgaactgaaatgcattccttgctagctcagcgggcggcttgtccctaggaagaggcgattcaacacaccattggaattttgcagacagaaagagatttttgttttctgttttatgactttttgaaaaagcttctgggagttctgatttcctcagtcctttaggttaaagcagcgccaggaggaagctgacagaagcagcgttcctgaagtggccgaggttaaacggaatcacagaatggtccagcacttttgcttttttttcttttccttttctttttttttggttggtttttggtttggtttttcccttgggggggggtttcattgtttgggttttctagtctcactaaggaaaaacttttactggggcaaaaagccgatggctgccctgccccgggcaggggccttcctatgaatgtaaaactgaaatccccaccgagggggacagaaagtgctgcccacggccttattaaaaaggggcaggccctctaacttcaaaatgtttttaaataaagtagacaccactgaacaaggaatgtactgaaatgacttccttagggatagagctaagggataataacttgcactaaatacatttaaatacttgattccatgagtcagtttattgtagtttttgatttctgtaaaataagagaaacttttgtatttattattgaataagtgaatgaagctatttttaaataaagttagaagaaagccaagctgctgctgttacctgcagaactaacaaaccctgttactttgtacagatatgtaaatattttgagaaaaaatacagtataaaaatagttattgaccaaatgctaccaggctctgcagcagctcgggggcttataaaatgttcatagggatgttacaatataattttgtgttataaaatatgccattataattatgtaataaccaaaatttcaacctagagtgttgggggttttttggaaaccgcagtctattagtactcaatggttttatacaccttacttctgacagagcggggcgtatgctacgactacaacttttatagctgttttggtaatttaaactaattttttcatattatattgttgcatccctacttcttcagtcaggtttttttgtgcttacaatttgtgataactgtgaataactgcttaaaaatacacccaaatggaggctgaattttttcttcagcaaaagtagttttgattagaactttgtttcagccacagagaatcatgtaaacgtaataggatcatgtagcagaaacttaaatctaaccctttagccttctatttaacacaaaaatttgaaaaagttaaaaaaaaaaaggagatgtgattatgcttacagctgcaggactctggcaatagggtttttggaagatgtaattttaaaatgtgtttgtatggaactgtttgtttacatttctttaataaaaaaaacactgttttgtgtttgcttgtaggaaacttaatcaccattttgaaccaggttagctttttattttggtacttaaaattctggtactgacacttcacaggctaagtataaaatgaagttttgtgtgcacaattcaagtggactgtaaactgttggtatattcagtgatgcagttctgaacttgtatatggcatgatgtatttttatcttacagaataaatcaattgtatataaaaaaa

SEQ ID NO: 74145 - DNA, 1853 bp, Homo sapiens; identical to SEQ ID NO: 64433

SEQ ID NO: 74146 - DNA, 2039 bp, Homo sapiens; identical to SEQ ID NO: 64434

SEQ ID NO: 74147 - DNA, 3123 bp, Homo sapiens; identical to SEQ ID NO: 64435

SEQ ID NO: 74148 - DNA, 1493 bp, Homo sapiens; identical to SEQ ID NO: 64436

SEQ ID NO: 74149 - DNA, 3886 bp, Homo sapiens; identical to SEQ ID NO: 64437

SEQ ID NO: 74150 - DNA, 1543 bp, Homo sapiens; identical to SEQ ID NO: 64438

SEQ ID NO: 74151 - DNA, 2279 bp, Homo sapiens; identical to SEQ ID NO: 64439

SEQ ID NO: 74152 - DNA, 646 bp, Homo sapiens; identical to SEQ ID NO: 64440

SEQ ID NO: 74153 - DNA, 481 bp, Homo sapiens
ttttttttttttagctcatcagctatcgttagggtattttatgtggcccaagaaaattcttcttcaaatgtggcccagggaagccaaaagtttggacacctgtgatttacaggttatgcctagatctgaaacagatccccatccctcctaaagctgcccactggttatgggccctgtttctcttagaaacaccacacacatcatttgggaaaagcacactgagtagaaacatggcctgaaagggtggtgggcggtggacctggcttcctgtggccagaggtcagcggacgatagaaatggtctgatcggccacagcaaagactggggaagattgggccccgggaaggacacattgattgggcacagagcactgtgccggaggctggctcatagaagagcagctcctgaacctgcaagtccagcactacacccagctgggctgggccccgcagcagccccaggggctcgtgctgcccattgt

SEQ ID NO: 74154 - DNA, 1026 bp, Homo sapiens
catattcaaaccatctttatttacaaaatactatcctgagaactattattccattaaacttcaatttgagcaaaagtgcaatcacttaagtaatagcagttacttaaactgaaaatgagatcagtcaaaattacttttgaagaaagcaacaatattgtcaggtttcttgctgtggttctggatgtccagtagcaggctcctttgaaggcggaatcaatcctgaagggaactcgcttctacctttagaatgtggggttggggtaaaatccaggtctcggatgaaggtaaggaggtaaacccctcggtggatagatgtttctcattgcaaatggagcatgtggtggacctgggaaatcccttggtggaaaataacctcgagaagctccaaacatggttcctggaggaggtggggggaaaggaggtcctcttctcatgaacgggccccttgtatccactggaaacaatggaccgctgattggagcaagaggtggaggaataaggccagggccagttgcttcattttcagcagggagagatgaatcaggcacatttaaattaccaagatcatctttggcatcatttctactggattccatttctgaaggcattgacctatccattttatccaaagaagtcattttaaaacttctgggttctgctggcccagacagtctttcagaattagaataaaatctgtcttccctttgtggaggaagagttgaatcaggatatgattgccctggtggaggaaacatcatcctacggtcctgttccaccggagatgacagggacccagtgtcagaaggagccctgtgaggatcgattaacctgtcatagcttggttctcctctttcattggtaatctgatggtccaggggattccctgggctgcttgggcctcttcctcctccccctggaagcacaggtgagagtctgagtggatcctccaacaaagtttgaggagagggaaaagctctcgtttcagatgaaggccgacccaatggtgatggactagatgggcaaata

SEQ ID NO: 74155 - DNA, 572 bp, Homo sapiens; identical to SEQ ID NO: 64442

SEQ ID NO: 74156 - DNA, 881 bp, Homo sapiens; identical to SEQ ID NO: 64443

SEQ ID NO: 74157 - DNA, 2941 bp, Homo sapiens
tttgggaggctgaggatgtcagtgggggaggacccgcacgttcttacccagttggaggcctttgttactatctttctcctcctgagtccatgggcgccatctttgaggatcctgtccatgtcgttgtttatatcatcttcatgttggggtcatgtgcattcttctctaagacatggattgaagtgtctggttcctcagccaaagatgtagctaaacagctgaaagaacagcagatggtaatgaggggccaccgagatacctctatggttcatgagcttaataggtacatccccaccgcagctgcgtttggcggtttgtgcattggcgccctgtcagtgctggctgacttcctgggggccattggatctggcactggaattctgctagcagtcactattatttaccagtattttgaaatatttgttaaagaacaggccgaagttggtgggatgggtgctttgtttttctaaatgttcaaatatttcattttgtgcgtgtgaaagggaaaacactttgacggatcgtttttgtcagatgacactggtggctccccttttctcccctcacagtttcttgtttcgagtgctgactgacccgtttctgaaatgggcaccgagctaagtctgtgtgcagcattagtacccgctgccttaaaactcaagtttacattattcattaaaaaaagtacatctagtgttgcctgtaatgctggaaaccagtgtatctaccttgctgtgttaaatcatgacagtgagacggtgagatggattcgttttgcacacaacattcaaaacacttcatattgcccccacttgttgaaaaataaatgtagttcaaattgccactttccagtatttttgagcttatttaatgagttctggaacatttatatctaatctatattttagataattactttttatacttttttaactcatggtatccccactccccacccccacctcatttttatttgtcccttctcaaagcagccacttagcccacatgggcgaaatcaagtctccagttatttctgccacaactgcttctaaggcctcctccttctcctcctcctcttcctcttcctccttttccttctcctcctcctctcttcccagtgacagcatcatcgtgctgtttgcctgtattggctatgccttctaactccaaccagtcacttgagaatattctttcaagattctgggccccgattcttttctgtttaaatccctaaagcaaagatctaattctcaagcaatgtctgtagttcagtgggggtgaacaatgaatatattcatgctaggaatttgtgtctgttgttgtactcacagcagcaacatgagtgtaaacagtagacaataaacttttatttaagaaaactgattcagttgtgttggaaaaaataaagaaatctgatattaaacgttttctaagatcatttgtataggttcagtgtattcataagaagtccaccctgagatgcctgtaaaagtcaaatgtaattacacttcaaactttaatcctaaattattgacagatagatagatagtgaccaacttaagggtaatcatatatgtgactaacatttgggaggaaacaggaaaacagtggtctcaaaacaacaatatcccagtctccatttgaaagagcatagatcttggtaaatcattttgaaaactatgtgctttatttcccaaaagatcaaacttaatttttaaaagacacccttttcagaagtatgggttttcattgctgtttagtttcttaggtgtggtatgtcttacgtagcttatgcttacaaagccaaataatcgcagggcaaggcagataaaggcaggcaggatagtgacagtggctcggtgagcatccgccaagggcctcagaccactgttaccataaaaacatccacccagtgttatgacgtccgatttttttttcccttaagaaggtggaaatatggcttttaatacataggaaaccttcagtttttaaatgcagggcaaataaacatttttaaacagtgccagccagactgccagttctcaaacagactgaatttccaaagcacaaccttttcatgtttataaaaaatagaaatggcatttagggatacattctaggatttggctctgacttctaagttgcactcttaggaagaaggagaggataagcttaggtcagctgcagaggtcattcccatggggagtggctggggaggaactgggctatgtggaaagactgggctgcgcccgtctacggatgccttctctcttgatttcaatgattgatagcatgtggctttcagacctaaggaagagttagagctttggagaatcacaatgcctgtgattgaaatcaggatttaaaaaagggttagaggcataggggaaggctaccattacaggaagtagttggatcttaattttcacatgtatagggctagacagcttcatctgtaaagttctgtatttccataattgttttatctttaggaagtccagtgtaaagatcttacagtttcactcataaaaatatcctgggctcagacagtgagcctgtggacaaacggaggctactgcagcattctggcattagcactctgattttatctggagagccctttcatatggttctcagggcctggcttacccgctggagccaggctagaaacatgacttagggctggatgagaatcatcctgagaattccgtgggggccagactggaaagtcctggaaaatcatggagctgctggaggccctaaaagtcaacacaaaaagagctaaactcactcaagaagctaagaaaatggcccaggaacactggtagaactgctagatgacagggtttcaggcatgggaaccagatcaatctgtacttcttgctgtgaactactctgtattgggtttcaggtactggctgatcttgctggttctgttcat

SEQ ID NO: 74158 - DNA, 3447 bp, Homo sapiens
ttcatgtgcccatcggagggtacatatcagtctattttttattataaacaaataaaagattaaatcacacatcaaagacctagactccttctctgagacaccaaaggcctaacaaccagtaagataattttagacaattctattgaaagttattcaaaaggcatcaagtcaaaataacgaaactgccccagtaaaaaggggctgggcctgggggccaggcaaaggcaagcatgagggccccagtagaggtggacctgtccctatggtaactgagctcggctttaaggccaggcattggggatcagctgctaggagcccacctgtgttcttcctgaggggtgggggcaccctagtcacttgccttagaggcacatgggtcccccaccagcctacagcatggaaaacacccaatgtctggctctagcctattcttaacccacaaactgggattgggagctggggacaggaagaaggggtcatggggccaggagcctattcaggctctacaaccagacttccctagagaggccccgtgccagttagtccaatggccacacacatcagaaagggtagtcaacagcgttgcacatgtaggttggaggtagcccaggtgtcagccacaccctggtcacagcagatccagagaggcaatgttccttggagctgcaggctgctggatctactgctcgtccagtcccgggctcagacacagggtaagtcctccaggcccctacccagggcctgccctgacacacagctgctgtcagagccactggagccactggctgatgggcattgggacgagatctctgagtcctcagcagtcaaagagggctggccgcccagctctgcctcagcctccagtgctgcttcctctgggaagctgggatacaggggacagcggagacccagaagagctgggtctctgtacaggtgcaggttgagggaccccagaacagagcaagaggcagggtctccaggaagggagttcgaggcccccaggtagaggctgtcatggtcaaacggggctacggcaatggacgcccgagagcgaacttctcggcacttcaggacatagttgacggtgcggtcgttgatggcttcctcgctgggagcaatgtctcggaaggccttgttccccacacccatggacaccatctcagccatgcgcacctccttgttgtggacggcctgcctccaaagcaggtgggagatgtcagctgtccaggcctgcttgatagccaggctggaggcctgcagcacaaaggtgtccctggccttgcggcggcggaaccagatctcgaagcgcaggttgctgttcccacagcactcagtgagaccaaggtctgccatcttgaaggagcgcttgtaggcaaatgtgtcaacccctgtgggcccatggcgaggcttgctgaagagcagcagctcctcaaaaaggaagatgcggcgcacggacttgtggcgcccagtgcgcaccacaaactcatcctgtcgcaccagctgcccctgttccttgaggttaacatcacagccctggatggcgtccatggccagcaggtcgtttccgtgccgcagctggaagtgcacaaggctctgggcctcccgcagcgcactgagctcctgcgtggggcccccgcaggcccgtgccagctcctgcagcagcagtgcgtacttgcccatgcgctggatgggctttagcaggtaggaggccaggtccaggtggtcccccagtgcttgctgcttgtccttgaagaaggtgtgcccatagcttgacatcagggcatcggagcgaggcttattcttgctgtagagcgcgtacatcccaaactgcaccctatggcgcaggaaggcataggccactcgtggtgggtgccgggtgcaagcctccagctcacgcaggaagaagtggcagtggaagtcccgcagcttctccaggttgccaaagaggtgggcacgctgaccgcggaggccctggggcacatcggggcgatccagctcggggaaatagttctccatagtgtactctagagcccggacatactcccgctccgtggccaccatctctgccagcaccagctgtagcctgttgaggctcctggggtcagagctgcctggtggaggcacagtaggggatgcctggggcagggcacctcctccagcctctggtctgcggcaggcagcaatagtggccgcatggtggcagtggcaggcaggttcactgagactctgccccagattccgatcgaagctgtaggccttcctcaggggagggtgggcaggtgcagcggggacctggctgacacacaggctagctgtgctgcccaccggtggtagcttcagtgaagcctcaagcttttggtccagggccagccaggtgtcctggcaccgcgcccaggcccagcggcactcctggcggatggcctctgagcccagccccgtggccagagcccacatctttcggaagtgggcaggaggcaagtcagggtgcctggtccagtgcagctgcagctgctgcaacacaacccccgggcgttcctgctccagctctgccaacactcgctgcccctcctcagcccacgtcaaggcctccctgaagagctgaaacagcctctcagcatccgccagccgctggcaccgctgggccaaagccctagagaattcagtcagctgggctcgcagggccagaaagcgtgccccaggggggtccagttcagccgcctcccagccagtcagcggctgcagaaacttctccccttgcctgacctgctcctgggcaacctggtacagctcctgaaaagagccttgggcctggagcagcatgtccagcgagggctccccagcctcctccagtgctggccagcccacctgctgcagccacacttcaatctggtgcagtccgctttcccgggcctccagtgtttggaccaactctagggcctgtattcgctggttgctctgcagggtcagttggtgcagcaatccatccacccggtcatatagctcgtcagccttgtccattgccgtcctgtagtctgggctcagggtcacctctgggacctcttgcttcagccatgtcagctcccggcccccctggcattgtagccatgccagccatggcgagtctagcacctgctgcatcaggacctctgtctgctgtagcagctgaccgacctccccaggctccatgggctggggcacagccttcacactttcgatggccccctggagcagggcacaagctgcctggcagttctgtagtagagcttccagccgccttcggaaatccagccaggcctggtggcagtaaggcaggcctcctcctagcgaagtgggcagccccgccgttgggatgtgggtcagcaggctctgagaaggcaactgctccagctgcagcccggaaggcacttccttcagcagcgtgcttcccactagcagcacctggtacac

SEQ ID NO: 74159 - DNA, 467 bp, Homo sapiens; identical to SEQ ID NO: 64446

SEQ ID NO: 74160 - DNA, 1229 bp, Homo sapiens; identical to SEQ ID NO: 64447

SEQ ID NO: 74161 - DNA, 525 bp, Homo sapiens; identical to SEQ ID NO: 64448

SEQ ID NO: 74162 - DNA, 1065 bp, Homo sapiens; identical to SEQ ID NO: 64449

SEQ ID NO: 74163 - DNA, 974 bp, Homo sapiens
agcggccgcgatgggtggcgccatggtcctgctctatgccagccgggcctgctacaacctgacagcactggccttggccccccagagccggctggacaccttcgattacgactggtacaatgtgtctgaccaggtgggcatacgcatgtctgccacctccttagtagccgtggcaccttggccccagctggcctgggcccttgtcccactacccctttggcgtgactgcagactggcaccagcccctgccttcccacaggcggacctggtgaatgacctggggaacaaaggctacctggtatttggcctcatcctcttcgtgtgggagctactgcccaccaccctgctggtgggcttcttccgggtgcaccggcccccacaggacctgagcaccagccacatcctcaatgggcaggtctttgcctctcggtcctacttctttgaccgggctgggcactgtgaagatgagggctgctcctgggagcacagccggggtgagagcaccagtatgtcgggcagtctaggctctgggagctggtatggtgccatcgggcgtgagccgggctggtatgggggcagccagacgaagaccactcctctgctcttctcccaggtgccaggaccaggcggccaccaccacagtctctactccaccccacagacgtgatccccctccctcccccacagaatacccaggccccagtccccctcaccctaggcccctgtgccaagtttgtctgccgcttcttgcccaggatcctgggggtcgtggctaccccctcctctggccggctccttgctgctcctgtcatagtgagcttgtgccgtccccctaggatggggggcatggccctggctgccagatgcccacagcaccctggcatgacctgccacctctgcttccacaccggagccagctacctctcctgtgcctgccactcaataaacagtgtctgcgccccacaaaaaaaaaa

SEQ ID NO: 74164 - DNA, 2398 bp, Homo sapiens; identical to SEQ ID NO: 64450

SEQ ID NO: 74165 - DNA, 778 bp, Homo sapiens; identical to SEQ ID NO: 64451

SEQ ID NO: 74166 - DNA, 1824 bp, Homo sapiens; identical to SEQ ID NO: 64452
  misc_feature (1)...(1824): n = a,t,c or g

SEQ ID NO: 74167 - DNA, 2399 bp, Homo sapiens; identical to SEQ ID NO: 64453

SEQ ID NO: 74168 - DNA, 2799 bp, Homo sapiens; identical to SEQ ID NO: 64454

SEQ ID NO: 74169 - DNA, 2261 bp, Homo sapiens
ccaacttcaagtgggagttcacattgctgacgtgagttactttgttccggagggatctgatctggataaagtggctgccgagagggctacaagcgtctacttggttcaaaaggtggtccccatgcttcccaggctgctgtgcgaggagctgtgcagcctcaaccccatgtccgacaagctgaccttctctgtgatctggacactgactccagagggcaagatccttgatgaatggtttggccggaccatcatccgctcctgcaccaaacttagctacgagcatgcacagagcatgattgaaagcccaactgagaaaatccctgcgaaagagctgccccccatttccccagagcatagcagcgaggaggtacaccaggccgtcttgaatctccacggaattgccaagcagttacgccagcagcgctttgtggacggcgcacttcgtttggatcagctaaagcttgctttcactctggaccacgagaccggattgcctcaaggatgtcatatctatgagtaccgcgagagcaacaagctcgtggaggagttcatgctcttggccaacatggcagtggcccacaagatccaccgcgccttccccgagcaggccctgctgcgccggcaccccccgccccaaacaaggatgctcagtgacctggtggaattctgcgaccagatggggctgcccgtggacttcagctccgcaggagccctcaataaaagcctgacccaaacatttggagatgacaagtactcactggcccgcaaggaggtgctcaccaacatgtgctcccggcccatgcagatggcactgtacttctgctcggggctgctgcaggacccagcgcagttccggcactacgcgctcaatgtgcccctgtacacacacttcacctcgcccatccgccgctttgccgacgtcctggtgcaccgcctcctggctgccgcgttaggctatagggagcgactagacatggcgcccgataccctgcagaaacaggcggaccactgtaacgaccgccgcatggcgtccaagcgcgtgcaggagctcagtaccagtctcttctttgctgttctggtcaaggagagtggccccctggagtcagaagccatggtgatgggcatcctgaagcaagccttcgacgtgctggtgctgcgctacggcgtgcagaagcgcatctactgcaacgcactggccctgcggtcccaccacttccagaaggtgggcaagaagccggaactcacgctggtctgggagcctgaggacatggagcaggagccagcacagcaggtcatcaccatcttcagcctggtggaggtggtcctgcaggcagagtccacagccctcaagtacagcgccatcctgaagcggccaggcacccagggccacctgggccctgagaaggaggaggaggagtctgacggtgagcccgaggactcaagcaccagctgagctccaccagccgcctgccccgcctgccccgcctgcctgtcccgccacactggctttaggacctgttgacacggaggggggtttttaatttggtttttaacaactcaggggtttgtttttatttttatttaatttttgcagctcaacttttaaacaaactgcaggggagagggtggggctggaaggaaggctgaggcctggtcagcagtgaccccagcagagcaggccccagtcctcctgggaggctggcccccctttttttctgggccctactgccctcctctgcccaggaaatgggggggtttcagcaactcagtgtcacagaataaaatcaagtgtggagtgccatctggtgtgtagggcgcctctgggaagcctgggcagcagaatgccccttgcacccagggcaagggacccagttcaggcttcacccctcgctgctgagccgatgtcaacacctggaactttcctgtcagttccaacacgattcagagctggctgcctggcagatgattgatactggagtctcattctgcctgattaaaaatggaattagtatgcaacactgagagcgcccccatcaccctgacgaatgtgactgtgtctgacgaatgtgactgtgtccaaccctgcccccacttcctctctgcaccagctccgcagggcctggtgggagtcatgggtcctgtgataccccctcccctcagttcctcaagcagcactctgtgaggtcctgtgcccagctctggtgtgagtgggtgccccggcagcaccaagggagcctggacagaggagccggcctgggctg

SEQ ID NO: 74170 - DNA, 526 bp, Homo sapiens; identical to SEQ ID NO: 64456

SEQ ID NO: 74171 - DNA, 1115 bp, Homo sapiens; identical to SEQ ID NO: 64457

SEQ ID NO: 74172 - DNA, 1669 bp, Homo sapiens; identical to SEQ ID NO: 64458

SEQ ID NO: 74173 - DNA, 913 bp, Homo sapiens
ttcactgcagaagaaggggacttgtggtttaccttgagagggaacgcccccgttcaggttcacttcctggatccttactgctctgcctcggtggcaggagcccgggaaggagattatattgtctccattcagcttgtggattgtaagtggctgacgctgagtgaggttatgaagctgctgaagagctttggcgaggacgagatcgagatgaaagtcgtgagcctcctggactccacatcatccatgcataataagagtgccacatactccgtgggaatgcagaaaacgtactccatgatctgcttagccattgatgatgacgacaaaactgataaaaccaagaaaatctccaagaagctttccttcctgagttggggcaccaacaagaacagacagaagtcagccagcaccttgtgcctcccatcggtcggggctgcacggcctcaggtcaagaagaagctgccctcccctttcagccttctcaactcagacagttcttggtactaatgtgaggaaacaaacatgttcaggccccgaacatttccggtgctgactcggccttaaacgtttgtgccataatggaaaatatctatctatctgttctcaaatcctgtttttctcatagtgtaaactcacatttgatgtgtttttatgaaggaaagtaaccaagaaacctctaggaattagtgaaaaaagaacttttttgaggtgtgttactatactgctgtaagttatttattatataaagtattgtaaatagaatagcgttgaagatatgaaatatggctatttttaatggtgacaattatgacttttagtcactattaaattggggttacctatatcagtacaatttgtagttgtttccaggtttggctaataatcattccttaacctagaattcagatgatcg

SEQ ID NO: 74174 - DNA, 686 bp, Homo sapiens; identical to SEQ ID NO: 64460

SEQ ID NO: 74175 - DNA, 1642 bp, Homo sapiens; identical to SEQ ID NO: 64461

SEQ ID NO: 74176 - DNA, 1137 bp, Homo sapiens; identical to SEQ ID NO: 64478

SEQ ID NO: 74177 - DNA, 1839 bp, Homo sapiens; identical to SEQ ID NO: 64479
  misc_feature (1)...(1839): n = a,t,c or g

SEQ ID NO: 74178 - DNA, 459 bp, Homo sapiens; identical to SEQ ID NO: 64480

SEQ ID NO: 74179 - DNA, 774 bp, Homo sapiens; identical to SEQ ID NO: 64481

SEQ ID NO: 74180 - DNA, 1806 bp, Homo sapiens
aagacatcagaatttgtatgtgatccatacaatattattttttagtatgcttttagcaaacaaactcactggtctttctttactattaataatgtgctaattttgtatttgagtttctgatcaaactttttattcctttgtcatcttttcctactttaatggatcgagaagtggcgttgcttgctgaaatggacaaagtgaaagctgaagcaacactttgttagtgaacgtaaatatgatgaggatctgggacgagtagcccggttcacctgtgatgtagagaccctaaagaagagcattgattcatttggacaagtgtctcatccaaagaacagctattcgaccagatcccgatgtagctcagttacatctgtgtccttgagtagcccaagtgatgcctctgctgcttcctcttccacctgtgcctctcctcccagccttacaagtgctaacaagaaaaactttgcaccgggagagactcctgcagccatagcaaactccagtggccagccctaccagccacttcgggaggtattgccagggaacagacgaggaggacagggctataggccacaaggccaaaagtccaatgaccccatgaaccaagggcggcatgacagtatgggtcgttacagaaacagctcgtggtattcatctggttccaggtatcagagtgctccatctcaggcaccaggaaacaccattgaaagaggccagactcactctgcagggaccaatggaactggagtcagcatggagcccagccctcccacgccttcattcaaaaaggggctcccccagcgcaaacccaggacctctcagactgaagccgtgaactcttgagagaaaatccagttggcctctctcctctatccacacaattcaacttgataactggactttaggaaacttacagttagatgtaataacaaaaagaagtttatgcgtatcactttttgtgccattctaagtatttttggtttcttgtctccttatttcctctttaccatttttggaggggaagctattttttttccttgatctttcccagtgatatggattgaatctggttggtcatttccaccaggaatcagaggcagctgttaccaggtttcggccttccagttgatccctccactgtccaggctgtctcaggaggaggtgaatcagagctagtctgtcacctttccaatctaagccgaagccacaggtgcctgacaggttcccttctaacaactatttgaccaagagaggcaatcagggggttgtatactgcactggattcgccagagaagggaaaatttaattagtgaaaaggaaagaacactaggaaacatttgagaacctgcctctatcccagaatgtgctggagatttgacactcaaatcagtgtttagtcttctgcttggcaccatagcttaacctgcagtttcttcaaaatgcccaatgccttgtttcctattaccttagattgcaaaccagtctagggaagtctatgagaaagtagcatttaattaaagtttaaaaaaaaaaaggttgggcgttgtggctcatgcctgtaatcccagcactttgggaggctgaggcgggtggatcactaggtcaggagttcaagaccagcctggccaacatggtgaaaccctgtctgtactaaaaatacaaaaattagctgagcatggtggcgtgtgcctgtaatctcagctactcaggaggctgaggcaggagaatcgcttgaacccaggaggcggaggctgcagtgagctgagattgtgccactgcactccagcctgggagacagagcaagac

SEQ ID NO: 74181 - DNA, 1784 bp, Homo sapiens
ccagctgccaggcaccttgtaaatacatggtgccgggcagctggccatgactcatccaagtcatcatttaaattttggaatgaatcctgatcatgccaggaattcattatctaactgtggaattcggcagcccaaatacggagacagaaaagttcatcacatgcacatgcggaagaaagggattaacaccttgataaatatcatgtcacgccttggccaagatgacccaactccctcgaggattaaccacaatgaacggttggaattcctgggtgatgctgttgttgaatttctgaccagcgtccatttgtactatttgtttcctagtctggaagaaggaggattagcaacctatcggactgccattgttcagaatcagcaccttgccatgctagcaaagaaacttgaactggatcgatttatgctgtatgctcacgggcctgacctttgtagagaatcggaccttcgacatgcaatggccaattgttttgaagcgttaataggagctgtttacttggagggaagcctggaggaagccaagcagttatttggacgcttgctctttaatgatccggacctgcgcgaagtctggctcaattatcctctccacccactccaactacaagagccaaatactgatcgacaacttattgaaacttctccggttctacaaaaacttactgagtttgaagaagcaattggagtaatttttactcatgttcgacttctggcaagggcattcacattgagaactgtgggatttaaccatctgaccctaggccacaatcagagaatggaattcctaggtgactccataatgcaactggtagccacagagtacttattcattcatttcccagatcatcatgaaggacacttaactttgttgcgaagctctttggtgaataatagaactcaggccaaggtagcggaggagctgggcatgcaggagtacgccataaccaacgacaagaccaagaggcctgtggcgcttcgcaccaagaccttggcggaccttttggaatcatttattgcagcgctgtacattgataaggatttggaatatgttcatactttcatgaatgtctgcttctttccacgattgaaagagttcattttgaatcaggattggaatgaccccaaatcccagcttcagcagtgttgcttgacacttaggacagaaggaaaagagccagacattcctctgtacaagactctgcagacagtgggcccatcccatgcccgaacctacactgtggctgtttatttcaagggagaaagaataggctgtgggaaaggaccaagtattcagcaagcggaaatgggagcagcaatggatgcgcttgaaaaatataattttccccagatggcccatcagaagcggttcatcgaacggaagtacagacaagagttaaaagaaatgaggtgggaaagagagcatcaagagagagagccagatgagactgaagacatcaagaaataaaggagggcatgcaagtgtggagtatttacttgctcagtaactgtgactgttgtctattgagacctagcctagttttcctgcagacaatgaacgaagtgtgctcattgaaataaaatacagagtcaaatcgctattgttgttttaatgatctgtttttagctggatggtctttattacaaagtattagatttttcttctatttaacggaaaacttgactttggtgaatgtgcattacttccttttattttgctctttaaataataaaattcaagaagcatattctatgtggaaaaaaaaaaa

SEQ ID NO: 74182 - DNA, 843 bp, Homo sapiens; identical to SEQ ID NO: 64482
  misc_feature (1)...(843): n = a,t,c or g

SEQ ID NO: 74183 - DNA, 851 bp, Homo sapiens; identical to SEQ ID NO: 64483

SEQ ID NO: 74184 - DNA, 662 bp, Homo sapiens; identical to SEQ ID NO: 64484

SEQ ID NO: 74185 - DNA, 1127 bp, Homo sapiens
ggcgtagcctaagcgtgggattccgcgcgtgcgctcggctccgcctggtgcggccgcggccgggagggactggattatgtcggccccgtttgaggagcggagtggggtggtaccgtgcgggaccccgtggggccagtggtaccagaccttggaggaggtgttcattgaagttcaggtgccgccaggcacgcgcgcccaggatatccagtgcggcctccagagccggcatgtggcgctgtcggtgggcggccgcgagatcctcaagggcaaactctttgattctacaatagctgatgagggaacatggactttggaggacagaaaaatggttcgtattgttcttacaaagacaaagagagatgcagcaaattgttggacttctctactagaatctgaatatgcagcggatccttgggtgcaagaccaaatgcagagaaagcttacattagagagattccaaaaagaaaatcctggttttgacttcagtggagcagaaatctcaggaaactacactaaaggtggaccagatttctcaaaccttgagaaataactgctttttttcctgcattctgtggatcctagcagatattgccaacttaatcagataaacagattatgtaatggaagaaaaatgcggatgcctacagttaacagattgcaaaatgtatcttaaaatggttctaaaaattgcattcaaacataatttacataggaaatgtactgtgggaactattctatggatatatggtaaagttgttttggacttgtttttgctcagcatgaagttttatatgctgcattttactaattccatatttaaccatatttttaatacaaaagaacattagagtatagatcatgtgaaatgaagggtgcctttggggaaaattaactttttcttttgataagtatgatattcaataaaattttctaaataggaattgtgtacccctttgtctaagtataacaattcacacaaaattatagtgctgaaaacaattttaataaaggaaaaagttaattttccccaaaggcacccttcatttcacatgatctatactctaatgttcttttgtattaaaaatatggttaaatatggaattagtaaaatgcagcgtcgacgcggg

SEQ ID NO: 74186 - DNA, 1978 bp, Homo sapiens; identical to SEQ ID NO: 64486

SEQ ID NO: 74187 - DNA, 1594 bp, Homo sapiens; identical to SEQ ID NO: 64487

SEQ ID NO: 74188 - DNA, 1077 bp, Homo sapiens; identical to SEQ ID NO: 64488

SEQ ID NO: 74189 - DNA, 375 bp, Homo sapiens; identical to SEQ ID NO: 64489
  misc_feature (1)...(375): n = a,t,c or g

SEQ ID NO: 74190 - DNA, 1538 bp, Homo sapiens; identical to SEQ ID NO: 64490

SEQ ID NO: 74191 - DNA, 426 bp, Homo sapiens; identical to SEQ ID NO: 64491

SEQ ID NO: 74192 - DNA, 5205 bp, Homo sapiens; identical to SEQ ID NO: 64492

SEQ ID NO: 74193 - DNA, 2494 bp, Homo sapiens; identical to SEQ ID NO: 64493

SEQ ID NO: 74194 - DNA, 683 bp, Homo sapiens; identical to SEQ ID NO: 64494

SEQ ID NO: 74195 - DNA, 393 bp, Homo sapiens; identical to SEQ ID NO: 64495

SEQ ID NO: 74196 - DNA, 1838 bp, Homo sapiens; identical to SEQ ID NO: 64496

SEQ ID NO: 74197 - DNA, 1646 bp, Homo sapiens; identical to SEQ ID NO: 64497

SEQ ID NO: 74198 - DNA, 1746 bp, Homo sapiens
gcggccgcctactggagacactccctcccgcctcccgggtctcctggcggcggcggagtgaggctgacagcgtgggaacctgtggagacccctccgccctccccgcggtggcagcggccgatccccggctccggcgcgagacgacggccgcgatgcgctcggcctgaggttacccgggcccgcccctttcctcgcttccctcgactattccactgcgtctccgcgccccggcgtcatcctgcgagtccctctgacgggagggaagatggctgcacggagctggcaggacgagctggcccagcaggccgatggagggctcggccggacatgcgggaaatgctctcggtcggcctaggctttctgcgcaccgagctggggcctcgaccttggggctggagccgaaacggtaccccggctgggtgatcctggtgggcactggcgcgctcgggctgctgctgctgtttctgctgggctacggctgggccgcggcttgcgccggcgcccgcaaaaagcggaggagcccgccccgcaagcgggaggaggcggcggccgtgccggccgcggcccccgacgacctggccttgctgaagaatctccggagcgaggaacagaagaagaagaaccggaagaaactgtccgagaagcccaaaccaaatgggcggactgttgaagtggctgagggtgaagctgttcgaacacctcaaagtgtaacagcaaagcagccaccagagattgacaagaaaaatgaaaagtcaaagaaaaataagaagaaatcaaagtcagatgctaaagcagtgcaaaacagttcacgccatgatggaaaggaagttgatgaaggagcctgggaaactaaaattagtcacagagagaaacgacagcagcgtaaacgtgataaggtgctgactgattctggttcattggattcaactatccctgggatagaaaataccatcacagttaccaccgagcaacttacaaccgcatcatttcctgttggttccaagaagaataaaggtgattctcatctaaatgttcaagttagcaactttaaatctggaaaaggagattctacacttcaggtttcttcaggattgaatgaaaacctcactgtcaatggaggaggctggaatgaaaagtctgtaaaactctcctcacagatcagtgcaggtgaggagaagtggaactccgtttcacctgcttctgcaggaaagaggaaaactgagccatctgcctggagtcaagacactggagatgctaatacaaatggaaaagactggggaaggagttggagtgaccgttcaatattttctggcattgggtctactgctgagccagtttctcagtctaccacttctgattatcagtgggatgttagccgtaatcaaccctatatcgatgatgaatggtctgggttaaatggtctgtcttctgctgatcccaactctgattggaatgcaccagcagaagagtggggcaattgggtagacgaagaaagagcttcacttctaaagtcccaggaaccaattcctgatgatcaaaaggtctcagatgatgataaagaaaagggagagggagctcttccaactgggaaatccaaaaagaaaaaaaaagaaaaagaagaagcagggtgaagataactctactgcacaggacacagaagaattagaaaaagagattagagaagaccttccagtgaatacctctaaaacccgtccaaaacaggaaaaagctttttccttgaagacc

SEQ ID NO: 74199 - DNA, 3172 bp, Homo sapiens; identical to SEQ ID NO: 64499

SEQ ID NO: 74200 - DNA, 5618 bp, Homo sapiens; identical to SEQ ID NO: 64500

SEQ ID NO: 74201 - DNA, 2291 bp, Homo sapiens
cccacgcgtccgataaaaaatgtttgtcatctactattcaagacaatcattatttttctggaaattgtatctgttttcaaggttatatgtaaagtgttaagacaatatcctataaaatgcatttttaggaagttttgcattactttcttcctaagtcttggtaaagttatataattagtaccttgaaaaaaataaagtgaaaagccttttggggactttagactttagtgtttaaatgtaattatttttatttgtttttggtttattttttatttttattttttttggccgtggttataatcttcagcatctgcaagaaggacgaaaagctcaacaatatcttgacatgtgctggaaacagatggataatagtaaaaagaagtttgaaagagaatgtagagaggcagaaaaggcacaacagagttatgaaagattggataatgatactaatgcaaccaaggcagatgttgaaaaggccaaacagcagttgaatctgcgtacgcatatggccgatgaaaataaaaatgaatatgctgcacaattacaaaactttaatggagaacaacataaacatttttatgtagtgattcctcagatttacaagcaactacaagaaatggacgaacgaaggactattaaactcagtgagtgttacagaggatttgctgactcagaacgcaaagttattcccatcatttcaaaatgtttggaaggaatgattcttgcagcaaaatcagttgatgaaagaagagactctcaaatggtggtagactccttcaaatctggttttgaacctccaggagactttccatttgaagattacagtcaacatatatatagaaccatttctgatgggactatcagtgcatccaaacaggagagtgggaagatggatgccaaaaccacagtaggaaaggccaagggcaaattgtggctctttggaaagaagccaaagggcccagcactagaagatttcagtcatctgccaccagaacagagacgtaaaaaactacagcagcgcattgatgaacttaacagagaactacagaaagaatcagaccaaaaagatgcactcaacaaaatgaaagatgtatatgagaagaatccacaaatgggggatccagggagtttgcagcctaaattagcagagaccatgaataacattgaccgcctacgaatggaaatccataagaatgaggcttggctctctgaagtcgaaggcaaaacaggtgggagaggagacagaagacatagcagtgacataaatcatcttgtaacacagggacgagaaagtcctgagggaagttacactgatgatgcaaaccaggaagtccgtgggccaccccagcagcatggtcaccacaatgagtttgatgatgaatttgaggatgatgatcccttgcctgctattggacactgcaaagctatctacccttttgatggacataatgaaggtactctagcaatgaaagaaggtgaagttctctacattatagaggaggacaaaggtgacggatggacaagagctcggagacagaacggtgaagaaggctacgttcccacgtcatacatagatgtaactctagagaaaaacagtaaaggttcctgaagagggtttctgaggaaatgggcaagatgttgaaggaggttacatgcagctgcttttgggggagggtattagagttgtcaggctcaaagagagtgagagaagcaagttgcatgagtgcatgcagacatgattttttttttactaacttcattagcatttccatacattgtttttaaaaatcataataccaacccttaagttcctagttcacagttattcccacaaaagaaaaagccaacaatagtgtaccatttttctattttattttattgctgtctaatcaataaagaatgcagagctgtcaaaaaatgtgtcttacatttagctgtcccaacagggattgtcttccctcccagctctggttttaattggcttttagacccactatctgtcagatccttgccatctgtcagtgtctgcctgcgccacctccgtgcttgcctaacatcctgttgcatgtctagcgtgattgagctagatttttcaggcatgtctttagattcccttgttcttgtcaaagccttgttttgttttacatttgtagtgcaaatcactttgtcaaacatctccagcactaatgtttccatcttagtatttgtgcacactgctataacttccccactgcaaacattccagttttggcattacgaagaagtagctgtgaacctgaagtatttatgat

SEQ ID NO: 74202 - DNA, 613 bp, Homo sapiens; identical to SEQ ID NO: 64502

SEQ ID NO: 74203 - DNA, 2423 bp, Homo sapiens
  misc_feature (1)...(2423): n = a,t,c or g
ttttttttttttgagagaattcataaatattagttaaggatctaaaacaaacttctcaaataactgaaagctgaaagcctctggaagccaactgtccctgcacaaaggtttacaattgagaaatatctcctgttcctattttgtcaagtttctttaatggctgaacagaaagaagcttcaagtaatggagaaggcattgtctgagtgcagctgctttcctgggacgcctgtgccgttcctgtcttccaaatcctatgcttgggaggcccctgggaggtacatttttgccagggaaccaacctgaccttaaaaagatgagtgtgacacagccggctgggcaggaggatggaggttgccacagggacaccacctggcccacgccctgggncagcctgggcatgttttgccgagttcgggggagggccaccccacccagagggcacagggcaaaccctaagcacgggggtattgcccttgaagccccaggggatgccctgtgccggatcctcatgcctcattgactagcctgcttgctgaaggagcccaggggcctgagcctgcaacactgcaaggggtgagaagggcatgctgctgtgggcgcactggactcaaacctcacattagaagctacaaagaaccccaaatgcgcttcagagccccaccaacccccaagccaggctcatccctgacacagtgaatccactgcagcccccgtgggaaactctgtgccaattgactgcttaaagaactgggggaaatagaaagccgagaaagagctccgatacacaagggaaaccgcacgtgagaaccagcactcccagcagggagacgtcactctccagaggccacagagatggcagacacctctgtctccacaatgaccccacatccnaactgaaagtgtgcaggaagacaggtctattgacactgaaatctagaaatcaaggtccacaggcgaatggaggcatcttcagccctgaggaggccaggctgtgtctcctgacgcccctgagggtgggcacagcagccagctctgtgtgggcggagtccacgtggtcctcattctcttccctggggacagggcagcacagtcagatgctgagactgaggccacacacatgggggcgccttcctgccttggcccggcccagctgcctctggagccaggaggccgtggcagccacaccacagtgtggatccagacacgattctgtggaggggttccgggattccagacagactgaatctccatggaatgatgaaaattaaaatttacttgattatggaagtctctgatttattccagccaaaatattagatgagccactgagaatcaccacaaagcaatcgccctcacggcccttgccagggtgacggcacagcaggaggacaggtgcccaggccagtggttctagctcttcacctctgcgacctccttctctgccttctctttggccttctccttctcctccaccttctcctctttttccagtgttgctacaatctcagccacctggctggtggagatgtgaacatcttctttgtccaccagctcaatcaccttgacgaggtcgtcgatgttgaccttgccatccttgttttcatccagtgctgcggccaggctggtgagcttgctttcgggaatgtgcttgacttgcttcatggcgttgatgagctcagcgacactgatgacgttctcccccgtgggcatgccgttggccggggccagcttgccagcctgctggtccatctccagctgcgagatcaagccatcgatctgcccgatcatttgctgcaccctttttgtcaatctcttgctggctttagattcttccacgtatttttcttcaccagtctttgaaagttccttcttgatctcctgcaagtcctcgctgtagtcctgcacatcctccttcagcagctccagctcctccttctccttggtgagtgacttcttctgctcctgcagcttagagcaggcatcgctgaggatgtcgatttcctccttcgtgatctcttcctccttcaagccctccagcaccggggcagtgtccttcaaggtctctgactgcaggactgtgtcaggcatttctggctgtggctcggtccccggcctttggggagcagctaccacacgttcgggctcaaaatccttctgaaaggcaaggcgacaccagcccagcgcccgccatcacacagaagcagtcttcttgctccccgaagctcagaacatatggcagaggccacactgggagcaggcctgcaggtgacattgggcagcacacctgccacagaaggtccctagggaggctccatgcagctgccaggtcacctggggccctctccagaacaggctagagcaccttatccatctctggtctccccaagactcccccaagctgccctgtcacttgcagagcagg

SEQ ID NO: 74204 - DNA, 2266 bp, Homo sapiens; identical to SEQ ID NO: 64504

SEQ ID NO: 74205 - DNA, 1041 bp, Homo sapiens; identical to SEQ ID NO: 64505

SEQ ID NO: 74206 - DNA, 1698 bp, Homo sapiens; identical to SEQ ID NO: 64506
  misc_feature (1)...(1698): n = a,t,c or g

SEQ ID NO: 74207 - DNA, 2185 bp, Homo sapiens
ttttttttttttgagtttccaaaattagaatttatttcagtttctaaggaatgaatccccgagtgtggcaggaaggacacagccggctcctgacgcacacctgatttgattcaacaccgagtcggcacagacacaaccagagatggcctgggtccaggctggggctgcacgggctgtgtcctggacagccaggagggaggccccgcacacagacggccgccgggcagggggcctgagcgggacaggcctggccacagcccatgtccttggccttccacataggtgcacacattgtctgcccagagagggccaagatgccccaggcaccccttcgctccgggggctcaggacacaggctcccagctgaggccacgcctggacccagagctgatgtttggctgcacgcgagcccactcgggacagacccaagaacacgaattctgtccctttggatttaaggctggtgttttttgacatttacttcagtttttctctctgaaattaaaattacctgagtaaaagattttaagacattaaaaaagccaaaaacacagaatccctgcaggcagacggtgccagggaggtggcggccagggccaggatgccaggggcacggtggggtcggctggagctccagggctgggcctttcccagtctcgcctgccctggagcccccaggagccgcccctgggccgacgctcctgtggccggagcacaggaaggcacagtgaggtagggacagtggccattgtcccccgcctgccaccagggctgagagggcagcgcacgcctcggcccctcctataagcccctgccccctcggagctgggtgtcttgtccagaagccggggaacggcccctgcagtgtgggaggggaggggctgccgggaggcctgagctcagacagttaaataatcctttatttgggtgggctgggggaggggtgactggcccaggagggcaggcgaggccgggcccagacccccatggggggtggcaggggcctcgggcgggctaggatgcacctggcacccagaagtgccgcgggggcactggctcctcaggggcccgagcgggcggggagcagtctcctacttgtgccgggcctcggtcaccctctgcaggcagtactgcgcggcgggcagcgacaggaccaggctcgcggtgcggcggcccatccagtacaggctgtagcccagcaggccgaagaaggcggccttcacggccaaccgagacactctgccggagacggacggcgggggcacggtcatgatctcctggatgttgaggtcggtgctccagttcttctcgatgccaggcacgtggcccatgcccacgacgcccacgaccacggaggggacgcacttcctgggctcggcgtcagaggcccgaggcagctcgaggcgccgcgcggcctggcgcagcatgtaggttaggtagacgtcgcgctccgagacgatggtgcggtgcaggtctgggaactcgccaatcatctcggccatcatctgctccagtaggtccttctgcttgcagcgttccacgtcatccttgctgatggggtctgacaggaagcacaggccccaagccagcctgaccttctgccagaaggagagcgctgcgatggccctcttgaaggtgacggggatgggtcggtcacccaggtggaacttgcagaaaggcaccttgctggcctccttgaaggcctccctgaactcgccacctggggccatgcccagctgctcggtgatgtgtgcagacaccttcagcagcagcatctgcatcagccccgacatgagcccgttctgcctcacggcctgctgcagcttctccaggctgagctcctgggcctcccgcagcagcgtgctctcgtccatcttcagcatggacacacgatattggcagagctccacgaccaccacgtcaggctgcacctcccggatggtcttcacaacgtccctcttgctgtcgtcgctgaagtgggctgtccccaccacgtacaccctgctcccgtcctcagccaccaactgggtcacagtgcgcggcaggttgggccgctgacgccgccgcttcagcttcatctccaggagcaggttgaaggcgtccacgtcggacaggttctgggggtctccagaaagcaccctgggcaccggctctgaagccacgaaatcgtcgacccgggaattcc

SEQ ID NO: 74208 - DNA, 411 bp, Homo sapiens; identical to SEQ ID NO: 64508

SEQ ID NO: 74209 - DNA, 2065 bp, Homo sapiens; identical to SEQ ID NO: 64509

SEQ ID NO: 74210 - DNA, 2276 bp, Homo sapiens
gaagagtgtgcgccagggggctgcctgatggagctatgcatccagctcagcatcgtcatgctggggaaacagctgatccagaacaacctgttcgagatcggcatcccgaagatgaagaagctcatccgctacctgaagctgaagcagcagagcccccctgaccactaggagtgtgtgaagaggaaacagcggtacgaggtggattacaacctggagcccttcgcgggcctcaccccagagtacatggagatgatcatccagtttggcttcgtcaccctgtttgtcgcctccttccccctggccccactgtttgcgctgctgaacaacatcatcgagatccgcctggacgccaaaaagtttgtcactgagctccgaaggccggtagctgtcagagccaaagacatcggaatctggtacaatatcctcagaggcattgggaagcttgctgtcatcatcaatgccttcgtgatctccttcacgtctgacttcatcccgcgcctggtgtacctctacatgtacagtaagaacgggaccatgcacgggttcgcaaccacaccctctcctccttcaacgtcagtgacttccagaacggcacggcccccaatgaccccctggacctgggctacgaggcgcagatctgcagggtataaagactaccgagagccgccgaggccggaaaacaagtacgacatctccaaggacttctgggccgtcctgtgcatccggctggcagttgtgatcgtcttccagaacctggtcatgttcatgagcgactttgtggactgggtcatcccggacatccccaaggacatcagccagcagatccacaaggagaaggtgctcatggtggagctgttcatgcgggaggagcaagacaagcagcagctgctggaaacctggatggagaaggagcggcagaaggacgagccgccgtgcaaccaccacaacaccaaagcctgcccagacagcctcggcagcccagcccccagccatgcctaccacgggggcgtcctgtagctatgccagcggggctgggcaggccagccgggcatcctgaccgatgggcaccctctcccagggcaggcggcttcccgctcccaccagggcccggtgggtcctgggttttctgcaaacatggaggaccactttctgataggacattttcctttcttctttctgttttctttcccttgtttttgcacaaagccattatgcagggaatattttttaatctgtagtattcaagatgaatcaaaatgatggctggtaatacggcaataaggtagcaaaggcaggtgctttgcagaaagaatgcttggaaacttgagtctccctagaggtgaaaagtgagcagaggcccctagaaaccctcctctgaatcctcctaattccttaagatagatgcaaaatggtaagccgaggcatcgcgcaaaagctggtgcgatgcttcagggaaaatggaaaacccacgcaagaataatgattgattccggttccaaaaggtgtcacctacctgtttcagaaaagttagactttccatcgccttttccttccatcagttgagtggctgagagagaagtgcctcatccctgagccacacagggggcgtgggagcatcccagttatccctggaaagctagaaggggacagaggtgtccctgattaagcaggaaacagcacccttggcgtccccagcaggctccccactgtcagccacacacctgcccccatcacaccaagccgacctcagagttgttcatcttccttatgggacaaaaccggttgaccagaaaatgggcagagagagatgacctcggaagcatttccacagatggtgtcagggtttcaagaagtcttatggcttccaggggtcccctggaagctttagaatatttatgggttttttttttcaaatatcaattatatggtagattgaggattttttttctgtagctcaaaggtggagggagtttattagttaaccaaatatcgttgagaggaatttaaaatactgttactacccaaagatttttattaataaaggcttatattttggtaacacttctctatatttttactcacaggaatgtcactgttggacaattattttaaaagtgtataaaaccaagtctcataaatgatatgagtgatctaaatttgcagcaatgatactaaacaactctctgaaatttctcaagcaccaagagaaacatcattttagcaaaggccaggaggaaaaatagaaataaatttgtcttgaagatctcaaaaaaaaa

SEQ ID NO: 74211 - DNA, 1547 bp, Homo sapiens; identical to SEQ ID NO: 64511

SEQ ID NO: 74212 - DNA, 863 bp, Homo sapiens; identical to SEQ ID NO: 64513
  misc_feature (1)...(863): n = a,t,c or g

SEQ ID NO: 74213 - DNA, 930 bp, Homo sapiens
ggaattcccgggtcgagggggaccgccttggggggctgtccatcagcccagcgggcatcgtgaagcgggatgagctggtgttccggatggtccgtggccgccgggtgcccatccttatggtgacctcaggcgggtaccagaagcgcacagcccgcatcattgctgactccatacttaatctgtttggcctggggctcattgggcctgagtcacccagcgtctccgcacagaactcagacacaccgctgcttccccctgcagtgccctgacccttgctgccctgcctgtcacgtggccctgcctatccgccccttagtgctttttgttttctaacctcatggggtggtggaggcagccttcagtgagcatggaggggcagggccatccctggctggggcctggagctggcccttcctctacttttccctgctggaagccagaagggcttgaggcctctatgggtgggggcagaaggcagagcctgtgtcccagggggacccacacgaagtcaccagcccataggtccagggaggcaggcagttaactgagaattggagaggacaggctaggtcccaggcacagcgagggccctgggcttggggtgttctggttttgagaacggcagacccaggtcggagtgaggaagcttccacctccatcctgactaggcctgcatcctaactgggcctccctccctccccttggtcatgggatttgctgccctctttgccccagagctgaagagctataggcactggtgtggatggcccaggaggtgctggagctaggtctccaggtgggcctggttcccaggcagcaggtgggaaccctgggcctggatgtgaggggcggtcaggaaggggtacaggtgggttccctcatctggagttccccctcaataaagcaaggtctggacctgcaaaaaaaaaa

SEQ ID NO: 74214 - DNA, 2614 bp, Homo sapiens; identical to SEQ ID NO: 64515

SEQ ID NO: 74215 - DNA, 2945 bp, Homo sapiens
ttttttttttttcctgcctgaatcagggagacccaggatgctgttcaggccttatcccaaccaaattgtgtacccaacagctcattgagaacaagccatgatgacaatggcggttttgtcaaatagaaaagggggaaatgtggggaaaagcaagagagatcagattgttactgtgtctgtgtagaaagaagtagacataggagactccattttgttctgtactaagaaaaattcttctgccttgagattctgttaatctataaccttacccccaaccccgtgctctctgaaacatgtgctgtgtcaactcagagttaaatggattaagggcggtgcaagatgtgctttgttaaacagatgcttgaaggcagcatgctccttgagagtcatcaccactccctaatctcaagtacccagggacacaaaaactgcggaaggccgcagggacctctgcctaggaaagccaggtattgtccaaggtttctccccatgtgatagtctgaaatatggcctcgtgggaagggaaagacctgaccgtcccccagcccgacacccgtaaagggtctgtgctgaggaggattagtaaaagaggaaggcatgcctcttgcagttgagacaagaggaaggcatctgtctcctgcccgtccctgggcaatggaatgtctcggtataaaacccgattgattgtacgttccatctactgagatagggaaaaaacgcctatctcacctatcaccgcctatcaccactccctaatctcaagtacccagggacacaaacactgcggaccactccctaatctcaagtacccagggacacaaacactgcggaaggccgcagggtcctctgcctaggaaaaccaggtattgtccaaggtttctccccatgtgatagtctgaaatacagcctcgtgggaagggaaagacctgactgtcccccagcccgacacccgtaaagggtctgtgctgaggaggattagtataagaggaaggcatgcctcttgcagttgagacaagaggaaggcatctgtctcctgcccgtccctgggcaatggaatgtctcggtataaaacccgattgtgcgttctatctactgagatagggaaaaaccgccttagggctggaggtgggacatgtgggcagcaatactgctttgtaaagcattgagatgtttacgtgtatgcatatctaaaagcacagcacttaatcctttaccttgtctatgatgcaaagacctttgttcacgtgtttgtctgctgaccctctccccacaattgtcttgtgaccctgacacatccccctctcggagaaacacccacgaatgatgaataaatactaagggaactcagaggctggcgggatcctccatatgctgaacgctggttccccgggtccccttatttctttctctatactttgtctctgtgtctttttcttttccaaatctctcgtcccaccttacgagaaacacccacaggtgtgtaggggcaacccacccctacatctggtgcccaacgtggaggcttttctctagggtgaaggtacgctcgagcgtggtcattgaggacaagtcgacgagagatcccgagtacatctacagtcagccttacgacatttgaagttctacaatgaacccatcagagatgcaaagaaaagcacctccgcggagacggagacatcgcaatcgagcaccgttgactcacaagatgaacaaaatggtgacgtcagaagaacagatgaagttgccatccaccaagaaggcagagccgccaacttgggcacaactaaagaagctgacgcagttagctacaaaatatctagagaacacaaaggtgaaacaaaccccagagagtatgctgcttgcagccttgatgattgtatcaatggtgtctgcaggtgtacccaacagctccgaagagacagcgaccatcgagaacgggccatgatgacgatggcggttttgtcgaaaagaaaagggggaaatgtggggaaaagcaagagagatcagattgttactgtgtctgtgtagaaagaagtagacataggagactccattttgttatgtactaagaaaaattcttctgccttgagattctgtgaccttacccccaaccccgtgctctctgaaacatgtgctgtgtcaactcagagttgaatggattaagggcggtgcaggatgtgctttgttaaacagatgcttgaaggcagcatgctccttaagagtcatcaccactccctaatctcaagtacccagggacacaaaaactgcggaaggccgcagggacctctgcctaggaaagccaggtattgtccaaggtttctccccatgtgatagtctgaaatatggcctcgtgggaagggaaagacctgaccgtcccccagcccgacacccgtaaagggtctgtgctgaggaggattagtaaaagaggaaggaatgcctcttgcagttgagacaagaggaaggcatctgtctcctgcctgtccctgggcaatggaatgtctcggtataaaacccgattgtatgctccatctactgagatagggaaaaaccgccttagggctggaggtgggacctgcgggcagcaatactgctttgtaaagcattgagatgtttatgtgtatgcatatctaaaagcacagcacttaatcctttacattgtctatgatgcaaagacctttgttcacgtgtttgtctgctgaccctctccccacaattgtcttgtgaccctgacacatccccctcttcgagaaacacccacaaatgatcaataaatactaagggaactcagaggctggcgggatcctccatatgctgaacgctggttccccgggtccccttatttctgtctctatactttgtctctgtgtctttttctttcctaagtctcttgttccaccttacgagaaacaccacaggtgtggaggggcaacaagagacttaggaaa

SEQ ID NO: 74216 - DNA, 741 bp, Homo sapiens; identical to SEQ ID NO: 64517

SEQ ID NO: 74217 - DNA, 1521 bp, Homo sapiens; identical to SEQ ID NO: 64518
  misc_feature (1)...(1521): n = a,t,c or g

SEQ ID NO: 74218 - DNA, 5840 bp, Homo sapiens; identical to SEQ ID NO: 64519

SEQ ID NO: 74219 - DNA, 1697 bp, Homo sapiens; identical to SEQ ID NO: 64520

SEQ ID NO: 74220 - DNA, 2577 bp, Homo sapiens
atttccatgaaatgggatcaagtggaggtgatcccatatattgcctgtgggaatgccagttctaacagctctgcgggtggccgcctggtatcctttgaagtgccacagaacacctcagtcaagattcggcaagatgccactgcctcactgattttgctctggaagggcacggccacaggattccaacagtgctccctcatagatggacgaagtgtgaccccccttcaggcttcagggggactggtcctcctggaggagatgctcgccttggggaataatcactttattggttttgtgaatgattctgtgactaagtctattgtggctttgcgcttaactctggtggtgaaggtcagcacctgtgtgccgggggagagtcacgcaaatgacttggagtgttcaggaaaaggaaaatgcaccacgaagccgtcagaggcaactttttcctgtacctgtgaggagcagtacgtgggtactttctgtgaagaatacgatgcttgccagaggaaaccttgccaaaacaacgcgagctgtattgatgcaaatgaaaagcaagatgggagcaatttcacctgtgtttgccttcctggttatactggagagctttgccagtccaagattgattactgcatcctaaacccatgcagaaatggagcaacatgcatttccagtctcagtggattcacctgccagtgtccagaaggatacttcggatctgcttgtgaagaaaaggtggacccctgcgcctcgtctccgtgccagaacaacggcacctgctatgtggacggggtacactttacctgcaactgcagcccgggcttcacagggccgacctgtgcccagcttattgacttctgtgccctcagcccctgtgctcatggcacgtgccgcagcgtgggcaccagctacaaatgcctctgtgatccaggttaccatggcctctactgtgaggaggaatataatgagtgcctctccgctccatgcctgaatgcagccacctgcagggacctcgttaatggctatgagtgtgtgtgcctggcagaatacaaaggaacacactgtgaattgtacaaggatccctgcgctaacgtcagctgtctgaacggagccacctgtgacagcgacggcctgaatggcacgtgcatctgtgcacccgggtttacaggtgaagagtgcgacattgacataaatgaatgtgacagtaacccctgccaccatggtgggagctgcctggaccagcccaatggttataactgccactgcccgcatggttgggtgggagcaaactgtgagatccacctccaatggaagtccgggcacatggcggagagcctcaccaacatgccacggcactccctctacatcatcattggagccctctgcgtggccttcatccttatgctgatcatcctgatcgtggggatttgccgcatcagccgcattgaataccagggttcttccaggccagcctatgaggagttctacaactgccgcagcatcgacagcgagttcagcaatgccattgcatccatccggcatgccaggtttggaaagaaatcccggcctgcaatgtatgatgtgagccccatcgcctatgaagattacagtcctgatgacaaacccttggtcacactgattaaaactaaagatttgtaatctttttttggattatttttcaaaaagatgagatactacactcatttaaatatttttaagaaaataaaaagcttaagaaatttaaaatgctagctgctcaagagttttcagtagaatatttaagaactaattttctgcagcttttagtttggaaaaaatattttaaaaacaaaatttgtgaaacctatagacgatgttttaatgtaccttcagctctctaaactgtgtgcttctactagtgtgtgctcttttcactgtagacactatcacgagacccagattaatttctgtggttgttacagaataagtctaatcaaggagaagtttctgtttgacgtttgagtgccggctttctgagtagagttaggaaaaccacgtaacgtagcatatgatgtataatagagtatacccgttacttaaaaagaagtctgaaatgttcgttttgtggaaaagaaactagttaaatttactattcctaacccgaatgaaattagcctttgccttattctgtgcatgggtaagtaacttatttctgcactgttttgttgaactttgtggaaacattctttcgagtttgtttttgtcattttcgtaacagtcgtcgaactaggcctcaaaaacatacgtaacgaaaaggcctagcgaggcaaattctgattgatttgaatctatatttttctttaaaaagtcaagggttctatattgtgagtaaattaaatttacatttgagttgtttgttgctaagaggtagtaaatgtaagagagtactggttccttcagtagtgagtatttctcatagtgcagctttatttatctccaggatgtttttgtggctgtatttgattgatatgtgcttcttctgattcttgctaatttccaaccatattgaataaatgtgatcaagtcaagggaaaaaaaaaa

SEQ ID NO: 74221 - DNA, 6152 bp, Homo sapiens; identical to SEQ ID NO: 64522

SEQ ID NO: 74222 - DNA, 2771 bp, Homo sapiens; identical to SEQ ID NO: 64523

SEQ ID NO: 74223 - DNA, 2629 bp, Homo sapiens
tttcgtctgggacgaggtggcccagcgctcagggtgcgaggagcggtggctagtgatcgaccgtaaggtgtacaacatcagcgagttcacccgccggcatccagggggctcccgggtcatcagccactacgccgggcaggatgccacggatccctttgtggccttccacatcaacaagggccttgtgaagaagtatatgaactctctcctgattggagaactgtctccagagcagcccagctttgagcccaccaagaataaagagctgacagatgagttccgggagctgcgggccacagtggagcggatggggctcatgaaggccaaccatgtcttcttcctgctgtacctgctgcacatcttgctgctggatggtgcagcctggctcaccctttgggtctttgggacgtcctttttgcccttcctcctctgtgcggtgctgctcagtgcagttcaggcccaggctggctggctgcagcatgactttgggcacctgtcggtcttcagcacctcaaagtggaaccatctgctacatcattttgtgattggccacctgaagggggcccccgccagttggtggaaccacatgcacttccagcaccatgccaagcccaactgcttccgcaaagacccagacatcaacatgcatcccttcttctttgccttggggaagatcctctctgtggagcttgggaaacagaagaaaaaatatatgccgtacaaccaccagcacaaatacttcttcctaattgggcccccagccttgctgcctctctacttccagtggtatattttctattttgttatccagcgaaagaagtgggtggacttggcctggatgattaccttctacgtccgcttcttcctcacttatgtgccactattggggctgaaagccttcctgggccttttcttcatagtcaggttcctggaaagcaactggtttgtgtgggtgacacagatgaaccatattcccatgcacattgatcatgaccggaacatggactgggtttccacccagctccaggccacatgcaatgtccacaagtctgccttcaatgactggttcagtggacacctcaacttccagattgagcaccatctttttcccacgatgcctcgacacaattaccacaaagtggctcccctggtgcagtccttgtgtgccaagcatggcatagagtaccagtccaagcccctgctgtcagccttcgccgacatcatccactcactaaaggagtcagggcagctctggctagatgcctatcttcaccaataacaacagccaccctgcccagtctggaagaagaggaggaagactctggagccaaagcagaggggagcttgagggacaatgccactatagtttaatactcagagggggttgggtttggggacataaagcctctgactcaaactcctcccttttatcttctagccacagttctaagacccaaagtggggggtggacacagaagtccctatgagggaaggagctgttggggcaggggtgtaaattatttcctttttctagtttggcacatgcaggtagttggtgaacagagagaaccaggagggtaacagaagaggagggacctactgaacccagagtcaggaagagatttaacactaaaattccactcatgccgggcgtggtggcacgcgcctgtaatcccagctacccaggaggctgaggcaggagaatcgcttgaaccggggaggtggaggttgcagtgagctgagatcacgccattgtactccagcctgggcgacaaagcaagactccatctcaaaaaataaataaataaaaaaataaaataaaatggtctggatttggtcaacaccttattcagtaaatccttaatttaccttgagacatacaaagacattcttttaaagagctattttcttggtattgcacaaaggttaattttaaagcaatccaggcaagtaagctcacaaaaagaagtacattcatctaatccatttagcaaatgttgcaaatcagcttccaccaataaaacgtagaaatctgtgaaactctatccttcgtgtcagttttaacattgtgttgatggcagccatttcaggcagaggtagccaagttccatatatatggggaaggcaaaaagcagaaaaacattgcaggagacttagcagttctctggcttctaatgactatagagcaatttcgaatatgagccatgtttctatgcagaattcttcttttatgccttaaacacaaaagagcttgttgctgccttgggcagatatactggaattgtcctctttgagcttactttctcttttctctaaggtcaagtaaaaaatgtgagacgttttcatataccacaaaggtaatacagcaggctggagtcactctaatcaaattaggagcaattcccttgtaaaatccaccgacgccttctttcctccatgtctttgtgattacatctattacaccactgtaaaacatgtgttgatcctgaagacgagctcttacgacttgatatgggtatgttgctgcgacagcaaatattttggatagtgctgcaacagatatatattctactgtgctcaactgggcttctggtaatctattgatatgctggttgtacttcaacttcag

SEQ ID NO: 74224 - DNA, 2389 bp, Homo sapiens; identical to SEQ ID NO: 64525

SEQ ID NO: 74225 - DNA, 611 bp, Homo sapiens; identical to SEQ ID NO: 64527

SEQ ID NO: 74226 - DNA, 1897 bp, Homo sapiens
cgtaacgcgtcacgggcggcctggcagctggcggcattgaggcggacgcgtctagaggtccgtctgaccgcggcgtcgggacctggtttccgggcatgagctgagagcaccacgccgaggccacgagtatttcatagacattgatggaagcagaaaccaaaactcttcccctggagaatgcatccatcctttcagagggctctctgcaggaaggacaccgattatggattggcaacctggaccccaaaattaccgaataccacctcctcaagctcctccagaagtttggcaaggtaaagcagtttgacttcctcttccacaagtcaggtgctttggagggacagcctcgaggctactgttttgttaactttgaaactaagcaggaagcagagcaagccatccagtgtctcaatggcaagttggccctgtccaagaagctggtggtgcgatgggcacatgctcaagtaaagagatatgatcataacaagaatgataagattcttccaatcagtctcgagccatcctcaagcactgagcctactcagtctaacctaagtgtcactgcaaagataaaagccattgaagcaaaactgaaaatgatggcggaaaatcctgatgcagagtatccagcagcgcctgtttattcctactttaagccaccagataaaaaaaggactactccatattctagaacagcatggaaatctcgaagatgatggttgtgaattactgtagcagcaaaagcaaattggtctccacacctaaaatcgtctgcctgtgtactttgtagatgtgaatggtactattcaacggagcacaatcacatgttagcatttggtaacataatgtttttggatgttcttatggatgtttcttccctaaactatgtatggaattgagcatcatccagaataaatagcgttgtatcccaaattgtgatttgaaccctgggatgctctaattggctggttggtttggatttgtaactccagaaacattctatagtgttccagagcaaaaggcaaatacacaaaatattatttaaatcaggaaactaaaaatattaacatctattaaaaaattgagcatttttctacgctcgtgtgtcttttacaacataaagaaaaagtaaaaggcagggagggaagtgagagacagattttaaatcatgttcagaactgttgttccagaatttactacggcaatccctccaactggactgaaaaagagaaagttcttggcaaaaaggagctgattctttgaacaaatgttgtagtaatctgtttaagaattatgcttattgtttcaaaatcccaactaggaaaacatggtgtatatcttaaaattgttcgtgttgacaaaactagaatcaaatttaacattttataccacaacacaagttctatttggaaattgaacttttattctatagcaaccatttttttcaaatctaaataaccatgccttctataataacaaatgttgctattatcatgggacttttaaaattacatttattgcatgggattgtttttatagcatgagaatgttctgtttggaattatatcatggtcagtctaaatagaaaaagcaaaatttctttgaaaacctaaacattgctatattggtcactatcaaacatacaattttctaataattgtgtagcggtctaagtggaagagattgcattatcttgtgcaggacgaggagaggacatgcagtgggcacagaaagtcaatggaacagatgccactgtggcaccaagactgtaatgactctgtgtggtaggtagttttaaaggactgcatgccttggaaatgattcttcacttggagaacatacttgcctctagatatgtttgtcactctaagcatcctgaatataacaatagagaaag

SEQ ID NO: 74227 - DNA, 2219 bp, Homo sapiens; identical to SEQ ID NO: 64529

SEQ ID NO: 74228 - DNA, 1644 bp, Homo sapiens; identical to SEQ ID NO: 64530

SEQ ID NO: 74229 - DNA, 3137 bp, Homo sapiens
gtggcagccagatatcgggccatacggaggactgctgaacgtggtggtggacggcctgttcatcatcgggtggatgtacctgcctccccatgacccccacgtcgatgaccctatgagattcaagcctctgttcaggatccacctgatggagaggaaggctgccacagtggagtgcatgtacggccacaaagggccccaccacggccacatccagattgtgaagaaggatgagttctccaccaagtgcaaccagacggaccaccacaggatgtccggcgggaggcaggaggagtttcggacgtggctgagggaggaatgggggcgcacgctggaggacatcttccacgagcacatgcaggagctcatcctgatgaagttcatctacaccagtcagtacgacaactgcctgacctaccgccgcatctacctgccgcccagccgccccgacgacctcatcaagcctggcctcttcaaaggtacctatggcagccacggcctggagattgtgatgctcagcttccacggccggcgtgccaggggcaccaagatcacgggcgaccccaacatccccgctgggcagcagacagtggagatcgacctgaggcatcggatccagctgcccgacctcgagaaccagcgcaacttcaatgagctctcccgcatcgtcctggaggtgcgcgagagggtgcgccaggagcagcaggaaggcgggcacgaggcgggcgagggtcgtggccggcagggcccccgggagtcccagccaagccctgcccagcccagggcagaggcgcccagcaagggcccagatgggacacctggtgaggatggtggcgagcctggggatgccgtagctgcggccgagcagcctgcccagtgtgggcaggggcagccgttcgtgctgcccgtgggcgtgagctccaggaatgaggactacccccgaacctgcaggatgtgtttttatggcacaggcctcatcgcgggccacggcttcaccagccctgaacgcacccccggggtcttcatcctcttcgatgaggaccgcttcgggttcgtctggctggagctgaaatccttcagcctgtacagccgggtccaggccaccttccggaacgcagatgcgccgtccccacaggccttcgatgagatgctcaagaacattcagtccctcacctcctgaccggccacatccttgccgccacatcccgggtggctctggggctctgaactctgacctgtgaatagaagcagcatgcactttggaaatccggccttttgaccagaacgcacacctcgtcggggggcccagtccagccaccccccagcactttatgtagagagggtgacatagacctgcatatttgtcagtgccatgatggaagaagctgagcatgtcttaccaaaaacagagagaacgagcctggatacagcagatgtaggggacagccgtgggaccgcgtgagaattgaagcggtggggttcccgcaccctgggctggctggtggttttctcgggaagcaggaccctcctgactggtgctcttcctgtgagcggatagagtgatagactgggtcgtgtgtgagacgcatgtgctccaccccactccttttgggggaagccaggcaacagtggcctctgggagggggtcaggaagaggcgaacagctcaggcagcgcaggtgtgatgggcacagtacgcaaagcaagctcgggaagttggtaggatctcaggcttggggccgggactctggagtgaatccccatttctctaccggcttgcttggagtttggacagaagcatttcacctctgatctcagcttccccacctgtggagtgggtttagtgacctgagtcactagggaatgtcacctgaatgcacagcccagcccatgcacctgccccagcccctccagctttggagccaaggccatcgttccagccacttgactgtcctcgacggcctgttccagacagggcgtttgttttgtccatgccttcctccctgcacgcacacggcgtcaaaaccaagctgccggccactgtctccagaacgcaaggctccaggcccgtgtgtctgaagcagtgagtggtccacacaggtgccaggagtgcccatatgagatgacgaggaaacccctttgcaggtgaggggacagctttctagaaaagccacacctgcatctggggacacactttggaaagtgggaccctccagcctggagaccccatggactgatgcctccactgctgtgtgccccatgttgtgttaacacctgcgtgtggggaccccatctgaggtcttggctgaggttggcatctcctgaagaacagagagcacggtgtccagagctggcccttcccccagcccacagccagctccgtgcccgagtgggcgtccccagcgagccttccctctctgccgcttgtccttgtgtctgggctgctccaagtccttgtgctgggcaccctggacacgtcctgctggtgagggacctcgggaaggtgacagtctgtgtgccttggtgtggagaccaacctgaggatgtcctgggaaatgttttcctgatgaatttctccttgactggcctttaaagaacataagaattcccattgcccagcctcagtgcatttggcaaatgcttactttgcttcccagagtcagagaattggcaaaggttcctaaatggtaatctggccggcctgggagaaagactcacgagaaaagccagtggagaaagcgcccttccagggcggcagcagcgggagccacgcagaccccgaggcgcacctgctggctcttgtgtgtggccccagtttctagcggcttttgcagcattagcctacaagctttgtcactccctgccctctgtggtggtcactgtttttctctcttgccaaatgaggcagtctctgagtgacggtgactgtggccttgaagcctggaggactgttgggcatgtagactggcaccttgaagattcaccattgtttaaataaaatcaagcaaatgcttttttaccaagagcccgagcctcgctctaagggacgcagtcctagaggcgtgccctttggggcttgaagagcacactgtgggacgcacgtgcttctgattaaaggaatctcagatctcaaaaaaaaaa

SEQ ID NO: 74230 - DNA, 5330 bp, Homo sapiens; identical to SEQ ID NO: 64532

SEQ ID NO: 74231 - DNA, 720 bp, Homo sapiens; identical to SEQ ID NO: 64533

SEQ ID NO: 74232 - DNA, 1034 bp, Homo sapiens; identical to SEQ ID NO: 64534

SEQ ID NO: 74233 - DNA, 997 bp, Homo sapiens; identical to SEQ ID NO: 64535

SEQ ID NO: 74234 - DNA, 2742 bp, Homo sapiens; identical to SEQ ID NO: 64536

SEQ ID NO: 74235 - DNA, 2867 bp, Homo sapiens; identical to SEQ ID NO: 64537

SEQ ID NO: 74236 - DNA, 3005 bp, Homo sapiens
gtccatcttccaccgcggccacgagcgcttccgcattgccagcgcctgcctggacgagctgagctgcgagttcctgctggctggggccggaggggccggggcgggggccgcgcccggaccgcatctccccccacgggggtcggtgcctggggatcctgtccgcatccactgcaacatcacggagtcataccctgctgtgccccccatctggtcggtggagtctgatgaccctaacttggctgctgtcttggagaggctggtggacataaagaaagggaatactctgctattgcagcatctgaagaggatcatctccgacctgtgtaaactctataacctccctcagcatccagatgtggagatgctggatcaacccttgccagcagagcagtgcacacaggaagacgtgtcttcagaagatgaagatgaggagatgcctgaggacacagaagacttagatcactatgaaatgaaagaggaagagccagctgagggcaagaaatctgaagatgatggcattggaaaagaaaacttggccatcctagagaaaattaaaaagaaccagaggcaagattacttaaatggtgcagtgtctggctcggtgcaggccactgaccggctgatgaaggagctcagggatatataccgatcacagagtttcaaaggcggaaactatgcagtcgaactcgtgaatgacagtctgtatgattggaatgtcaaactcctcaaagttgaccaggacagcgctttgcacaacgatctccagatcctcaaagagaaagaaggagccgacttcattctacttaacttttcctttaaagataactttccctttgacccaccatttgtcagggttgtgtctccagtcctctctggagggtatgttctgggcggaggggccatctgcatggaacttctcaccaaacagggctggagcagtgcctactccatagagtcagtgatcatgcagatcagtgccacactggtgaaggggaaagcacgagtgcagtttggagccaacaaatctcaatacagtctgacaagagcacagcagtcctacaagtccttggtgcagatccacgaaaaaaacggctggtacacacccccaaaagaagacggctaaccctggagtatcacccttcctccctccccaggcaccactggaccaattacctttgaatgctgtatttggatctcacgctgcctctgtggttccctccctcatttttcctggacgtgatagctctgcctattgcaggacaatgatggctattctaaacgctaaggaaaaaaaacaaacacagaactgtttcaagtactcaagactgacttacagaccaaccaaccaccttgctggaacccttgctagcaggcattcttataaaagaaactttcgagcctccttatattgctggaaactcagctgtgctccagactagagcctccttacctatgctatggatttttaatttattttctcttatttcatgtacactgctttttttggttacagtgtatgatggatgtgtatgaaaaaaatgtatctttgggaaaacaattacagtttgttaatttgaagatgctggtcttgactcatctttatttttattcgcacatcccaccccatcccctgaactacttgggaggtgggaggggtaccagtccacctttgcttttggtagagatgagaggccgcattttgctgctaaagcaagagaaacttggagctgaagcacacacctggtctgcccctagatttctcctcaaggcctctggagcaaccagcacctgcccccttggaatgcagagcctggcctgccaaactacaatgtggtaggctgaaacgatggtgttaattcttaggactacttttctagtcacagatgttttcaaatttctaagaaaaagaaaatgaggctcaagaggctgcttcgtagaattccttttgaatgaattgagtggggatggggacacagtctccaagtgtgtatgtggtcttttctgatctcagctgtgtggctgcaactcttcgctgttcattggttcctctcctggaaagtggcttctaaccagcactggatggtgatcattggtaagctttgctcacctccctctctcttgcttcatttggctttatcaaaaagaacagacctagctctgaatttgtttggcttgggaaattatggattctttcaagccactcccacaaggtgggtcctactagaaagggttagcattttaaggggggttgttctatacacctgtgtccttaccccaggctcaggaactgccagggagggaagatgaggtggggagtctgtactgagatggaactgtcagtgctgtgttgtatgtacttgctgttgtaaaagtttgggcatgactttgcatctagcgggtgctgcctgcatctctttgtctgtaagcttgctctgggactcagcctcttaggacctacgatgccagcagctctcattaacagtgaaatgacagaggccaaagatggccaagtgaagacccaagtctcagaaaacccagacttgggacaactgcctgggaactaggatgctagagcagttctgtaatgctttgagacacagcaattttcacattggccattctttcccctcccctacccccttttcttttgagggacttttaatgtttgctgctttaggtggatggagagtccaccaggtcccactcaattgctgctctaaacttctacccacacccaccttaattaaggggtgctaataaaacatgctgaggttgagataaagacgggacataaggggaaaaattcattccatagagctgaaatctggttttcaaggcctctgtggctttcttctgaacttaccaccagccctggctggaatgtagattgtgtttttagtaatgtgtactgtgagctgtcttctgtataatgtattttgtaatgtatttttctcatctaccaaaggatgaaacaaataaaattatttaaatagttaaaaaaaaaa

SEQ ID NO: 74237 - DNA, 604 bp, Homo sapiens; identical to SEQ ID NO: 64539

SEQ ID NO: 74238 - DNA, 1462 bp, Homo sapiens
ttttttttttttccaggtcaacacgcttttattgccacttctggctcccctcgtcccagcaagattcctacctcttaccctgtaggaatactgagctccgatgcaggggaatggggtgggggtgttaccacttctcctctgcacactgccaagttaaagaaaaccctgcttgctggagagggagggccagacagggaggaattcaagggcatgtatggctcagtcccacttctgactgcagagtatagggaccagggttccaaactttttttcgaagtaagggaggtggggaagaatttggctgctgttgtaccccgtgtcctagctgccatgtttccatggaaatgaaggtggggcaggatgtagctcactctgactacctgggaggatggcaggacaggcatttggtaaacatatctccctccactcctacctagcacatacggctgtccccagccgacccccaggctctctcctcactgcctgctccactcccttcccttctggagctggtatcatgccaagtggagtccaggcagggctgccagtgctactctccacagccaggtctcactggcacgttaggatctaagtatgtccgccaagctcaggagcatccctgctagagctggtggtggcagtgcctcggtgaaaaggcagcagcagtacccccaactctctgtgcaactgctgtttcccaaacaaaactgaaaacataaacccaaacacttaagggtatcactctggcacaatgctgaggactgggatgggggagaggaggcgcatcctcctgagactggagccacctgtgcaccctgccttctgcccatctggagtttgcttcttcccactgggctgtcactggggggctggaatccaaatctccatttggtgctgctttcagcacccactgctgttcgtttatgaggcttgccagtttccatggtgaggaggtgcaggatggattctcagtaccatgggtcagcccggtgctgctggttgtagagctgtagcttgatctgatctttgatctgattcactaggatctgggacagcagaattcccaccagctgggggatggccaggcctagagccacaccaccaagtaagaataggttgctgtgtatccagttgaccaacttgtcaatacagccattggtgtagatgactttgctagcttccaagtagtcaaaggcctgcataccttggccacacatagtgttgatcactgcctggtcaggagtaggcaagcaacaggagtaaggcacagagcagcgctctcgactggggttgtcttctgagcagttgaaatacatgttctgagaccagtccttgtaggaaatccctccacagcagctaaactttttctggccaaaatcaatgaggttctgcagatccaagtcatctcggtagtgcacaatggcattgttgatgatctcactcactttccctcgacccggga

SEQ ID NO: 74239 - DNA, 834 bp, Homo sapiens; identical to SEQ ID NO: 64541

SEQ ID NO: 74240 - DNA, 413 bp, Homo sapiens; identical to SEQ ID NO: 64542

SEQ ID NO: 74241 - DNA, 440 bp, Homo sapiens; identical to SEQ ID NO: 64543

SEQ ID NO: 74242 - DNA, 737 bp, Homo sapiens; identical to SEQ ID NO: 64544

SEQ ID NO: 74243 - DNA, 1741 bp, Homo sapiens; identical to SEQ ID NO: 64545

SEQ ID NO: 74244 - DNA, 1090 bp, Homo sapiens; identical to SEQ ID NO: 64546

SEQ ID NO: 74245 - DNA, 514 bp, Homo sapiens; identical to SEQ ID NO: 64547

SEQ ID NO: 74246 - DNA, 726 bp, Homo sapiens; identical to SEQ ID NO: 64548

SEQ ID NO: 74247 - DNA, 1071 bp, Homo sapiens; identical to SEQ ID NO: 64549

SEQ ID NO: 74248 - DNA, 608 bp, Homo sapiens; identical to SEQ ID NO: 64550

SEQ ID NO: 74249 - DNA, 1205 bp, Homo sapiens; identical to SEQ ID NO: 64551

SEQ ID NO: 74250 - DNA, 1762 bp, Homo sapiens; identical to SEQ ID NO: 64552
  misc_feature (1)...(1762): n = a,t,c or g

SEQ ID NO: 74251 - DNA, 1701 bp, Homo sapiens; identical to SEQ ID NO: 64553
  misc_feature (1)...(1701): n = a,t,c or g

SEQ ID NO: 74252 - DNA, 663 bp, Homo sapiens; identical to SEQ ID NO: 64554

SEQ ID NO: 74253 - DNA, 2289 bp, Homo sapiens; identical to SEQ ID NO: 64555

SEQ ID NO: 74254 - DNA, 957 bp, Homo sapiens; identical to SEQ ID NO: 64556

SEQ ID NO: 74255 - DNA, 978 bp, Homo sapiens; identical to SEQ ID NO: 64557

SEQ ID NO: 74256 - DNA, 1868 bp, Homo sapiens; identical to SEQ ID NO: 64558

SEQ ID NO: 74257 - DNA, 934 bp, Homo sapiens; identical to SEQ ID NO: 64559

SEQ ID NO: 74258 - DNA, 1445 bp, Homo sapiens; identical to SEQ ID NO: 64560

SEQ ID NO: 74259 - DNA, 1620 bp, Homo sapiens; identical to SEQ ID NO: 64578

SEQ ID NO: 74260 - DNA, 711 bp, Homo sapiens; identical to SEQ ID NO: 64579
  misc_feature (1)...(711): n = a,t,c or g

SEQ ID NO: 74261 - DNA, 549 bp, Homo sapiens; identical to SEQ ID NO: 64580

SEQ ID NO: 74262 - DNA, 1101 bp, Homo sapiens; identical to SEQ ID NO: 64581

SEQ ID NO: 74263 - DNA, 2237 bp, Homo sapiens; identical to SEQ ID NO: 64582

SEQ ID NO: 74264 - DNA, 1462 bp, Homo sapiens; identical to SEQ ID NO: 64583

SEQ ID NO: 74265 - DNA, 2287 bp, Homo sapiens; identical to SEQ ID NO: 64584

SEQ ID NO: 74266 - DNA, 2243 bp, Homo sapiens; identical to SEQ ID NO: 64585

SEQ ID NO: 74267 - DNA, 1381 bp, Homo sapiens; identical to SEQ ID NO: 64586
  misc_feature (1)...(1381): n = a,t,c or g

SEQ ID NO: 74268 - DNA, 1586 bp, Homo sapiens; identical to SEQ ID NO: 64587

SEQ ID NO: 74269 - DNA, 1139 bp, Homo sapiens; identical to SEQ ID NO: 64588

SEQ ID NO: 74270 - DNA, 1397 bp, Homo sapiens; identical to SEQ ID NO: 64589

SEQ ID NO: 74271 - DNA, 1096 bp, Homo sapiens; identical to SEQ ID NO: 64590

SEQ ID NO: 74272 - DNA, 1108 bp, Homo sapiens; identical to SEQ ID NO: 64591

SEQ ID NO: 74273 - DNA, 1025 bp, Homo sapiens; identical to SEQ ID NO: 64592

SEQ ID NO: 74274 - DNA, 1401 bp, Homo sapiens; identical to SEQ ID NO: 64593

SEQ ID NO: 74275 - DNA, 1650 bp, Homo sapiens; identical to SEQ ID NO: 64594

SEQ ID NO: 74276 - DNA, 1069 bp, Homo sapiens; identical to SEQ ID NO: 64595

SEQ ID NO: 74277 - DNA, 1805 bp, Homo sapiens
ttttagggccagcgtctgggctccatttgatcaggtcagcatttattagtaggaagcagtaacatttacaactggtcctcgggcaggaaccgggagggccaccacccgcggccgcccacgcgagcccagccttcaggaggagagagcagcgcgtccaatgcactgaggacaataccccaacccgcctcgaggctcctgcggctcctctaagcctcactggatgatctccaccagaggtcctcgcgtgcctccctgaggaaagggggctttcgcaactggtgggcaaccccgccgggcttcaccgtgggctagcagccggtgtgtccgcactgttgtcgctctgccttcattcttggaattggggcgcacttggacccctgtttgggcagtgctggggggtgagggggactaaactaacagcacttttcaaaaacatgggggacatttacacaagagagggctccccaagccagcttgcactcacaaaatatagcatttcttaaggaaccaatggagcaggaaaaagagggagtgggatagggcgaaaccccaaagccacttggtttttccaacacgtaaacgagcaaatacagagtcccccaaatacctcagagaccaaccccccagtcccttttatttaaaaagaaaaaaaaaaagaagaagaagtccaagtcgctggagagtttctggaaatcaagcaccaaacacccacaaaggaaaacagcaacaacaacaaatccgctgcccttgagcgctcccgccagcaccgcgccgggtcagtctcctttggggcatttctccttgctcatctttttcattttcatcctacggttctgaaaccagattttgacctgtctctctgttaggttgagaatcctggccacctcgtagcgccggtcccgggtgaggtacatgttgaagaggaattctttctccagctcaagcgtctggtatttggtgtagggacagcgctttttccgggtggagcgagcgtggatccagttcgcggcggggttgtttgggtcaagttgctgctgctgcggctgcgaatgctgcttctcctcctccttcagcgaacagcctgggatcgggtggtcgctgcaagctgagggctccgacgagccgcccgtcccagtcgcggccccgatccctgccccaggcccggttccccccgtcgccgctgccgccttctcctgcaggaacgagttgcacgagaactcggggccgctgctcccctgggactcccgggccacggagcactcagtccgtttggaggaggaggataaggaagtggaggaggaggaggtggtggaggcggccgtggcgggggccggggccgctcgggtttcaggcttaatcccgtagtggcgcccgttggctgggccgctggggccagggctgggaccgcggcccggaccgccgcctccaccaccaccgccaccgcccgcaccgcccgggaagccgggcagcggctccatccaggagcgcacgtagcggccgggctcggaggcagaggcggccaggggcggcgggggaacgtacgggtggtagaggccgctcatcgccgccgctgccgggggctgggagggcaccgcggaccacgaggcagagaacacggccgatctgggggcaaaactacacgaggcgaactcggcggcggtggcggccgggccatcagccacacctgcaggccggccctgcgcgcctggccccggcggcccgaagcgcgccgcgaacacctcgtcgccctcatggcctataagcgagtccacgtagtagttgctgagggtgccactggaagacat

SEQ ID NO: 74278 - DNA, 774 bp, Homo sapiens; identical to SEQ ID NO: 64597

SEQ ID NO: 74279 - DNA, 1582 bp, Homo sapiens; identical to SEQ ID NO: 64598

SEQ ID NO: 74280 - DNA, 1949 bp, Homo sapiens
ttttttttttcgttgaaaaccaataatttatcaaaacgctgcgtgtgtatgggggggggaggggtgtcccaacaaacagggcagcggggggcggacccacaggcaggaaacggtgcccggaaagggggggcggcagccttgccactggctaggccatcgcgggcgggcaggctagacattcttgccgcgcaggcgcagttcgtggcgtcgcaggtggttgtagagcgactgcacataggtgaagacacacttggggtcaggcttcttgcccatgatcatcatgtcgtccacctccaccaggggcacacagtccaccagcatccgtggggccccgagcaggggttaggactttttggtttttaccagccccttctggaccagacagcggtagaattcctggatgtacgtgtacacgcacttccagtcaggctctcgaagccgcaccatgtcctctgtatccaggagctgcgggcagtccgcatgggtctccgcagatgagaaggccacctcgaagttctggcgtcggttctgagggctaagctgcccatagtcgaaggcctcagggaagaagttgtgcaccagggcacagaaggccatcccatcactccagctggaggagaagttctggatgtcgacgtgctcgtagccgcgagtcttggctcgacaccagtccagcagcatctgcttgatgctgttggcgttggggaccccgaagctggtggatcgctgcacggctgcgcggggtccgccagggctgccggccgcgccctccttctccagcttctcaatcatggccttgcgcgcctgggaggctgaggtcttgggcagactctgcgccttcatcagctctttcttcttctcggcctgccgtttctcgagcgccgccaggctgccggcccgtgggctggcctggtcctcgcggtcgaagatgctgcccatcttcttggatgaggaggaagaggagaaggtcttggtttgcatcatggtgctgccactgccattctccgagcgcctcacgaaactcgactccactgtggtggtgcgggccgtccgtgtgccatcattggagtggacgagccgctcagtcttggtaacagtgctgacagcagagccatcagctgcccgctggctgtgcctcgtggtggtctcagtggctgtgttgccgcgcccctcccctggccggccccgtgcctcctgcagccgccgttcccgctccttgtcccgctggtctctcttcctttgtcggagctcacgaagtgcagcccggatgagcttccgctcttcaaagtccgtgctctgatccagcatcttgtccaagactccttcatcctcaatagtcatcagctcctcagcgctcagagggctccgcccttctggtgctttgttcactcgggtctgctcagccccattggccacttccactgctgcagcgagaggctctgctggctctgcttccatcttgatgctgcagcctcctcggctactggggggggcatggctgaagctggtgacatgagtgacactgcccagccgagccagggtcccagggctgttgacacgggtgatggtgctcttgcccccactactggtgctgagtagggtcgggggcgcccgcagccccagtgtcagttctgccctctggttgcctgtgggcagcagcacccggcctgtggaggcctggccacggccgtccttgatctcgatggtgaatgtggtcttcatactgccccctggctcggcagtgccgacggccacgggcagcggggcaccaggctcctctgaacgtgccacaggcccccctgctctgttttcaaggggcctagcagccaagccccgccccctggggccctcctcctgggggcagcttcgaagctgggccaggggctgggctactcctcgttgctccttgctgaaccgggaggaggtatcactgggcgaattccaccacc

SEQ ID NO: 74281 - DNA, 1091 bp, Homo sapiens; identical to SEQ ID NO: 64600

SEQ ID NO: 74282 - DNA, 2014 bp, Homo sapiens; identical to SEQ ID NO: 64601

SEQ ID NO: 74283 - DNA, 1291 bp, Homo sapiens; identical to SEQ ID NO: 64602

SEQ ID NO: 74284 - DNA, 1736 bp, Homo sapiens
gtgcgaggaattcggcgatcaaggtatttgtggaatcgatgaatttgataagatggggaatcaacatcaagccttgttggaagccatggagcagcaaagtattagtcttgctaaggctggtgtggtttgtagccttcctgcaagaacttccattattgctgctgcaaatccagttggaggacattacaataaagccaaaacagtttctgagaatttaaaaatggggagtgcactactatccagatttgatttggtctttatcctgttagatactccaaatgagcatcatgatcacttactctctgaacatgtgattgcaataagagctggaaagcagagaaccattagcagtgccacagtagctcgtatgaatagtcaagattcaaatacttccgtacttgaagtagtttctgagaagccattatcagaaagactaaaggtggttcctggagaaacaatagatcccattccccaccagctattgagaaagtacattggctatgctcggcagtatgtgtacccaaggctatccacagaagctgctcgagttcttcaagatttttaccttgagctccggaaacagagccagaggttaaatagctcaccaatcactaccaggcagctggaatctttgattcgtctgacagaggcacgagcaaggttggaattgagagaggaagcaaccaaagaagacgctgaggatatagtggaaattatgaaatatagcatgctaggaacttactctgatgaatttgggaacctagattttgagcgatcccagcatggttctggaatgagcaacaggtcaacagcgaaaagatttatttctgctctcaacaacgttgctgaaagaacttataataatatatttcaatttcatcaacttcggcagattgccaaagaactaaacattcaggttgctgattttgaaaattttattggatcactaaatgaccagggttacctcttgaaaaaaggcccaaaagtttaccagcttcaaactatgtaaaaggacttcaccaagttagggcctcctgggtttattgcagattaaagccatctcagtgaagatatgcgtgcacgcacagacagacagacacacacacacacacacacacacacacacacacacacacacacacacagtcaaatactgttctctgaaaaatgatgtcccaaaagtattataataggaaaaaagcattatatataatacactaatttaagaagtgataaagtctccagatgcagtagctcacactgtaatcacagtgactcaggaggctgaggtgagaggattccttgaggccagggttcgagaccaaccttgggcaacatggcaagaccccatttcttaaattagtttattatatttaatgcttttttcctattataatacttttgggacatcatttttcagagaacagtatttgactgtgtgtgtgtgtgtgtgtgtgtgtgtgtgtgtgtctgtctgtctgtgcgtgcacgcataatcttcactgagatggctttaatctgcaataaacccaggaggccctaacttggtgaagtccttttacatagtttgaagctggtaaacttttgggccttttttcaacgaggtaaccctggtcatttagtgatccaataaaattttcaaaatcagcaacctgaatgtttagttctttggcaatctgccgaagttgatgaaattgaaatatattattataagttctttcagcaacgttggtcga

SEQ ID NO: 74285 - DNA, 2291 bp, Homo sapiens; identical to SEQ ID NO: 64604

SEQ ID NO: 74286 - DNA, 857 bp, Homo sapiens; identical to SEQ ID NO: 64605

SEQ ID NO: 74287 - DNA, 1598 bp, Homo sapiens; identical to SEQ ID NO: 64606

SEQ ID NO: 74288 - DNA, 990 bp, Homo sapiens; identical to SEQ ID NO: 64608

SEQ ID NO: 74289 - DNA, 916 bp, Homo sapiens; identical to SEQ ID NO: 64609

SEQ ID NO: 74290 - DNA, 1404 bp, Homo sapiens; identical to SEQ ID NO: 64610

SEQ ID NO: 74291 - DNA, 3111 bp, Homo sapiens
aggagaatgaagacatggtacaagatgcgctgcagcagaacccgggcgccttcaggctagctcccgccctgcctgcccggccccaccgaggcctgagcacgttcccgggtgccgagcactgcctccgggcttcccccgaagacccacgcttagcggtggcttcttcgttgctgtaattgaacgggtccaagttgccgacctcagcctcacaggccaaagcatcagcaccagaacgcacacccagcccagccccgaaagagaaagaagagagcaaaaagctgcagccggtgcttgcacaccgccttgcacatagcagaggctccgggctcactccttcctggtggaaaaggaagatgcctgtcctctccgtggaggaccctgggccctcaccgcaggcagcagtttgctgttttgaaaggttattgggtcccttcctcgggctgtgttcttgctggtgagcaaaagtgttgcctgcagaaataaaatgcagaacgtactctacgatagatcacagttttttattcttaatgtcacaagcaggagaaaaatctcacattcatactaaaaattccaactagactcaacaggaatgaagtctctatttgtaatggaaagtcccagcctcccgctgccgtccagtgcgtgtactgtacacatccacactcattctcactcagggttcccggaccggctgtcctgcctgcggaactgaggtaaactagctcaggtactgacactaggagggtctaccttacataaggtacaggtagaagcttgattgctaggcccaggcccacccagaccctccaatcctaacaggtatttaggcttgaggttcactccctcctcagctgcacacgcagccaggtattaacgaggatcagagctgttctgaggggtgggaaggagcagccccgccaccactcactcaccctcagtcacatcggggagggggcaccagttacatttacatcacattatttataaaataagaattacatttcatataacatggccagaaggagctctagtcccccaggaaagctgccggggacagcatttgagcctcttctttgcacaggcataacttaactatacagctaattcctagttaatagcatttatacttaaccacctcaatgaaccaagcttgaaggaatttaaaaggcaatttagcttaaatacaaaaataaatttttgttaaaaaacgtttaaatatttttttcttttaatttagacacacgcattcatacttctcccaaagaggttgggcgtggcagcaaggcgcttgggcctggggtatgtggtttcagaaggacggaaggaaaggatgggctgcagagggccctgtttgggaaaaataggattttaaaaatatggttcattaatttaggttttctaacatctactttgggtgatgtagcctccagtgaggtcagttaagtgggacagaaacggcagagggaagaggtctttgcttcccctgggcccattctccctggctgccagcccttgaagtcagaacaccatgggaaaattcaggagtcggcacttgtagccgtcaagtggtgctactttccacattcaattagcgaggccccagaaaacttgaaacaggaagtccggcactaccaacatgccgccactcatacaactcaactcttcctccaaactcgattcaaagagcaatacacagagcgtcagacaaaggaacacaggacaaggcttgaaacatacaatcctggagaggcagacgagggcccaatggggccaaagggtagctgggcgaggaggcagctgaagcagcggtgggcatcctgcctgctccaagagcttctcccttcacccctggctctgccaggctaacagtcttgagccaccaagctctgaggggccaaactggcagagggttggagatgaaacattgattcaggcttggcaggaagaaaacggcaggagcagcacccactggggtctccaaggcaaagctagattcaagggcatttaaaaaggagggaatcctgcaaggaactggtgagggacacagcagcaagaaatggggaaacagagtccccagaagggaccagaggaagagaaccacttctcacagctaagccaagcaagataaagctttacggatagcccatttcccaaatcccatcaggtgcacaccaccgatccaggcgggctggaccctgccccctccagcgacgacggtctcggggaaaggtggaaggggcgcctgcctaagggtgtgctaagcgggagtcagggcagcggacactatgtacaggtgtttccttagttctccagcctccccagtagaactgttcaagtagaggtcccgggctttggccctccgcatcctgcttccccttccctgaggcttgtgcttcctccagaagggaaagggccccagggctgccactgccccctggcggctgaagccagagatccggggtaggtttgctttacgcaactggaagggtccaaggctcttcctagcaggtgccaaggtccagatttagggaaggggtggggggaacagggacaggggacaaaggctactttttgcgggtgtgctgccttcgggcctgcagtcgctgtcgagcccctggggtcttggatcccgcaccaatggaaaatgaaagggccgccgatccgaaaggtgcaacaccaacaaagccttgggcgggtgctgaggatgccccaaaggagaggctgctgcctgatgtgcccactccaggcgcaggggtgttcagaccaaaggtgggggtggcggtgcctccaaacacaggtttgctctcagttgtgctgctcacgttgaaggcaaacggtgtgctctggccggtggtgcccagggcgttttgacctaagccccctgcgaagggggtggaggtggctgtgctcccactctgtcctgctccaaagctgaaagctccggtggtggtgctggagcctggggtggccacattgatcccaaagctcccactgccagcgggggctgccgaacccccaaacgtgaagggtgatggtgttgtgctgcccaacaccgagctgctgctcccgctgctggcggtataggtggtggctccaaaaccggagctggtg

SEQ ID NO: 74292 - DNA, 2169 bp, Homo sapiens; identical to SEQ ID NO: 64612

SEQ ID NO: 74293 - DNA, 1322 bp, Homo sapiens; identical to SEQ ID NO: 64613

SEQ ID NO: 74294 - DNA, 1736 bp, Homo sapiens
ttttttttttttcgaaccttgtggttttttatttgacggggcagatggagtcagtacacaataaataacatgaatataggaactgcgccgtatcgcggctggcggggtggggcaagacattggccagacctttagtctgcagcaggacagaaggacagccggacccctgatcttgggcaactggcgacccgcggctgggaaccggggctaactcttccctcagagttccacgcgcgcatcgcggtaggcccggtccagagcccactcgggctgtgagtcggtgcccccttctcgggcaaggcgggccatctcctgtttggaacagccgcttgccgcgctcggctggggtccacattaatccagttgttggcaatccacttggtgccgcgcgtgaccaggcagcccccgtgcagcgagtagttgtctacgtcacccacccaaccttgcccatcaggcaggtagttgtaccagaagactgctgtgccctgttggggcttgacacgcaggtttcccttgtcacagtgcctccgtgtgtcacggaggtccacgtcatcctgaatcagactcatttcatcgtaggttctgttatctgctacagggaaaacagtctcgcccccaccagtgacgttgttcaaataaaacagcactgtcatgtagcggcaggaggtctcgaagggtacagactcgttggctaccagcttggtatgggagcagatggtctctgggtacacaggcccactgtccacgtgggcatggtagtggcccccctcaccatatcgaacaacctgcagcggctcgctgagctccacgatctcaggcgacaggcgagtgaggcgcagcaccctctggcggatggcacgcatgatgtggtgggcaccctcaccctggtagagccaggtatggtggctgttccgcaccagctcactggactctgccttgtggctcctcatgtacttgtggaagtcccgaaggtccatgttggagaactcctgcagactcagcactccgtcaccatcagggtcagccttgatcgcggcgtacatctcctgaatgctctctggagtcatccaccatccatttcccaggcgagtctgggccagaacctcacggagctgaaggtgcccatcacggttctggtccagcagccggaagaggtccagctggctgacctgcatagtgctcattgcctcttcatactcttcagtaggcaggatctggctgcgctgtaaccccttcatctgcgccagatggatgatgagccgacactcttcatcagtcaggaagccggggatttcgaagagcagcggcttgaggctgagggttcggatgaagtgatccctgtcggtgaccagctggaccttacgctcgtgccccaccttgatgccctccagccgggtgaggggacctaaggtgggctcgggcccggggccctgggcacggtgttggggcccgggatcgctgctttcgtcgccgttgctgtagtgcacgaagagcagcagcgccagcacgttacccaggtacaggtgcacgaacaccatcagcaccaggaagtaggcgcgcgagcagatgccgcggggcttgcacagcggacgcaccggtgcgtcctcgccgtcgcccagcacggccgccgcctgagcctggcagtggtctggcggcgcccactgcggcctcgaggcctcctcgtcctccgcggtctcagaccggtgacctgtcaccgccgctgccgccatggcacc

SEQ ID NO: 74295 - DNA, 1203 bp, Homo sapiens; identical to SEQ ID NO: 64615

SEQ ID NO: 74296 - DNA, 566 bp, Homo sapiens
aagaagatcctgtgccgccttttccggatctttgtccacgtctatatccaccacttcgaccgggtcattgtgatgggtgcagaggcccatgtcaacacctgctacaaacacttctattactttgtcacagagatgaacctcatagaccgcaaggagctagagcctttgaaagaaatgacgagcaggatgtgtcactaatgctccacctcaccctttggaagaaaggaaagctgtttcctcctggtgccctgagcgggcaggaggtggaccaccctggctgaaatgacacacctactcccaggaacagcagaggtggaggcaagcagtgactcctgagagacattccccactcactttgtgtgctcttaaccttctgagtgctgctagcccagacctgtggacgaggcagaccacaacgtgaaagaaggaccagccccttgaccgttctggctggggaattgtccacgaggaagcctctgcacttccacacatggcacagttctgcctgtgacctgccgcctaagctttactggaattcaggttttgagactgagatgcgtgttcga

SEQ ID NO: 74297 - DNA, 456 bp, Homo sapiens; identical to SEQ ID NO: 64617

SEQ ID NO: 74298 - DNA, 1257 bp, Homo sapiens; identical to SEQ ID NO: 64618

SEQ ID NO: 74299 - DNA, 385 bp, Homo sapiens; identical to SEQ ID NO: 64619

SEQ ID NO: 74300 - DNA, 2551 bp, Homo sapiens; identical to SEQ ID NO: 64620

SEQ ID NO: 74301 - DNA, 822 bp, Homo sapiens; identical to SEQ ID NO: 64621

SEQ ID NO: 74302 - DNA, 1039 bp, Homo sapiens; identical to SEQ ID NO: 64622

SEQ ID NO: 74303 - DNA, 2061 bp, Homo sapiens; identical to SEQ ID NO: 64112

SEQ ID NO: 74304 - DNA, 1156 bp, Homo sapiens; identical to SEQ ID NO: 64624
  misc_feature (1)...(1156): n = a,t,c or g

SEQ ID NO: 74305 - DNA, 1766 bp, Homo sapiens; identical to SEQ ID NO: 64625
  misc_feature (1)...(1766): n = a,t,c or g

SEQ ID NO: 74306 - DNA, 1136 bp, Homo sapiens; identical to SEQ ID NO: 64626

SEQ ID NO: 74307 - DNA, 1048 bp, Homo sapiens; identical to SEQ ID NO: 64627

SEQ ID NO: 74308 - DNA, 1053 bp, Homo sapiens; identical to SEQ ID NO: 64628

SEQ ID NO: 74309 - DNA, 2210 bp, Homo sapiens; identical to SEQ ID NO: 64629
  misc_feature (1)...(2210): n = a,t,c or g

SEQ ID NO: 74310 - DNA, 1909 bp, Homo sapiens; identical to SEQ ID NO: 64630
  misc_feature (1)...(1909): n = a,t,c or g

SEQ ID NO: 74311 - DNA, 1462 bp, Homo sapiens; identical to SEQ ID NO: 64631

SEQ ID NO: 74312 - DNA, 1689 bp, Homo sapiens; identical to SEQ ID NO: 64632

SEQ ID NO: 74313 - DNA, 458 bp, Homo sapiens; identical to SEQ ID NO: 64633

SEQ ID NO: 74314 - DNA, 689 bp, Homo sapiens; identical to SEQ ID NO: 64634

SEQ ID NO: 74315 - DNA, 2948 bp, Homo sapiens
ttttttttttttgtgaaaattttatttttctttttattgcaaatttctggtaaaggaaagaacatggaagctgattctcatttgagctttggtgagaagagaactgcactgtggctcgacagctcaccacctcggctgcacacccaaacacgcggaggcctcgggcacgcactgatgcctgcgacccacctcccagaggttctgacttaatcggtctgggaggcacagcggggcatcagtagatttcccaactcctctggatgatttcaacatgtagccaaggtgagcacacctgcggtggctcatctcaaggggctggcaatgtcagaagcacctgagaagctcagctgacagccaagtgtcacctgcttacatcactccttggccagagtccagctggtgttccccgcctccctcttcccaggtgtcgatgttctgattccttctcctcaaagaccccacaagacagagatgctggagggggtgtggcttcctgtgctgtggtttgtgcttaaacgtggagaaccacatgaaccacgtgtacgctaccacaaaagaaattcactttctgattgcaaaacagcattcgcctctttttatttgttaagtggaaacttgtggcaaaataagaaaacatgtgttggataatatagtccctatataacctctcatgtccaaatttgaaaaaaaaaattgtcaagccattgacagcaaaatatgtactttagcagcatattttatatgggtaaacagtaatagccagttagacacttcatttgtgatttgtcctaaaaatagaaaatgctttttattttcctgagtccttggcaaacaaaaaacatttttttctttttaattgttaaagttcctgtttttctttttcctgggacaccctcacagttcagaacgttgtgtctcactgtcagtttttacatacagagatgaacaaacagcactggggccaattttcaatgactgatcaaatatggcgattgaaaataaaacacccatcatctacaaagttgctcaagatgaaagtttcttacagtgctataaatgcaatatcaatttgaattgttgtccatacaaaagtatgaatttctattccattagtaatactgaatgattaataccttaacagcgataaaatttttagaacatttaaaaaatacagaggattccagttttacatcatacttctgacggattatcatactttctattttgtctgcaaaacttttacagagtacagtgcattgacatgataaaaccaaggcacaaaaatacagttacgataagtgtatataaaccctagcactttgtgccaattttggaaacagatcataaagtctgaaaaattaccacattctatttgattagtgaacaattaattgtgcagtaaatagactgttaaccaccattccattattaaatatatggctatcactatacaggttgtggataattcaaaaatagttttaaatattaaaacctgtaatatctaggtggtcaacgcagatattgagccttacgttatctaaataagtttccatttaatttgcaatccacatggcagttagcaatttttaaactatttccattacataaatggtggggtttattctaaatgttaaatcctttccccttacaaaagacagaagatttacaagaagataaccaatataagaagtgcatagacaacgataataaaatccaaattggactcaaaggttgaagtctaatctactgggacattctcttaatttagggtgaggagcaacacattcctgtgatgattcattagtttcttaattaaaaaaaaatccccatgacatttttcaaaatagtaaacagtcttcattagtgcatcaagcattgaagaaaaattgtcgtctttccattcgtaaaatgaagaagataaaagcctttcaaaatccagggcgggggatttccattgaatttagagaagtgaaataaactggtaaaaactgtatttcatacttttaacaaaagagtattttcaagactcaaggtaaacatttagacccataaaaacacatttcttggcacatgcacgccatggatggaacaatcctgaatgcagcgatggcctggctacagaggtatccggctcctagccccactggcaaaactgtcttttaggaccttgtcccagctcccttcacatgggggtctctggcttctgcatcagctggatttgcttctgtagctggtccctgtccagcttcatcttggcctcgagaacttgcctgagggatcctatgctttcatagacggctgtaaacccagcattaacttctgctttcatttccttgatgttctggttcatctgtaactccagcttggtgattcgcccgtgcatcttctcctcttcttgccttgttctctgaccatcaaaagtcttcttttgaccctcttctattttgtcaagcctggctgacatctggctgagcttcttctccatatccctttcactggctccactgttttccttaacaatcaaggaaagctgatcaattttctgtaaaagctctttttctatccgttcttgttcctgttgcaaccaactccgtgcagataatatctggttactgagttcctcaactgtacctttaaatttagtgtccaaaagctgaagctggtggttactgtctctgtgagacatcttcagtttggtgctctgctctgatattgacaagtccactctgttcaaaagctgagaaatctgtccctctgcatctttgattttcgtttccaagataagtttggcagcctgctgttctttgttcaagtgctggagcccctcataggtcgttttgtgctctgcagaaagactagctatgctggcatcacatctgtccagacaaagaacaaagcttgccactcttcctcgaagatctcccacaccggagagctggcgcatctcc

SEQ ID NO: 74316 - DNA, 1414 bp, Homo sapiens; identical to SEQ ID NO: 64636

SEQ ID NO: 74317 - DNA, 206 bp, Homo sapiens; identical to SEQ ID NO: 64637

SEQ ID NO: 74318 - DNA, 429 bp, Homo sapiens; identical to SEQ ID NO: 64638

SEQ ID NO: 74319 - DNA, 2318 bp, Homo sapiens; identical to SEQ ID NO: 64639
  misc_feature (1)...(2318): n = a,t,c or g

SEQ ID NO: 74320 - DNA, 1464 bp, Homo sapiens; identical to SEQ ID NO: 64640

SEQ ID NO: 74321 - DNA, 1306 bp, Homo sapiens; identical to SEQ ID NO: 64641

SEQ ID NO: 74322 - DNA, 4260 bp, Homo sapiens; identical to SEQ ID NO: 64642

SEQ ID NO: 74323 - DNA, 1211 bp, Homo sapiens; identical to SEQ ID NO: 64643

SEQ ID NO: 74324 - DNA, 2018 bp, Homo sapiens; identical to SEQ ID NO: 64644

SEQ ID NO: 74325 - DNA, 2159 bp, Homo sapiens; identical to SEQ ID NO: 64645

SEQ ID NO: 74326 - DNA, 1148 bp, Homo sapiens; identical to SEQ ID NO: 64646

SEQ ID NO: 74327 - DNA, 3675 bp, Homo sapiens; identical to SEQ ID NO: 64647

SEQ ID NO: 74328 - DNA, 1747 bp, Homo sapiens; identical to SEQ ID NO: 64648

SEQ ID NO: 74329 - DNA, 856 bp, Homo sapiens; identical to SEQ ID NO: 64649

SEQ ID NO: 74330 - DNA, 4451 bp, Homo sapiens; identical to SEQ ID NO: 64650

SEQ ID NO: 74331 - DNA, 1230 bp, Homo sapiens; identical to SEQ ID NO: 64651

SEQ ID NO: 74332 - DNA, 2222 bp, Homo sapiens; identical to SEQ ID NO: 64652

SEQ ID NO: 74333 - DNA, 2842 bp, Homo sapiens; identical to SEQ ID NO: 64653

SEQ ID NO: 74334 - DNA, 1299 bp, Homo sapiens; identical to SEQ ID NO: 64654

SEQ ID NO: 74335 - DNA, 728 bp, Homo sapiens; identical to SEQ ID NO: 64655

SEQ ID NO: 74336 - DNA, 1922 bp, Homo sapiens; identical to SEQ ID NO: 64656

SEQ ID NO: 74337 - DNA, 2234 bp, Homo sapiens; identical to SEQ ID NO: 64657

SEQ ID NO: 74338 - DNA, 1011 bp, Homo sapiens; identical to SEQ ID NO: 64659
  misc_feature (1)...(1011): n = a,t,c or g

SEQ ID NO: 74339 - DNA, 1201 bp, Homo sapiens; identical to SEQ ID NO: 64660

SEQ ID NO: 74340 - DNA, 1605 bp, Homo sapiens; identical to SEQ ID NO: 64661

SEQ ID NO: 74341 - DNA, 662 bp, Homo sapiens; identical to SEQ ID NO: 64662

SEQ ID NO: 74342 - DNA, 1116 bp, Homo sapiens; identical to SEQ ID NO: 64663

SEQ ID NO: 74343 - DNA, 1189 bp, Homo sapiens; identical to SEQ ID NO: 64664

SEQ ID NO: 74344 - DNA, 1314 bp, Homo sapiens
  misc_feature (1)...(1314): n = a,t,c or g
ggaggcaggagaggccagcggtggtctcattcctggaaaatctcttgtgtttgcaactatggagctgctgatgttcattttagtacggcatatgccacatctcagtaccaaggtgtcagactctccaagtcacatagccactaaaactcgactatcagaagaaagtgctcgtttggtggcagccacagttaccatactctctgatttaccatccctttgttcacccgctggatgtatgacaatcctgcccacaattctgttcttaattgcaagaatattgaaagacacagcaataaagtctgcagataatcaggttcctccaccagtcagtgcagctcttcaagggattaaaagtattgtgacactttcaatggccaaaactgaggctggcgttcaaaaacagtggacagctctgattcgtagcacgcttgcttgcatcctggaatattctcaaccagaagactctgtacctacacctgatgaagtaagcatgctaacagcaattgcactcttcctgtggtctgctagtaatgaaataataggagtccagtcattacagaatggctgcatgaacagatttaaaaatgcattaaattcatgcgacccatgggttcaagccaaatgttaccagcttctcctctcagtcttccagcattccaatcgtgccctttcaactccttatattcattcattagctccaatagtggttgaaaagctaaaagctgttgaaagaaacagaccagccagtaacatagagcttttagcggttcaagaaggaataaaagttcttgaaacactggttgctcttggtgaagaacaaaacagagtccagctacttgctcttttagttcccactttgatatcttacctgctggatgaaaattcttttgcctcagcaagttcagcttccaaagatcttcatgagtttgcactccagaatttaatgcatattggacctctgtatccacatgctttcaagacagtaatgggggctgctcctgagttgaaagtgcgtctagaaactgccgttcgagcaagccaagcgagcaaagctaaagcggctgccagacaaccaggcccccgccatacattctggcaccaacaattaaagctaaaaaacaaagttttttttaatttgtaatttcatttaatttgtatntatggttggcaactaagcccctaattagtganggccactgtatcattccaggctanctaatgggtctggtttaatttggaatattgggattaatagtgcttccaaggtagggtaaagtggaaataatgctcacaccacttattggatttttaagg

SEQ ID NO: 74345 - DNA, 2996 bp, Homo sapiens
ttttttttttttttattttgtattggttttatttaaattttacagaaacctgatcagagttaagtatgtaattataagtccagtaacaatttctacaaaaatgcacatacaatgccagaactccttaaaagcaactaatatcatatttgtgttttgcataaaacatgcattaatatgttggccaaaatcagtctctacaagaagagacagtccaatacagtcaataagaaaactagttgtgaacaacaggtaaaaaaagaggtttccagttaatgtgaaagaaggaatagtacctttcataaaacaagcccttcagcgctgagttaactgatcggtactattgtgctgcacgtaatgtaacacatcacctccaagacttggtcctgattggtcataggaagtaagggactttctggtagttacatcagatatttgagaagattaaaagttttccggacatgatggtatactaatagtgcaaccttgcaaaaagggttcgaaacattgtcagacttggaagagttccccagcttgataaacaacctcaaagacaccccgagcctttgaacggagccctctgcacaaggccagctcagggctcaccagcatgtcctgtggccacaagaccttccagctccacataccacccttcgtgaggatctgcaattaggagcctgagtgccgaagaacatggttgtgccatttctttgaggctttgactttttataaggcctagttcatctcatccagggattgggcactcgaatgaatacacagatgctggacacataaggagtattaatatacatggtggccccacagcctgaaatgcttttattaacatacatcaaggtgtgtctccgactgtcaggaaagaccttggtcctccagaggcagagagaagctgagggttctctatgtatcacaaggcatttcctacatagactgaggggtgttaaagagatctcatatcaactgaaaggacttcccctcaaatgtggggctctgtacaaccttccatgaggatcttcaaaaaaaagatctcatagtcgttagggaagtggcggtggacattaacattatatacacaaaactcatcattcgtgcagcctcgggccttgtttgtaatctcttccacagtctgtctcttccaaaacagggctccctgccctgcttatttcaagtaagctaagtcaggatctgttttctttagcagattcaagggggaaaaataataatttattggggttctaataacattttcataacagaatatcaaaataggtccatttttgatatatgcttatgaatatccctgataatatcaagaaatccagaggacttcgtaaaccaccaagatttcacaggggtgagacccggtctgttttctaggcagcagagaagggactagtatacgggcaaatgttctccaggaagccctgtgagcactacagtactgaaattctaattctagtgccaatagaatcatgaacgaaaatttcacttgaactgtattagtaaaattcataacaaaggcttgcttcctcaaccctgtcatctgttaatctctccgcctgtgacagacatccagaccagaaaaccatcagtcctggctactctggaggttgggcctagagaaaacaagccccaagatcctttctaagctatgaccaaacctcagaaaacagggacgtgaaagaaggagcagaccaggcttgaggaagctttgacccaaggcaccacgatcataggggcgaggggacctgtagaggttttaggtgacgggaagagagccttccgtgatgcctgcggaggaggttctggaaggcaacagctctgtggcaaaacacacacatctgggagtgaaataacagatcattaaacaagaccccaatttgctttctcaaaacaaaatcaaacttaaaaactatgcaaataaccctgggtgcactggagtaggagtacactggagaagtctgtggaatgagctgcatcagctgagtcacagaggacgctggctgtgaagtcagcatccacacggtggctactgcagctaaagagaatgaagggagcgcgaggcctctccaaacagaggaggacggaaagggggccaaatgtgaaccacacctcttttattccaagaatgggaagcgcattttcattggcttgaatgagaaagcttcatactccactctagctgcagtaatactgcatcccatccactcttcttctcttttttgactgaaactcttcaaagaactgctgaatgtcctctctcttaacaaccgtgccttcatcagcaaatctcttgagatagtctttaagttcagtcttcaaatcattgtattcacaaatgagttccacttgctggactctattcatgctgctaagggtatccattaggggatcgctcctgtcagtggcctgggcaatcttccctttgttttcataagccagaactgtgtcgtattcatctgtcaggaataagacatctagatctccatacattttcatacagtcttggcaggtacacaacttgctacgccagttcaggggccaataggtggcagtgtctttctttataagctgcttagctttaagctcctgaagtttgcagccagattttgattctgcgttgaggctttcattcttaaacactgtctggagatcagattcagaactagagccggcacatggttcactgttctgctctactttaacctcccggacatcatcctttccctgttctggaacatcctctttgagggtactatcttgatgctctccattttcaggtttgataacttcctgatcacctattccatcaatgttccgcaccaatccatcatcctcagtggatattttggttactgccaattgtgcagcataagcccacaaaaaagaacaacgtttcatgcaggcctggcataccatctcctgaaaatccccactctcagggggaatacgaaatcgtcgacccggaaattccggagcag

SEQ ID NO: 74346 - DNA, 1286 bp, Homo sapiens; identical to SEQ ID NO: 64667

SEQ ID NO: 74347 - DNA, 1380 bp, Homo sapiens; identical to SEQ ID NO: 64668

SEQ ID NO: 74348 - DNA, 829 bp, Homo sapiens; identical to SEQ ID NO: 64670

SEQ ID NO: 74349 - DNA, 3271 bp, Homo sapiens; identical to SEQ ID NO: 64671

SEQ ID NO: 74350 - DNA, 8519 bp, Homo sapiens; identical to SEQ ID NO: 64672

SEQ ID NO: 74351 - DNA, 932 bp, Homo sapiens
ggcggaattcggacatgatcctctccgcctctcgagataagaccatcatcatgtggaaactgaccagggatgagaccaactatggaattccacagcgtgctctgcggggtcactcccactttgttagtgatgtggttatctcctcagatggccagtttgccctctcaggctcctgggatggaaccctgcgcctctgggatctcacaacgggcaccaccacgaggcgatttgtgggccataccaaggatgtgctgagtgtggccttctcctctgacaaccggcagattgtctctggatctcgagataaaaccatcaagctatggaataccctgggtgtgtgcaaatacactgtccaggatgagagccactcagagtgggtgtcttgtgtccgcttctcgcccaacagcagcaaccctatcatcgtctcctgtggctgggacaagctggtcaaggtatggaacctggctaactgcaagctgaagaccaaccacattggccacacaggctatctgaacacggtgactgtctctccagatggatccctctgtgcttctggaggcaaggatggccaggccatgttatgggatctcaacgaaggcaaacacctttacacgctagatggtggggacatcatcaacgccctgtgcttcagccctaaccgctactggctgtgtgctgccacaggccccagcatcaagatctgggatttagagggaaagatcattgtagatgaactgaagcaagaagttatcagtaccagcagcaaggcagaaccaccccagtgcacctccctggcctggtctgctgatggccagactctgtttgctggctacacggacaacctggtgcgagtgtggcaggtgaccattggcacacgctagaagtttatggcagagctttacaaataaaaaaaaaaactggctaaaaaaaaa

SEQ ID NO: 74352 - DNA, 2536 bp, Homo sapiens; identical to SEQ ID NO: 64673

SEQ ID NO: 74353 - DNA, 4201 bp, Homo sapiens; identical to SEQ ID NO: 64674

SEQ ID NO: 74354 - DNA, 1385 bp, Homo sapiens; identical to SEQ ID NO: 64675

SEQ ID NO: 74355 - DNA, 455 bp, Homo sapiens; identical to SEQ ID NO: 64677

SEQ ID NO: 74356 - DNA, 399 bp, Homo sapiens; identical to SEQ ID NO: 64678

SEQ ID NO: 74357 - DNA, 2255 bp, Homo sapiens; identical to SEQ ID NO: 64679

SEQ ID NO: 74358 - DNA, 719 bp, Homo sapiens; identical to SEQ ID NO: 64680

SEQ ID NO: 74359 - DNA, 1794 bp, Homo sapiens; identical to SEQ ID NO: 64681

SEQ ID NO: 74360 - DNA, 1499 bp, Homo sapiens; identical to SEQ ID NO: 64682

SEQ ID NO: 74361 - DNA, 820 bp, Homo sapiens
cgtcgactttttttttttcctggacagcatttcattttattatgtaactgtagaaagccttgatcaagataaaaatagggatgacttatcagaaactgaagaattttcttaggaaagcaaagtttactgaaggataccttcattccagccatgatgaacgtctgtcttctcaggcaatcatgatgaagctccagggacagtataacccatctctcccactcatccctgagccttggtcctggactgaatgtggttagaggttgtggaaataaaaaaaagaaccaaaataagaacactctccataaaagccaagctcagagactggtcctcttttgcttaggtacaacaggagcaggaaggatcaacattcttgaaagcataccttctattcatttggcttttttgacttggggcgccagtgtagagctgagcactccactgccctttctccactcacaaatgtctgcataggtacacgtccggcacttccaagcctcctccacgtcaactccctggggctctcggtggcccatccagtaggccatataatgctgcaccttggctctcacctccttctctttgaaggctacaatctcagtacccagcacagtggcagtctcttggtggatatactcaatcttcaagatatcaataactgggaggtctgacagtgttagagacaagaagacaagttccatgaggtcacccaaagacttcacagagaagcctccctgctgggcatgcctcagcactgatggccccagtggcttttctagacccaactttgtgtggtggattaggctagcaggggtcacttttc

SEQ ID NO: 74362 - DNA, 1046 bp, Homo sapiens; identical to SEQ ID NO: 64683

SEQ ID NO: 74363 - DNA, 1701 bp, Homo sapiens; identical to SEQ ID NO: 64684

SEQ ID NO: 74364 - DNA, 712 bp, Homo sapiens; identical to SEQ ID NO: 64685

SEQ ID NO: 74365 - DNA, 733 bp, Homo sapiens; identical to SEQ ID NO: 64686

SEQ ID NO: 74366 - DNA, 1336 bp, Homo sapiens; identical to SEQ ID NO: 64687

SEQ ID NO: 74367 - DNA, 1045 bp, Homo sapiens; identical to SEQ ID NO: 64688

SEQ ID NO: 74368 - DNA, 1188 bp, Homo sapiens; identical to SEQ ID NO: 64689

SEQ ID NO: 74369 - DNA, 2402 bp, Homo sapiens
cgcagtccccgagcgagaccaaacaggtggaatccgggctggagccggagctccggcggcgcgggtggcggcacgtccctccagacagtaccacaggcacctggagtaccggcatcggtcgctgtggcccccgagtgtccgtcagagcctaggggagcctgccctcccgcgcctcgtcggggcccggccaggcaccttggccgccggcgcacggacgcgggcacgagcactagatcacggctgctggacctcggcacgttgacaagatttctctggggtaccgcggaggattactttgaatttcggtggtcgcctgtggtctggcatatttagaacttaagtctattatttcgggcaccatgactttgaggcttttagaagactggtgcagggggatggacatgaaccctcggaaagcgctattgattgccggcatctcccagagctgcagtgtggcagaaatcgaggaggctctgcaggctggtttagctcccttgggggagtacagactgcttggaaggatgttcaggagggatgagaacaggaaagtagccttagtagggcttactgcggagactagtcacgccctggtccctaaggagataccgggaaaagggggtatctggagagtgatctttaagccccctgacccagataatacatttttaagcagattaaatgaatttttagcgggagagggcatgacagtgggtgagttgagcagagctcttggacatgaaaatggctccttagacccagagcagggcatgatcccggaaatgtgggcccctatgttggcacaggcattagaggctcttcagcctgccctgcaatgcttgaagtataaaaagctgagagtgttctcgggcagggagtctccagaaccaggagaagaagaatttggacgctggatgtttcatactactcagatgataaaggcgtggcaggtgccagatgtagagaagagaaggcgattgctagagagccttcgaggcccagcacttgatgttattcgtgtcctcaagataaacaatcctttaattactgtcgatgaatgtctgcaggctcttgaggaggtatttggggttacagataatcctagggagttgcaggtcaaatatctaaccacttaccagaaggatgaggaaaagttgtcggcttatgtactaaggctggagcctttgttacagaagctggtacagagaggagcaattgagagagatgctgtgaatcaggcccgcctagaccaagtcattgctggggcagtccacaaaacaattcgcagagagcttaatctgccagaggatggcccagcccctggtttcttgcagttattggtactaataaaggattatgaggcagctgaggaggaggaggcccttctccaggcaatattggaaggtaatttcacctgagtctcagggaaccacgaagggatatggcaacgagtagagcatgaaggtagaacagtctatatactcttgtgacacatacaatccctaccttgtgctgccaagtaactcatttttgtgcaattctcagtataagccctttgtcgtttctatgcctatttaaagtctcctaaaggtgtaattgactaggaaggatgtagttctacactgccatttacctatttaaattcatccttgtgaatatctttgttgttgttgttgagacagagtctcgctctgtcacccaggctggagtgcagtggcgtgatcttggctcactgcatcctccgccttccaggtttaagctattctcctgcctcagttgcccgagtagctgggactacaggcatgtgccaccacgcccagctaagttttgcattatcagtagagacggggtttcaccatgttggccaggctagtttcgaactcctgacctcaagtgatccacctgcttcggcctctgaaagtgctgggattacaggcgtgagacactgcgcccagcctcatccctgtgaatttcttattgtacacaagttctttcactatctgtgtgcagtgctctgaggggacagacaaggcttgggtgtatatgccaaccagatctcattgaagtatcagcttgtttggtactaggtgcaagtgtagcatgtcacatgtgaccatgttgggatccattgacaatttttagggtatgtactggcctacatttatgatgaagatcctgagcggaggttaagatattaagttattttccatatgaatcagaattatattgattctgtgcaatcaaaacaaaaggcagaatagaatgctgagattggttaagtttgcaatgaccatcttgaaccacagatttctgctatgtgtcatcaaaacatctagttctgagtaacattttcacgattgttataaaattataggtgtgaacttctaaaataaaggaatgctaat

SEQ ID NO: 74370 - DNA, 3009 bp, Homo sapiens; identical to SEQ ID NO: 64692

SEQ ID NO: 74371 - DNA, 873 bp, Homo sapiens; identical to SEQ ID NO: 64693

SEQ ID NO: 74372 - DNA, 1489 bp, Homo sapiens; identical to SEQ ID NO: 64694

SEQ ID NO: 74373 - DNA, 1614 bp, Homo sapiens; identical to SEQ ID NO: 64695

SEQ ID NO: 74374 - DNA, 2157 bp, Homo sapiens; identical to SEQ ID NO: 64696

SEQ ID NO: 74375 - DNA, 1691 bp, Homo sapiens; identical to SEQ ID NO: 64697

SEQ ID NO: 74376 - DNA, 2593 bp, Homo sapiens; identical to SEQ ID NO: 64698

SEQ ID NO: 74377 - DNA, 1139 bp, Homo sapiens; identical to SEQ ID NO: 64699
  misc_feature (1)...(1139): n = a,t,c or g

SEQ ID NO: 74378 - DNA, 2035 bp, Homo sapiens; identical to SEQ ID NO: 64700

SEQ ID NO: 74379 - DNA, 1560 bp, Homo sapiens; identical to SEQ ID NO: 64701

SEQ ID NO: 74380 - DNA, 845 bp, Homo sapiens; identical to SEQ ID NO: 64702

SEQ ID NO: 74381 - DNA, 1973 bp, Homo sapiens; identical to SEQ ID NO: 64703

SEQ ID NO: 74382 - DNA, 684 bp, Homo sapiens; identical to SEQ ID NO: 64704

SEQ ID NO: 74383 - DNA, 4583 bp, Homo sapiens
cgcgtgtctacgcggacgcaccggctaagctgcttctgccgccgccggccgcctgggaccttgcggtgaggctgcgcggggccgaggccgcctccgagcgccaggtttattcagtcaccatgaagctgctgctgctgcacccggccttccagagctgcctcctgctgaccctgcttggcttatggagaaccacccctgaggctcacgcttcatccccgggtgcaccagctatcagcgctgcctccttcctgcaggatctaatacatcggtatggtgagggtgacagcctcactctgcagcagctgaaggccctgctcaaccacctggatgtgggagtgggccggggtaatgtcacccagcacgtgcaaggacacaggaacctctccacgtgctttagttctggagacctcttcactgcccacaatttcagcgagcagtcgcggattgggagcagcgagctccaggagttctgccccaccatcctccagcagctggattcccgggcctgcacctcggagaaccaggaaaacgaggagaatgagcagacggaggaggggcggccaagcgctgttgaagtgtggggatacggtctcctctgtgtgaccgtcatctccctctgctccctcctgggggccagcgtggtgcccttcatgaagaagaccttttacaagaggctgctgctctacttcatagctctggcgattggaaccctctactccaacgccctcttccagctcatcccggaggcatttggtttcaaccctctggaagattattatgtctccaagtctgcagtggtgtttgggggcttttatcttttctttttcacagagaagatcttgaagattcttcttaagcagaaaaatgagcatcatcatggacacagccattatgcctctgagtcgcttccctccaagaaggaccaggaggagggggtgatggagaagctgcagaagggggacctggaccacatgattcctcagcactgcagcagtgagctggacggcaaggcgcccatggtggacgagaaggtcattgtgggctcgctctctgtgcaggacctgcaggcttcccagagtgcttgctactggctgaaaggtgtccgctactctgatatcggcactctggcctggatgatcactctgagcgacggcctccacaatttcatcgatggcctggccatcggtgcttccttcactgtgtcagttttccaaggcatcagcacctcggtggccatcctctgtgaggagttcccacatgagctaggagactttgtcatcctgctcaacgctgggatgagcatccaacaagctctcttcttcaacttcctttctgcctgctgctgctacctgggtctggcctttggcatcctggccggcagccacttctctgccaactggatttttgcgctagctggaggaatgttcttgtatatttctctggctgatatgttccctgagatgaatgaggtctgtcaagaggatgaaaggaagggcagcatcttgattccatttatcatccagaacctgggcctcctgactggattcaccatcatggtggtcctcaccatgtattcaggacagatccagattgggtagggctctgccaagagcctgtgggactggaagtcgggccctgggctgcccgatcgccagcccgaggacttaccatccacaatgcaccacggaagaggccgttctatgaaaaactgacacagactgtattcctgcattcaaatgtcagccgtttgtaaaatgctgtatcctaggaataagctgccctggtaaccagtctctagctagtgcctcttgccctctcctcacctccttttctctcagtgactctggaacctgaatgcagcttacaagacaagcctgacttttttctctgattaccttggcctcctcttggaaccagtgctgaaaggttttgaatcctttacccaacaatgcaaaaatagagccaatggttataacttggctagaaatatcaagagttgaatccatagtgtggggcccatgactctagctgggcaccttggacctccagctggccaatagaagagacaggagacaggaagccttcccattttttcaaagtctgtttaattgcctattacttctctcaaagagaacctgaagtcagaacacatgagcagggtgagaggtgaggcaaggttcatcctgaatgggagaggaagtcgaaccactgctgtgtgtcttgtcaggatgctcacttgttcctactgagatgctggatattgattttgtaacagcacctggtgtttcacggctgtccgagtgagctaacgtggcggtgtggctgcctggacctcctctttcaggttaacgctgacagaatggaggctcaggctgtctgcaagaaaacagttggtttggctgtgattttgacctcctcttccccactgccatcttctaagagactttgtagctgcctcctagaagcacattctgagcacatttgagacctctgtgttagaggggagactgcacaaactatcctcccccaggttgagacgtctgcagagtggcaagctgacttgtagaaatggggtgccatttatgctctacttagacaagggtaatcagaaatggaatcagtgcaggcaaaatttaggatttgccgcttccataaatcaaagcatgactaatagggggtctctgaaatgtaagggcacaaacttcacttagggcatcgcagatgtttgcagaatggttggcctaatgattatgctacagatgggttttaaatgacccgtctaggttactgcttccttgcaaaaaaagtcgaatcctgcattgaattgaatatgaatttctctaactctctccagaaaatggatggagataacttgtctttaaaactgtaggccagccttagccactgtggagcccttgcctccgagctctggcttcaaggggagctcttctccaggttcactaggtgaattgatttattattatcatattgataatgtgagattctttagccactttggggagcctgtctctccagaagcctttcttagtggtgcccacagttggagcccaggggccatgtttgcaaactgattcatgtgcatggctgacaggagtactggttcactaccaatgcctgagcttttctcttacatagaaaaactgtccactctcagtaatcacaagcagcatccgttttgttttctcttcttgggagacatctgtcaaaccaggaatattcttgaaaagaacgtgagcaggaaaaactgctggtgatactttttttaagttttgtttttatcttgcctgttggcttcaatacatttgagaatacgctgaagagggaaaatttcagtgatggagattctagattaaatatcaggactgatttcctggtgggattatggtccagttttaccaaagaaccaattccttgaatgttggaatctaactttttatattgtcattattattgttgtttttaaacggttctttgtcttttctgttttatttttctcaagctgctttcaggagctagcagaaaataactcaaagttgaagactctggaagattttgctttaacctaactcgcattgatgtattaaatttataattttagcattcccaatagatcctatcattccttaaacataataccctttgtcttggagtagaatactaagttagagttagtggatttctagtttaggagaggagctcaaaactataatctttaacaaattgaaaaatgaaatagggtgttttccctttttgtgcacacctatattaccttaagaaatttccttccatagacagctgcctcaaagggaaatcctctttaaaccgtagttggcgcagaggtcagtcctagtcggagcttaggaggggcggagacgctcacatcgtctgacttgagtcgccactgattgtggcaacagctttgcctcatgagtcaaaaattggcaatttcttttgatttttagttgttgaatttgctgtttcaagcatttgtacatattagaagtctaaggagtagcaagtcagtgggaggactttttcacccctggcattagcagcttcgacctcattttccagatgcaccagctcctattaataagttagcaaggaaagtgtatgtcacgtgcaggaacagtgaggcagggacaggggttctgctccttctcacttcaccaccggcacacagcttgcccctgtctttgcccccaaaggtattttgtgtctagtgtcaaattggagctattcttcactggtccttaaccttgggttttaaaaagaaggcttctctgtttgggtagcgtaagagctgagtatagtaagtcctcttccaaagagatggcaatatgctgggcatctactttaaaacaaagttgtctgatttttgcaagagaggttaggattttattgttcttatttccctttacagttctgcagttccatcacagtatttttttaaataactcaggtgtatgagaagaaattagaaaagaaaattaacttatgtggactgtaaatgttttatttgtaagattctataaataaagctatattctgtaaaaaaaaaa

SEQ ID NO: 74384 - DNA, 827 bp, Homo sapiens; identical to SEQ ID NO: 64706

SEQ ID NO: 74385 - DNA, 1284 bp, Homo sapiens
ccagagcctggctgaggtcctgcagcagctgggggcctcctctgagctccaggcagtactcagctacatcttccccacttacggtgtcacccccaaccacagtgccttttccatgcacgccctgctggtcaaccactacatgaaaggaggcttttatccccgaggggttaccagtgaaattgccttccacaccatccctgtgattcagcgggctgggggcgctgtcctcacaaaggccactgtgcagagtgtgttgctggactcagctgggaaagcctgtggtgtcagtgtgaagaaggggcatgagctggtgaacatctattgccccatcgtggtctccaacgcaggactgttcaacacctatgaacacctactgccggggaacgcccgctgcctgccaggtgtgaagcagcaactggggacggtgcggcccggcttaggcatgacctctgttttcatctgcctgcgaggcaccaaggaagacctgcatctgccgtccaccaactactatgtttactatgacacggacatggaccaggcgatggagcgctacgtctccatgcccagggaagaggctgcggaacacatccctcttctcttcttcgctttcccatcagccaaagatccgacctgggaggaccgattcccaggccggtccaccatgatcatgctcatacccactgcctacgagtggtttgaggagtggcaggcggagctgaaagggaaagcggggcagtgactatgagaccttcaaaaactcctttgtggaagcctctatgtcagtggtcctgaaactgttcccacagctggaggggaaggtggagagtgtgactgcaggatccccactcaccaaccagttctatctgggctgctccccgaggtgcctgctacggggctgaccatgacctgggccgcctgcacccttgtgtgatggcctccttgagggcccagagccccatccccaacctctatctgacaggccaggatatcttcacctgtggactggtcggggccctgcaaggtgccctgctgtgcagcagcaccatcctgaagcggaacttgtactcagaccttaagaatcttgattctaggatccgggcacagaagaaaaagaattagttccatcagggaggagtcagaggaatttgcccaatggctggggcatctcccttgacttacccataatgtctttctgcattagttccttgcacgtataaagcactctaatttggatctgatgcctgaagagaggcctagttaaatcacaattccgaatctggggcc

SEQ ID NO: 74386 - DNA, 4119 bp, Homo sapiens; identical to SEQ ID NO: 64707

SEQ ID NO: 74387 - DNA, 614 bp, Homo sapiens; identical to SEQ ID NO: 64709

SEQ ID NO: 74388 - DNA, 1730 bp, Homo sapiens; identical to SEQ ID NO: 64710

SEQ ID NO: 74389 - DNA, 699 bp, Homo sapiens; identical to SEQ ID NO: 64711

SEQ ID NO: 74390 - DNA, 1810 bp, Homo sapiens; identical to SEQ ID NO: 64712

SEQ ID NO: 74391 - DNA, 1247 bp, Homo sapiens; identical to SEQ ID NO: 64713

SEQ ID NO: 74392 - DNA, 1689 bp, Homo sapiens; identical to SEQ ID NO: 64714

SEQ ID NO: 74393 - DNA, 1460 bp, Homo sapiens; identical to SEQ ID NO: 64715

SEQ ID NO: 74394 - DNA, 2335 bp, Homo sapiens; identical to SEQ ID NO: 64716

SEQ ID NO: 74395 - DNA, 872 bp, Homo sapiens; identical to SEQ ID NO: 64717
  misc_feature (1)...(872): n = a,t,c or g

SEQ ID NO: 74396 - DNA, 2454 bp, Homo sapiens; identical to SEQ ID NO: 64718

SEQ ID NO: 74397 - DNA, 1751 bp, Homo sapiens; identical to SEQ ID NO: 64719

SEQ ID NO: 74398 - DNA, 1110 bp, Homo sapiens; identical to SEQ ID NO: 64720

SEQ ID NO: 74399 - DNA, 1925 bp, Homo sapiens
atggcctggaacaccaacctccgctggcggctgccgctcacctgcctgctcctgcaggtgattatggtgattctcttcggggtgttcgtgcgctacgacttcgaggccgacgcccactggtggtcagagaggacgcacaagaacttgagcgacatggagaacgaattctactatcgctacccaagcttccaggacgtgcacgtgatggtcttcgtgggcttcggcttcctcatgactttcctgcagcgctacggcttcagcgccgtgggcttcaacttcctgttggcagccttcggcatccagtgggcgctgctcatgcagggctggttccacttcttacaagaccgctacatcgtcgtgggcgtggagaacctcatcaacgctgacttctgcgtggcctctgtctgcgtggcctttggggcagttctgggtaaagtcagccccattcagctgctcatcatgactttcttccaagtgaccctcttcgctgtgaatgagttcattctccttaacctgctaaaggtgaaggatgcaggaggctccatgaccatccacacatttggcgcctactttgggctcacagtgacccggatcctctaccgacgcaacctagagcagagcaaggagagacagaattctgtgtaccagtcggacctctttgccatgattggcaccctcttcctgtggatgtactggcccagcttcaactcagccatatcctaccatggggacagccagcaccgagccgccatcaacacctactgctccttggcagcctgcgtgcttacctcggtggcaatatccagtgccctgcacaagaagggcaagctggacatggtgcacatccagaatgccacgctcgcaggaggggtggccgtgggtaccgctgctgagatgatgctcatgccttacggtgccctcatcatcggcttcgtctgcggcatcatctccaccctgggttttgtatacctgaccccattcctggagtcccggctgcacatccaggacacatgtggcattaacaatctgcatggcattcctggcatcataggcggcatcgtgggtgctgtgacagcggcctccgccagccttgaagtctatggaaaagaagggcttgtccattcctttgactttcaaggtttcaacggggactggaccgcaagaacacagggaaagttccagatttatggtctcttggtgaccctggccatggccctgatgggtggcatcattgtggggctcattttgagattaccattctggggacaaccttcagatgagaactgctttgaggatgcggtctactgggagatgcctgaagggaacagcactgtctacatccctgaggaccccaccttcaagccctcaggaccctcagtaccctcagtacccatggtgtccccactacccatggcttcctcggtacccttggtaccctaagctcccagggcaggtgaggagcaggctccacagactgtcctggggcccagaggagctggtgctgacctagctagggatgcaagagtgagcaagcagcacccccacctgctggcttggcctcaaggtgcctccacccctgccctccccttcatcccagggggtctgactgagaatggagaaggagaagctacaaagtgggcatccaagccgggttctggctgcagaagttctgcctctgcctggggtcttggccacattggagaaaaacaggctcaaagtggggctgggacctggtgggtgaacctgagctctcccaggagacaacttagctgccagtcaccacctatgaggctcttctaccccgtgcctgcacctcggccagcatctcctatgctccctgggtcccccagacctctctgtgttgtgtgcgtggcagcctccaggaataaacattcttgttgtcctttgtaaaaaaaaaaaaaagg

SEQ ID NO: 74400 - DNA, 2679 bp, Homo sapiens
acgtttttagaagacagctaccaagtatatatttcggggttgtagagttcaaataataaatctctagcttcataatgtttctaagcttctctcccttttaaaatttttggtattagggatggattgataactttaatggaccaagtggtctctttattgcggtaagtaaaccttttgatttatttaatattctatacatttttctgttttttgtatatctttaaatatatatacactatggcttatatatcttaaggtgttgtttttaatttcaacaaaggcagggaaaggaattcttcgaacaatacgtgcctccaacaatgcccttgcagatcttgttcctgtagatgtagttgtcaacatgagtcttgcggcagcctggtattccggagttaatagaccaagaaacatcatggtgtataattgtacaacaggcagcactaatcctttccactggggtgaagttgagtaccatgtaatttccactttcaagaggaatcctctcgaacaggccttcacacggcccaatgtaaatctaacctccaatcatcttttatatcattactggattgctgtaagccataaagccccagcattcctgtatgatatctacctcaggatgactggaagaagcccaaggatgatgaaaacaataactcgtcttcacaaagctatggtgtttcttgaatatttcacaagtaattcttgggtttggaatactgagaatgtcaatatgttaatgaatcaactaaaccctgaagataaaaagaccttcaatattgatgtacggcagttacattgggcagaatatatagagaactactgcttgggaactaagaagtacgtattgaatgaagaaatgtctggcctccctgcagccagaaaacatctgaacaagttgcggaatatacgttatggttttaatactatccttgtgatcctcatctggcgcatttttattgcaagatcacaaatggcaagaaatatctggtactttgtggttagtctgtgttacaagtttttgtcatacttccgagcatccagcactatgagatactgaagaccaaggattcagcattagaacatctatacatatggtgatctaaatgtacaaaatgtaaaatgtataagtcatctcactttttgtcaagacattaaaccatcttagatcggagtgtgaagtaaattatggtatattttatgtaacattttaatgtttatgctcataaaacttagtgaacacactgtgttatgccagctcaaatctacagtagccaccaaaaccatgacttaatattttgagccctagaagaaaggggtgtgctgaggacaagagtggggaaataggaacactgaccagtataactgtgcaattctggaacatattaattaaaataatatgccttaacatatagtgaatttctaattctaatgttcagtgcaatggaagacatttatttggacagtaatactagcaaagttggtagatatttgattcttcattttttgtttttttcattagttgaagtgggttttagttttgtttaaaattataaccagcgtattttcacatcattctgtaagttaaatgatatcaaacatgaaagagatgttctcatttttctttttctgattaaacgtctgatgcatatcatttttctataagtaatcagttgcttttaaaatcagaaggctatattattctaatgaccctattcgatctaaatgggtttgagaatccatatcagcaacatacgtgttttttgacagaaagtgaaaacaaattccgtaaaactgttagtatcaaaaagaataggaatacagttttcttttccacattatgatcaaataaaaatcttgtgagattgtttatgttttgaagcaggaggatttcttgagatttgatggaagtgggagttgggaaggattcaccatacttgtgttctcctccctttataaattttattcataggacttttaaaaggcttgtgctatctttccagtgaaaactgaaagtgcattattatggaagaatgtatttgcaggtagtaatagcattaaaaaatatactcgtgtgtaaacacatactaattttgaccttgaaagatgaattccttcaagaaaaataaaataatgcttaagataatgtgtacgaaattaaataaaggactttatttacatactacataaggtagcaaactgttgaatgagtttgaaggtatcacttattttttatgcatgtgattttagctttagaaagaaatgcgttatagaaacaagtaatagcaagaaaattgatgtatattttaatgatacattaaaattcccttttaatcataatagttaactctacttactgttttaacatacatttgatttaacaaattgttcagcataacacttctaattaagtttatcaagttgtactgtattagataatcagcagtgtatctggagtatgtttaaagagaacagttcgcaatacaaaaagttacatggagctttacatcttaactttctttgtcaatttaaatgcaatggataaaaaggttattttgctattgtgaaaaactaattgtaaaggaaatcacctactttcatgcaggtgtataatcttgaaaaggaaaaatgcttccatgttgaagccagattttctgtagtaaaacttttaaatattat

SEQ ID NO: 74401 - DNA, 2119 bp, Homo sapiens; identical to SEQ ID NO: 64722

SEQ ID NO: 74402 - DNA, 1550 bp, Homo sapiens; identical to SEQ ID NO: 64723

SEQ ID NO: 74403 - DNA, 593 bp, Homo sapiens
gtcctagccaccggtgtctccttctacatccgcctctgcgccggctgccacccgcgctccctccgccgccgccgccttgctgctgctcaaagctgctgccgccccttgggctaaaaggttttcaaatggaacattttgatgcatcacttagtacctatttcaaggcattgctaggccctcgaggtatcagcagctctgtcctcagaatgggtcccccacttcacacagttgtaggatggctacagcagctccaagcagcacattcagaggaagaagaaaaaatgtttcatttgtgtggttttaagcataaagaagttgtttcccagagctctttgccagctgtcatccctcaaaactcactggccacaattgcttcacatgcacctgcctgaaccagccaccagagggggttaggaccaccacagattgactagatcctaaggattctctacctggggctggagttcgggtcaggtgcccgggaagcactgtgcggtgtgggaggatgaatatgtgccaatttggaaagatgagtatttgtgggaaaatgaataaagcaaagtgtaaatcagaggtttaagttaaaaaaaaaa

SEQ ID NO: 74404 - DNA, 940 bp, Homo sapiens; identical to SEQ ID NO: 64724

SEQ ID NO: 74405 - DNA, 902 bp, Homo sapiens; identical to SEQ ID NO: 64725
  misc_feature (1)...(902): n = a,t,c or g

SEQ ID NO: 74406 - DNA, 2604 bp, Homo sapiens; identical to SEQ ID NO: 64726

SEQ ID NO: 74407 - DNA, 2806 bp, Homo sapiens
ttttttcaggtgctcaaacttttattttcttacaaaatgttatagaaatgaacccaaactaaacagatatgtacatgtatatatgtacaaaattttacttctgaaaaagaacctataaaaatagatcgtattaaaaaaacttaaaaagatttaaaaccaatactatgaaattgattttcttaaagtaatagtaatcttaaattgcaggttgtagttggttttccaggcttatttatatgtttgattgtggttggatatataaaggagtttctttcatttcagaatgcctccagtctcattttattatatcaaagagtccagaattttttttcccttcacaaatccttcaacatcaggacaaggcatgttaagttacaaatcacctttggtcatcatcttcttcttgagtcacaggtctgaaaggcaatgtagtttgtcctctttcaggatcagacattcggagaattcttatcagtttactggatggaagtgaactcatgctttgaggtgtgagcaagataaactgtctaaaacgctgggaatctgccatcttcagtatcaagtccatggcaattctcctattaaccatatccatgtagacatcaaattcatccaggcatctgaaaggagattctgcgatggaccacagggaaagaataaaacacactgtggagaaagaacgttcacctccagacaaggctctcatgtcattgaaagcagctttatttccttctccaggctgaactgatatacttagagtttcattcttgtggtcaaaattcatttttccacaataggcccgctgagatagtaagttgtcaaagtataatttgcatcgtaaagtcaaacaccttctaaattgttgatatgtcttgaatctgtgctccatgatttctcccagtaatttaataaacttttttaaagtcctcactttactatccagatcaagataggtctctcttgcttcttggtactgcctcattatttcctctcgatctccatgactagcatgttctgcctgtatcttctgccttaatcgattaatttctttgtccagaattgatgcagatttttctacttctatacgctctgggcagatttgtcttgcttgtgacattttctcctctagttctttctctttcatatccagttctcgtttctttttatttaaggtatccaagtgttctttttgtttttcttcataatgtcgtttccctcgtttttggttatccacttcagaatcagcaaggtttaattcatccttaagtgggtctgctagctccgatagttgattaattttgaatttaattgcatcatacttattttctgcttctattttcagacttttaagatgctccatattttctttttgttgctccatatgttcctcaaccattttcattttgcttttattttcctgagcttcatcttccaaagttgcaatatctacagactggtgttcttctatgttctcaagttcccgaatttcagaaatattttttcttattttcatctttagttctttataatgtagttggcaccttttaagaagttcctcattgtgtttaatatctttttcaagggcagataaatgttgctgaagatttaatatctgggccgtcttattttcaacctcattctccaagtcacttatttcagaatccacatctctgcttaggaacttaggtcttgtattttcagatgaataataacgtcctgcaaaaacttgatcaccatcagcagtaaaagcttctctacaatttttgggtggcttttgggactgcattactgcacgagctacagaattatttttgattagtagcactgtctctatgcctctcatgtcaattaggctatttgccgcaaccgcattatctatttctaaagctgtcagaactgttggaaagtctggatgataagcagctctgtgtcttacatcatatatctcattccgacactcagaaactattatcggtggccgtgaggtccatggtaaataaaaccttttcatgagtgcctgaaggaccctttcatcagcatgattatggcaacaataggcctgcagaagcccttttaagcaagattcaatagccaaagcaagttctgggtcccgaagatgaatgcaagctcctaaagggcctacaggtttataggtaaaatgtccttgtctataagcatcatctatggcttcaagaagagctggaacattagggccaaatcttttgagtcgatcagttttactatctttcaattctttcagttgcccctgattgtagctcagtgcatgcttcacatctaattcttctctcttaattttgccatgttcttctttgtccttttctatggcttgctgaaactgttcgatctcttgattgactgaattttcttgattttgaaaggcctttactctctcttttaaccaagatatttttttttgtctttccaaccgttcaggttccaaagattggtcagtactttttttcagctcttcaattcgtttacaaagctgctcatcatctttctttaatgctttatattcgtttaaggatcggttatataaaacctcagcttcattataggcccttttcttagcaacaacatctgctttcaatgccatacattctggtgctcgtgcatttgtctcttcactaatcttttctagtttgtcttgaatatccttgtacttttgttctgcctcattaagtctgacctgctgttcttccattttcctgtcaagtctagcagcacgatcttctccaattttgatattatctctgatggcattcaattgtttttcaatttcatt

SEQ ID NO: 74408 - DNA, 1725 bp, Homo sapiens; identical to SEQ ID NO: 64728
  misc_feature (1)...(1725): n = a,t,c or g

SEQ ID NO: 74409 - DNA, 2185 bp, Homo sapiens; identical to SEQ ID NO: 64729

SEQ ID NO: 74410 - DNA, 1446 bp, Homo sapiens; identical to SEQ ID NO: 64730

SEQ ID NO: 74411 - DNA, 2681 bp, Homo sapiens; identical to SEQ ID NO: 64731

SEQ ID NO: 74412 - DNA, 1044 bp, Homo sapiens
ttttttcaatattacaacaatctttattggaaaaccccaagtattttgtcttgaaaaatcagcaatccaggtattaaaaatagcatggaatgcccaattttactttgataattacatggtagtcagtttccgctcctggctaaagccttggattttcttctgggcagttcctaaaggcacaggtggcatggaagaaatcattccattttcgtctcctccccttatttgattggggtgtctggttaccaaaaagagtcatcaggcccttggattaccttcttgaactgatcttctagatcgcaagtcaagactgccatcatgttcccccaaatgcaaaaagccttgttgctccacctctctcctttccagaacaagtgagctggggtttgctttcttctccatatcctgcagcttgatcaatttttctatcaggaacattttatctttgccctcattaatgatctgctcatggagcagccttatcataatcttccttccctctgtgatctgccagtaaagataggtgatgattagcacaatgagggtgaggatgaaaaagaagtgcacacttccaatgaggttccgatagatccaaacaacccacaggtagccaggccgtgtacttagggtgtcgatccagctgtagatggagtgaatgaagagaggcagacctcgaaaagggccacagtcagctgaaggcttcaatctccagatggtgatggccagggtgcacaagaccccggtgaaggatgggaaaaagagcaagaagatgaagaaagtcatcatctgtgaggcccgccaggctttgctcggaggctggaaattcatcatcaggctgatatttttggagtagaccatgatgaaaagcataatcatttggataaagggcagcagggggcaaaagaatatgccaatccaccccagagtttgtgcatagatcagttgtagaacgttcctggcaatgtcaaactcctgaaggccaagacttgtgatcagttgcatcccaatgattataatcagcaaaagcgtcgggccacgcgtccg

SEQ ID NO: 74413 - DNA, 1480 bp, Homo sapiens; identical to SEQ ID NO: 64732

SEQ ID NO: 74414 - DNA, 956 bp, Homo sapiens; identical to SEQ ID NO: 64733

SEQ ID NO: 74415 - DNA, 777 bp, Homo sapiens; identical to SEQ ID NO: 64734
  misc_feature (1)...(777): n = a,t,c or g

SEQ ID NO: 74416 - DNA, 1980 bp, Homo sapiens; identical to SEQ ID NO: 64735

SEQ ID NO: 74417 - DNA, 620 bp, Homo sapiens; identical to SEQ ID NO: 64736

SEQ ID NO: 74418 - DNA, 1000 bp, Homo sapiens; identical to SEQ ID NO: 64737

SEQ ID NO: 74419 - DNA, 1663 bp, Homo sapiens
tttaagaactaatcaaatctctttaatgtttaagcctatttgtatctgatattttgttacttgcagccaaaagcagcctagctgatacacaatcgtccccctgccccctggtcacccttacagctcagagatgaactctagagaaatgcaaagccccagttgggagccagccggagactctccttggtctttagcttgggaaaataggacttgtgggggtgggggcagcatcagatggatcacagactccaagcaaaggcatgataggagtttatttacagacaagacacagcaaccagcacccactcaggctctgaccaggggaggtggtagacaagaccccagatatatataaatatacatataggtcccagcaccatcagcaccagaacgttccccagccaggtccctgccagaaggaccaagagtcaggcaggattgaggacatagaaaggagagggccccagtctttgccaggtatcagtgatcacctgttatggtccccatgtcagaggaagaaactatccttggccttgaagtgtggacactgaggagcatgaggacggagagaccctctggaggcgcccccattcctgtgtccagcctgtgccctcaatgccaaggccacagaagcgaagtgccagcaggagcagcttggggaatggagacactgcaggcccctccaggaccatccaggagccaggcatggaggtggggtcctaggccatggctgcccatcacacaggagcctcccccagtttgctggtggcacttgtgactcgcttattctcccggaggtttcggaggcgggcgctgaggctgctgatctcttccacataggcctggggcacccaccccttctcaccatctgccaggcggaccccttccagccagccgtcactggtccaggtcctcactgacaggatgtcagtcttctccaaggtcagctcatctgggtgcagtgccttgtatgtcctaacacactgaacctgggggcaatcttccccctcactgatgacctccttgtcctcctgggggctggaggggcacaaggctgagatccatcgctgcttctcactttccgtccgggcccgcagcaggaactggtgcttcatgtgctgcccgtggaggagctggaggaggaacacgtggccggggatgccctgcagcttcaggctcaggtcccgcacctgcagctcagccatcttggcatggacgaaaacggcaaacttccctagctccttccgccgagagagcagcaagcagtcattgaagaggtggaggtagactgccttgctggacagcttcagcttggcagggggtgctgcaggcagtggtgccagctctaccaactctccatgccgaaccagccagcgggcctgagagatcagcgggaaaatcttgccctcaaagtggatcttcttgctcaggtggatgagttcctctgtcctcttcatggactgtacactagcattgcactcctgcaccagctccttgagcgcattgaaggccttggtggccatgtcttcgtcttcagagccctgtgctgtccgcttcaggatgttctccaccaacatcttgaggcgggtgatcctctggaagggcaggataaggaaggaggtaaggggcagacgctggcacgaattccaccgcactgtgctaa

SEQ ID NO: 74420 - DNA, 3455 bp, Homo sapiens
ttttttttttttgaagcactgttttaaaacaacttctcaaatttatttaactcatgtggttaacatggtattgtataaaaagaaaaaaaaaacaccactcaatacttactaagccttgcagacagctcagagttgaggcagcatattgggcatagagatcataggatttgtattatcccttgcaagatggaactccaaccaacaccagaattttccaattcaaattcagttttagtcgagaccccagcataatttttagaaaaaagattggattgttgcttttcttttaattttccattcctatttagacaaatgaccagaggcaatgacaaaagtaactgtttaaaagggatttctctccagaagttttttctaaaggtttaagtccaggctttccatccttctctccatcctttttcattttaaaaagaagggttttggaatatgtcaacctttactcagcttgctatacaaagccactgctttagtcctagacataatgccaggactcatctcccaaacttctggtcttaatcaagttcatgcttggttgctaaagaagctcatgttaatcccaaagtcagcacaatcccaaccttaaaaagcagacagctgattgcatcacttacgacatacaccatcttgaggcaaaagaagccagtcagacaccccttgtttgctacgtgtgagacacatcagcagttgagcctgaccccttccgcagagctcactgtgcaaaatcaccagcacaccactgcaatccactgagctcaccgcctgtccagccataatggaagtcacttgaaggttatcattgtaatagatgattttccataagtaactaataaaaatgttttctttgatgtttagacctactaacaattcagtctctccctctccatcctctcttagggagcctgtacttttaagcaaatagggaagctaaaaatacaaaggagcaacatccatttataaataaatgtgtgccttatcttcctcactaacttcctggaaaagtgctgtttttgaatattctgttttcttaaggagaaattttttgtaaatgtagcacactgtatataggaagggatttctctttttagtctttatctcattgtacgggtttcactctctaggtattgagagtgggggaggaggggatcaacaaaccgcaaagagcagcataaagcacaccccgtatcagcagcacggcagctcctccaatatcgtcaatgctgactcgaggtaatttctggtggagttgaacacatcattaaatttctatttgtgttctgcctgaggcttttccctaaccactaattgcaagtgaaggtcccagagagcttttgtgaaaggaacagaacacaagccacgtcctggtctgtagccaggtgtccgtgtactgcataatggaggaagaggattacagggagattttcacttcagcctttagtccaaccaaaacttaaaagacttacagagaacagcctcaggaggttaggggacagaagtgtggtactgcaggaagacaagaggggtaaacgtatccagcagaatgtaaggataagaaacacccacatgaattcttagaatacagaggaacaagaaggaataattcctgtgccatatgcggaccagggcatagggtgagtggagcacagtgggttagccactaaatggcttcagtgagaattctgaaaactgttccagtataattttggagtaaatccttctcctggacaggtcaaagactgtgctttttaaatgtcattagaaggtaacagctttttgcctcctgcttccagatgatttccttttggttaaaaaccagaaatagtataaacctcacaggatgaaagaacagtcttttgatacaggtgaggtggagatctagatgaacttacatagtaagtgaggagtacatttcttggtcttctcccttgaccactccaagtctctgatctaccagagatggcagtttatttcctctggaagaagccagtaatggacacctgtctgttggctttgcccagagcagcagtccctttcttggggccctttcgttcctctctgggttcttttttcacagtcatggcagggggtctgtgtactgaggatgtcttcatgttaagctcctcttcactatctgtgcaggattcactctcgtagactttttcagtcactatgcagccttccccatccaggtaagttttagattttagtacgcgttttcgttttcttttgttttctccacttgagctcttgacagaaggaggttcaggctcagtctttggcactggttcaagaggtggagacggaggaggaggtggggatggtgactcagcttcataagccccaggagagtctggaaagacttcatcttcactgctatcagattcaggaagtttgattcttctcctctttttcctcatgttttcagtttcctttgtctcatcatcagataatgctactcgcttccccctttttttttccttctgcagcaccttaacaggctctgcttttttgctggattttttcaggcctgcaggagttgccagctttggttccgtgacagacactgtaggctgctccactattttttcttctttcactgcttgttctgagtccaaattgactttaaatttattcatagcagcttttccaaaaaagttgctcatcatattccctttccctggtgccttgttgcctgctgcagatgcatttgttacttctttagcctctgttttcgtttccttgttggtttcttgggttttagcagcagctttggaggcaaacattcccataattcctttgggctgctgggaaacctgcttggatgcaggtgggccatgaccattggtggtcagctcattgttggcttgtgtctcacttgacatgtgaagatgtgactgctcaaactttttggaagacgaagaggattcagcaggagctctggggacggcagctgcacattgtatagcactaaatttgctgcagttctgcaagttgcttttaaggatgtcatagtcagtattgaacagaggcccactgtcctttagcatggctttctggatgctgtacacatggatgctggcagtcacagctagcttggacttcactgcttccaatttatcttctctcactactgcaaccttgtggcaggaatgtccattctgaatgagactgccagacaccaagtaggtaacatgcagttgggctcctgaattttcttttcgtttcctttcaacataatcatacagcatctgtttggcctggttaacatgaacccctagtgtatagctcagccatttgtatgtcacgatcttgttttggtccgtgacgaactcgtctatattttccagataaagctggtccgccatggtgcggcagcgctgggacccgcctctaacccctctctcaatcacagccacagctcccgccggcgggaaacgtct

SEQ ID NO: 74421 - DNA, 2102 bp, Homo sapiens; identical to SEQ ID NO: 64740

SEQ ID NO: 74422 - DNA, 2168 bp, Homo sapiens; identical to SEQ ID NO: 64741

SEQ ID NO: 74423 - DNA, 1116 bp, Homo sapiens
aatacatgtcccctagcctttgaccactgtcagccacctgtgtcccttgagccttcgggtcttcacttcccacttggacatcactgctggacattcccatcgagatgacacctgggttccaatcccagctctgcctttgaagcacttgcggccaccgtcaagtccctttgctctcggaccctgggtttctcatcctttaatgaggtgggttcagaagctctcccatcttcacagcaaccctggcactggcttctcaatgggagggaagcagcagagaaactgaagtgttagacactatgtgtcccaccaccccattacagagacatatgacaatgttcagcaggtcatctttaatgcagaggaggagatgggatgtcactcgctgtctggaggcacgtgggtggtgtgcgggccctcactggccagcctctgggtggccccgcctatcccagtatgaacgtagccaactcaagccctctactgtgtctcagcccacgaagcctttgtagccttcatcttccagcagttgaaacagataggggaaattcagctctccggggctgctgggctcccctcgacctgggacctgtgccacctgcacatgcccaacaatgggcaggaactcccggatgtttcctgtcaggttcccatccatgatctgccagtggaatatgtccatttgtaattggaggttgggtcttcctaccttctgtaagatggctgccgcctgctggggcgtgtccaggaagtactgggggtcagtgatgcgggtgttgatgggctccagcagtcccacgaggtcctcctgagccaaaaccccagctgcatgcctcaggttctccagaaaaacggcctccatctcagccttgactgctattcgatcagctccctggggtactcggccagccatcaggtggatcatgtccagcctcaggaacgctgccaaatacaccaggcctcctcttgccacagcacccttgcaaggaacactcaacttcctgcccatcaagcaatgcccactccgcacggcctgctccagtccctctcggaaggccgcatgtctcccggggacggcacccagccccatttcccccttctcttggtctcccgggggcg

SEQ ID NO: 74424 - DNA, 4880 bp, Homo sapiens; identical to SEQ ID NO: 64743

SEQ ID NO: 74425 - DNA, 831 bp, Homo sapiens; identical to SEQ ID NO: 64745

SEQ ID NO: 74426 - DNA, 1035 bp, Homo sapiens
ttttttttttttcaaatggccaaaagcaatttaatttttggaggaaaaactgcatacccagtacaacttatatctcaggcgaaatgtctcaaaatcttcctgctcattggacaaaaactcagcttcaccacattgccagccgggagaccatgaaagggaactggcgccactgcccccagctgcccttcccaggggcgaacttcaccaagatgtggaaatcctgggcccaccccacagtcagtcatcgctccatttcttcctggcaccaccacctccatctggcctgctccccaaccccccagaagcaggtgggcccaggctccaggccagtgcccccatcaagatcagacgtaaggcatcttcccaccgtcgctgtgctgcggggacttttccaatccttccttcctctctgtccagaggctgccaggctgagggggccaccgtccaggtggaacaggcacaggcatcggggaatcagatggtatcagtggggatagggcacagcactttcctgggagccatgtgacgccagatcttcctctggcagttcccactggctgtgggaagtggttttcataaagggggccaacttccaggaacatctagggctcgggagcaacccagcattgacagtgaatcagaatccacctagagctggccatggcccaggcagggggtgtcttccccacagcccccaggagtggctgcacctagtgggcgcagcatttggcctgcctcgcgggccccttgttcagagccacagctgcatccccccgtagagcctggccctcctcgtcgcttctctgcagtagctcttgggccactgtattgaacacctccgacacctggtggttcagtttggccgaagtttccatgaacagcaacttctggctgtcggcaaactccttcccttcctgaaggaaacagccacaaaatccagcgctgtttataagagagtttcctaaggacacctggttcacttccaacagtaagatccgagaaagctgcagccgtggagcccgccggacgcgtggg

SEQ ID NO: 74427 - DNA, 1200 bp, Homo sapiens; identical to SEQ ID NO: 64746

SEQ ID NO: 74428 - DNA, 3156 bp, Homo sapiens; identical to SEQ ID NO: 64747

SEQ ID NO: 74429 - DNA, 1757 bp, Homo sapiens; identical to SEQ ID NO: 64748

SEQ ID NO: 74430 - DNA, 459 bp, Homo sapiens; identical to SEQ ID NO: 64749

SEQ ID NO: 74431 - DNA, 1885 bp, Homo sapiens; identical to SEQ ID NO: 64750

SEQ ID NO: 74432 - DNA, 1060 bp, Homo sapiens; identical to SEQ ID NO: 64751

SEQ ID NO: 74433 - DNA, 2481 bp, Homo sapiens; identical to SEQ ID NO: 64752

SEQ ID NO: 74434 - DNA, 442 bp, Homo sapiens; identical to SEQ ID NO: 64753

SEQ ID NO: 74435 - DNA, 1497 bp, Homo sapiens; identical to SEQ ID NO: 64754

SEQ ID NO: 74436 - DNA, 1968 bp, Homo sapiens; identical to SEQ ID NO: 64755

SEQ ID NO: 74437 - DNA, 504 bp, Homo sapiens; identical to SEQ ID NO: 64756

SEQ ID NO: 74438 - DNA, 929 bp, Homo sapiens; identical to SEQ ID NO: 64757

SEQ ID NO: 74439 - DNA, 2863 bp, Homo sapiens; identical to SEQ ID NO: 64758
  misc_feature (1)...(2863): n = a,t,c or g

SEQ ID NO: 74440 - DNA, 618 bp, Homo sapiens; identical to SEQ ID NO: 64759

SEQ ID NO: 74441 - DNA, 1356 bp, Homo sapiens; identical to SEQ ID NO: 64760

SEQ ID NO: 74442 - DNA, 2038 bp, Homo sapiens; identical to SEQ ID NO: 64761

SEQ ID NO: 74443 - DNA, 1009 bp, Homo sapiens; identical to SEQ ID NO: 64762

SEQ ID NO: 74444 - DNA, 1077 bp, Homo sapiens; identical to SEQ ID NO: 64763

SEQ ID NO: 74445 - DNA, 2093 bp, Homo sapiens
atggctgcggccggcggcggcggcggcggggcggcggcggcgggccgagcctactcgttcaaggtggtgctgctgggggaaggctgcgtggggaagacgtcgctggtgctgcgctactgcgagaacaagtttaacgacaagcacatcaccactctgcaggcatcattcttaacaaagaagttaaatattggtgggaaaagagtaaaccttgccatatgggatacggcaggtcaagagagattccatgcattgggtccaatttactacagagattcaaatggagcgattttagtttatgacataacagatgaagattcttttcagaaggtaaaaaactgggtcaaagaattacggaaaatgttgggaaatgaaatctgtttatgtatagttggtaataaaatagacttggaaaaggagagacatgtttccattcaagaagcagagtcgtatgcagaatctgtgggagcaaaacattatcatacttcagccaaacagaacaaaggaattgaggaactctttcttgacctttgtaaaaggatgatagaaacagcacaagtggatgagagagcaaaaggcaatggctctagtcagccgggaactgcaaggcgaggtgtacagattattgatgatgaacctcaagcccagaccagtggtggagggtgctgttcttctggataactgttcacgcctaagaaattaaaagacagaacaaaactgtggatcattgccctcaacatgaagactgccatattccaagtcacattattttaccaatggaattatagaattaacagtattttaaattacgtttataacactgcagagaccttaagtgctaaacttagtggagtttgtgaccagagaattggcattttctacaaatgtttttttttggtttttttttggttttttttgggtttttttgagacggagtctcgctctatcgcccaggctggaatgcactggcttgatctctgctcactgcaagctccgcctcccgggttcacgccattctcctgcctcagcctcccgagtagttgggactacaggcgcccgccaccacacccagctaatgtttttgtatttttagtagagacggggtttcaccaggttagccaggatggtctcgatctcctgaccttgtgatccgcccgcctcggcctcccaaagtgctgggattacaggcgtgagccaccgtgcccggcctacaaatgttaacaaagcaattaccaatggcctttttacatattttttctttaatgaggaataatatgcatgtagaaaagacctacttaaagtcttcatttatattctttcaaatcaaatctttatttaataacttatatatgttgttggaatggttacatttttgcagccctttgtattttgtggtagtttaaattgtatcacttctaaacagcaaactgtttttgtttttaattagcagatatctgaagtactatttttgcagggtttgcacaggcccgtaactgtctactactttgatataatctgtatacatcctgtatgctgagctggtaaaatacattgtaaattacatattaaatattttatctgcttttacaagcgcaaggtgcaaaaatatatacaatagtctcattgatgactgtaaagtgaattaacatttggtgattatgcctagcttttttgactaatataaagatcatagctccccttcacttctgtcttaacttgaacatggcgtgtttaaattttcatacatactttacttgaattattgctgttgtcacatatttttgcctctgtgagttcatctgatgattgagcagtagcatttgccttttgggttttttgtttgttattatagaagagatgacttctgctgattttgctttagaatggttaccttagaagaatttgggtggctcatgttgaatttcacttctgcaatagctttcattttctcataggctttataagagatgggttcagtggtatgagcagaggaagagatcccagatagtagccagttaaccaagactcattcatatagcacgtagtttatgttcctgaggcagcacttttagatcctttgtgagcaagttctattt

SEQ ID NO: 74446 - DNA, 1323 bp, Homo sapiens; identical to SEQ ID NO: 64765

SEQ ID NO: 74447 - DNA, 1158 bp, Homo sapiens; identical to SEQ ID NO: 64766

SEQ ID NO: 74448 - DNA, 795 bp, Homo sapiens; identical to SEQ ID NO: 64767

SEQ ID NO: 74449 - DNA, 1119 bp, Homo sapiens
ttttttttttttgtgtgaacaagccttcattgtgcaagcgtgagcccaacaaacaaacaccaggtctgcgctggccgaagacgaagcgtcctccctggaggtgggaacaagtcacctctgaccacacctcctctgacgccatcacctcctcctggccccacccaagggctcgacacaagccccaaggtcggggggagaggggcggggcggaaccgagggcggaggccaaggtgggattccaggaaggccttccgaaggatggaggtgggtcctgtccctccaggtagcttgtgggtgtggacagcaggacttgctggctcagtgtgggcacaaggacactgtgccactggttgagtgagtggtgagggattggaggtggctcccagaggcctccatctgcatggccctggccctgtggctccagcaggctgccctggctgtgggtagcccaggagccacatgcgcttagtggggccgctctggggcaggggctctcacaggacagcatgagccactgagccgcctggggagggccaggccaggcggggagctgtggtgcaatttgctcctgtccctggaggtctgtgggcggaagctgtgggcacaggtggacatggctgtcagacgtggggtcataggctcccactccccagctcctgcctcctcacagacagaagccacggccaaggagaggagagacatggggaaggcagagatgagggaacaggaagggagaaggcaatgaggaaagagaaagggagggtaagatgcggagggcacaggtggatggggacgagggggccaagcatggacagcgggaggggagaaggcggaggggccgagaggcagctgcgcaagagggccttcaggcagagttgaggtctgtggccttgggctgggccttgcgggaggtcagctccgacagcttcttcagccgcttcttcagctccagcgggaacttctcgtagcacctcttacacacgggcttcatgtcgaactccacaaacttgttcttcagggtgagcttgctgttgcaggtggagcaggagaagcagctcacacaccaggccttgttgagggccgacaccacatcgccttcaatcacatggctgcagttgt

SEQ ID NO: 74450 - DNA, 1376 bp, Homo sapiens; identical to SEQ ID NO: 64768

SEQ ID NO: 74451 - DNA, 957 bp, Homo sapiens; identical to SEQ ID NO: 64769

SEQ ID NO: 74452 - DNA, 520 bp, Homo sapiens; identical to SEQ ID NO: 64770
  misc_feature (1)...(520): n = a,t,c or g

SEQ ID NO: 74453 - DNA, 1541 bp, Homo sapiens
ttttttttttttcacggtgccttcaagctttattgccacacacactcccccagcccttcctgaatggccctgtgcatgggaacaccagcttagagaagcaattcagggctaggcaagggccagaggactggatttgggactggggtgggtaggggggatctggagaaggaaagtgctaagaccaaagcccacccccaccccaggtttccctgagtggtgtccacccccagggtcttgggggctggcttgtgcattggggggagggggctcatcccaaatggatcctcccctggggtctccaggctcatggagggaagagaagccccactgagcccctcgcaccccccatgaagccctcaatgtgcagggagcaggaagaagagctgcacacaaacgcatacacatgcttgtctccaagagagctcctggcccctggggctgcccagccaggggctcaacagtccagaccgatggacacgagcaggtcctcgagtgcccgcagacgctgctgcgcctcctctatggcgctgtaggtctgcaccgtgctggccacgtggaagcggatgtcgtccaccagcgggatagagtccgtctcctgccgggctgccacagccgctgcctcctccttcaccgcctccacgaagtcctcccgctccaccagcttctcaatgaccttggccatgtactcagtgcactggtcctcaagccgcgccaggcggaagagcttggccacgcgccacacacccaccacagtgtcctcgtctagcatctgagccaggctgcggccgcacagcctcttcaggcctggcagcaggtacatgtcggcgacgctcagcacatcataggctgcctcgggggacagctcagtgtggtcgctgtacatgtagtagagcacgtgagtgaagacgtcgggtgagatgccatgcagggtgacggctggggggccccctgaggtcgctggctcctcgctctctcggaagtggtcatccagcagggctcggaagtagtcactgcggccacagaaaaaggccttgtggcagaggaagctgcagccagccactcggaagcagatgtcagggcagctgttgaagccgtcaggacaagggaagggcagctcccaaagatcacctcggagctcggggggcagggcacaatcggccagcagcgccatgtcctcccggaggcgggggtctgcaggtgggggctcgatggtcagcaccttcacacacgtgcctggcttagacgccacaaactcagacaccttctcgcacttggcctccaggtcgctgagcaggtcccacagctggcattgcttggccaggcgctcacagtcactcacatgctctacgccaatgtccaggcggcctgggggcagtggggaggatgagggcctgcgggacctcagctgtcatcaggcccacagaaaaagggtgatcccctcccacctggccacctggctgcaggactaggactcctgggcccacttgccaccatggtttccccatcaaaagctgttcggacgcgtgggtcgacccggaagt

SEQ ID NO: 74454 - DNA, 904 bp, Homo sapiens; identical to SEQ ID NO: 64772

SEQ ID NO: 74455 - DNA, 988 bp, Homo sapiens; identical to SEQ ID NO: 64773

SEQ ID NO: 74456 - DNA, 1496 bp, Homo sapiens; identical to SEQ ID NO: 64774

SEQ ID NO: 74457 - DNA, 1160 bp, Homo sapiens; identical to SEQ ID NO: 64775

SEQ ID NO: 74458 - DNA, 6277 bp, Homo sapiens; identical to SEQ ID NO: 64776
  misc_feature (1)...(6277): n = a,t,c or g

SEQ ID NO: 74459 - DNA, 566 bp, Homo sapiens; identical to SEQ ID NO: 64777

SEQ ID NO: 74460 - DNA, 902 bp, Homo sapiens; identical to SEQ ID NO: 64778

SEQ ID NO: 74461 - DNA, 1762 bp, Homo sapiens; identical to SEQ ID NO: 64779

SEQ ID NO: 74462 - DNA, 1935 bp, Homo sapiens; identical to SEQ ID NO: 64780

SEQ ID NO: 74463 - DNA, 1293 bp, Homo sapiens; identical to SEQ ID NO: 64781

SEQ ID NO: 74464 - DNA, 1890 bp, Homo sapiens; identical to SEQ ID NO: 64782

SEQ ID NO: 74465 - DNA, 1046 bp, Homo sapiens; identical to SEQ ID NO: 64783
  misc_feature (1)...(1046): n = a,t,c or g

SEQ ID NO: 74466 - DNA, 1020 bp, Homo sapiens; identical to SEQ ID NO: 64784

SEQ ID NO: 74467 - DNA, 1476 bp, Homo sapiens; identical to SEQ ID NO: 64785

SEQ ID NO: 74468 - DNA, 1687 bp, Homo sapiens; identical to SEQ ID NO: 64786

SEQ ID NO: 74469 - DNA, 789 bp, Homo sapiens; identical to SEQ ID NO: 64787

SEQ ID NO: 74470 - DNA, 2142 bp, Homo sapiens; identical to SEQ ID NO: 64788

SEQ ID NO: 74471 - DNA, 922 bp, Homo sapiens; identical to SEQ ID NO: 64789

SEQ ID NO: 74472 - DNA, 2897 bp, Homo sapiens
cccacgcgtacggccaggtgggagtgaagattgtgatgtgttggaggccacccagcccctggaacaggggttcctgcagcagctggaggagggccccagcagttctggacagcatcagccacagcaggaggaggaggaatcaaagccagaaccagagaggtctggcctcagttggagcaaccgggagaaggcaaagcaggcattcaaggaactgctgagggacaaggctgtcccctccaatgcctcatgggaacaggccatgaagatggtggtcaccgacccccgttacagtgccttgcctaaactgagtgagaaaaagcaggcattcaatgcctacaaggcgcagcgggagaaggaggagaaggaggaggcccggctaagggccaaagaggccaagcagaccctgcagcatttcctggagcagcatgaacgcatgacctccaccacccgctaccggcgggcagaacagacctttggggagctggaggtctgggctgtggtccctgagagggatcgaaaagaggtttatgatgatgtcctcttcttcctggccaagaaggagaaggaacaggccaagcagctccggcgccgcaatatccaggccctaaagagcatcctggatgggatgagtagtgtcaacttccaaaccacgtggtcccaggcccagcagtacctcatggataaccccagctttgctcaggaccatcagctgcagaacatggacaaggaagatgcactgatctgttttgaggagcacatccgagctttggagagggaagaggaggaggaacgggagcgggcccggcttcgggagcgacgccaacaacgcaagaatcgggaggccttccagaccttcctggacgagctgcatgagacagggcagctgcactctatgtccacctggatggagctatatccagcagtcagcactgatgtccgctttgccaacatgctgggccagccgggctccacccctctggacttattcaagttctatgtggaggagttgaaggcacgattccatgatgaaaagaagatcattaaggacatccttaaggaccggggcttctgcgtggaggtgaacacggcctttgaggacttcgcccacgtcataagctttgacaagagggctgccgcactggacgcaggcaacatcaagctgaccttcaatagtctgctggagaaagcagaggcacgggagagggagcgggagaaggaggaggcacgcaggatgcggcgcagggaagctgcctttcgaagcatgctgaggcaggctgtgcctgctctggagctaggcactgcctgggaagaggtccgtgagcgttttgtgtgtgactcagcctttgagcagatcaccctggagtcggagcggatccggctcttccgggagttcctacaggtgctggagactgaatgccagcacctccacaccaaaggccgaaagcatggcaggaaaggcaagaagcaccatcacaagcgttcccactcaccctcaggctctgagtcagaagaagaggagctgcccccaccatctctccggccccccaagcggaggaggcggaacccctcagagtcaggctctgagccctcttcctcacttgattcagttgaaagtgggggtgctgcccttggaggacggggctccccttcctcccatcttcttggagcagatcatggccttcggaaagccaagaaaccaaaaaagaaaactaagaagagaagacacaagtcgaatagtcctgagagtgagacagaccctgaggagaaagctggcaaggagagcgatgagaaagaacaagaacaggacaaggacagggagctccaacaggcagagctccctaaccgttccccaggctttggaatcaagaaggagaagacaggctgggacacgtcagaaagtgagctgagtgagggtgagctggagaggcggcggcggacactcctacagcagctggatgatcaccagtgacccaatgagctgttctctgcctcgggtctgtgtgaggccatggctcctggggccaccctccaccggtctgcctcagactttttccttagtctggtctgtgtccactttttctaaagtaaccccccaacccccagcacaccattgttggcacctctcaaggttgctcttggtgttcaagggtcccctactccctggactagtgcagtccttgccctcagccccagaccagagatgggtggtatatgccatgtggggtgggtgatgccagtagataaaagtgtgagagaaggggtctccagggaagagtcacaggctgttggacacagcctgggtggcagagggcagggtcatcaccctctagcatcagtgcctgctcctgcctgccctggccctgaggctccaccacttcttcctccacccaggacctaatgtacgtgtgttttgttttttgttttttaaataacaatatttataacatggccagtgactcttttccatgtgctactggggcaggctggggactggacacatgcccagcagagggcactagtgtctcatggcaggcctgcttccctttgtgtggctagagcccacctagccggttctcctttccccagagttctgatctcatctcctccaaaacagatgcagtgccccaaagatttcttttctatccccatagcccaggtcagactaaatggccaccctagccccctaagctcagaaagaggagacaaagtcaggcctggtgcatcaagcctttgttgagagggggagagtctgaggtttatgtacagtaagaggaaagggaggtggtacatgtacaaaaaagtgggcccccacattcccttccaggggcagaggagaaacgggaaggtaagcaaatagccaagaccaccatgctccttgtcccctgccaaaaaaaaaa

SEQ ID NO: 74473 - DNA, 2214 bp, Homo sapiens; identical to SEQ ID NO: 64791

SEQ ID NO: 74474 - DNA, 1512 bp, Homo sapiens; identical to SEQ ID NO: 64792

SEQ ID NO: 74475 - DNA, 2197 bp, Homo sapiens
tttttttttttttaatgaaaatatgtgacacttttatttacaagcttttttgcataaactatacttaacatgactaaacaacaaaaagttcttgacttccatcctttatgggtagaaaaataaattattttaatagttatttaaacatgcctcctgcttccagagaaattaatgtgttaaatatatatatttttcaaattatccctaacatttacacaaacttgagtagatactgctctatttttacacagaattgtaaacagccttttaaaaagctagagtaactttccactagttagaactgaacattgtaaaatataaaaattttataaaccctataatgcaggtaatttaattatgactgatctgtaggaatatacaataaaaatttgtcagtcatccacaattaagtacaattatttatggagaaaaattttactatgtccagaaaaagattttattcatgttcttgaaagatagctttgttcccaataaatattccctcctactatttttgtacattttaggaaaagatgtattcagttcaaaaataagtaacatccagttatttgactttttgcttttttcttgcttgaaactgctctgttttggtttttatagatttaatcaacattgacaaagcaggatcaatggacttcctttgtgattccttttcaatctcactctcttttttctttattgcctgagtaagttcttgttcttttcgttctctttgccgggccttctcctcaaggattttttccatagcttttgttttcttgaaattgggatctgaggggtccaaattgaacaagtgggaagtgtacattgcctgaaaccgtgcatcgttaacatttacctcaaagtcatcctctattaattccttctttttcatgagctgctttttcttctttttgctcagattctggtgctccacaatcttgttgtaattgaagtgtttcttactgtcctcgtcctcatccatcataagcaaagccatttcagccttttgtctttctatttcaatttcttcttctggagatgtgccatcttttgcagattttaccgattttttatttatacctatttgtttaacttcttcagcaaagtatgggtcattcaaatcaacatcagagggaagttcctcttcactggcctcttcagcaagagccttctgtttccttttcagtctttttttctctttcttcttctctaaaaattgttcccaaggggtcagtttatcctttccttcccatttgtttttgaccatctcttctgcactttctttaagacctggaacccatttaatttccatttccatatcattttctttgccttttttttttttttcttgaataacctgcaagagctgcctgtatttagcaatttgttcttcatcatccttctgacttttctttgttttcccatcttcttctacattgactccatcatcaccttgtagctcctcttctgtctcctcttcatcttcactagaggaagctaagtaggcttgaaaatccatgtccaaaagctcttcctttttaaacttcctgttgagcattgtaattctttcatgatcagtctcatcccaagtgatttccaccgttgatgttcccattgcagcagaagtgaaatattttggtttatatgctgttaaattcacttctgaggctacatccttaggctcatcatcaaaagtaatatcatctggtataaaccttagatctatgaaagaacaactactttcaaattccaggccatcacaatcctcataaattttactagctgtttccggagaatcacagtctactactgcataatagtacttcagtcgtttgaattgataatctctcaatttttctctagacgtccagtctttttctggggcatcttcaggaatacttaatagctctactggtccttgaacttgctcttccttcatcctctcctttccaaattctgaaggatatatcttgacggaaaatattacacctcctttgggtttaaatgaattgaacagagccagcaaatcttttgcctttaatctatcccagtccatgttacaaactgctaatcgacgtgtaatctcatcagcacgaggagcatctttatctaattctctccaagcatgctcaaaaccagattcttctggaaacaaatctgccgtatcatcttcatcttcagaactagtttctat

SEQ ID NO: 74476 - DNA, 1520 bp, Homo sapiens; identical to SEQ ID NO: 64793

SEQ ID NO: 74477 - DNA, 2850 bp, Homo sapiens; identical to SEQ ID NO: 64794

SEQ ID NO: 74478 - DNA, 663 bp, Homo sapiens; identical to SEQ ID NO: 64795

SEQ ID NO: 74479 - DNA, 692 bp, Homo sapiens; identical to SEQ ID NO: 64796

SEQ ID NO: 74480 - DNA, 4703 bp, Homo sapiens; identical to SEQ ID NO: 64797

SEQ ID NO: 74481 - DNA, 803 bp, Homo sapiens; identical to SEQ ID NO: 64798

SEQ ID NO: 74482 - DNA, 1280 bp, Homo sapiens; identical to SEQ ID NO: 64799

SEQ ID NO: 74483 - DNA, 543 bp, Homo sapiens; identical to SEQ ID NO: 64800

SEQ ID NO: 74484 - DNA, 388 bp, Homo sapiens; identical to SEQ ID NO: 64801

SEQ ID NO: 74485 - DNA, 1222 bp, Homo sapiens
ttgctttgtcatctgaaccacaaactgtacttcttttgcctccctatgaaaatggcttctgccagtagcattttctccagtcatccacaggtgaagacaaggaaattctctatcctgaggcccccttttccacataatcccaccccaatgcaaactatttcctgcaaacagataccttcagactgtttcccccttcatcataacgaccccagacctagaaatcccagtttaggcctcagttgaaacattcctcctacctataaaaactacccgtatgggcctcatttcctcatcccactaggggtctgcccttcctaaatcaaaagcaagtagaagacagagtaaaatgtgtaatataaatttattctgggacattttcctcattgaagatattttaacatagattaaaatacatcaatatttcatgaaaaataaattctagaagaatttaaataatatctgtaatgtacatgatttgaccctgaatatccttttttttttcacttcaaacatcattttttaaaaagtaacataaaatgataaggactgcaacattcttcatatatcttgtgtctcataaattttaattcaactgcccgttcttttctcaactatgtatgttaatggtatttgctcctgtttttgaataggaagagtatccattttctgtttcttcgtgatatttaggtcttctttctctgattcttcaagaaaatgcttcgtgctgagtttgaatagtaatcgagggtctggattagacagtggtggacaattacacatctctctaattttgagagcctgaggtataagtctatccaagtactcaactcgattgccatgagaagggtgtgtagataaccattctggcatcttgggttggccatgcaggctatcaacgaactccatttgctgccaaaacactgaactggctcttatgtctgcacaagcctttgcagcaagcagtagtccaattttgtcagcttcggcctccaattttctgctgtatggtctattaaacatatactcctgcaatttagactgtatccactggcacaaaagtgccaagctatctcgaggacaaatggcccaaatcattgtgaggaaaatcatacctaggaaatccaacaaatgaaccatgccagcctttccttctgggccatgaaatagcacatgcagtacttgggcatgctgcagaaggaaagaaagttgatgaatatcggtt

SEQ ID NO: 74486 - DNA, 2038 bp, Homo sapiens; identical to SEQ ID NO: 64803

SEQ ID NO: 74487 - DNA, 998 bp, Homo sapiens; identical to SEQ ID NO: 64804

SEQ ID NO: 74488 - DNA, 2985 bp, Homo sapiens
gggaaaggtccaactggcccaccttcaacactccctctaagcacccagacctctagtggcagctccaccctatccaagaagaggcctcctcccccaccacccggacacaagagaaccctatccgaccctcccagcccactacctcatgggcccccaaacaaaggcgcagttccttggggtaacgatgggggtccatcctcttcaagtaagactacaaacaagtttgagggactatcccagcagtcgagcaccagttctgcaaagactgcccttggcccaagagttcttcctaaactacctcagaaagtggcactaaggaaaacagatcatctctccctagacaaagccaccatcccgcccgaaatctttcagaaatcatcacagttggcagagttgccacaaaagccaccacctggagacctgcccccaaagcccacagaactggcccccaagccccaaattggagatttgccgcctaagccaggagaactgccccccaaaccacagctgggggacctgccacccaaaccccaactctcagacttacctcccaaaccacagatgaaggacctgccccccaaaccacagctgggagacctgctagcaaaatcccagactggagatgtctcacccaaggctcagcaaccctctgaggtcacactgaagtcacacccattggatctatccccaaatgtgcagtccagagacgccatccaaaagcaagcatctgaagactccaacgacctcacgcctactctgccagagacgcccgtaccactgcccagaaaaatcaatacggggaaaaataaagtgaggcgagtgaagaccatttatgactgccaggcagacaacgatgacgagctcacattcatcgagggagaagtgattatcgtcacaggggaagaggaccaggagtggtggattggccacatcgaaggacagcctgaaaggaagggggtctttccagtgtcctttgttcatatcctgtctgactagcaaaacgcagaaccttaagattgtccacatccttcatgcaagactgctgccttcatgtaaccctgggcacagtgtgtatatagctgctgttacagagtaagaaactcatggaagggccacctcaggagggggatataatgtgtgttgtaaatatcctgtggttttctgccttcaccagtatgagggtagcctcggacccggcgcgccttactggtttgccaaagccatccttggcatctagcacttacatctctctatgctgttctacaagcaaacaaacaaaaataggagtataggaactgctggctttgcaaatagaagtggtctccagcaaccgttgaaaggcatagaattgactctgttcctaacaatgcagtattctcaattgtgttactgaaaatgcaacattagcaaagaggtgggttctgttttccaggtgaaacttttagctccatgacagaccagcctgtagttatctgtgtacacagtttacagctacaaaaacctactttggtatttattacagaaaagtgctcagttaaatgtaagtgttattccttcagcaaaatattcactgacccaaaactctttatggcattttacaatgcacacagcctcatgcaagtttagacaagtggatttatactgtcttatgagtgcccgcccctgatatattacctcattatgcaaaaataacatatctttcatgactattttgacaaaagtttaaaacacatatgaagttcaaatttcaggaaccaaggactgccagaaaatattagcctctacattacgcatgcatttagaagcttacctgaaatctgccttttataaaggaatagtatggataagtggaattgtacattttttaaacttgattgccattaaagcagaaattataaggttgcaacaatatttgtttctaatcactggctttctcaagagtatggattgacatattgtgttatgaatgcacatctctcagatgtgttgaagcatccattgcatccattttttattattttcttagttttgttcttggacaaatttaaacttttaaaagattattcaagatgaatttaaaagtcaacccttcacacagtttccctactgtatgtagaatccaggtgctgaaaccaagtgtttcttttcccatgctctttgttaaaccccaattatagataatttttccagtcttaagctctgtccaccttcaagtcaattcataaccaagtttttgaacgctgctatgaattgcactgtgaaaagcactcttccctctcagttttcttttcatcccagccatgtttatcagatccttaagaacattgtatttcagtcttttacatcagtctgaattttggaaaagaatgcaatagttgtactccacagtcagtggaactgttccctgagtccgaggctcatgtgtcattctggcactacatttgcttaaattgctattttggcaacagcacagaaaactaatatttttaagcagagaatcttggcaatgagtgagagatgttaatttcacagaagcacaactcccaacccaacccttaggaaaagccctcttccatcgttacagtgctcagtgaatattaatttagttctgcttaagtggttgctatacaaactttgaatagccacctaataaataaaccttgcatgacaaacctgcaaaatattttatcagctgttattggaaagtgattttaagcaattgcttcctcagtgtcagggcacatgtgaatttccacaccaaacagagcatgaggaaccagttgacatgctgggttgtgactggcagctttagcagcctcagtactgaagccacaccagtgtccggatggaagtctgcatctgaggttgctcagtgtcccggtcattcatttacacattttaacttgcattaaagagctgttcttttctgtggcctagactcttttcactgatctcaaaataaactggtttttttcaaaaaaaaaa

SEQ ID NO: 74489 - DNA, 1268 bp, Homo sapiens; identical to SEQ ID NO: 64806

SEQ ID NO: 74490 - DNA, 1222 bp, Homo sapiens; identical to SEQ ID NO: 64807

SEQ ID NO: 74491 - DNA, 399 bp, Homo sapiens; identical to SEQ ID NO: 64808

SEQ ID NO: 74492 - DNA, 2951 bp, Homo sapiens; identical to SEQ ID NO: 64809

SEQ ID NO: 74493 - DNA, 1450 bp, Homo sapiens
ttttttttaaagtgaaaaagaatttatttaaggttttgttatatcaggacaacaaaccagcccttttatgtcaccactcatttaaaaggccattccaaaacattaccattaatgtagtagcccatgttttctttcaggcattttcaaagggcatctcagacccacaatattttctattgagtgtgcagaaaaacagagctgcaaaatcattagtaaggcaaaataataaaatgtctccctttttattgaaacatcaattttccatgttttagagatattctgaatttaacattcatagatatgcaatatttaagttttaggatattagcatactatcagcaatattgggtttaatagctactatcaagcaactgatttctaatgcacacaacataatttgatagtatatgtataagaagatggcctgaattttgccctcaaatgcacaaaaagaattttccatacacattctcaaaagtctttggccttgctgaataataatagagctgttattttactgtgaagcaaaataagccttcaagtgtcccttacttgatcttagaaggtcaaattctctgtccaatagttcctcttctgttaacttagagaaattatcctctccaaaaggattccaccctgacatatcaggtggattgctgatgttcttctgatttgtgaaatttgcaatggcctctttatcagcaactgacctattggcactataggaggagtccattatggttccaacctgagctggaagtgatgaagtgtaggaaactaaggctggtgagaactcttgaggggaggtaagatattcaggtgatgcctgttgttgagacggctgatgttgagctagcatctgctgttgaaagaaagcctgctgatactgcggcatcattgtaggatactgtgatgcagaaggttgtggttgatataccgaatgcattaaaaattgttgttgaagcatctgttgctgctgtgttgcatgttgatactgctgcatataagcatcttgaagtaggtggtggtggtggtggtggtggtgctgctgctgctgctgctgctgctgctgttgctgttgctgctgctgctgttgctgttgctgctgctgctgctgctgctgctggtgaggatgacgatgctgtaaatggagttgctgtaatctccaatctccctgctgtagttgctggagtactctatgctgctgtggcggctgctgaggaggtccctgacccaataaaatttcagggccatttccaggtcttagtgccccttttggtctatggttaccgaattcaccaggagcaaggactttaacaggtgttgctgaactttgaatggtcagcacactgggagtggcagtagtagcagagttggcctttggtctttgtcttggtgcaattgaggtatatgttggtcaaatggtatctgttattctggcttttatttg

SEQ ID NO: 74494 - DNA, 5931 bp, Homo sapiens
ccaactcctggagtcccctgggagctgccgctgcaggcccccgagccgctaggccccgccgccaggccaccgctgctgcggcagccatggcggaagttcatagacgtcagcatgctcgggttaaaggagaagcccccgcgaaatcctccacactccgagatgaggaggagctggggatggcgtcggccgaaacgctgaccgtgtttctgaagctgctggccgccggcttttacggcgtgagctccttcctgatcgtggtggtgaataagagcgtgctcaccaattacagatttccctcctcactatgtgttggacttggccagatggtggccacagtggcagttctctgggtgggaaaggcgctcagagtagtcaagtttcctgaccttgacagaaatgtacctcgaaagacgtttccactacctctactatattttgggaaccaaatcacgggactgttcagcacaaagaaactgaacttgccaatgtttacagttctgagaaggttctccatcctgtttacaatgtttgctgaaggagttttactcaagaagactttttcttggggtattaaaatgactgtatttgcaatgattattggagcctttgtagctgccagctctgacttggcatttgatctggaaggatatgcttttattctgataaacgatgtcctaacagcagcaaatggtgcatacgtaaaacaaaaattagattcaaaagagctgggaaaatatggactgctctattacaatgcactgttcatgattctgcccaccctggccattgcgtatttcacaggagatgcacaaaaggctgtggagtttgaaggctgggctgacaccctctttcttctgcagttcaccctctcctgtgtgatggggtttatcttaatgtacgccacagtactctgcacgcagtataattctgctcttacaactacaatagttggctgtattaagaatatattaataacttatattggaatggtctttggtggagattatattttcacgtggacaaacttcattggtttaaatatcagcattgctgggagcctggtatattcctatatcactttcactgaagagcagctgagcaaacagtcagaggctaataacaagctggacattaaggggaaaggagcagtgtgaccagaggattgcttcatctgatacgtaggcctaagtttttaatcaactcagaacactggcagttcctacagagacactgaggtgtcttgattatggaggaaataaccattcctttgcacttgtacaatctgaggattgattgctgccttttaaaattttatgaagagagaaacttataattgactctattttaaatatgttgtttgaattaatttatatcagactggaaaaggtactgggctttttaatttatttttcttatatgccgacagtgaaacatcagtgttttgaaagtattttatttcataatttgatatccaggtgtccctgagagctgcatatgtaatgtttgccaactggagcttcatcattcaaattgttgctgcatctggaggcagtttagcctttcctctgctggaaatgcagacgaatatgtgaaatttctcttctttgaatcttatttcttatgattgcattgtcttcatcatatcatcattccatttgccaaggaaaacaactttggcactataaaaatatgtggggctttgaagtgtattgctatctatgttggcttccctgactttcataggatgagcagagtgcattccttgaaaacatgttctttttttgttgtgtagaatggggataatgaagggggtgagaaagtaggccttttactaatttttcatctatttgacttattgattcaactaaaatgttttaagtatatgtgccaggcattgtgctaaatgctggggatacagagatgtttgcagaggtagttgaaacatctcactcctgccatagtgactcaggtaaggttgagaatttagctctgttaatctattcagaagatgtcactaagagtaagttgtttcagcactcaaaagccgcaaatctgtaaattggattaagaacacctgccctacctacccggcaatagtgtgaatccaaatgctgcaatgtgagatgaggtacaagtaaagagctgtgttttgtaaaccagtgcagctcagcattgactccctctctaagtgaaaattgcagacaggcaagtctgttttcccttgccaccttcctttgggtttggttgctctttggatgaatatgatgagggcccacatttctgaatttattggtttgaggggaaaggctggttagacgtctttgtattgtcaatggttggtttttctctggcagtgtcagtgttaaagctatcattttccttcttaaatggcatgagcaatgagcaaacttccctcctttcaacattctcacctacatcatgtgccccttggctcacctactgagcttgccaacttctctcaaaaccaatgctgcattttgggagagcagctgtgaatgggcactgcctaaattgcctcttggggtaatctggagggtggaggtgttaactcaaacataaccctatgacttgactcagagatatccattgactttgaggattagtgtgtttgctcaggccagttgtacagccagtgtgcaagagatttggtacctttgcactaatgcacacaccagtgtctatttcattgggtttggaatccactggactctgttgacctaaacagttaggggttttgattttttttgatatgcaaatttatattgagatcattttcatattcctgtcttttggtttgtctttactaaagcttggctggtggtgctgtgtccctagaattatccctgcaaccaactcccaagttacaagcttcattaagagccttagactcacttttttctagcatcttctgacctgagaaaattccactgggagtaaaggatagtatcttgtgtcatatgggtcttactctccctattttaccaatgagaaaacaaaactcagagaaagatgacttgctaatacatcaaacccatgtcctttttattgaactatgctgccatttaattaaccgcccttcccctctgagggagtaaggaaacagatcctgagttcacttgagcactttcaaaaaagcaagcagttgattgaatttggtgtcagagaggagcatactttgcaaatcaggaagagtgacagcttaccctgtcctggaacccttatcccgcttccaggctgactttagttgataatgcacttctggctgtaaatgttgccaacacttcctggttttgcttaggtacagtgaaagggcatagtgagagctatttttagtgattctgttctttctgtcagcaacatgaaggagggacgtttgaataatttttgttgtagaatatttcttcatgaaaggcttttgggtgtctttaacaggtgttgggctagagccccaccaggagttgaactgcctcttgggggtcaggttccctaggagatctgtcacctcttcaggagtatttgagaacattgtgtagttacagcttcactaaatgcacgtgacaggcttctgtgccttgggagccctggcttatgctgaaacttctggctgaccagagcagtacagcaactttgccctgtctgtgttctgcttcctggatgcatccttcagccactaaccagcattgcaagatggagcagggtgaacaagctggagactgaatagtcttttggagtttgcgttttgattattgcaggcgtgttacaatatactggtgatttacctggtactgtggcacctcccagaaagtctggtttttgccccatgtttgatatttactaggcagaaattctttgtcctgttaactgcctcctgggagaaaaagaggcaatacagagttaaatccttaatttgcccactgagacagatgagctgtggtattccaaaagacaaattctatgactagtgtctcctgttcaatgtaagtgagaccctctttggccaatctgcttctagtcaaggctaaatggattggaataaccctagttggccaggctacacattgccagcatgtcccgttgagttttaattgcctcatgtggctgtggactttatgagtcaatcatttgtaggctccagtttgcacctagttttttttttttaaaaagggcatttacccccttttggtagccctgttttatcaagaatccatggagggttttggtcagtacagctggtgcaggatcctcacggagaaacagtggagtttcacattgagttggtttgaaatggcaccccaggactttgggcctgccttacttgatagcctcgttcagtgagcaaagacttagtgagcagctcttgtatgccaagtattttgctaagctctggaaaaaagataaacaagacatggttcttgctttcaaggagtgtgtaattctttagccagatatggaaacctggaccctgagtgggagaaaggagacagatgaaaggagtccgtgattttgtaaccaagagctgcctgcatggttatgagtatcactgattttagggacgccccacagagctaaagcattttttttaatccgagaggacttttgtaactcatattagttaatcttctagctctgagatagcaacacagctcttagaattctgtaagtagcttgaggcctcctcctctactgtacatgttcttgctttcccaaaattgtaagtttggtttttcctatgaacaagactgtaattgatttttctctccctgaggaaaaaagttcggaataaatgagacatggatatgaaactacttagcacaatgcctggtacatattaggccctcagcaaatgtggctaccgtgtcattatttcatggtgagactcaaggcaaaacaagattcttaatttatgctccgtaaatgctagaggcttgggcaatacggtctgtcctgaaaaacaggactctgtgtctcattgcctctagaatccttaggtagcagtttctgttcactgtcttttcttttttaaaaatatctgctggacacaattacggccattacatgatgcaggtgattctacctattttttaaaaagaacaaaatttcttttatattgtgacagtacattttaataaaggaaaattattttcttccccctactccccctccttttttttttctggtaaagacagggtctcactctgttgccagactggtctcaaactcctggcctcaagtaacccttctgtctcagcctcccaaagtgctgggattacaggtgtgtgccacatgtccggccaggaaaattattttctatcttaaagaaacatagttacattttagaatgtcaattcagttaaatctttctcagtttttacctttagatggctcctggaaaggccagcgttccttttcccctctctgaattgaaagcacttgaccccatgctgcccctgcttccaggcctgtctcagttgtcatatattgtgagtccctggcaccattactgttttctaagccagtcttctaggtcttactttcaggatgctgcttcatggcatgaggatatagtttacagtgttgtagtttttttttttttaaagctttgttctttaaaaatactttttaaaaaaaaatctactggttaaatttattgtctcacaaaaatgtttttagaagattatttttttccacaaatgttttcctttcctcatgctgatgatcaactgatttttgtcctacaggtggttagcttctcacgagtatttttttcatttttagagtctatttaccaaatgaccatttttagtgttaaaaggtactgaggaattgaggtatgtaaatcaggtgacataaacatgaaaattatgtgcctaaatatttttgtaatggtgtaaaataaatactttttcctga

SEQ ID NO: 74495 - DNA, 1198 bp, Homo sapiens; identical to SEQ ID NO: 64812

SEQ ID NO: 74496 - DNA, 645 bp, Homo sapiens; identical to SEQ ID NO: 64813

SEQ ID NO: 74497 - DNA, 745 bp, Homo sapiens; identical to SEQ ID NO: 64814

SEQ ID NO: 74498 - DNA, 3043 bp, Homo sapiens; identical to SEQ ID NO: 64815

SEQ ID NO: 74499 - DNA, 769 bp, Homo sapiens; identical to SEQ ID NO: 64816

SEQ ID NO: 74500 - DNA, 933 bp, Homo sapiens; identical to SEQ ID NO: 64817

SEQ ID NO: 74501 - DNA, 312 bp, Homo sapiens; identical to SEQ ID NO: 64818

SEQ ID NO: 74502 - DNA, 788 bp, Homo sapiens; identical to SEQ ID NO: 64819

SEQ ID NO: 74503 - DNA, 415 bp, Homo sapiens; identical to SEQ ID NO: 64820
  misc_feature (1)...(415): n = a,t,c or g

SEQ ID NO: 74504 - DNA, 957 bp, Homo sapiens; identical to SEQ ID NO: 64821

SEQ ID NO: 74505 - DNA, 1316 bp, Homo sapiens; identical to SEQ ID NO: 64822

SEQ ID NO: 74506 - DNA, 1382 bp, Homo sapiens; identical to SEQ ID NO: 64823

SEQ ID NO: 74507 - DNA, 3450 bp, Homo sapiens; identical to SEQ ID NO: 64824

SEQ ID NO: 74508 - DNA, 1927 bp, Homo sapiens; identical to SEQ ID NO: 64825

SEQ ID NO: 74509 - DNA, 2725 bp, Homo sapiens; identical to SEQ ID NO: 64826

SEQ ID NO: 74510 - DNA, 414 bp, Homo sapiens; identical to SEQ ID NO: 64827

SEQ ID NO: 74511 - DNA, 896 bp, Homo sapiens; identical to SEQ ID NO: 64828

SEQ ID NO: 74512 - DNA, 6398 bp, Homo sapiens
agaccaacaaattcatcaaggagctcatcaaggacgggaagtcactcataagcgcgctcaagaatttgtcttcagcgaagcggaagtttgcagattccttaaatgaatttaaatttcagtgcataggagatgcagaaacagatgatgagatgtgtatagcaagatctttgcaggagtttgccactgtcctcaggaatcttgaagatgaacggatacggatgattgagaatgccagcgaggtgctcatcactcccttggagaagtttcgaaaggaacagatcggggctgccaaggaagccaaaaagaagtatgacaaagagacagaaaagtattgtggcatcttagaaaaacacttgaatttgtcttccaaaaagaaagaatctcagcttcaggaggcagacagccaagtggacctggtccggcagcatttctatgaagtatccctggaatatgtcttcaaggtgcaggaagtccaagagagaaagatgtttgagtttgtggagcctctgctggccttcctgcaaggactcttcactttctatcaccatggttacgaactggccaaggatttcggggacttcaagacacagttaaccattagcatacagaacacaagaaatcgctttgaaggcactagatcagaagtggaatcactgatgaaaaagatgaaggagaatccccttgagcacaagaccatcagtccctacaccatggagggatacctctacgtgcaggagaaacgtcactttggaacttcttgggtgaagcactactgtacatatcaacgggattccaaacaaatcaccatggtaccatttgaccaaaagtcaggaggaaaagggggagaagatgaatcagttatcctcaaatcctgcacacggcggaaaacagactccattgagaagaggttttgctttgatgtggaagcagtagacaggccaggggttatcaccatgcaagctttgtcggaagaggaccggaggctctggatggaagccatggatggccgggaacctgtctacaactcgaacaaagacagccagagtgaagggactgcgcagttggacagcattggcttcagcataatcaggaaatgcatccatgctgtggaaaccagagggatcaacgagcaagggctgtatcgaattgtgggggtcaactccagagtgcagaagttgctgagtgtcctgatggaccccaagactgcttctgagacagaaacagatatctgtgctgaatgggagataaagaccatcactagtgctctgaagacctacctaagaatgcttccaggaccactcatgatgtaccagtttcaaagaagtttcatcaaagcagcaaaactggagaaccaggagtctcgggtctctgaaatccacagccttgttcatcggctcccagagaaaaatcggcagatgttacagctgctcatgaaccacttggcaaatgttgctaacaaccacaagcagaatttgatgacggtggcaaaccttggtgtggtgtttggacccactctgctgaggcctcaggaagaaacagtagcagccatcatggacatcaaatttcagaacattgtcattgagatcctaatagaaaaccacgaaaagatatttaacaccgtgcccgatatgcctctcaccaatgcccagctgcacctgtctcggaagaagagcagtgactccaagcccccgtcctgcagcgagaggcccctgacgctcttccacaccgttcagtcaacagagaaacaggaacaaaggaacagcatcatcaactccagtttggaatctgtctcatcaaatccaaacagcatccttaattccagcagcagcttacagcccaacatgaactccagtgacccagacctggctgtggtcaaacccacccggcccaactcactccccccgaatccaagcccaacttcacccctctcgccatcttggcccatgttctcggcgccatccagccctatgcccacctcatccacgtccagcgactcatcccccgtcaggtctgttgcagggtttgtttggttttctgttgctgccgttgttctctcattggctcggtcctctcttcatgcagtgttcagcctcctcgtcaactttgttccctgccatccaaacctgcacttgctttttgacaggccagaagaagcggtacatgaagactccagcacaccgttccggaaggcaaaagccttgtatgcctgcaaagctgaacatgactcagaactttcgttcacagcaggcacggtcttcgataatgttcacccatctcaggagcctggctggttggaggggactctgaacggaaagactggcctcatccctgagaattacgtggagttcctctaaccgtgggccccagcagaactgctgagctttacatggtatccatgacaactgctgattccagtgtcgaggccatttctctttgccactgagaaatgcagcgtgactgactctgttgctacctgtcaacatgaatgtttctgtgagctctggtgtcactcatctccatgatcatctcagccaacatgcatcagtactgcaagaaaagaagtcaatcagcagaggagagcatttgataactaagaggaagacttgcaaagccgttttctcatgagtaccctgaatagggggcactcattttgtttcaacggtccaaacgcccaaccttcagaaagaggaagtcagatagaaatagtccctgagagcacactgtgtaggctaagcctgctggggctgggtgaagaaattggcgctgagatccaggctggatccattgcttttgtttacaataggcactctctctaccccacctctcagtacttgagacttaaagtgctacaggcagctggatctgtttgcatgcaggatgaagagggttaaaacactgtttatataagatccaatctctcaccatctctaaagcagccgttggcctgtcatcagtgagatacaatccagtcttctcatgcacgggaacacacacaccctgcgtttctccctcccaggctaggaacctctctgccaccaagggctgccatccatcgcctagtaaccacggcaacccaacctactctaaaaccaaaccaaaaaaataaaataacacatcctctttgcatgacacattttttttctcccctttttggtacactttttttgaatggttttctaacaacttgaagcacaggatcaaggaattagggtggtctacttgaggcagatgggatagtagctgggaactgttccctttctgattaatttcagcagcatcggaatatatttggagcacaccctagtaacctcttgagattaaattacatagtcttaatatttctgttcctccatgcaactgatgtttgttttttaaagggtaagatgctgcctcccaatgggtgatgccatctgactggtttccccatgtcctcccattcacccatctctgctcccacccttgcctgcctctaacccaccactggccagcccccttgccctactctgggctgctgaacactggtgctgtggtggttttcaaggttaattcctaggctaaccgtatggcctatagtttaaaagcacatctatgttcactgccactctgaaaaagggaattatttctcagtctttcaaggcttgagactaatataggccattgtgattcaggaaagaaaccccaaggttggagggtgggatgagtacccctcctgaaaaagggaatttgctggtgaaaagaggctggatcttgtggaagactgtcttggatggggaagtactacctggagatttcaaattcacttggcctgcaaacaacagagttatccgtatcttccacatgtgaatgtcattgcaagggtgactctagacaaactacaaaccgatggaccgtcaagctccccaggagccccttggatggcagcgttgcttcagagtgtttcctgtttctggaattccttgttagggaactttaaagaagaaaagaaaaacttgaattgtgttgaattactgtatcttttacttttttttttttgaaaagataaacttgtcaatagagtgatttgaaatactatatggcaaagttttatatttgatattctttaagttagttgctcacacacttaggctttgattgctgaagaagtatgtttaagagggagagaggggaggcaaagctgaagagagtcaaggtcactgtccccgcttcggcctgaaggaaagagaagacatttctatggccttgctctctgctgtcctgttggtgggcacgacacatcagtggtgttcagtctttatgtgtttttaagcatcccttgggctttggatttggagatgggaagagcatctccaggcaatgagtttttcaaagaatgcctacttagtagtaagatgaagctcaggatttaaataagtggggtcaggcattcgagtttttgtctttcttctcaggggtatttcttggtacccccaagatatcaggccagaaagagatgagtcagttgctgtgctctttacttctttttctccacatcttctgaggctttagaaatgtggacaagctagttttcaaattttgtgtgcgtctgtaagttcttaaagaaccagcttcttagaatgttcagttctcaatgtgctgctgctttcccttctcctaaacattttaaaactcttccctttcacctccaattcccgtgatcccaaaagaagaggaagactccaggaggggtatagattgtgccgtcatagctttacaggtggttttaaagttagcaggggtttgtcatggtgattcactactcagtttatcagctcaaggattatacagctcttttccgggaactcacccaggagcaagcgagacactaccattgaatcagggaatgagaattaagaatggacaggaccaagacagaactcaagaaagccactggggaaaactcgagaagaaagggagtatactagtaggttagatctgtgaacctgaggacaagaagaccttgggaaatggaggcctcaggggatgtgcattcacatactattacgcttctcaaagagagaccaacatcatgcttttaacacatttgatgaggttttttatttgtgtttttgtttgttttttgagatggagtctcactctgtggcccaggctggagtgcagtggcgcgatcttggctcactgcaacctccgcctcccgggttcaggtgattctcctgtctcagcctcccaagtagctgggactacgggcatgagccatcacacccggctggttttttgtgtttttggtaaagatggggttttgccatgtttgccgggctgatctcgaactcctgacctcaagtgatctgcccacttcggacccccaaagtgctgggattccaggtgtgagccgctgcggccgaccacatttgatgtttgaagttgtaatctgtcccatcataaacttacctggagctcatgtggaggaacagaaggccaagatccttgctttgggggtgcctcacgaagcatccctgtagacacttggccccagcttcactgcttggaagcatgtccctccctcttgagttggctctgatttgaaatcgggagaaacagagctgctgccaatgggatcttttaggtaactccctccctagcttccgtgtgtctgtgcagtgcccatgagctgctgccaatgggatctttcaggtaccccctccccagcttccctgtggctgtgcggtgcccttgacagatggcttctctgtttccctttgcccagccaggctcccctccttcctattagctacaaaactggataaacttcagaatatgagccaatgagtaggaaggaacttgaagactaaagattttactctctcccctatccatgccccctacctctgactctctctgtgtgaacaggaaactttagggtagatgaggagaatgaattggttatcagagtggaagaccatggcccaggatccctgagctttcccagtagcctccagtttcctttgtaagacccagggatcacttagccatagcctgaatcttttaggggtattaaggtcagcctctcactcttccttcaggttactaacaaaatttcgtagctaaagaatgccatggccgggtgcagtggctcacgcctataatcccagcactttgggaggccgaggcgggcggatcacgaggtcaggagattgagaccatcctggctacgacggtgaaaccccgtctctactggaaatgcaaaaaattagccgggtgtggtggcgggcgcctgtagtcccagctgctctggaggctgaggcaggagaatggcatgagcccgggaggcggagattgcggtgagccaagatcgcgcccctgcactccagcctgggtgacagagccagactccgtctcaaagg

SEQ ID NO: 74513 - DNA, 958 bp, Homo sapiens; identical to SEQ ID NO: 64830

SEQ ID NO: 74514 - DNA, 1087 bp, Homo sapiens; identical to SEQ ID NO: 64831

SEQ ID NO: 74515 - DNA, 2372 bp, Homo sapiens; identical to SEQ ID NO: 64832

SEQ ID NO: 74516 - DNA, 1799 bp, Homo sapiens; identical to SEQ ID NO: 64833

SEQ ID NO: 74517 - DNA, 1255 bp, Homo sapiens
cgcgagacccgtccggaattaccggcacgacccacgcgttcgaaaccaataaaaacaatcctgggaagactaagactttagatccaaaggctgtctttcagagaacaaaggaacactgcctcatggggatcaaaggaactgtgaagcgtagcacagacggggacttcattcatgctaatgttgacattgacttaattatcacagaagaacctgaaattggcaatatagaaaaacctgtagaaatttttcatataattgagcatttttgtcttggtagaagacgccttcatctatttggaagagatagtacaattcgaccaggctggctcacagttggaccaacgcttacaaatagcaactacaatgcagaaacatatgcatcctatttcagtgctcctaattcctacttgactggttgtacagaagaaattgagagacttcgaccaaaatcgcctcctcccaaatctaaatctgaccgaggaggtggagctcccagaggtggaggaagaggtggaacttctgctggccgtggacgagaaagaaatagatctaacttccgaggagaaagaggtggctttagagggggccgtggaggagcacacagaggtggctttccacctcgataattgttgaagacattgaacctattcatcctcctctaaccttctttattgcaattaaatttcaagtgggagacttaactttagaactcacttccagcttgcactttgctttaatttctctgagctgcaagaatgtcttagcgagccttgcttgcagttgtcacacacactgtccggtttttttcaggataaatgaatgattctgccttttgttatgtgcgtgaacagaatggaacaactcaagtagcttcatcttcagagactgaatttattctgatagacttcagctaattacaaaggattttgctaatttttgggaataaataatggaaaaagatccagtctgtggtatcatgctagtgctgacagggccttgatagaatagagttggaaaagatggtaagcttttgtcagggttttaacattttcttgatgaaacaataaaaagaggtaagcttttttcttctttttttttatagttttaaataaactcagatataatttgaatactgaagaaattaagagactttgaacaaaaactcttcccaaatctaaatttgataggggaggtggagattccaggggtgggtgaaagaagagatagaacttagcaggcagacttaaaaaaaaaa

SEQ ID NO: 74518 - DNA, 2830 bp, Homo sapiens; identical to SEQ ID NO: 64835

SEQ ID NO: 74519 - DNA, 1247 bp, Homo sapiens; identical to SEQ ID NO: 64836

SEQ ID NO: 74520 - DNA, 626 bp, Homo sapiens; identical to SEQ ID NO: 64837

SEQ ID NO: 74521 - DNA, 519 bp, Homo sapiens; identical to SEQ ID NO: 64838

SEQ ID NO: 74522 - DNA, 1566 bp, Homo sapiens; identical to SEQ ID NO: 64839

SEQ ID NO: 74523 - DNA, 2546 bp, Homo sapiens; identical to SEQ ID NO: 64840

SEQ ID NO: 74524 - DNA, 1785 bp, Homo sapiens; identical to SEQ ID NO: 64841

SEQ ID NO: 74525 - DNA, 881 bp, Homo sapiens; identical to SEQ ID NO: 64842

SEQ ID NO: 74526 - DNA, 1617 bp, Homo sapiens; identical to SEQ ID NO: 64843
  misc_feature (1)...(1617): n = a,t,c or g

SEQ ID NO: 74527 - DNA, 1201 bp, Homo sapiens; identical to SEQ ID NO: 64844

SEQ ID NO: 74528 - DNA, 958 bp, Homo sapiens; identical to SEQ ID NO: 64845
  misc_feature (1)...(958): n = a,t,c or g

SEQ ID NO: 74529 - DNA, 1885 bp, Homo sapiens
cggacgcgtgggcgggcagtggctgtcaagcggctcctccgcgagtgctttggcctggttcggcgggaagttcaactgctgcaggagtctgacaggcaccccaacgtgctccgctacttctgcaccgagcggggaccccagttccactacattgccctggagctctgccgggcctccttgcaggagtacgtagaaaacccggacctggatcgcgggggtctggagcccgaggtcgtgctgcagcagctgatgtctggcctggcccacctgcactctttacacatagtgcaccgggacctgaagccaggaaatattctcatcaccgggcctgacagccagggcctgggcagagtggtgctctcagacttcggcctctgcaagaagctgcctgctggccgctgtagcttcagcctccactccggcatccccggcacggaaggctggatggcgcccgagcttctgcagctcctgccaccagacagtcctaccagcgctgtggacatcttctctgcaggctgcgtgttctactacgtgctttctggtggcagccacccctttggagacagtctttatcgccaggcaaacatcctcacaggggctccctgtctggctcacctggaggaagaggtccacgacaaggtggttgcccgggacctggttggagccatgttgagcccactgccgcagccacgcccctctgccccccaggtgctggcccaccccttcttttggagcagagccaagcaactccagttcttccaggacgtcagtgactggctggagaaggagtccgagcaggagcccctggtgagggcactggaggcgggaggctgcgcagtggtccgggacaactggcacgagcacatctccatgccgctgcagacagatctgagaaagttccggtcctataaggggacatcagtgcgagacctgctccgtgctgtgaggaacaagaagcaccactacagggagctcccagttgaggtgcgacaggcactcggccaagtccctgatggcttcgtccagtacttcacaaaccgcttcccacggctgctcctccacacgcaccgagccatgaggagctgcgcctctgagagcctcttcctgccctactacccgccagactcagaggccaggaggccatgccctggggccacagggaggtgaggtgggctggatgccacacagatggtctccgtgctggctcactgaaagagctgagcctgtggctggcctcagaatcaggctgggtgcagtggctcacacctgtaatcccagcattttgggaggctgagtgagaggatcacttgagctcaggagttcgagaccagcctggccaacatggcaacaccccatttctacaaaaaatttgtaaaattagccaggcatggtggcgcacgcctgtagtcccagctgcttgggaggctgaggtgggagaatcacttgagcccaggagttcgaggctgcagtgagccaggatcatgccactgcactccagcctggtccacagagagacactgtcaccccctttcccccacaagactggcagaggctgggcagcctggggctgatgaagcagagatgttcgctggatcccaggccctggcacccctcaggaaatacaagaaaaagaatattcacatctgtttaatgtgcataaagccaaggaaaggacagttccgaattccctaaaaaaaaaaaccaaaaaaggacgagggctcggaccggacctgagatacaaaacttggaataagggggggggggggggtttagaaaaaaaaacccttacttgggctgggggccggggattttttttttgattcgggattcaaactttgactcgggggggggcttctttccctagggggggaagaaaaaccgcccc

SEQ ID NO: 74530 - DNA, 621 bp, Homo sapiens; identical to SEQ ID NO: 64847
  misc_feature (1)...(621): n = a,t,c or g

SEQ ID NO: 74531 - DNA, 1337 bp, Homo sapiens; identical to SEQ ID NO: 64848
  misc_feature (1)...(1337): n = a,t,c or g

SEQ ID NO: 74532 - DNA, 2370 bp, Homo sapiens; identical to SEQ ID NO: 64849

SEQ ID NO: 74533 - DNA, 1564 bp, Homo sapiens; identical to SEQ ID NO: 64850

SEQ ID NO: 74534 - DNA, 908 bp, Homo sapiens; identical to SEQ ID NO: 64851

SEQ ID NO: 74535 - DNA, 2355 bp, Homo sapiens; identical to SEQ ID NO: 64852

SEQ ID NO: 74536 - DNA, 1510 bp, Homo sapiens; identical to SEQ ID NO: 64853

SEQ ID NO: 74537 - DNA, 3004 bp, Homo sapiens; identical to SEQ ID NO: 64854

SEQ ID NO: 74538 - DNA, 384 bp, Homo sapiens; identical to SEQ ID NO: 64855

SEQ ID NO: 74539 - DNA, 798 bp, Homo sapiens; identical to SEQ ID NO: 64856
  misc_feature (1)...(798): n = a,t,c or g

SEQ ID NO: 74540 - DNA, 1173 bp, Homo sapiens; identical to SEQ ID NO: 64857

SEQ ID NO: 74541 - DNA, 463 bp, Homo sapiens; identical to SEQ ID NO: 64858

SEQ ID NO: 74542 - DNA, 862 bp, Homo sapiens; identical to SEQ ID NO: 64859

SEQ ID NO: 74543 - DNA, 502 bp, Homo sapiens; identical to SEQ ID NO: 64860

SEQ ID NO: 74544 - DNA, 2873 bp, Homo sapiens
tcctgccgcgccggcagccacaggctggcatagcggctgccgacccgccctcgttcctccaccccctgcacgggactgctgggcccgccccgccccgcctgcaggtgaagcggccgcagccgccgagtaggtgcgtggggatgatctcactcgcgcgctccgcgccaggaggaggaggagcgggagcggatccaacttccgggtagtggagccgcaagccaccggcatcttgctttttcttccccctcctcctgtgtgccccgcgccgctccctctttcccttttattcccggccccacccgccaaaatgaacagctcggacgaagagaagcagctgcagctcattaccagtctgaaggagcaagcaataggcgaatatgaagaccttagagcagagaaccagaaaacaaaggagaagtgtgacaaaattaggcaagaacgagatgaagccgttaaaaaactggaagaatttcagaaaatttctcacatggtcatagaggaagttaatttcatgcagaaccatcttgaaatagagaagacttgtcgagaaagtgctgaagctttggcaacaaagctaaataaagaaaataaaacgttgaaaagaatcagcatgttgtacatggccaagctgggaccagatgtaataactgaagagataaacattgatgatgaagattcgactacagacacagacggtgccgccgagacttgtgtctcagtacagtgtcagaagcaaattaaagaacttcgagatcaaattgtatctgttcaggaggaaaagaagattttagccattgagctggaaaatctcaagagcaaactcgtagaagtaattgaagaagtaaataaagttaaacaagaaaagactgttttaaattcagaagttcttgaacagagaaaagtcttagaaaaatgcaatagagtgtccatgttagctgtagaagagtatgaggagatgcaagtaaacctggagctggagaaggaccttcgaaagaaagcagagtcatttgcacaagagatgttcattgagcaaaacaagctaaagagacaaagccaccttctgctgcagagctccatccctgatcagcagcttttgaaagctttagacgaaaatgcaaaactcacccagcaacttgaagaagagagaattcagcatcaacaaaaggtcaaagaattagaagagcaactagaaaatgaaacactccacaaagaaatacacaacctcaaacagcaactggagcttctagaggaagataaaaaggaattggaattgaaatatcagaattctgaagagaaagccagaaatttaaagcactctgttgatgaactccagaaacgagtgaaccagtctgagaattcagtacctccaccacctcctcctccaccaccacttccccctccacctcccaatcctatccgatccctcatgtccatgatccggaaacgatcccaccccagtggcagtggtgctaagaaagaaaaggcaactcaaccagaaacaactgaagaagtcacagatctaaagaggcaagcagttgaagagatgatggatagaattaaaaagggagttcatcttagacccgttaatcagacagccagaccgaagacaaagccagaatcttcgaaaggctgcgaaagtgcagtggatgaactaaaaggaatactggcctcccagtagcattggatgcaggaaaaaatacattgacggtgaaaaacaagccgaaccagttgtagttttagatcctgtttctacacatgaaccccaaaccaaagaccaggttgctgaaaaagatccaactcaacacaaggaggatgaaggcgaaattcaaccagaaaacaaagaagacagcattgaaaacgtgagagagacagacagctccaactgctgatccataaaccagaagcctgacatgtttggaagtccttttcaataagcacatgattagtgttgttatattggcaagggctgtaaacattctgctctggtcactgtattcagaatacaggttcttttctggtgtcacttttgtaagtagcaactataaacataagtaagctgtttagcaaaacacacattcctagtaggttttggttttttgatctttataaagatgaggtttttttcctagttactgtattaagtatgacttcttttagaaggttacaaaaaaattcagatgttgatacctttttaggaaatgtgcataccactcatcaaatggaatgctgaaagtttgaggtgcttgtatataatcggataaacaaaactgatcaacccaatgtgattttaaaagcccccaaagaagcttctgttttgggtctgatcctcttgatggagaaactgcagcagcatggaaattgttgggtactgtggcatacaagttattttctacagtagactgagataaactgaaaactcaggagctggcatcaaactcgtagtcccatagtcagtgttaattacacacattgttaactattggatgaaaaatacatgctattgattgtgtccaaagcctcccgaggacctccgtggggatgctctggtagcctgaatacagaactgaggtgaaagtccaaaccttgaattttacagtagtaagttggtaaaccatgtgctctgtgctatgagttaattatgttttcccaaatactaatgtggcacaagtaccatattttatcagagttcttatgtacagtatggtgaagataagtgacaagcacacatttttcttgcttcactgctgttctatattacacaggtttgttgttgttttttttaaaaaagaaattaagcagtagttagtctctaaaaatacaatgtttcaggctaccacagtgaataaatagaaatgtaatcagggattaaaaaa

SEQ ID NO: 74545 - DNA, 1809 bp, Homo sapiens; identical to SEQ ID NO: 64862

SEQ ID NO: 74546 - DNA, 587 bp, Homo sapiens; identical to SEQ ID NO: 64863
  misc_feature (1)...(587): n = a,t,c or g

SEQ ID NO: 74547 - DNA, 598 bp, Homo sapiens; identical to SEQ ID NO: 64864

SEQ ID NO: 74548 - DNA, 454 bp, Homo sapiens; identical to SEQ ID NO: 64865

SEQ ID NO: 74549 - DNA, 2177 bp, Homo sapiens; identical to SEQ ID NO: 64866

SEQ ID NO: 74550 - DNA, 1228 bp, Homo sapiens; identical to SEQ ID NO: 64867

SEQ ID NO: 74551 - DNA, 1833 bp, Homo sapiens; identical to SEQ ID NO: 64868

SEQ ID NO: 74552 - DNA, 970 bp, Homo sapiens; identical to SEQ ID NO: 64869

SEQ ID NO: 74553 - DNA, 1329 bp, Homo sapiens; identical to SEQ ID NO: 64870

SEQ ID NO: 74554 - DNA, 1916 bp, Homo sapiens
  misc_feature (1)...(1916): n = a,t,c or g
ttttttttttttgagcaggagctgggcctttgagggcccctgctccaaccccaagctgcatttatgaaataacccatcacaggtggattttaaaaatacccaaaaaaaatatttaatatacattataaaacctagggggggtttggagggggcctgagcgatatgcaaacagggaggaccttcaggaaagctcgggccagggtcggggatgaggaagggaaggggcacagtacttcatatgaaactcataaatacccacaggtggctgctggacaggcccagctggctctgggggcctgggtgttaagaagggacagcaggtgaagggttaaccttcagtccccagaaactgggtctgggagctgctactctaggcaggtagattgaggtggggaagaacctaagggagcagtgccccaccaagggtttgtcagattcaagcctcaggcaagagaaaaatcaaaagccttctgctactctctccctctgggcctctggtctgcccagaggctgggactccttcctctaccttgctctcaatctggagggtgctggggggtgccccatcttcctggggcccctggctggcttgtgggctaatgaggtgctaatggggtctagtagctgctgtgctcccttcttcatgcccagtctgaaacaggtgctcccctaacccagcgcccctcgatgaggctccactccacactgcagagtctctcccctaccctgcggccagcccccgccccagggaggtagtataaacctgggctctggggacaagcagccctggatgagaactccagctctgcccacctctcctgtgggtccctcaacttcctggagcctgggcacttcatctgaaacccagagacctacgctgctgtgcggagtctgaggaccacacaagccatgcaaggagtctgggcaccaggcctgggacacaaanggggcaaggaagtgtgggcccctctgtcctcagtccaaccccaaccggacactcccagggcctctgctcactgactcccttggtctccatcctgccctcacctgcccatcatgctcccccaagggtgggtgggggtacagtggccacacatgctggaggctgaaggtgtcccctatccccacctctctgaggtcacgcgaggctgggcagagcagggtgatggtgggtcagcgccccggacaggctgccccaccgttgagccctcctctcctctcttctcccacaattaaagcgcagaacagtggcagggagtgtgtgtgctggggtaggtggggaggcctcctgggtcctgggcctgaggcctggcaggtagatgaatcctcaatcctggacccccccaggggtgccaggcaggtgtggagaggagatgctcaccctgcatccttaaggaggcgcagagggcaccctagtctttgacgagcttgtagacatggtgctgggccccgtgctcactggtggagacttcgaagacaaaagcaatgacaagcagggtctcctgggagtcccggctcgtgaccacctgcaggatggtgaagttctccagcacgctgttcatcatgtacttctcgggcaggtgcttcagcttgtggatgaagttgatcatgtaaggagtctgggcaccaggcctgggacacaaaggggcaaggaagtgtgggcccctctgtcctcagtccaaccccgaccggacactcccagggcctctgctcactgactcccttggtctccatcctgccctcacctgcccatcatgctcccccaagggtgggtgggggtacagtggccacacatgctggaggctgaaggtgtcccctatccccacctctctgaggtcacgcgaggctgggcagagcagggtgatggtgggtcagcgccccggacaggctgcctcgtgccgaattcctgcagagcg

SEQ ID NO: 74555 - DNA, 414 bp, Homo sapiens; identical to SEQ ID NO: 64872

SEQ ID NO: 74556 - DNA, 5980 bp, Homo sapiens; identical to SEQ ID NO: 64873

SEQ ID NO: 74557 - DNA, 533 bp, Homo sapiens; identical to SEQ ID NO: 64874

SEQ ID NO: 74558 - DNA, 1882 bp, Homo sapiens; identical to SEQ ID NO: 64875
  misc_feature (1)...(1882): n = a,t,c or g

SEQ ID NO: 74559 - DNA, 2567 bp, Homo sapiens; identical to SEQ ID NO: 64876

SEQ ID NO: 74560 - DNA, 4305 bp, Homo sapiens; identical to SEQ ID NO: 64877

SEQ ID NO: 74561 - DNA, 2436 bp, Homo sapiens; identical to SEQ ID NO: 64878

SEQ ID NO: 74562 - DNA, 1129 bp, Homo sapiens; identical to SEQ ID NO: 64879

SEQ ID NO: 74563 - DNA, 2414 bp, Homo sapiens; identical to SEQ ID NO: 64880

SEQ ID NO: 74564 - DNA, 421 bp, Homo sapiens; identical to SEQ ID NO: 64881

SEQ ID NO: 74565 - DNA, 1139 bp, Homo sapiens; identical to SEQ ID NO: 64882

SEQ ID NO: 74566 - DNA, 1786 bp, Homo sapiens; identical to SEQ ID NO: 64883

SEQ ID NO: 74567 - DNA, 641 bp, Homo sapiens; identical to SEQ ID NO: 64884

SEQ ID NO: 74568 - DNA, 485 bp, Homo sapiens; identical to SEQ ID NO: 64885

SEQ ID NO: 74569 - DNA, 1281 bp, Homo sapiens; identical to SEQ ID NO: 64886

SEQ ID NO: 74570 - DNA, 1638 bp, Homo sapiens; identical to SEQ ID NO: 64887

SEQ ID NO: 74571 - DNA, 3042 bp, Homo sapiens; identical to SEQ ID NO: 64888

SEQ ID NO: 74572 - DNA, 2048 bp, Homo sapiens; identical to SEQ ID NO: 64889

SEQ ID NO: 74573 - DNA, 1465 bp, Homo sapiens; identical to SEQ ID NO: 64890

SEQ ID NO: 74574 - DNA, 405 bp, Homo sapiens; identical to SEQ ID NO: 64891

SEQ ID NO: 74575 - DNA, 6845 bp, Homo sapiens; identical to SEQ ID NO: 64892

SEQ ID NO: 74576 - DNA, 1477 bp, Homo sapiens
ttttttttttttctattcatcttattttactttctaaggaattgatagaaatataaatgtacatatacctaaaaagtgagctatcctacatatgacagaccagaatttactaactccataggttttctggatatttcaagcacacattaaaacaattacagagaggacatacatttatgatttatgcaaattaaggcacatcaattacaatctatttttttaagttagtcagtttaaaaatcttcacttacaaaaattcaaaatatgtccaagctcaactttttagtaggaatgttaatttgttgggtttggccattttcttttttcaccttaaaggtcaaacatgaaacaatgaggaatgtaggtctttgtaaaacacataaatacctgtgatgttttgaatcatttggcccttaaaaatattgcttaacaagttaaacccagcttaattgtaggtaaatgcaagtatacccaaggctggactattttagtctgcttttggctgcagattgtacttctgtggctggaaaaaatgttcttcaatagcactgaccagttcattcagttccttcttcagctgctcaggatcactgttcccaggtggggcacacagctctgcatagtacttgattttgggctctgtcccactggtgcgcatggtggccacgcctccattagcaaaggtgaaggtgatcatttggctgcttttactagtgggaagaacagcttttttatcaggttggctatcatcatagccagttgtaaggtccctaatggcagaaatttcaaatttgccacaagcttttggataattattttttccatcgtagtttctgaggttttcaaataatttcttaatggtttcttgatcatggcagataaaataggaagctttagtaatatggtagccatactccacataaatggcctttagttgctgagacaaagacaaattcttggttgctaggaagctagccaactctgcacttatgacagcggcactgactccatctttgtccagaacaaaagggcagcacatgtatccaatagcttcttcaaatgcaaataaaacagttttcccctggtctattagctgtttggctctgtttcccatccacttaaagccagttaatgtttcctcaaaatgaaaaccttcctttaaggcaatggcccgcaagattttggaggagacggtgctggacaacatgtacgtgtctttgagagcactgcgatcctggttcttctctttccaagatgtaaaaagccaccagcccaggagggcccccaactcattgcctgaaaacaccctccattcaccactgtcttgcttttctgccacagcaagtctatcagcatccgggtcgttagctaaaacaattctggccttggttttgtcagccaaagcaaaagacaaagtcaagacacctttcccctcttcgggattcgggtatttcactgttggaaactcaggatccgg

SEQ ID NO: 74577 - DNA, 2150 bp, Homo sapiens; identical to SEQ ID NO: 64894

SEQ ID NO: 74578 - DNA, 1760 bp, Homo sapiens; identical to SEQ ID NO: 64895

SEQ ID NO: 74579 - DNA, 395 bp, Homo sapiens; identical to SEQ ID NO: 64896

SEQ ID NO: 74580 - DNA, 540 bp, Homo sapiens; identical to SEQ ID NO: 64897

SEQ ID NO: 74581 - DNA, 718 bp, Homo sapiens; identical to SEQ ID NO: 64898

SEQ ID NO: 74582 - DNA, 461 bp, Homo sapiens; identical to SEQ ID NO: 64899

SEQ ID NO: 74583 - DNA, 429 bp, Homo sapiens; identical to SEQ ID NO: 64900

SEQ ID NO: 74584 - DNA, 537 bp, Homo sapiens; identical to SEQ ID NO: 64901

SEQ ID NO: 74585 - DNA, 471 bp, Homo sapiens; identical to SEQ ID NO: 64902

SEQ ID NO: 74586 - DNA, 444 bp, Homo sapiens; identical to SEQ ID NO: 64903

SEQ ID NO: 74587 - DNA, 469 bp, Homo sapiens; identical to SEQ ID NO: 64904

SEQ ID NO: 74588 - DNA, 563 bp, Homo sapiens; identical to SEQ ID NO: 64905

SEQ ID NO: 74589 - DNA, 533 bp, Homo sapiens; identical to SEQ ID NO: 64906

SEQ ID NO: 74590 - DNA, 389 bp, Homo sapiens; identical to SEQ ID NO: 64907

SEQ ID NO: 74591 - DNA, 590 bp, Homo sapiens; identical to SEQ ID NO: 64908

SEQ ID NO: 74592 - DNA, 567 bp, Homo sapiens; identical to SEQ ID NO: 64909

SEQ ID NO: 74593 - DNA, 336 bp, Homo sapiens; identical to SEQ ID NO: 64910

SEQ ID NO: 74594 - DNA, 375 bp, Homo sapiens; identical to SEQ ID NO: 64911

SEQ ID NO: 74595 - DNA, 846 bp, Homo sapiens; identical to SEQ ID NO: 64912

SEQ ID NO: 74596 - DNA, 353 bp, Homo sapiens; identical to SEQ ID NO: 64913

SEQ ID NO: 74597 - DNA, 637 bp, Homo sapiens; identical to SEQ ID NO: 64914

SEQ ID NO: 74598 - DNA, 305 bp, Homo sapiens; identical to SEQ ID NO: 64915

SEQ ID NO: 74599 - DNA, 157 bp, Homo sapiens; identical to SEQ ID NO: 64916

SEQ ID NO: 74600 - DNA, 404 bp, Homo sapiens; identical to SEQ ID NO: 64917

SEQ ID NO: 74601 - DNA, 730 bp, Homo sapiens; identical to SEQ ID NO: 64918

SEQ ID NO: 74602 - DNA, 243 bp, Homo sapiens; identical to SEQ ID NO: 64919

SEQ ID NO: 74603 - DNA, 352 bp, Homo sapiens; identical to SEQ ID NO: 64920

SEQ ID NO: 74604 - DNA, 214 bp, Homo sapiens; identical to SEQ ID NO: 64921

SEQ ID NO: 74605 - DNA, 171 bp, Homo sapiens; identical to SEQ ID NO: 64922

SEQ ID NO: 74606 - DNA, 360 bp, Homo sapiens; identical to SEQ ID NO: 64923
  misc_feature (1)...(360): n = a,t,c or g

SEQ ID NO: 74607 - DNA, 504 bp, Homo sapiens; identical to SEQ ID NO: 64924
  misc_feature (1)...(504): n = a,t,c or g

SEQ ID NO: 74608 - DNA, 372 bp, Homo sapiens; identical to SEQ ID NO: 64925
  misc_feature (1)...(372): n = a,t,c or g

SEQ ID NO: 74609 - DNA, 545 bp, Homo sapiens; identical to SEQ ID NO: 64926
  misc_feature (1)...(545): n = a,t,c or g

SEQ ID NO: 74610 - DNA, 353 bp, Homo sapiens; identical to SEQ ID NO: 64927

SEQ ID NO: 74611 - DNA, 588 bp, Homo sapiens; identical to SEQ ID NO: 64928

SEQ ID NO: 74612 - DNA, 365 bp, Homo sapiens; identical to SEQ ID NO: 64929

SEQ ID NO: 74613 - DNA, 578 bp, Homo sapiens; identical to SEQ ID NO: 64930
  misc_feature (1)...(578): n = a,t,c or g

SEQ ID NO: 74614 - DNA, 370 bp, Homo sapiens; identical to SEQ ID NO: 64931

SEQ ID NO: 74615 - DNA, 384 bp, Homo sapiens; identical to SEQ ID NO: 64932

SEQ ID NO: 74616 - DNA, 511 bp, Homo sapiens; identical to SEQ ID NO: 64933

SEQ ID NO: 74617 - DNA, 412 bp, Homo sapiens; identical to SEQ ID NO: 64934

SEQ ID NO: 74618 - DNA, 773 bp, Homo sapiens; identical to SEQ ID NO: 64935

SEQ ID NO: 74619 - DNA, 423 bp, Homo sapiens; identical to SEQ ID NO: 64936

SEQ ID NO: 74620 - DNA, 648 bp, Homo sapiens; identical to SEQ ID NO: 64937

SEQ ID NO: 74621 - DNA, 417 bp, Homo sapiens; identical to SEQ ID NO: 64938
  misc_feature (1)...(417): n = a,t,c or g

SEQ ID NO: 74622 - DNA, 380 bp, Homo sapiens; identical to SEQ ID NO: 64939

SEQ ID NO: 74623 - DNA, 595 bp, Homo sapiens; identical to SEQ ID NO: 64940

SEQ ID NO: 74624 - DNA, 646 bp, Homo sapiens; identical to SEQ ID NO: 64941

SEQ ID NO: 74625 - DNA, 586 bp, Homo sapiens; identical to SEQ ID NO: 64942

SEQ ID NO: 74626 - DNA, 808 bp, Homo sapiens; identical to SEQ ID NO: 64943

SEQ ID NO: 74627 - DNA, 384 bp, Homo sapiens; identical to SEQ ID NO: 64944

SEQ ID NO: 74628 - DNA, 1542 bp, Homo sapiens; identical to SEQ ID NO: 64945

SEQ ID NO: 74629 - DNA, 1072 bp, Homo sapiens; identical to SEQ ID NO: 64946
  misc_feature (1)...(1072): n = a,t,c or g

SEQ ID NO: 74630 - DNA, 989 bp, Homo sapiens; identical to SEQ ID NO: 64948

SEQ ID NO: 74631 - DNA, 322 bp, Homo sapiens; identical to SEQ ID NO: 64949

SEQ ID NO: 74632 - DNA, 1825 bp, Homo sapiens; identical to SEQ ID NO: 64950

SEQ ID NO: 74633 - DNA, 2802 bp, Homo sapiens; identical to SEQ ID NO: 64951

SEQ ID NO: 74634 - DNA, 1833 bp, Homo sapiens; identical to SEQ ID NO: 64952

SEQ ID NO: 74635 - DNA, 1251 bp, Homo sapiens; identical to SEQ ID NO: 63981

SEQ ID NO: 74636 - DNA, 1553 bp, Homo sapiens; identical to SEQ ID NO: 64954

SEQ ID NO: 74637 - DNA, 1516 bp, Homo sapiens
gcaaagcgcaaaaagataaatcagaattcaagtaaagagaagattaataatggacaagaagtcaaaatcgatcagagaaatgttaaaaaagagttcactagccatgctttagattctcatatcttagattattatgaaaatccagccatcaaagaggatgtatcaacattaataggtgatgatttggcatcttgcaaagatgagactgatgaaagctcaaaagaagaaactgagcctcaagtgctgaagtttagagtcacatgcaacagggcaggagagaaacattgctttacctcaaatgaggctgcaagagattttgggggtgctgttcaagattattttaagtggaaggccgacatgaccaactttgatgtggaggttcttttgaacatccatgataatgaagtcattgtgggcattgcattgactgaagagagtctccaccgaagaaatataacacattttggacctacaactcttagatcaactcttgcctatgggatgctcaggctctgtgatcctctaccttatgatataatagtcgatccaatgtgtggaactggggcaataccaatagagggggccactgaatggtctgactgcttccatattgctggtgataataatccactggctgtgaatagagcagcaaataacattgcatctttattgaccaagagccaaattaaagaaggcaaaccctcctggggcttgcccatagatgctgttcagtgggatatctgcaatctgccattgagaactggctctgtggatattattgtaacagatttgccatttggaaaaaggatgggatccaagaagagaaactggaacctttatccagcttgcctacgggagatgagccgtgtctgcacacctaccacaggccgagctgtactacttactcaagacacaaaatgctttaccaaggcgttatctggaatgcgacacgtatggcgaaaggtggatacagtctgggtgaacgttggtggtcttcgtgctgcagtttacgttctgatacgtacacctcaagcttttgttcatccttcagaacaagacggagaaagaggaactctttggcaatgcaaagaatgaagatgactaatagtacttgtacttcccaccactggaaatgttagcataaaagaacttggagaggaaaaaagtattaacaaaactgcagtctgcactctttaaacctgtttaaggctcttcatcctggttagcaaaaggtgtgaatgtaatgtgatggaatttaaaagttttatgagaccaggcacagtggctcacgactgtaattccagcagtttaggaagccgaagtgtgcagatcacctgaggtccggagaccaggcctggccaacatggtgaaaccctgtctctactagaaatacaaaaattagccaggtgtggtggcgggcgcctgtaatcccaactactcaggaggctgaggctagagaatcacttgaacccagcaggccggaggttgccggtgaagtcgagatcaccccattgca

SEQ ID NO: 74638 - DNA, 492 bp, Homo sapiens; identical to SEQ ID NO: 64956

SEQ ID NO: 74639 - DNA, 2081 bp, Homo sapiens; identical to SEQ ID NO: 64957

SEQ ID NO: 74640 - DNA, 3018 bp, Homo sapiens; identical to SEQ ID NO: 64958

SEQ ID NO: 74641 - DNA, 1428 bp, Homo sapiens; identical to SEQ ID NO: 64959

SEQ ID NO: 74642 - DNA, 397 bp, Homo sapiens; identical to SEQ ID NO: 64960

SEQ ID NO: 74643 - DNA, 1255 bp, Homo sapiens; identical to SEQ ID NO: 64961

SEQ ID NO: 74644 - DNA, 2009 bp, Homo sapiens; identical to SEQ ID NO: 64962

SEQ ID NO: 74645 - DNA, 812 bp, Homo sapiens; identical to SEQ ID NO: 64963

SEQ ID NO: 74646 - DNA, 2403 bp, Homo sapiens
ttttttttttttcaccgggctaggtctgctttttattggccacgcatccagccgccagcctcagggcacacacctggcagggggcaggctcgggtaggctgccctcgctgggtgggcagtgagggggcagcggctgctgggtgtcaccctgcagcccctcaggtggacctgtattgtccccagggcctgcccacgctgggcagctggcactgggaggggttttctgttgatgtgatggccaagtttcagctgcagggcagaggcctggcagtggcagcaaaggcagaccgcccccaactccaacttcaggggctggacatgctggaacgggggccagaccccatgggaggggaccctggcctgccatggcactgcctgccagcttacccctgcccagggcccccaactcagccacctccaagcagtaaagacttgcaaagcattgcattttgattaaaccttgctgggctgaagggcaggcagagctgtggtggacactggcaggacgcagcaccccccgactggcccttggcaggctgcaccgggcgcatgcgggtgtgggccagggttgcctttaggaagcaggtgggaggctggcacgtgcaggcggtccaggagggcaccaggcctggcagggcactggtgcctgtcgggttcccagccacaacaccccaagaaggctccaggagggccccggctgggtaaggcacggagttttggtttccggggcccagtcccagcctggcccccagaagagcctctcttggcagaatggcagcatgtcctgtggcctgggctctctcacttggccttgggcctgggcctgaggccttactggatcacacacagtttctttgttttattatcatcagaatcagggggaacctcttcctggctcctggagggacgcttcttccttcgcttcccggtcccctttgaggcccggccccgggccctggggagtgtgcccgaccccgaggagtcggtcaccgcatcctcggagaaggacttgtccagggatgtgtccagtgcggactctggggccgtgtcctcctcgtcctcgtcctcatccccacctgggcctgctgcagggggtctggcaccacggctgtggacagcgtcctccagcccctcacttgtgctgtcggcctcggcctggaggacgcccagcaaggacgtgggatccttggcatcttgccttgaacttccggctgcagggggctggttgctggagaacttgaggggcttcagggcctgagcatctcccagagtcaccggccaggccccctccaagggctgggggcactggggatcctcagtggttaggacatcgctggcatccacataccaggaagaacgcctctccaggggccggggaccaccctcctccaactgctccagggtgggctgagggccgggggtcacggcgtctacaaggtcccagccccgggactcgctggctgttgtagcatcaaggccgggctcagaggcgggacagcgcgtgctgcccacggggtctcctgcagggttactggtggccacaggctctgtggctcttgggggatccatggaggctgccttgctgcccccgtcggtgtccccgcggccccgggctgtcttccgcagctggaagcccttcctgatgtcagccagcagggcatcgatgacacacacctcctcctgcttcccgggccccttcctgacaggcttcccgtcctctccccgaggccgccgcgcctcctcctccgccagctgctgcttcctcctctctgccttcgccgcctgctccttccggtccttgttctccttcagggcgcggaggaaaaggtcccggaaagccttcatggtgctgaacgtgtcctccagggacagctgctgggcgtcctcacacaggtagtcggccagctcccgttgcttctgctcgatggcctcaaacagctcgtccagtgcccggaaggccgagatgctggcctggaggcgctcggtgtactgctcctggacctcggccacggaggcagacaccttccgctcggtctccagaagcttcttcaggttggagctggcctctgagcggatgatctccaggttgatccctgctgcttgcgagggctgttccaggtcccggggcagctgcaggaggtcggggtggctcttttccgcttcctccagcacgtggtgcagcagcgtcacgcggttctgctgggacttggtctccgtgagcttcagcaatgtgctgatcttgaagccgtcggcgtcaccggtgtggctgccgtagttgaggaagttcccaattctcaggatcagctggcagaagatgggcagctggcggctggtgagcagcctttcgcaggcagccagcaccagctgggccttgggccgcaccatgtccagcacggcggccgc

SEQ ID NO: 74647 - DNA, 949 bp, Homo sapiens; identical to SEQ ID NO: 64965

SEQ ID NO: 74648 - DNA, 720 bp, Homo sapiens
gctgataatagaaagatgtctcggaaggagaaagatgaaagaatcttgtggaagaagaatgaagttgctgattatgaagctacaacattttccatcttctataacaacactctgttcctggtcgtggtcattggtgcttccttcttcatattgaagaacttcaaccccacagtgtatccttttcaaggttgattatcttttttagaagtcaagaaacagtagttcattttggttttgacttgtctggatattttagtggaaagaaaaactgctctgggagtcagtccattaaatagtgctgactttagataactttctggacatttaaaataacagctattggtttaagattcttttaagtttatgaattatgactgtatgataaagtattacaaagtagtctatgggaatctgtgtccttgcctccttaaaaaaaagctccaaagagccaaagcaaacctgtcatttttgatagcttctgaaataataagcccctgtacctgttatttttgggctctgggggttgggtggatggccaatgcagttaaataggttcattccagtgtatcttaatagtgtttcaagctgctgttaagttgagcttttgggcaagaatcagtcttctcttattaatttattaaagatgttatccaggaatgtgcagccaagattttaacaattggtgattatgatgtaataaaatatcagaaaccatccaaa

SEQ ID NO: 74649 - DNA, 3163 bp, Homo sapiens
atggggttattcagaggttttgttttcctcttagttctgtgcctgctgcaccagtcaaatacttccttcattaagctgaataataatggctttgaagatattgtcattgttatagatcctagtgtgccagaagatgaaaaaataattgaacaaatagaggatatggtgactacagcttctacgtacctgtttgaagccacagaaaaaagattttttttcaaaaatgtatctatattaattcctgagaattggaaggaaaatcctcagtacaaaaggccaaaacatgaaaaccataaacatgctgatgttatagttgcaccacctacactcccaggtagagatgaaccatacaccaagcagttcacagaatgtggagagaaaggcgaatacattcacttcacccctgaccttctacttggaaaaaaacaaaatgaatatggaccaccaggcaaactgtttgtccatgagtgggctcacctccggtggggagtgtttgatgagtacaatgaagatcagcctttctaccgtgctaagtcaaaaaaaatcgaagcaacaaggtgttccgcaggtatctctggtagaaatagagtttataagtgtcaaggaggcagctgtcttagtagagcatgcagaattgattctacaacaaaactgtatggaaaagattgtcaattctttcctgataaagtacaaacagaaaaagcatccataatgtttatgcaaagtattgattctgttgttgaattttgtaacgaaaaaacccataatcaagaagctccaagcctacaaaacataaagtgcaattttagaagtacatgggaggtgattagcaattctgaggattttaaaaacaccatacccatggtgacaccacctcctccacctgtcttctcattgctgaagatccgtcaaagaattgtgtgcttagttcttgataagtctggaagcatggggggtaaggaccgcctaaatcgaatgaatcaagcagcaaaacatttcctgctgcagactgttgaaaatggatcctgggtggggatggttcactttgatagtactgccactattgtaaataagctaatccaaataaaaagcagtgatgaaagaaacacactcatggcaggattacctacatatcctctgggaggaacttccatctgctctggaattaaatatgcatttcaggtgattggagagctacattcccaactcgatggatccgaagtactgctgctgactgatggggaggataacactgcaagttcttgtattgatgaagtgaaacaaagtggggccattgttcattttattgctttgggaagagctgctgatgaagcagtaatagagatgagcaagataacaggaggaagtcatttttatgtttcagatgaagctcagaacaatggcctcattgatgcttttggggctcttacatcaggaaatactgatctctcccagaagtcccttcagctcgaaagtaagggattaacactgaatagtaatgcctggatgaacgacactgtcataattgatagtacagtgggaaaggacacgttctttctcatcacatggaacagtctgcctcccagtatttctctctgggatcccagtggaacaataatggaaaatttcacagtggatgcaacttccaaaatggcctatctcagtattccaggaactgcaaaggtgggcacttgggcatacaatcttcaagccaaagcgaacccagaaacattaactattacagtaacttctcgagcagcaaattcttctgtgcctccaatcacagtgaatgctaaaatgaataaggacgtaaacagtttccccagcccaatgattgtttacgcagaaattctacaaggatatgtacctgttcttggagccaatgtgactgctttcattgaatcacagaatggacatacagaagttttggaacttttggataatggtgcaggcgctgattctttcaagaatgatggagtctactccaggtattttacagcatatacagaaaatggcagatatagcttaaaagttcgggctcatggaggagcaaacactgccaggctaaaattacggcctccactgaatagagccgcgtacataccaggctgggtagtgaacggggaaattgaagcaaacccgccaagacctgaaattgatgaggatactcagaccaccttggaggatttcagccgaacagcatccggaggtgcatttgtggtatcacaagtcccaagccttcccttgcctgaccaatacccaccaagtcaaatcacagaccttgatgccacagttcatgaggataagattattcttacatggacagcaccaggagataattttgatgttggaaaagttcaacgttatatcataagaataagtgcaagtattcttgatctaagagacagttttgatgatgctcttcaagtaaatactactgatctgtcaccaaaggaggccaactccaaggaaagctttgcatttaaaccagaaaatatctcagaagaaaatgcaacccacatatttattgccattaaaagtatagataaaagcaatttgacatcaaaagtatccaacattgcacaagtaactttgtttatccctcaagcaaatcctgatgacattgatcctacacctactcctactcctactcctactcctgataaaagtcataattctggagttaatatttctacgctggtattgtctgtgattgggtctgttgtaattgttaactttattttaagtaccaccatttgaaccttaacgaagaaaaaaatcttcaagtagacctagaagagagttttaaaaaacaaaacaatgtaagtaaaggatatttctgaatcttaaaattcatcccatgtgtgatcataaactcataaaaataattttaagatgtcggaaaaggatactttgattaaataaaaacactcatggatatgtaaaaactgtcaagattaaaatttaatagtttcatttatttgttattttatttgtaagaaaatagtgatgaacaaagatcctttttcatactgatacctggttgtatattatttgatgcaacagttttctgaaatgatatttcaaattgcatcaagaaattaaaatcatctatctgagtagtcaaaatacaagtaaaggagagcaaataaacaacatttgg

SEQ ID NO: 74650 - DNA, 6772 bp, Homo sapiens; identical to SEQ ID NO: 61381

SEQ ID NO: 74651 - DNA, 2112 bp, Homo sapiens; identical to SEQ ID NO: 61382

SEQ ID NO: 74652 - DNA, 1810 bp, Homo sapiens
ttttttttttttaaggaaaggaactttaatgagaaatcaaaacacagggaaccaaagtgcaaatcatccaccccccatgggggggccatcctgaaccccacatcatcccctcagcccccttcaggcccccagcgcaggcccagggcctggagcttctgcctcaggtagctcttgagctggggcaggcctctctgggactccagttcctcgaagggtagcggcaggagctggtagcccatcaggcctaggtgccgctccctcagggccctcgagcccagtcaggcacccgggccgtcccggcagtaaatgcccagccgttcccgcaacaccagcaccaccctctgggcaagggtctcgagtagtggcgctagaggcagcctgggccctgtgggcaggacccttggtgggtatggcaggaaggggtcctgggtcctcacgggaagcacagcaccagagctgctggcgcacagcaggaagtctgtgcagtagcctggaggcacagtcaggtcctggcggtatttctcctcccccagcagctggcgcaacccctcagctactatgtccttgtgactgtacttgcagcgggcacggtcggtgatgagaggctggggaaagatgggcacttgctgccttcggggaaggcggggaccccggtatcctgggagctccagctccacggccgtgtccagcagggagaggtagcgacgcacaatcagagcatgaggggtgccactgatgtagttgatgaagccaggggaaaaaacaaagtgcagggctctgaagggcaggcaccgcagttggcacagtgacatcaagatgttgactgtagccaggggtgccacccctgcttcccgagccaggatcctctcaaggcagggcataaactgctgttccaggggcaggtagttcagtcgcccaaagggcaggaccaacttctgtaccaccttgctgctgagttgcgtttcctgaaccaccaggaagtgggcaatggcttccagaagctggggctcccgcaaccggtgccgggccaggtgctgggccaggagcaccatcacgtggggagtcagttcctctggccttgcctctgccaggctgctgatcagatgctgccgtggataccgcagaaaacgggggcagcttagagcagcttccaacccttgcccacctcggagaaggggctgcaaagggggaggtggcttcggagggaggcggagccttcgctcctgttccagggcacacaccaggggaccatcagatggaaagccaagtaagactgcaaggtgcagacacacgtggatggtgtgaatgtcaaaggaggggcagtttcggatgatgagctgactcaagtcctgcagtgtgacctgctccacaggagggggccgtggccgagaccccaagagctggcccagacgacgaagcgccaccgagtagtggtgggcgcgcaccttgctggggttctggcccagccagcgcagcagctccccagggctcttcgcctgttccagaagccgctgcagtccttgcacaggacctgcactggggcctcctccaacaggccggtccccccatttgctgggccccaaacagcagggctgtactggagggatcagcagcaggccagacagccgagcaggggaggtctgagcagagagcaggactcgaagcatggagttgggtgatggagaccatgactccccgggccctgcgcaggtcgctccctcagtcggtctcggggcccgggggccgggttccccccgcggcctcctcatcggctagccaccgagtccgccatcttccccccacgcgtccg

SEQ ID NO: 74653 - DNA, 1193 bp, Homo sapiens; identical to SEQ ID NO: 61383

SEQ ID NO: 74654 - DNA, 1260 bp, Homo sapiens; identical to SEQ ID NO: 61384

SEQ ID NO: 74655 - DNA, 8514 bp, Homo sapiens; identical to SEQ ID NO: 61385

SEQ ID NO: 74656 - DNA, 8066 bp, Homo sapiens
ttttttttttttggaatgtaaatcttttattaaaacagttgtctttccacagtagtaaagctttggcacatacagtataaaaaataatcacccaccataattataccaaattcctcttatcaactgcatactaagtgttttcaatacaattttttccgtataaaaatactgggaaaaattgataaataacaggtaagagaaagatatttctaggcaattactaggatcatttggaaaaagtgagtactgtggatatttaaaatatcacagtaacaagatcatgcttgttcctacagtattgcgggccagacacttaagtgaaagcagaagtgtttgggtgactttcctacttaaaattttggtcatatcatttcaaaacatttgcatcttggttggctgcatatgctttcctattgatcccaaaccaaatcttagaatcacttcatttaaaatactgagcggtattgaatacttcgaagcagaacaggcaatgtgcagccctcatttatgagaaaaccctcaggaaactcccagggtgatgcttggagaagctgtgagttgagctgaagctggagaacttcctccagagcaaagggcttaagaaagaaagaagaactctaagctgggtctgctaacatcactccagtttagatggatcttggcagagagacatgcttgttcctctggattggaaagatgatttactctcgggaatcttctctgtcagcctgtacatctaaaggcatgaagcactcaattgggcaattaacattagtgtttgttctctgatggtatctctgagaatactggttgtaggactggccagtagtgccttcgggactgggttcacccccaggtctgcggcagttgtcacagcgccagccccgctggcctccaaagcatgtgcaggagcaaatggcaccgagatattccttctgccactgttctcctacgtggtatgtcttcccatcatcataacacgttgcctcatgagggtcacacttgaattctccttttccgttcccaagacatgtgcagctcatcatctggccattttctccctgacggtcccacttctctccaatcttgtagttcacaccattgtcatggcaccatctagatgaatcacatctgaaatgaccacttccaaagcctaagcactggcacaacagtttaaagcctgattcagacattcgttcccactcatctccaacggcataatgggaaactgtgtaggggtcaaagcacgagtcatccgtaggttggttcaagccttcgttgacagagttgcccacggtaacaacctcttcccgaaccttatgcctctgctggtctttcagtgcctccactatgatgttgtaggtggcacctctggtgaggcctgtcagagtggcactggtagaagttccaggaaccctgaactgtaagggttcttcatcagtgccaacaggatgacatgaaatgatgtactcagaagtgtcctggaatggggcccatgagatggttgtctgagagagagcttcttgtcctacattcggcgggtatggtcttggcctatgccttatgggggtggccgttgtgggcggtgtggtccgcctaaaaccatgttcctcaaagatcatttgttgcccaacactgggttgctgaccagaagtgccaggaagctgaataccatttccagtgtcatacccagggtgggtgacgaaaggggtcttttgaactgtggaaggaacatccaagatctctggtccatgaagattggggtgtggaagggttaccagttggggaagctcgtctgtctttttccttccaatcaggggctcgctcttctgattattcttcagggcaatgacataaattgtatattcggttcccggttccaggccagtaatagtagcctctgtgacaccagggcggggccgagggaccacttctctgggaggagacccaggcttctcatacttgatgatgtagccggtaatcctggcacgtggcggctgccatgataccagcaaggaattgggtgtggtggccaggaaacgcaggttggatggtgcatcaatggcagtggaggcgtcgatgaccacaggggagctccgagcattgtcattcaaggtgtacaggtagatcttgtagtcagtgcctggttgtaaacctgtgatggtgtagcttctgacatctggcttgatggttctctggattggagtctggccattggctggaacggcatcaacttggaagccagtgatcgtctcagtcttggttctccagctaatggtgatggtggtctcagtagcatctgtcacacgagcccttcttggtgggctgacattctccagagtggtgacaactccctgagctggtctgcttgtcaaagtgtccttaagagcatagacactcacttcatatttggtggccaccataagtcctgatacaaccacggatgagctgtcaggagcaaggttgatttctttcattggtccggtcttctccttgggggtcacccgcactcgatatccagtgagctgaacattgggtggtgtccactgggcgctcaggcttgtgggtgtgacctgagtgaacttcaggtcagttggtgcaggaatagctgtggactgggttccaatcaggggctggctctccatatcatcgtgcaaggcaaccacactgactgtgtactcagaacccggtctgaggccttgcagctctgcagtgtcttcttcaccatcaggtgcagggaatagctcatggattccatcctcagggctcgagtaggtcaccctgtacctggaaacttgcccctgtgggctttcccaagcaattttgatggaatcgacatccacatcagtgaatgccagtcctttagggcgatcaatgttggttactgcagtctgaaccagaggctgactctctccgcttggattctgagcatagacactaaccacatactccactgtgggctgcaagccttcaatagtcatttctgtttgatctggacctgcagttttagtttttgttggctcctggtccatttttgggaagtggtggttactctgtaaccagtaacaggggaacttgaaggcagccacttgacactaatgctgttgtcctgaacatcggtcacttgcatctgggatggtttgtcaatttctgttcggtaattaatggaaattggcttgctgcttgcggggctgtctccacggccagtgacagcatacacagtgatggtataatcaactccaggtttaaggccgctgatggtagctgtagacttgctcccaggcacagtgaactcctggacagggctatttcctcctgtttctccgtaagtgatcctgtaatatctcactgtgacagcaggagcatcccagcttgatcagtaggctggtgggggtcgcagcaacaacttccaggtccctcggaacatcagaaactgttgattgttggccaatcaataagggactttcctctctgccattaagagcaacgatgctgaccacatactctgtgcctggagtgaggttggtgagggtgatggaattccgagagtggggcaccccgatcttctcgaggtctcccacttgaagtgctcgggatgatgggcggatcctgtagccagtgatgggtgggctcgaggagcaatcccagtgcacaagtaaaagagttgggcagtaatatcaggaaaagtcaatgccagttgggggaatcaagacctgttttctgtcttcctctaagagggtgtgctctcatgttgttcgtagacactggagacactcactacatattctgtaccaggcaggagatttgttaagaccactgccattgtctgaaaggaagaaaattgacaaactctgcaacatccttccctcatttttcacaggtgagtaacgcaccaggaagttggttaaatcaatggatgggggtggagccccaggtgacacgcatggtgtctggacccaaatgttggtgaatcgcaggtcagtgggaggaggaacagctgggatgatggtatcagagatagggacactttccttgtcatccttgacagtgtaaacactgacattgtactccaggcccgggacttcaaggttatcaaaaagtgcaggagctctgatcagcatggaccacttcttccaaagaatttccctgctggccgtttgtaggggttgtggtaattctataaccagtaatgtctggggtggtgctcctctcccaggagactgtgagcactccagtgtcagggtttgcctccagatgcaagtttgttggtggagacaatggtgtcaccacttttgtttacaattgggcgcatctctttcctgtccatctctcaggacttggatggtgtagacgtattctactcctggagtcaagccggacacaacgatgcttcctgagtctgaagtcacttctcgtggtgcctctcctccctggcttggtcgtacacccagcttaaaaccaattcttggagcaggcgtccatgtgatcacaatggtggtctcagtcacctcggtgttgtaaggtggaatagagctcccaggctgcagtgtggtaaagactccagtggctttggggctctcttggttgccctttatggccacgagggatacggtgtactcagatgcaggctgcagattcctcagtgggtacttggagacagagggacccacattgtactgcctgggctgtcctcttcgggtaaggcccacggtcagtcggtatcctgttatctgggcccgaggtggagtccatctcaccaggacagtagaatcagtttcattgacaaactggaggttagtgggagcatcccagtttggttgtctgttgagcagtcagaggcttgctctccctcccatggctcactgcaaagactttgaagtaataggtgaccccaggggacagcccggtgttttctgcgaaaggtgttcctgctgagtggcagcctctgcccgtgctcgccaggcaggttgacggggatcacatccacacggtagccggtcactgcactctcaggcggtgtccacatgatggtgaccttcacgtctgtcacttccacaaactgcaggtccctgggagagggcactgtatctgagcgtggggtgccagtggtttcttgttgaatgacaacaggtgtactttcttgattttcttccacagcatagatagtgatgttatactgaacaccaggttgcaagtcactgagggtgacggagtttgcagtttcaggaaggttgagttctgtgctgctaccttctactgatggcgaatagactattctgtaccctgtgatgggagcctggggtctgctccagcgaacaacaattgaggtgtcatcaacttggtccacagtcgggtcaggtggggcatcaggcgctgttgtttgtgaagtagacaggatcaaactctgctccccatcctcagatatctgatagacatttacaatgtattttcggccaggaagcaggtccagggatgttccacagaagtggctgtgcttggaagaaccaggtactgtggctcatctccctcctcactcagctcatattccacccggaatcccgacacggtgtcggaagctgagacccaggagaccacaaagctactggctgtgatttcggtcacagattcagaagtggccacaagaggagaaaagggagtcgtctctcctgtcacgggtgttgctggtcacaggtgtgctggtgctggtggttgtgaagtcaaagcgagtcacttcttggtggccgtactgctggatgctgatgagctggccctcgtataccacaccaggcttcaggcctttgatggtgtaggagtttaagtggcctggtatggtagcttccttccaacggcctacagaatttttaggtctccacctgagaatgtacttggaaatgtgagatggctgtggtgcattccactggatggggtgggagttgggctgactcggagtctcagtgataaatacttcgacaggaccacttgagcttggataggtctgtaaaggttggcaatgccactccccaatgccacggccatagcagtagcactggtatctgacaccatgcacatacttctcccatgaatctccaatttgataaaacgtcccagtctctgaatcctggcattggtcgacgggatcacacttccacctgccccgaccctgaccgaagcatgtacagttcagcatgtgcccctcttcatgacgcttgtggaatgtgtcgttcacattgtaagtgatgtcatcaacaatgcactgatctcgaagctgcgagtaggcaatgcatgtccattccccacgaccattcccaacacacgtgcacctcatcatgtgacccatgtcatgctgcttatcccactgatctccaatgcggtacatgaccccttcattggttgtgcagatttcctcgtgggcagccatggggcagaacccaaacttctggtcggcatcatagttctgtgtggtcccacaccacttcatgttgtctcttctgccctcagaagtgcaatcagtgtaattgtggttgttgtataggaaggggaagtggcacaaggcaccattggaatttcctcctcgagtctgaaccaaaacagtgtggtctgtgcagaaagagtatttctggtcctgctcataattcgaagttgtgctgcaccaaagatgtccgtcctgtcgcccttctgtggtgcaggagtagaacgtcctgccattgtaggtgaatggtaagacacatggctctccatttgagttgccaccgtaagtctgggttacagctgtctcttggcagctgactccgttgcccaggcacgtgcaaaagcatttgcttatttccttgtgtctttcaagccaactgcatccccacagagtagaccacaccactgtctgtgacacagtggccatagggaggaggctgggggtgaggctgcggttggtaaacagctgcacgaacatcggtgaaggggccagatccgctcgatgtggtctgcacagaggtgtgcctctcacacttccactctcctcggccgttgcctgtgcagatgcactggagcaggtttcctcgattatccttcttgctccaggtgtctccaattctataggatgtccttgtgtcctgatcgttgcatctatttctagaagtgcaagtgatgcgtccgctgccttctcccaggcaagtacaatctaccatcatccagccttggtagggcttctcccacgtttctccgaccacataggaagtcccagcagcatgatcaaaacacttctcagctatgggcttgcaggtccattctccttttccattaccaagacacacacactctaacatgtaaccaccagtctcatgtggtctcctccaggtgtcaccaatcttgtaggactgacccccttcatggcagcggtttgcgatggtacagcttattctccctcgcccagccccgatgcaggtacagtcccagatcatggagtctttaggacgctcataagtgtcacccactcggtaagtgttcccagtgtacttgtcaaagcaagtctcttcagcttcaggtttactctcgcagttaaaacctcggcttcctccataacaagtacaaaccaacgcattgcctaggtaggtccgctcccactgttgatttatctgatagtgttttccattgtcataacaaccgggcttgctttgactgacagccaccggggactggggctgaaccatttgctgagcctgcctcttgctcttcgaggctcccgtggagggcaccgctgtccccaggcacaggacggccagcagcagcagcccgggccccggacccctaagcatgttgagacggtgggggagagacgcccgcaccgggaggcaagttgccaccaagtttgcttcccttcgcaacctgcgggaaaaatcccttctaatgcctcccgggggttgtcgcctccaagaaggtgggggccagagggtggggaaggggacgggtggagggacagaagggatgcagaggaccagagaagttgtggctgcaggtcccctcttcccgctcgcgcctggggttccctctcctccccctgtgcagcacagccg

SEQ ID NO: 74657 - DNA, 4827 bp, Homo sapiens; identical to SEQ ID NO: 61387

SEQ ID NO: 74658 - DNA, 2338 bp, Homo sapiens; identical to SEQ ID NO: 61388
  misc_feature (1)...(2338): n = a,t,c or g

SEQ ID NO: 74659 - DNA, 8734 bp, Homo sapiens; identical to SEQ ID NO: 61389

SEQ ID NO: 74660 - DNA, 4871 bp, Homo sapiens
tttcgtgctgctctcgcgatatttgcgcgagcctgcttccttctttcctcccttgccagtctgcctgtcttcctccccgtcttccctgcccggcctcccccttcttcccccgctggccccctccccggagggataatatggtctccggcgatggacgccccaaaagcaggatacgcctttgagtaccttattgaaacattaaatgacagttcacataagaagttcttcgatgtatctaaacttggcaccaagtatgatgttctgccttactcaatacgggtcttgttggaagctgctgtacgaaattgtgatggctttttaatgaagaaggaagatgttatgaacattttagactggaaaaccaaacaaagcaatgttgaagtgccctttttccctgcccgtgttcttcttcaagattttactggaataccagcaatggtggattttgctgctatgagggaggcagtgaaaactcttggaggtgatcctgagaaagtccatcctgcttgtccgacagatcttacagttgaccattctttacaaattgacttcagtaaatgtgcaatacagaatgcaccaaatcctggaggtggtgacctgcagaaagcaggaaagctctctccacttaaagtgcagcctaagaagcttccctgcagaggccagactacctgccgaggatcttgtgattctggagaactaggccgaaactcaggaacattttcttcgcagattgagaatacacccatcctgtgtccttttcatttgcaaccagtgcctgaacctgaaacagtgttaaaaaatcaagaagtagaattcggcagaaatcgagagaggcttcagttttttaagtggagttcaagagtttttaagaatgtggcagggatccctcctggaactggaatggctcatcaaataaacttagaatatttgtcaagagtggtttttgaagaaaaagacctcctcttcccagacagtgtagtcggcacagattcacacataacgatggtgaatggtttagggattctggggtggggggttggaggcattgaaacagaagcagttatgcttggtctgccagtttctcttactttaccagaggtggttggatgtgagttaactgggtcatcaaacccttttgttacatccatagatgttgttcttggtattacaaagcacctcaggcaagtaggagtggctggaaagtttgttgagttttttggaagtggagtttcacaattatctatagttgatcgaactacaatagcaaacatgtgtccggaatatggtgctatcctcagctttttccctgttgacaatgtgacattaaaacatttagaacatacaggttttagcaaagccaaactcgaatcaatggaaacataccttaaagctgtgaaattgtttcgaaatgaccagaattcttcaggagaacctgaatactcccaggtgatccagattaatctgaattcaatagttccatctgttagtggtccaaaaagacctcaggatagagttgctgtgacagatatgaaaagcgatttccaggcttgcttaaatgaaaaggttggatttaaaggcttccaaattgcagctgaaaaacaaaaggatattgtctccattcattatgaaggaagtgaatataagctgtctcatggatcagtggtcattgctgcagttatcagttgtaccaataattgcaatccatctgtcatgcttgctgcaggtcttttggctaaaaaggctgttgaagctggtctgcgtgttaaaccttatataagaacaagtttatctccaggcagtgggatggttacacattacctcagttcaagtggagtattaccatatctaagtaagcttggatttgaaatcgttggctatggatgttcaacttgagtgggaaatacagcacccttatcagacgcagttttaaatgcagtaaaacagggtgatttggttacctgtggaattttatctggaaacaaaaattttgaaggtcgtctttgtgattgtgttcgtgccaattatcttgcctctccacccttagtggtagcttatgccatagcaggcacagtgaatatagattgccagacagaacctttaggtactgaccccaccggcaagaacatttacctgcatgatatttggcctagtcgagaagaagttcatcgagtagaggaagaacatgttatactatccatgtttaaagcattaaaagataaaatagaaatggggaataaacggtggaattccttagaagcaccggattcagttttgtttccatgggacttaaagtctacttatatcagatgcccttcattttttgataaacttaccaaagagccaattgcactccaggcctattgaaaatgcccatgtcttattatatttgggagactctgtcacaaccagatcatatatcacctgccagaaagtatcgctaggaatagtgctgccgctaagtatttgacaaacagaggccttacccctcgtgaattcaactcttacggagctcgaagaggtaatgatgctgtaatgacaagaggcacttttgcaaatatcaagctttttaataagtttattggaaaaccagctcctaaaacaattcattttccatcaggacagacgctagatgtatttgaggctgcagagctgtaccagaaagaaggtatcccactgattattttagcaggaaagaaatatggttcaggaaactccagagactgggctgccaaaggaccgtatttactgggtgtgaaagctgttttggccgaaagttatgaaaaaatacacaaagatcatttgattggaattggcatagctccacttcagttccttccaggagaaaatgcagattccttgggcctctccggtagagaaacattttctttaacatttcctgaagaactgtctcctggaattacattgaatatacagacaagcactggaaaagtattcagcgtgattgcttcgtttgaagatgatgtggaaataacattatacaaacatggaggattattaaactttgtggcacgaaaattctcatagtatctacttaccatagatacctttcataactggtaactgcaaagccttttgtgctggacccaggaatccttaccatggagcagcagatagtcccagtatactcacttatctcatccatggatgtaaatgatgatgaatcaacatagtaactgaaatgaaatcttcttgattttaaataatatacgaatggtgctattaatattgctaaaatcaacgtgtgaagtgtgttgtggaagagacctgtaagtatgggggggggcgatattttatcagaccattttgtaaataaaggcagaatttgtgttgaagattcttatatgaataaccttcctggatttgtttagttttgcaccaataaaactgtgtactactgtttgttggtttaagagtagcagattgaaatataagaagccagattagactctaaaattgtggccattgggaatctcatttataaatggaccttttaagtatattaattcctcttcagaattgagctgggacacatttgggcattcttagtttgtcatataaccaggtttatccttagtctaactgcaagggatagaacctgccccaggtcaccaatccattctggtccaatcccagcccaaggttcccttcccacatatgaagatggaccatggcaggatacaactgattgtgtggcaccatgtattagcagtgggaatatgtatcacatatgatgcagcctttcatatttcagcagtttgccactgtgactgtctggcaagcccccagatggcgttatattaattggattagattattttgctcaccttatgtaatactgtaacttcctataacctaatattttcggtatcattaaccaaaatttcacactcatagttgctaaagagaatgttattcaatcattaaactctgaactgatttcttctatacatttaaattatccaccctcaataatacgggtgctcaaccctatgcattttttaagtgttgctatttcttaattaaattgatttcctgtcattttgaatcatttatcacctgcgatgcatgattctattaattttgttatgttactgttttaaccaaagctgaccgtaaggataaaacacttaagttgttgctgagtactatatatcctcaatatgcatgtctgcccatcacatcaaatgttctgtcaacaagatgtttggtaattttttttaaaaaggttggaaaattaattatagaaggttctatactgtttttttaattaagaaactaaatctagcaggctaaaggttaattgtagtgattttttttcacatagatatctttctatgacctagttagttactgcaattcagaattagttcacattgcataaagaattacttgttgtaagcaaaatgctgaaactaccaaaccagtggatgaagaccactaagaactttgcacataatcatacaatcttttgaaaatattttgcaaatatgtgtttagacaataagatggactagagttcgacaaaatgatttctttatttaaattttgtataagtattttcttcgacactttcaaattatattgtgttcttgatatatgctgtatatttatttgttagtgcatgtgtttttaatttacatgaaaacatgagttaggagaaattacaggttgaaagatgaaatgcctgtatgtgctctgaagaaatggtaattccagattgtgcagggggaaacaaatctattttgttttgttttgttttttgagacggagtcttgccctgtggctgggctggagtgcaatggcgcgatcttggctcactggcacctccgcctcccgggatcagggtattc

SEQ ID NO: 74661 - DNA, 2950 bp, Homo sapiens; identical to SEQ ID NO: 61390
  misc_feature (1)...(2950): n = a,t,c or g

SEQ ID NO: 74662 - DNA, 1673 bp, Homo sapiens
ttttttttttttgagcggttttcttaagtgtctttaatactccactcagggcagtcccctccctctactgagaggctcttggctctggccccaagagcagctggaaggccctggcctgaacttcaaccaacttgaatgtccaaggctgtgtgtgccacgctccctggctctggtacgtggtatgcaagcacctctcgggccttgggggagtttgatcccctccagccactcctgggtacagcctcctgcacgtgtgcacctggactccggacgccgcacagggatgtctaagtgtaaatgccttccattctgcccgcagcaggggccttatccgcatgtccgtctgggagtctggggcttggcctcttgccattttaagcatcctccaagcacaaggggaggacccttccacaaagtgggaatgggggaactttgcccttctttaaaggtttcaaggatcaagtttctgggatgtttcgaaaggcatagggttccaagacaaaggtttacacccatcttttcggttcttcttcaagggtgaccttctgtggaaatctttggtttctaagggttcggtaaggtgactcctccacatccctccgttgaacagctccttgggccgcatgtctgaagatgtgtgccaggtgcccgtctgagctggctccatcatgacgcgtcactttgtcctccttcaagtctccaaacagagtgtcgacggcagcatctctcactgagaggtcaccttgctcccattaatttgaagcaaatttcacctgatgttaaacacgcaagtcaagcgcccccgggaagccatgcaaagccagggggaagggctttccctgaagagcctcccagcttcttgtcattaaccaaggggccaccaatgaccgtggaaaaatcttctctggagacaaggttctgctgtctggccgaaataatccttcaccaaagaacccatgacctgctggggggactttggcggtgccaagaaggtgggccagtgatggggcgaccccagcaacccgctccggcgtatcggaccccagcccaggacaggcagaggtcagcatggggcagggtgcgttccctccctcactgtgctggcgaataacgacgcacgaattctttttgactctcccaggatactaaaatccgcagctatcgtcgtatcaaatacatagtgcacccccaagacttttgaggaaaccacagagtcttctggatgcaatcagttacactgaggttgaaatttagccagcaaaaataaggcaaagattgaggacacacagacactaaccagcactttgtgctttgaggtatcacatttcttgttaaggttcagaacgcggaagaagtccttggcattttgctgggaaagttggactccttcctctgcagtcatacagctgtcacatgccaggcagtcgctcaaaaatatcttggcatcagccaacttgtggaattctcccttctctccattttcctgggctggactcggtgcatcggctgacacattctcttggtcatcagtttttgttttcttactacattccttgcgcgtgcagtgctcacacttcatctggagcgcggcgggcgggaggccgggcgcctcagactcagggaagcaccgggagactgggacaccactgcccgccgcccgcggccctttgttg

SEQ ID NO: 74663 - DNA, 2934 bp, Homo sapiens; identical to SEQ ID NO: 61392

SEQ ID NO: 74664 - DNA, 3786 bp, Homo sapiens; identical to SEQ ID NO: 61393

SEQ ID NO: 74665 - DNA, 6143 bp, Homo sapiens
cctgttatcagagagtagggccccctcagtttatcgtttagacatcgctaagtgaaaaacagaagaccaggtttatttcatacaatgttattcacacatttttcattttctaatttatacataatatacaaagaagtgaagttaaccattatttcatatgaaccaataagagccaggacttagacaaactggtccagaaacaatccctatcaaaaggagacactcaagagtaaagcctaggtagttttgcccaattgttttattctgaaatgtgattttcagattttaccaaaatttcatgccaacttactaaaaggtaaaaattggggtgggcacccaaaatggcagactgtaaaatttctacaagaacaggtacttttgtagagcaggcctgaaagtattgggaagattgggttgtcagcactgggacaaatgggaatgagtatcaggaccccaagaagagggtttagtttctcaatgtagtattctctacttgtcattttctaaaattgcagagataatgcctgtgccaacagagggcaaggatgaaggaagactaggaattcaactgtacaaagacaggaaagccattaccaatctccaacatgacagctttgatcctgaaaccatgggctgatactgagaacaaaagttcgatacgggccgaaatactctgaggttggtaaagtaggaaaaagtgagacagcggctttgtgtgggttttaaaaaaatgaaacaaacacaaggcgttgctgcagtgactgggacatgctgatgacccagagtgactatgagaaggaacggtgacaagtgtttggatttaatggtctcaccaaggaatgttgggttagaaaagtaaaataactcaacaccaaacatgaaaaagtatgcctggcatccccaaactttatgccattatttttaggttcataatatgaacaactaagtgataaaacctttagattccatattgtgctcagaagattgcgtttcttctgcagatctctagtaaaaaaagatctcttccatattcagctgacagaatagcatgttcattttagttttcagcactgaacataagtgggtcaacataaatgtttatacaaaatactgacttcaacaaaatacaaagcactttctttatctttcagaaactgaatatacacagcaagtttttttccaaaatattttcataggcaaaggattaaaaacgattttaattatacacatatggtcacaattttgccttaaaaagattgttgggaaatgtacataaggccgcttgtaaatgtacatcgtgttactgttatgtcttatgtccagaggaaaaaatgttatcatacagatttgctcttacttgggagtaggctattcaaaaatacagtactcttctgtacaaagaaaaaagtcacatcacatttaataagatgaaaaaagcattggcctccatggtaaccaaatatctcagtccaatactttctattatgcacaataccctgacttcaattgaaagtgatccaaattctagcaggtccatattaacagtcaacaactatgttataaaacaaaatgatctcacaataataaaaagaaagctggttcatacttctgaaaccatataaagataaaaaatttttaaaaaatcactctcgatttggagaaataaatttacattatacaacactatattgccaggtcaaagagggcagggacgtaaatgtacactaaaatgcaaatgtatcccaaagagataaaacaaattccatttacagcatgaaggtttacaaatgtacacctgtacaaccaaggaaagcatcactactaaattagcaaggcttttataataaacattgaaacaagatttcctttcaaagtgtaaacttacatctattactacacacacaatgcatatatttatagaaagcaaaaagagctatctgaatatgtaatcatgcttaaatgctgagctatcaaattcacttttcagtggccccttttcatctctatctggttcctactttctgcctctatgaaaaagcaaaataaagctcaacacttcctcaacatgtctgtaattctataagcaaaacaaaatacaaatttccactctttctcattgcaaaccaaactgaaaagttaataagtgacttaacttttcatttagtgcacttaattggaagtgtcaccatgattttgtatttaactcttacaacaattacatatgtaagtatatacaatatttctgtacattgccagagacattttagggcagtaattgtattaaaaccacatctactgtaaataatgttaggttcttttcatctcaaaccactttattcttgtctacttactcgttatttgcatgatagtttgtgaattatcaaaatacaacttaactctttttaaaatattaataatatttatgcagttgattgttaatctgttataaaaggtttcacgcaaaggaaaaaaataaggactataattctatatacatctctataaacctgttgtgctatggggttgtagacctaccagactgtgagccagtttattaaaagaatactgtactttttcctttaaaaactatttttgtgactttacaaggtaaaaatttacaaaatatgtgacagctttttatttttgatacagttacatcatatacaggcattctgtgctttgccagcaatccaatctgataggtctccactcagggctgaatataatttataattcatccccccccccccaaatatacacaagaaccttaaaaaatttacaaatggatgaataaagtcaataaatagttttgctttaaaaaaaaattgaagattcatagttgagttgtgttttgataattcacacacaaaaaaattcttttcacatggttaaattatcttctttctcttgctcctgtaatttacagcattccatttggtggtcctccaataggtcctaggtccgggctattcttcaaataatacttttccaacttggccagtatatgcttcccgtatgtgtatttgcgcaaagtagtaatgtgaggtcgaatcttgtgcatgattatctttctctgagcaggttcagccatatcaatcatcttttgaaccacgtaattggcatactggtccttcatcatggtgtataaggcactgtgaggaccatcattctggcagcaaacctcgtcaatcagtaaagctctctcagcacgggaggcatgagtaacacacttttctactacattgctggcaaatttgtgttgactcagggctaaaacctttcccctgatttcggaaacaattttgctcttgtcttcaggtcgaccgtgttccagtacatgctgaataacataattgccatactgatcctgtaccaactgctctgtatgttggtggagttcttctaagataggtaaggtctgttctgcagtgcaatgctctaggatgcgctgaattactctgcagccataaggatgagttgaaagcacaaatacttgtcccttgaaagcatcaatgatgaactgtagtgactgtggctgaacacattcgatacatttttgtacaacatggtttccattctgatctttcacacatttgagcacatgaccatccagctcctttaccatttcactaattacctgctggtcagaagaaatagattctaatgctttctgaataacgcggcagccatacatctgcaaggctaagggtagaacatgaccacgaatacgagtagccagggctaatttttgatccagactcccaaactcaaaaaacttctgtataacatagttgccaaaaacatcagtcattaattgataggctgcttgcagaatttcattaaataccatctgtcgctcagctggagtagctctctctagtttttgctgtatgaatctagaaccatgctggtcttgagaaaactcaactatatgtccaatcaagtctctaagctgaaggtttgggaagcggttgtttctgaaatcttccaataatctactgcggccagaaggcataatatcagacctattataccgaagccgggaaggaggaaagagctggctgctggagctaaatagactggaagtgcttgaagcacttcgatattttgcttctgctccaggtgctgcagagatatatcgaccactaccatttgtcagtcctcctaaatgcaaactggatgaggatccatgtgatgaaagtgatggcggtggcgtaagtgaatgtcctggagtttggcttggcagaggcatgcctattggacttggagaggaggaaaatcccagactattgtaaaatggttgccctatgggtgctaggctgctactagatcttttgtacaagtcagagctagtagatagagactctctccttgtggcactactacttgcagaactgccaactgatgaaccaaatccactgagggctgagcctatagcagcacccaaagagttaccacttccaaagccaagagatgtacttccagggttgaccagggtccatggaggaaaattaaaggaactactctggggagctattagtcaaaggaactgcttccataaaatgaattagattgcagattattgcttggctgctgttgctgctgctgtggtggctgagtgccaattggccgaaacagaccatttgtgctgcctgtaaggctacttgcagttcctccagctgctgctgctgctgcagcttgtgctgctgctgaactaattaaaacaggtgttggagccattaaccgaactggagctccaaggccagtccttgctccagggccaaccactaaggcaccagtctgatcataataggcagttggagctagtacttgatagcctggcatgccagtagcaagaccctgaccaaaagccaatgttggatttgctgctgcagctgccgcaagtgattctgcttgctgcccttgctgaccctgattgggagtaagaggacgctgacctgctccagcacggagaacctgttgctgtccaggctgagcttgtgatgctgcttgctgactggctgtgttatttgccgcagctgcagcttgctgctgaaataagttggctggatacaccccccatggaacgccgtaatactgaggtggaaccactgctggacctgctaatgtagctgctgcagccaatcctgctgcagtatacggatcggtccctggaggagcagcactaataatgtatggatttggcacaaatgcagctggagcaaggcctgctgagaatacaccagctatatgtggctgctgagctgctgctaatgcatattgctgctgttgagctgcagttaactgttgaactgttagtgcattagtcctctgaaagagctgctgctgggaattgtagtcaaaaaggcctacagtagctcctgaagagtccattggtacctgattaccaggatagtcaaactgtaaggattccagaccaacttgttccatggcatccagattctgagtttcaggatttgaaaattcttcaacaagtggtttattagctgtaggattaggaagaggccccagtccttctgagggattagtattggggcccaagcgctcaactacttcagttggagaggcttgacgacttccaggagtacgattaaaatctttgcaatcggcatccattccatttggcaaacctctgccatttattttagaatcatcatcatctccttgtttaagatccctgtttttggtcctcctcaaatggagaagccttgcctttttgatctcctttctcaggtccatctgtttcagcatctctagtgccaaaatttcccttcctaaatcgagaatccaatttatcagcaggagaagaacttaatacatattctaccatgctcacaccaaggcctccactttctgatcgcggagacagtattgcatttacttcactgtttccatgaaaaccctgtccagatcttctctgtaccataataggctgggacattgaatggtgagaagctccccatgcagtctctctccattcatcatccccaagaaatatgcctttttgtccatcttttgttgaatcatcaggttcccaaaactttttggtaggcaaaagctctcccattccccgagattctaatgcaagagcttgaaaatcatgattcatttcatccacagat

SEQ ID NO: 74666 - DNA, 1098 bp, Homo sapiens; identical to SEQ ID NO: 61395

SEQ ID NO: 74667 - DNA, 8527 bp, Homo sapiens
  misc_feature (1)...(8527): n = a,t,c or g
tttttttttcagaactactaaacatttattgaatgtgtaaggtattaaaaacatttacaattttgttaataaaatgatgttttatattaatgtatgtattatgctttggaatatgctaagtcatgtagataactttacatttctttcaataactttattctttacaaaatatacaaataaattaaanaaaacaattcaacttttaaaagggattacccatatgcaagaagaaggtattgctatcacccattctaaattcccccaatgcattcatttcctgttcccttatctttcaactctagtggcaaagtaaagactgaattgaaattaagctggcactacaacatcattaccagggatagacacataaacaaagtcatttccacataaggaatgctggatctccagagaagtggacaaagaggagtctactgagttttgcactcnaggcacatccttgccctgnaggaggcgtgcccaaggacctgggctgagaatccacactctctgctcctgcattttgcacctctggacaaaggcctaaacttgagttatcaaaatagcgaactggatgaggtgatggtaaagactttgatcggctatcaaaaaaacaagattttggtgattcctttggcacaggatcttgtaaattccgttccttgcattgagagggtgtaatttgtttctttttagaagctgttccagtcactttaggagactttggagaattctcacaagttacttgtttgtgagcctctcttttaagggttctttccttccaagttttgacctcattggaaagatgctgattattgcttaacaattcattcttttgttttattagctgttcattttgctgctttaacttagaaatttctttttctagccttatatgttcacttttcaaaataagagcttttgtgttttgtacaatgccgctgccacctccacaagttaagggtttatttgaaggctgaggatcagtatgttctgatatcactgaggtatcttgggcctgttgacttcttctgagattttctctcaatagccttataacttccttttgatattctacagtggcttttgtagcactgatttccttttcaaattctttggcatttttcattttctctaggtctattttcccaagcttcattttgagatcttcaatttcttctttatatggcttagctcctaaagcaactttgtcctgaagtacttgaattgtctcttttgttttttcaaggcatttatttgattcatgaactttggcttgaagttttgctattatgtcattagtcacctcaagttctttctgcatctttataatcttgctttccttatgcatagcactttctttagcttcatgcagtgaattttccagctctcgaattttctctgtggttaactgtgtagctcttgatgtaacatgaggattcttattgtcttgtgtggtaggattaacctgggcaccagatgccaaggaagtcttcaatgtttggtagtttttaaatagtttttcatttttctctttcagtgatttcaggtcctgttcccactctttggatatggtagcacttctttcctcaaactctgttgattcattcattatggcaattattctgttattaaagaagttattcacttgacaaatcctatcattttctttctggatgccatttttaagcttttctatatcaaaacgagtatttaaccactcttccaaaaactgtgtcatttctttcctattacttagtacttgttgaaattcagtctttatgctagggaactcactttctgagaaatctttgagaatttcctcaatatgtagatccatattctggttcaatttgagatcccttaattctctggatggtacatcacaatcttgttgaaggtgctgtattttaattagcaattccttttgcttttccacttcatcaataaaatccatttcaaatttattgatgcattcatgttgttcttcttttatttttgtaacatagcttaacacatacttcagtttcttcatgattctgtggaattcaatttccttctccaagtcaagagacaatctattcaagcactcataatgatcatccatctctgagtatctcttcaaaagctcttttattctagagcacttttctctcaggctttccataaggtgctgttgtccatcacttagtaaccttttttcaggttttacttggtggttctgtcggtctctagctatcatttcccttaaggttgctatgaattggtccctttccattttgagagattcttttatcctccttagctcatctctttctttagctacaattcttatttcttcaaggctttcatgaagtttcttagtcaactggaagttatccatctcacacttgcatagatagtttggctcaaattgcttcttcaactgttccatttcattaatttttttatgactcatattgacatcttctttcactctaagcagttgaagttcttttttctgaagttcttggatctttttctgtaattcatcttttgatttatctaaatccttttgaatgtctgaaatttgaattgtcttttctgaaattttttctctaagtttatcaacagtttctttgtgttcttttgatagcatacgagcagtttttagttcctgttgtatttccagatctctagctttggtttcttgcaggctttccttgagttggtctctctccagtttgagtgtctcctctactcttcttagattatctctttctttcattacagatttcatttcttcaaggttttcatgaagtttctgagccaaatttaaattctctatttctaatttactcagagttaagctttggtcttttatttgtttctttagttgctccatttcagacacttttttctgtgtctcattgacatctttttttaacgtaataagttgatgttcatttgccttaagttcttgaatcttttcttgtaatttagcatttgaattttctaaatctttttgcatatttgatagtttatctgtcttctcagaaacaattcctctgagtttgtcaatagtttcctgctgctctttcagatgcatgtgagcaattcttagttcctcttgtattttcagatcctgtgcttttaaggcatcatttgagtgttctaagtccttttgcatatttgatatttcatttgttttctctgaaacaatccctcttagtttatcaatagtttcttggtgctccttcagatgcatgtgaacaatttttagctcctcttgtttttctaggtctctagttatagtttctctaaggttttccttgagctggtctctctctactttgagagtctcctccacactcctaaggtcatctctttcttttgttacagatctcatttcttcaaggttttcatgtagtatctgagtcaaccttatattctccgtttctatgttttccaggtttaacttctgggtctcaaattgctccttcaagtgttctatttcacacattttctcctgagtctcattgacagctgtcatcttaagaaactgatattctttttcttgagattctttcattttagctacaatttctttagtgttttctttcagttggtctctctctatctgaagggcctcctgtactcttttcatttcctctttttccttaatcataatttgtatttcttcttgactttcttgaagtctgttggtcaactcgagcatcttactttctatactttgtagtgctgaatccttggctttgcgatgctccttgaattgtttcagttcattcactttttcctgaacctcactaatttgttttatattaagttgttcctctttctcataaatctcttggatcttgttctgtaatttatcattgattgcttctaactgcttttgaatggttgatatttcagtttccttctctgaaagattcactcttaactcattaatagtttcctcttgttctttcaggcaacaatgagcaactttaagttcctcttcagtttccaggtgtttagctacaatttcttttatgttttctttgagctggtcactttcagattgaagaacttcttgcagcctctgtaggtcatctttctccttagctacagatttcatttcatcatgactttcttgaagtcttttggacaatccgagcatttctatttctatccttagtagtgctgaatctttgggtttgaattgctccatctcactcacgattttggtagtttcattgtctttttctttcatatttaaggactgttcttgtttgctttgagactcctggattttagccaaagtttctctaatatgttctttcagctggtcatgtttaacttcaagggcttcttttatcgttttaaggttgtctctttccttggttagagattttatctcttcctgactttcttgaaatttttcattcaacctgagcctttccatttctattcttgccagtgttgttgagtccttggttgtggactgttctgttaataactccagttcattcattgtttcctgagtctcactgacttttttcacattaggcagtaactcttgttcctcatgaagcactgggatctcttcttgtaatttggtatgggatttttctaagtcctgagtatttattatttgagctgtcttctcagatacgcttcttcttagttcatcaatagtttcttggtgttcttttaggtgaatatgagcaatttttagttcttctttggtttgtaggcctgtagcttcaatttctcttatatatcctctaaggtggtctctctctgtttcaaatgacttctgtaattcctttagaacttttctttctttggttatagatttcacttcctcataattttcattaagtttctgagccaactcaagcctctctgtttccatatgttccaatgtcaattctttgttctttaattcattctttaaattctctatttcattaatctttttctgcatctcactcatctcttcttgtacattaagaagttgttgctgtttttcttggagttgctggctcttttcctttagtttttcttcaacttctgccagtctgtcacaggtcctagaaagctctccttctttctttatggcatggttcttttcttgtgcaactatctcttgttgctttttaagttcatccccaagaagtcttaattcttcctggttttcaatggtcatttcaatattttcctttaggtcagtcttcaattgttccttttctgctataacactctctaacatttgttggagttcatttttctcctgtattaaagaaaatatcttcctttgttgctcaattatctcattatccttaacatctgcagttagtgtttgggtatttttagcttccaaatcctgttttttatctatgccaaccatcttttgctgaaattcatctttagtttctcctgtattttcctccatatgcaaattcctggaaacttcctcagaaattttcgattttagtgtattaattgtttcttgatgttgtttcagagactcaagagcatttcgtaattgttcttgagtatctatattcatgttaacagtatcgtgaatatcacttttgagttggtccctctcaatttgcaagctttcttggagttgttttagatcatctttttcttgagttaaagtttttacttcttctaaagtttgctgcagtttctcagtaatcagtgttttctccctttctacagtttgcagcggagaatctctattttctaattgttccttcagctgttccatctcatttagtctttcttgaacctcacgtgttttctcctgaagttcttgggtcttgtaagaaagctcggtcttcaaagcacccaaactcgaatcaaatttttgggcttctttagagagattaactatttcctgattcattctctcattctcctcaaggaccatcttatacttttgctcaaagtccatatgaagggttttgaaattttggaattcttgatcagtgcttttataattcgactgtgtagttgctaggtcatcttttgttttcccaatttcttcaagtaaaccttgaactctactctccttatgaactacttcagaaaacaatttatctttttctgatgttattatatggagctcttcagatttgtcttgtatctctttcctcagcctttctacttcagaaggtaaagatttcaattctgaaagcaaaatgacttcttcccgcaaagcttcattttcttcaacttctttatttagttctttctgaagatcagtaatctttccttccaattccaaattacagagcaaatcttttggaactttgccatctataagggaggtgagttttgttatctcattaaaagcagattgtaattctttctccagatcaacttgcattttcttttttgcctccaattggctttgatataactgaatatcattttccatttgcttgtatgtagttgcaagttctttcattttctccttcaactccagattttcacttctaagaaaggctgattctctcttggcatcaagggctacagtttcagcatcaaacagagtctgcttcatttgttttgggtcttcaatgctttccaatgagtatgacaagtccatttttatattttctagcttttgagagtctatgtattcctgtagcttcttaatctggtcttccttttctctaagcagctctacttttgaactgagttcattctcaagatcttgattatatacttctcgatgcttaactaaattctttaagttcgaaatttcatgaattagttgcatctcttgatcttttttagtttttctttctagagcctcaaattcatccaaatcattcttttcttttaatttcaattccatttcttctttttctgttcgtagttgttcatagtctaataccagattatcatagtcagcacgaagtgagttcaactcactttctatattctcctgatttagtagctttgttgctggattccattctatctcacttaatgtatcaagagtgttactgaaaacatcagactctgaacagacagattcatcaatttctcgtaataaatttatagaaagcttatgtgtttttgttgttatatttgttggtatattaaattgatctgcatagtttgagttcttcattttgttaattttgccaaggcaccaagtaactcttcgttttcttttagcctttaattcctgttgcaacgtgagggaagaagaggtcaccagcatccgtgttaagttttcaattttctcattctgtactttctgaagcaaatctttttcttccaaaagttgggccaattggtctttttccattgcctgagcccgcgtctctaaagaaacctcctctaattgttttttaagatccattatttcttttctataccttttcaggagagcttcatcagttgatacctcattaacataaggagtattcttcatatatttagcagtactggcaaactggagagcagtaagagtttcatcaaaagatactggagtaattgtgcagataatacgtgtctttggatttcctcccaaggaattctgaagaattcgtgttaacttgctatctcgataatttatgaaaccaccaacttgtccatcactaagtttcttgatcacttgtcccaaaataaataagcttcgatttatattacagccttccttgagccgcacacctgcagcgcctgtttgagcagctctttcactgcctgcaagatcaaccaaattcaaatgggataccttaacagatccttcacaattagaaggttcacccttctctctgctttccaaaatcatcctaaagatggtatgagaacgactgcttctttgattcatttttgtttctccataatgcctgctcttttctccctttgtaatccatttcaaagccatttctgatgtatatacaacttcttctgtgagatcagcaacatacacattcctattgacatcttctcgaataattaaaggtttcattttttgagtgccacagagtaaatctgtaatggtttcattgtatatttccatgtaagatacacgtaagagaaattccctatccaggaaaacttcttaaattttttgggaaaaatgtccatgaaattgcccctggggtataactcccaaatgatcttctgaacccatcatggtatatgtttttcctgaagccagtctgtccatagggcaaatatagtaccattgtagccttgtatggcagaatcgatgattggtgctgctattggcttcatacacatttttgggagtttcattaccatgaaggacacgatcaaaattgaaggatttacttccatcaactggataaatgacattattgtgggttttccagtaaacttgggcagtttctccaagtgattcttctctgctgttcagcggccgcactcgcacgcagacggccacggctccttcctccgccatcctatcaggctgaactggtcccaccaaaatggccaggaccctccgcggccggcacttcagggctcacaggccgccccgcctttaaattta

SEQ ID NO: 74668 - DNA, 940 bp, Homo sapiens; identical to SEQ ID NO: 61397

SEQ ID NO: 74669 - DNA, 1595 bp, Homo sapiens; identical to SEQ ID NO: 61398

SEQ ID NO: 74670 - DNA, 2435 bp, Homo sapiens; identical to SEQ ID NO: 61399

SEQ ID NO: 74671 - DNA, 1640 bp, Homo sapiens; identical to SEQ ID NO: 61400

SEQ ID NO: 74672 - DNA, 2020 bp, Homo sapiens
tagtcgattgtcacgtggcaggccaggggaaggcgggacttccggcggcgaggtaaattttttttttttttttttttttttttattttcttccggtggctggtctccggcggccccgtccccgactgggccccgtgcctccccgcccccgcgtccccccgccgcaagaccgagccgccaccatgaagaaattctttcaggagttcaaggccgacatcaagttcaagagcgcgggacccggtcagaagctcaaagagtccgtgggggaaaagacccacaaagagaagcccaaccagccagcccccaggccgccccgccagggacccaccaatgaggcacagatggcagccgctgctgccctagcccggctggagcagaagcagtcccgggcctggggccccacatcgcaggacaccatccgaaaccagggctgccttccagtgagaaaggaacttcaagccgaagccaccgtcagcgggagccccgaggccccagggaccaacgtggtatctgagcccagagaggaaggctctgcccacctggctgtgcctggcgtgtacttcacctgtccgctcactggggccaccctgaggaaggaccagcgggacgcctgcatcaaggaggccattctcttgcacttctccaccgacccagtggccgcctccatcatgaagatctacacgttcaacaaagaccaggaccgggtgaagctgggtgtggacaccattgccaagtacctggacaacatccacctgcaccccgaggaggagaagtaccggaagatcaagctgcagaacaaggtgtttcaggagcgcattaactgcctggaagggacccacgagttttttgaggccattgggttccagaaggtgttgcttcccgcccaggatcaggaggaccccgaggagttctacgtgctgagcgagaccaccttggcccagccccagagcctggagaggcacaaggaacagctgctggctgcggagcccgtgcgcgccaagctggacaggcagcgccgcgtcttccagccctcgcccctggcctcgcagttcgaactgcctggggacttcttcaacctcacagcagaggagatcaagcgggagcagaggctcaggtccgaggcggtggagcggctgagcgtgctgcggaccaaggccatgcgggagaaggaggagcagcgggggctgcgcaagtacaactacacgctgctgcgcgtgcgcctccccgatggctgcctcctgcagggcactttctacgctcgggagcggctgggggcggtgtacgggttcgtccgggaggccctgcagagcgactggctgccttttgagctgctggcctcgggagggcagaagctgtccgaggacgagaacctggccttgaacgagtgcgggctggtgccctctgccctcctgaccttctcgtgggacatggctgtgctggaggacatcaaggccgcgggggccgagccggactccatcctgaaacccgagctcctgtcagccatcgagaagctcttgtgaaataaaagcagggttggcctcagccctgtgggtctgtctcatgctctccctgttcctctccccgccaccccagggcctccaagccacctctggaaatacttggctctgccccatgggcacgggaggggcgccagccgtggagctgtggaattgggccccgtggcagagcccccatcccttgggggctgtggggatgcgcccaagcccccgagggagaggcctggggacaccaacaaatctaagccctccctagctgcttggtaactgtgtcatgaagctgccggacagacacacgtggcatctccctgggcaggagagcaggcctgcagcatgggtcccgttcccgtgtgccgtgggtggcagtggctgcacctggcactagggctgctctgtggatgtgggtgacaacggcaggaggggacgctggccttcctgcacatagacctgcagttagtaaatcataagcccaaataaacaggttgtttgaatataaaaaaaaaa

SEQ ID NO: 74673 - DNA, 861 bp, Homo sapiens
tttttttttttgcaaatcagcagatttattgaggccaccagcgccactggggagcagcgcgcgtgtgcggagggggtggggcctccccagggtccatgaagtgctcggcccttcccaggcatgcagtcctgcgcagccggagggggatgcgcagggactgcgctgtgggcgccgatggtcagccatggtcagtctgtccgcagccagctgcccttctcctccacctccttggtcactaccagcagcacctcgcacaggccctgggccagcgcagccgccaggaaaggcccctgactccgtcctcaatcccccagggccttcgggcgcccgcagctttggagtccaggttgtagtaagacaccgttccaacctggcgcagggccacctaagatgccgccggcgcagcggcagtgacagcagccccagcgacacgggcgagggcaggttcaggatcagccccagtacctggggcagggccagctgggacaggggcctcctcctgtcccaccacacggcggccaggcccagcccctgcagagcggccatgatcacattgacatcatagttgccggtgcccaggaggctgcgatgagggttcagccgggagtctggggccaacctcttgcagatctcatcggcagcctcctggctaaagagctgctgctgcagaacgttgttgagggcgtggacagcacacagctccaggcgctgccgttcgtggtacacggtgggtgggctcggctgtgctcccggggcctgggacatgccgtcctcggctcctgcccgcctgcctctccgctccaccgagccaggggtttccgcatccccttcctgggcggcggctcgcgatctagaactagt

SEQ ID NO: 74674 - DNA, 6204 bp, Homo sapiens; identical to SEQ ID NO: 61402

SEQ ID NO: 74675 - DNA, 5235 bp, Homo sapiens
gccgccggaactggctgttggtgggggtgcagcactgagccgccgacggggcgggtgggctttgctgccgagcaggcggcgccgtcttggggcctagcggcgaggcgacccgcacaggtgggcggtggcggtaggtgggtggccagcgactggcaacgcggtggcttagacgcgcgagatccggccagggtcagagtactgtaagattgatgttaaaggcatggtgttcaccccacttcatcagcgtacataagttatctcttcttttggacccttattttatgccataatgcaacaagctttagaactagctttggatcgtgcagagtatgtcattgaaagtgcccgacagagacctcctaaaaggaaatacctatcaagtggaagaaaatctgtatttcaaaaactttatgacttgtatattgaagaatgtgaaaaagaacctgaagttaagcagaaattaagaagaaatgtgaactttgttagagaagcttgttatgcaagaagacttttgtcatgtttagtgggtcaatctataccccaggaaatgagggatattctctgatgctcaggggaaaaaacggatcagattccgagaccattcgactgccctatgaagaaggagagttgcttgaatatttggatgcagaagaattacctcctattttggttgatctcctagaaaaatctcaggttaatatttttcattgcggatgtgtcatagcagaaatacgtgactacaggcagtccagtaacatgaaatctcctggttaccaaagtcggcacattctcttacgtccaacaatgcagactttaatttgtgatgtacattcaataacaagtgataaccacaaatggacccaggaagacaaacttttgcttgagagccagctcatcctagctacagctgaaccactctgtcttgatccttctatagcagtcacctgcactgcaaacagactgctctataacaagcaaaagatgaacactcgcccaatgaaacggtgtttcaagaggtattccagatcctctctgaatcggcagcaagatctatctcattgtccacctcctcctcagctgaggttacttgatttcttacaaaaaagaaaggaaagaaaagcaggtcagcattatgacctcaaaatttctaaggcaggaaattgtgtagatatgtggaaacggagtccctgtaatttggccataccttctgaagtagatgtggagaaatatgctaaagtggaaaagtctatcaaatctgatgactcacagccaacagtctggccagcccatgatgtaaaagatgattatgtatttgaatgtgaagctggtactcagtatcagaaaacaaagctgaccatcttgcagtcgcttggagatccactttactatggtaaaatacagccatgtaaagcagatgaagaaagtgacagccagatgtctccatcacactcgtccacagatgatcattcaaattggttcattattggatcaaagaccgatgctgagagggtagtcaatcagtaccaagaattagtccagaatgaagccaaatgtccggtcaagatgtcacacagctccagtggctcagccagtctgagtcaggtttctccagggaaagaaacagatcaaactgaaaccgtgtcagttcagtcttcggtattggggaagggtgtaaaacatcgacccccaccaatcaaacttccctcaagctcaggaaatagttcctcaggtaactattttacaccacaacagacaagcagctttctcaaatctccaactcctcctccttcttctaagccatcaagtattcctcggaaatcatctgtggatctcaatcaagttagcatgctttctccagctgccctatcacctgccagctcatcacaaagaaccacggccacccaggtcatggcaaactctgctggacttaacttcatcaatgtagtgggctctgtttgtggggcccaggctttgatgagtggttcaaaccccatgctgggctgtaacactggtgccataactcctgcaggaataaacctgagcggccttctaccctcaggaggtctgctaccaaatgcactgcccagtgcaatgcaggcagcttctcaagcaggtgttccatttggtttaaaaaatacttcaagtctcaggcccttaaatctactccagcttccaggtggttcacttatttttaacactctgcagcagcagcaacagcagctctcccagtttacaccacaacaacctcagcagcccacaacttgtagtcctcaacagccaggggagcagggttctgagcaaggttcaacccagtcaagaacaggccttatctgcctcagcaagctgcctgttattaaccttactggagtaggaagttttatgcagtcacaggcagctgcagttgcgattcttgcagcatcaaatggctatggcagcagcagcagcacaaacagctcagctacatcatcatcggcatacaggcagccagtcaaaaagtaaaatgaagagaggcatgccaaccactccaaaattttgagtcttgcattactttttgttccttttttaaaaacacaagagcactgaatcaaaagaattgagtttctactttttgttttttttaatgtgtcagtattttacattgctagatgtacaaactttatacagaagcacaaccttatcatttttaaataaaaacagggaaatggtttaacaaactagggttggtttgcctaagtcattgctttttaaaaatggtttcactatacataatatatatggaagtgacctaagaaataatagaaacatctttcagaagaatgtagtttgatatttatttagtataaaacgtttgtgcacagtgttaacaaatacaatttttacaaatctgttttgaaaatgtggtggctgtttatttgggtttcatactcttaattacttcatccatcagttttttaacttctttgtgtcttgtaactgctcggctcatacagtcctgaagtttagctccagttagcccacttccacctggtttgtgaagacaacagagtttgccttcctcatccattactattgttaaggttcctgttgccagatgttcctcctctccagtagggtcaactataagcaaagtgtcatcaaacacagcaaaggaagttgcaactggatgagttctaatattcaaataacttttcttctttaaattaacttctgctaaaggcggtttcttcatttatagtaacttcaggcaactggtacattttttaaaagccgcctagcaaagcaaaatgtgcaggcatcccaaaatgtttcccatcgtagtcgaggcaaatgagatcacagtatagaacccagacaagctttcctggagaaatgcataaggtcctctttctgaattatctgtgaattttcaatgacatctgcaatgaactggctagccacttgggcctcttctccaggaggtccagaccggaatcaacgtatcctttatcaggggcatctgttgatggtgctgcaaattcctatagtagcaaagaaatgtttcctattgaaagaagctactgaaaaattatgaagacaatttagcaatcagttatggaaggctctatcaaatatcagcttagggaattgtgtcagggcctctacggacattggtgctgatcctcacaatagctctacaagataagaaggcactacagtacagtggactacactacagtgctgctcggcaagattacctggagatcttttaaaaaatagtaactgggtttgtgcccccaactactagccaagaatcttaatttgttctccagatgatagagcaagatttaggaactgctgctttagtggtaaagagcaaaagctcagctgggcgcggtggctcacaccggtaatcccagcactttgggacacagaggcgggcggatcacctgaggtcaggagtttgagaccagcctggccaagatggcaaaaccccgtctctactaaaaatacaaaaattagccaggcatggtggcgggcgcctgtaatcccagctacttgggaggccgaggcaggagaatcacttcaacccaggagacggaagttgcagtgagctgacatcgtgccactgcactccagcctgggcgacagagcaagactccgtctcaaaaaaaaaaaaaagcaaatgctctgcaattactaagccagttcaaatgtcagagccatacttactggctgagagacttcaggcaagttatttaacctcttaccttaaactcctcatcttgtcaaatgggaagaaaatagtgtctactcctagggactgttaataagggccaaatgagatagacctgttaaatcccaggcataaaacctgacaaggagcaagttctcaaatcttactgttatacatcactccaggtttacgaaagaagaatctcaactgaggttaaataacacagggtagactgtagtcaaagaagcacaggctttggagtcagatttatgtctaagttttacttatgagtcttatgtacctggacaggttactgaaagtcatctgtaaaacaggaggtgaagacaagtaacaaatgattgttataggcattaaagtggataattctgtaaagcacctaaaaaggtgtctggaacatagcaagtactcagtaaatggtagccagtattccctcaaatttttcttttcaacaatttcaattttctacacatttacacagattacatgtcatcactggctaaaaggatgtcaccaaaaatctgttaatgtctcaaatgatataacaatttttttaaaatggtgactcagattttaaaagttgtttcattttgctacatttgacaattgttcacttagtcattaaacttgggtcatattatctaacactcatagtgaaagctcttgggaaattaaacattaaaaattgacacccaactaccaaatcaagagtagaattacaggtgtatattacaatctaataaataaagctaactttgtaactcaaatctcaataggacatatttagacttactgctttaactccacagattactgtagtatttcccaacttcactaaagcagaaccatctgcggtactaattgaaccgatgttgacagttgtggttctgaattcaccaagttctcttccatcaggacggcagttctctttcagaaatctcctgtaatactccagaggttccacggttttgaacccagccgccatcttcccgcccgcgcgtctg

SEQ ID NO: 74676 - DNA, 945 bp, Homo sapiens; identical to SEQ ID NO: 61403

SEQ ID NO: 74677 - DNA, 4326 bp, Homo sapiens; identical to SEQ ID NO: 61404

SEQ ID NO: 74678 - DNA, 6329 bp, Homo sapiens
  misc_feature (1)...(6329): n = a,t,c or g
gcggccgccggcctcctaggagcgctgcacctggtgatgaccctcgtagtggctgcggcgcgggccgagaaggaagcattcgttcagtcagagagcataatagaagtactgcgttttgatgatggagggctactacagaccgagacaacacttggactcagttcatatcagcagaaaagtatatctctctaccgggggaattgcaggcccatacgatttgagccaccaatgctggatttccatgaacaaccagttggaatgccaaaaatggaaaaagtctacttacataatcctagttctgaataaacgattactttagtatcaatatttgctacaacatcacattttcatgcatcattttttcaaaataggaaaattcttccaggaggaaatacatcatttgatgtaagtttttccttgcaagagtagtaggaaatgtagaaaatactttatttattaatacatctaatcatggggtatttacttacccaggtatttggtgttggagttccaaatccatatcgattgaggccgttccttggggccagagtcactgtgaatagcagtttctcacctataataaacatccacaatcctcacagtgagcctttacaggttgtagaaatgtactctagtggaggagaccttcacctagaactcccaacgggtcaacaaggaggtaccagaaaactgtgggaaattcctccttatgaaaccaagggagtgatgagagccagtttttcatctagagaagcagataatcacacagccttcataagaataaagactaatgcttcagacagcacagagtttatcattcttcctgttgaggttgaagttacaacagctcctggaatttattcctcaactgaaatgttagattttggtacactaagaacacaagatctaccaaaagttttaaaccttcatttattaaattcaggaacaaaagatgtaccaataacaagtgttcgacctacaccacaaaaatgatgctataacggtacactttaaaccaattacattaaaagcatcaggaaagtaaatacaccaaggttgcaagcattagttttgatgcatcgaaggcaaaaaagccatctcagttttctgggaaaataacagttaaagcaaaggaaaagagttattctaaacttgaaataccatatcaagcagaagttttagatggttatttgggatttgatcatgctgcaacattatttcacatccgagacagccctgctgatcctgtggaaaggccaatttaccttactaacactttcagttttgcgatcctcattcacgatgtgttgctaccagaagaagccaaaacaatgtttaaagttcacaacttcagcaaaccagtcttaattcttcctaatgaatcaggatacatttttaccctgctttttatgccttccacatcatccatgcacattgataacaacattttacttattaccaatgcttctaaatttcatttacccgtgcgggtatacacaggctttttagattactttgtattgccccccaaaatagaggaacgtttcatagattttggagtactgagtgctacagaagcaagtaatattttatttgcaattataaacagcaatccaattgagttggctataaaaagttggcatatcataggagacggttgtatcaatagaacttgtagctgtggacagaggcaatagaactacaataatttcaagcctgccagagtgtgaaaaatcctcttcatcagatcaatcatcggtaacattagcttcaggctatttttgcagtcttcagagtcaaacttactgcaaaaaaattaggaggggattcatgatggagccatccagatcacaacagactatgagatcctgacaatccctgtgaaaggctgtgattgcagtaggctcactgacctgctcccctaagcacgtggttcttccaccttcctttccagggaaaatagttcatcaaagtttaaatattatgaattccttctcacagaaggtaaaaatacagcaaatacgatctttgtcagaagatgtgcgattttactataaacgattacggggcaataaggaagacttggagccaggaaaaaaatcaaagattgcaaacatttattttgatcctggactacagtgtggggatcattgctatgttggcttgccttttctatccaaatctgaacccaaagtgcagcctggtgtagccatgcaggaagatatgtgggatgctgactgggatttgcatcaaagcctgttcaagggatggacaggaataaaggaaaattcaggtcatagattgagtgctatatttgaagtaaatacagaccttcaaaaaaatataatatcaaaaatcactgctgagctctcctggccttccatacttagctcaccccggcacttgaaatttccacttactaatacaaactgctcctcaggaagaagagattactttagaaaatccttgcaggatgttcctgtctatgttcagtttattcctctggctttatattccaacccttcagtgtttgtagataagttagtatcaaggtttaacttgagtaaggtggcaaagatagatttgagaacactagaatttcaagtcttcagaaacagtgctcatccactgcagagttcaacaggatttatggagggccctctctccacatttaattttaaacctaattttaaaacctggagaaaagaaatctgtcaaagtaaaagtttactccagttcacaacagaactgtttcttcacttatcatagtcagaaataacctgactgtgatggatgctgtgatggtccaaggacaaggaacaactgagaacttgagggtggcaggcaagcttccaggtccaggaagctccttacgctttaaaatcacggaagcattgttaaaagattgtacagatagtttaaaactaagagaaccaaatttcacattgaaaagaacatttaaggtagagaatacaggacaacttcaaattcacatagaaaccattgaaatcagtggatactcatgtgaaggatatggctttaaagttgttaattgtcaagagtttactctaagtgccaatgcttctagagatataatcatattgtttactcctgattttacagcttctagagttattcgggaactgaagtttataacaaccagtggctctgagtttgtatttatattgaatgcatcccttccttaccatatgttagcaacctgtgcagaagccctacccagacctaactgggaactggctctgtatatcatcatctcaggaataatgagtgcactgtttcttttggtcattggaacagccctatttggaagctcaaggaatatgggagcccatttcgaaggcggctatccctttgaggcctcgaacccgcccttcgatgtgggaaggccatttgatctcaggagaatcgttggtatttcatctgaaggaaacttgaacacactcagctgtgaccccggtcacagtagggggttctgtggagcaggcggatcatcatcccgacccagtgccgggagtcataagcagtgaggcccatcgggtcacccacacagcagccacagcaatagaaactcagctgacgtggatgacgtcagagcctataacagtggacgaacctctagcatgacttctgctcaagcagcttcttcacagcctgctaacaaaacacgcccccttgtcttagattccaacacaggggctcaaggtcattctgcgggcagaaagtccaaaggggcaaagcagagccagcacggcagccagcaccatgcccacagcccgctggagcagcaccctcagcctcctctgccaccgccagtgcctcagccccaggagccgcagcctgaaaggctgtctcccgcccccctcgcacacccttcccacccagaacgtgccagcagcgcgaggcacagttccgaggactcggacatcaccagtctcatagaagccatggacaaagacttcgaccaccatgactccccagccctagaagtgtttacagagcagcctccatcgccattgccaaaaagcaaagggaaaggaaaacctcttcagcgcaaggtgaaaccacctaagaagcaagaggaaaaggagaagaagggaaagggaaagccacaggaagatgagctgaaggactctttggctgatgatgatagctcctccaccaccacagagacctccaaccctgacacagaaccgctcctcaaggaggatacagaaaagcaaaagggaaaacaagccatgcctgaaaaacatgaaagtgaaatgtctcaagtgaagcaaaaaagcaaaaaactcttaaatattaagaaagaaatcccaacagatgtgaaacccagttcattagaactaccatatactccccctttggaaagtaagcaacgtagaaatctcccaagcaagattcctcttccaactgcaatgacaagtggatccaaatcacgaaatgcccagaaaacaaaaggtacaagtaagttagtggataacagaccacctgccctagcaaaattcctcccgaatagtcaagaattaggcaacaccagtagctcagagggtgaaaaagactctcctccaccggagtgggattccgttccagttcacaaacctggcagctctactgatagtctttataaactttctctgcaaaccctcaacgcagacattttcttaaaacaacgccagacctcaccgacacctgcttccccgtctcccccagctgccccctgcccctttgtggcccggggcagctacagcagcatcgtcaacagcagctccagcagtgaccctaaaataaaacagccaaatggaagcaaacacaagttgacaaaggcagcctcgctcccgggcaagaacggcaaccccacttttgctgcagtcacggctggctacgacaagagcccaggtgggaatggctttgctaaagtttcttcaaacaaaacaggtttctccagcagccttggcatttcacacgctcctgttgacagcgatggctcagacagctcgggtttgtggagtcccgtcagcaacccaagcagccctgacttcactcccctcaattcgttctccgcctttggaaactcttttaatctaactggtgaagttttcagcaaactcggattatctcgatcgtgcaatcaggcctcacagaggagctggaacgagtttaatagtggcccttcatacctttgggagtcgccagcgacagatcccagtccttcctggccagccagttccggctccccgacccacacagccacatcggtcctcggtaacaccagcggcctgtggtccaccactccattcagcagctccatttggtccagcaaccttagcagcgcccttcccttcaccactccagcaaacacgctggcaagcatcggcctcatgggcacagaaaactcccctgctcctcacgctccctccacctccagtccagctgacgacttgggacagacctacaacccgtggcggatatggagccccacgattggaagaagaagctcggacccttggtctaattcgcactttcctcacgagaattaaattaagcaaaaaacaaacaaacatagtgggccctcgtctagatcatgatgtgccagtttctgagacatctttttaaggctcttactgcagctcccctccccaccctcctcttctttgcaaaacagacccaagcagggcaggctcagaccactcgcttctttcagatctttcttgcaattatgataacatgagatttgctgttgtgcttttagagaaaagtctggactcagccacaaactctaataagacctgtacatctgagaacctttcccgttactgcgttttcaccacctgtcttccccatgctttatttatctgtatgaacacagatttgacattacagctaaggaaataatttgagttgattcagaaatcctggcatgtgacaattttgttaaattaccaagtttggtttttaataatttctcaatattatgcgccaagatctaattttaaaactgtatgaggactttgtgctgaaaatagagtatttttttaaagtaaggctgtcttggtttaaaagcagattacagaaatgtaagtcaacttaagaacagtgaatgaatgtaaaaacattcagttgagaccatatgcattttctgtgctgtttgtacttgaggtatgtaacatttgtatacctgaacttattttaaagatgaactgaaatgcacatagccaagtcttgagatacaagattgaatgtgtatttcttaaaaatacaactttgtgttgtactttgaaataaatgatgcttttttcanaaaaaaaaaa

SEQ ID NO: 74679 - DNA, 1991 bp, Homo sapiens; identical to SEQ ID NO: 61406

SEQ ID NO: 74680 - DNA, 1029 bp, Homo sapiens
ggaattcgtgctggggggttgcagaaagctgctcgccagcttagttcaggcaggtgctgtcagcgtcccttgttttggaggagccagcctgagccctacccccgacgaagcgagtggaggcggcggtttaactgacgttttctttctgcccagccgaaaggaaagaaggccaagggaaagaaggtggctccggccccagctgtcgtgaagaagcaggaggctaagaaagtggtgaatcccctgtttgagaaaaggcctaagaattttggcattggacaggacatccagcccaaaagagacctcacccgctttgtgaaatggccccgctatatcaggttgcagcggcagagagccatcctctataagcggctgaaagtgcctcctgcgattaaccagttcacccaggccctggaccgccaaacagctactcagctgcttaagctggcccacaagtacagaccagagacaaagcaagagaagaagcagagactgttggcccgggccgagaagaaggctgctggcaaaggggacgtcccaacgaagagaccacctgtccttcgagcaggagttaacaccgtcaccaccttggtggagaacaagaaagctcagctggtggtgattgcacacgacgtggatcccatcgagctggttgtcttcttgcctggccctgtgtcgtaaaatggggggtccccttacttgcattatcaagggaaaagggcaagactggggacgtctagtccacaggaagacctgcaccactggtcgcctttcacacaggtgaaactcggaagacaaaaggcgcttttgcttaagctggtggaagctatcaggaccaattacaatgacagatacagatacgatgagatccactgtcactggggcagcaacgtcctgggtcctaagtccgtggctcgtatcgccaagctcgaaaaggcaaaggctaaagaacttgccactaaactgggttaaatgtacactgttgagttttctgtacataaaaataattgaaataatacaaattttccttca

SEQ ID NO: 74681 - DNA, 341 bp, Homo sapiens; identical to SEQ ID NO: 61407

SEQ ID NO: 74682 - DNA, 1911 bp, Homo sapiens
ctttttttttttgttagttgtttttgtttttaatttgtctccaataagcaatgtcttctgccccatccagcatgggaagtgggtcccacgtgaagggggccccaccaccccactttgggaagctgaaggctagagacttcgggagccccccccggctcaagactcccccctacgctgggttgtgggttatattcagaggcccgacacccacactggggtaggttaggtattgggtttacttaggccacaggccccccgggggcagggagacagagtggggggcccgaagctccctgtctctggaagaagttaaaaagttcttggggtaggccctgggccccgtggggggcagttatgagatgaagggaggttactccttaagcccaggagtggttaagagacagtggggctggtagagatgcctgtttaaagccttggcctctaggaggtgttagagatttgctggggttgggggcccagggttgctgggacccccagtttttggggaagggagctgtaagagattgggggatgttctgagctccccagacaagaactgctggttaagagggggccaggcccggttggggctcagctgtccctgaggagctcggcatcccgcctgggagatgcagctgtcactggggtttctccctctctgttgtcctggcctcgtccttggcaggtggcggggacttcttgggggaagctgaagtgctggggttggggacccccgcccccgactgggcatctatgctggcgtgcctccttgcggacaaggtcctccagctccttcttccatccaaggagctcagcaagggccaggcagccctggtcgcattcacccagccaggccacgtccctgcaaggaggtacccatgaccaggaggaggtccaccttcaggaagtctgactgcatacaggagaagaaacgcgctgggaggctctcaccaaaaaagacgattatcaggcttcaccaggctctgacagtcttcacacttgggcgtcacctcagagaagatcttctctttcatccagcttagcgggtattcgtgccggcagctggcgctgacgcagtgtgatgtgtagaaggtgccgtgcgcctccaacaaagtcctcctgttccagcccggctattcgctccagggtatctatgttcctgcgtgtagcagcgcaggagtagccccttgtccttcagcaggcgcatgaagtagtgacagatggttggcttgaactgccccaggatagagttccttggcgagggcgaagaagggttccggatgtttcttgaaatagctgaatctcaaaagatggcctctgggttagggaaagatggtcacttctctaggttgttcaataagaggccggtggatggagaagcgaaaagtcggggatgcctgcggatgtggagattccagctcccaccaaacagatgactctgcgacagcgttcgctctgcatgtaccgggccaccccttccaaggtcagctcgtccagcagacgctccttctggctgcccaggctgagcgtctgggagaataagttccgcaggaagtccatgtctgcttctccaccagcggctcctccctcagagtctgaatctgagtcctggaaggggtggggtggagtggccaggcccgagaggtgggattagggagggaggagagggggtgataccaggtttggggaaaaggctgtggcaggaaggtggcctgaggaagtgcggggtggtggagagactgcactggggctagctccagggctctgggacaggctgccggggttggagtcctggccatgcccgtccccaggagcaagacctcatgtgagtggctttgctttgcttttcttttttgagacagtgtctcgctctgttgcccaggctggagtgcactggtgcagtcacagctt

SEQ ID NO: 74683 - DNA, 1612 bp, Homo sapiens
  misc_feature (1)...(1612): n = a,t,c or g
aggaggcgggcgggcgcggttctttccggaaggattgaatctcctttagccccgcccgcctccgtagctgcctgaagtagtgcagggtcagcccgcaagttgcaggtcatggcgctggctgctcgactgtggcgccttctgcctttccgacgtggagccgccccggggtctcgtctccctgcggggacttcgggcagccgcgggcattgcggcccctgtcgattccgcggcttcgaggtaatgggaaacccaggaactttcaacagaggccttttactctcagctttgtcgtatttgggttttgaaacttaccaggttatctctcaggctgctgtggttcatgccacagccaaagttgaagaaatacttgaacaagcagactacctgtatgaaagcggagaaacagaaaaactttatcagttgctaacccaatacaaggaaagtgaagatgcagagttactgtggcgtttggcacgggcatcacgtgatgtagctcagcttagcagaacctcagaagaggagaaaaagctattggtgtatgaagccctagagtatgcaaaaagagcactagaaaaatgaatcaagttttgcatctcataagtggtatgcaatctgccttagtgatgttggagattatgaaggcatcaaggctaaaattgcaaatgcatatatcatcaaggagcattttgagaaagcaattgaactgaaccctaaagatgctacttcaattcaccttatgggtatttggtgctatacatttgccgaaatgccttggtatcaaagaagaattgcctaaaatgcctgtttgcaactccctccctagttcccaccctatgagaaggccttaggctaactttcacagggcagaacaagtggatccaaacttctacagcaaaaacttacttcttttaggaaagacatacttgaaactacacaacaaaaagcttgctgctttctggctaatgaaagccaaggactatccagcacacacagaggaggataaacagatacagacagaagctgctcagttgcttacaagtttcagtgagaagaattgagaacttttcagagaagatttatgaaatagctaataaacattgccttttcttttaattctaaacttaatatatgaactataactgttctacggctttttaaatgttgtgaccatttaaccgtgtaaatataaaatattctaggcttcttcacaaataatagggtaaaataaataatcgccataagagtggtagaaataaatctccatggctcaggcaaagagattattttgcatcctggataccagcaatgcaaaatggtatgagatttctaaggattgatcacattgggatgggagatcaagcaaagaaatatttgtagaggaggggaaatggatctataggggatatacagggggatggattttcaaattggattgattctaagttgaaatcttgaagagaaggtgtggtgacagtggttaggatgttgtgggttcctgacataaagtagttaaatgatatatcttggagctaacctgtgaaataaaaaactaagtaaggagatgatgtattgcgnccgctctagagtattcaacctaacaaagagtgacttt

SEQ ID NO: 74684 - DNA, 2065 bp, Homo sapiens
tttttcagagacaaggcttttattcactgtatgccttggcatctcctctcacaccagaaagtttaaaagaaaaaacacagcgacaaggattcacttgggccattttggaacccatttatattgtgggtgttactctgggcttcatctagccccatactagcctctgagactgcctcagaccgtctgaacattcatggccttcccttgggcccaaatgtagctgtcccagtgtaaaaggagtcatagtctggagtgtaagacccagggatcttacaaaaagcctccttggtccttaggctctgggtagtaggaaaaccaggttgtgtttgtacccctagtcaaaaactttgatggcaattctcaaaaacacgtttcggatgggtgctgagtggtggggtagagtctcccctgggacagatgctgctcagagacttcctggggcaatttggctctgctgtcagggaggaagatctcatctggggatgtgcccgggatccccgccgggcgaatggactcccagttgccacccccggggaacacgttaagcattgtttcccctgcccccaggaatgaaggtcttgcccatctcccaaatcaacactccttaaaaaggacttccaactggcaaaaaatcccctcggcccctcggtgacccggtagcacttctcaagccgtgcactcggccttgctggtggggttgctcagggcaaagatgataggggcgctcgtggaaggaggccatgtccctcagaatctgctccgtgaagggcttctgcgatggcagcaacacctatgatggctgtgggcttcaccagcctcaccacctcctccagggagttgacttcaggatgggtcttgggcaaacatctccttttcatggttcaggtggtctctcccctgaacaatgagccctttaaaagtccaccatcccagatctttcttgtggcctcctgccttcggtacaccttctttcctctagggccatgacaaggaggtgggcaatgccccatagctgcctcgcctgcaccttggaaaccaaacacgtgattggaaagcttgttcttggtgattcgcagagcagccaagatccctgccacagcaacggaggctgtgccttggatgtcatcattgaacatgcagtacttgttacggtatttgttgagcaggcggaaggcattggcattggcgaagtcttcaaattggatgaggcaatttattccaaacttgtctgtcacagcctgcatgaactcatccagcaagtcatcgtatgccttcccgtgcacgcgctggtgtttcaggccgatgtacagagggtctctgagcagctcctcattgttggtgccgacgtccagcagcacagggaggcactgctgcgggttcacccctccgcatgccgtgtacagggccagcttgcccacagggatgcccatgccgtagcagcccaggtctcccaggcccaggatgcgctccccatcagtcaccaccacggccttaatattgtcttctggccaagaattcagcattgttgcaagatgacctttgtcatgaatggtgatgaacagtccacggggcctgcggaaagtcaggccatagtgctgacaggctagccccacggtaggcgtgtacacgattggcatgaacttctccacgtccgaagtcagcactcggtagaagagcttctcgttacggtcttggagtgtcatgagaatgatgtacttgtccaggtcactctgctgccgctcgtaatatctcatgattcggaggagctggacgtcctggctcagaaagcagggcgggattaggccgtggattccaagctgcagcctttcttcaagggtaaaggccatccccttgttgagatgagggttcctggtgacatcgtatccgcgcttcttcaggggcacagggcgcgccgggccaggcttggagtggcagccttgggcgggcgcggtgggtgtccagcgcgggagggcgccgcaggcccggcccggccagggagccagccgcgtgcctgtccccagcgcggcacccatggtccttggcagacctcggtcctctccttccg

SEQ ID NO: 74685 - DNA, 1126 bp, Homo sapiens; identical to SEQ ID NO: 61412

SEQ ID NO: 74686 - DNA, 1964 bp, Homo sapiens
tcatgggaagcctatttgcaggaattggttctgacttggagaaaaaaaacacaacttcttgaaaaggtaaaatagcttaaagcatttaatatctaaacaaatcaatctgttaatagtagtcacaaaatatgcttaatatagaaacccacattcatgtttttaagaaaaaagtgtaaattgtattccacctcaaaacataaattaacccgcttaaagaatcttcagcggtcaaagtcatggtgaattttaaacaacttcagagtaaaataacaagtactttatactgctttatatctaaaaaatgcttacaacttctcataaaaatagtttgaagcaactattttttcttttattttttaacagacacgttcaacattacgggcaacatttttaaaaccttaagctttacagactttcaaacattcaaatactggggtccctttcctttgatgtggtttattcagctagaaaagaaaacatggtagacaacttaatacattttcaccaaatttgaaagtagtacaaaaattttaggactctaccgaactacacatcgtacctaatgtatcattaaaaatagaagacagtattttcttcagcaaataaaacagcatactaatatgctgctaatgcataccttttaatgtgtactgtcattcataaattatttacaactgctactgtgtgaagagaactagaatgtaaattttctgcaaaactggaaaaaaagcaatacaaaatttgtgaaagcctgtgttttatactatacaaaagtcagtttttctcttcaaataccagatattgtatgcagtgatattttggacacattatagtaattcttgaggatgttttagtgctggaggtaagtttacaggcctcgattcttcatcaaggagtactagatcttctatttcactgcctctgtatttccttttacatatttttaccaccacctttttcttgagaaataacttcaatgcttctcttgatgcaactgcttttgcattttctttgctttttccacagccagtgcccaaatacacagacttgcacctcaattcacaaacaatactttcttgagagctcttattttgaggcagatctgccaattcttttagtgggacaaaaaatacatccagtgttgctttcagagcctcaatagctgcatttaggagctctccatgattcacattgggactaaagccaccaacagctaccaacttccatgccaccgttttatatagtctattgaaaaaaggttgcttctgtttcacatcttcattggttaacttgcaagagaatttgacagaactctcacttgactgtgaagtacttttagaaggcaactgtgaggtgctagtctgagaactactcttagaagccaactgggacacacttgctaaggaagtgcttttggaaaccagagatccactggtctgggagctgctcttggaagctagtagtgatgcagctacctgggaagtgctcttggaagttagcagcgatgtatttgttgaagagctgctcttgggagtcagtaaggatgtgcctgatgaggaactgtttttagcaactgatgatgaaacacttgcctctgaactagttttggaagttaacccacttgaagctgtctctgaactaggtttggaagacaatagtggcaattctacctctgagcttcctgaggagcccaacaagggcacctcgatctctgagctgctttgagaagctgaggctgaagagccttccaaagcactctttttaggtgatccactttgttgtctagaatcagtggattgggtcatgtgactattcacactggatttcagcaaggaaacaaatgatgcagaaccgtgtttatctggagcttctgcttcagaagctttcccagatcctgccgttgttacctgagaggaaacgctgctgctgctttggctggaaacagatcgatctctgtgccgaat

SEQ ID NO: 74687 - DNA, 5276 bp, Homo sapiens; identical to SEQ ID NO: 61414

SEQ ID NO: 74688 - DNA, 3281 bp, Homo sapiens
agcgggaatcgatagcatactcagtgtcgtggaattcgtgacttctgacagctctctccatggaaggaggcggcggccgcgatgagccttcagcctgccgggcaggggacgtgaacatggatgaccctaagaaggaagacattcttcttttggccgatgaaaaatttgacttcgatctttcattgtcttcttcgagtgcaaatgaagatgatgaagtcttcttcggaccctttggacataaagaaagatgtattgctgccagcttggaattaaataatccggttcccgaacagcctccgttgcccacatctgagagtccctttgcctggagccctctggccggggagaagttcgtggaggtgtacaaagaagctcacttactggctttacacattgagagcagcagccggaaccaggcagcccaagctgccaagcctgaagaccctcggagccagggcgtggaaagattcatacaggagtcaaaattttaaaattaacctctttgagaaagaaaaggaaatgaagaaaagccccacgtctcttaaaagggagacatactacctgtcagacagccccttgctggggccccctgtgggtgagcctcggctcttggcctcctccccggccctgcccagctctggtgcccaggcccgcctcacccgggcgccggggcctccgcactctgctcatgctttgcccagggaatcatgcactgctcatgctgcaagtcaggcagcgactcagaggaagcccgggaccaaattgctgctgcctcgagcggcctctgttagaggaagaggcatccctggggctgcggagaagcccaagaaagagattccagctagtccttccaggacaaaaatcccagctgagaaggaatcccaccgggatgttctccctgacaaacctgccccgggtgctgtcaatgtgccggccgccggaagccacttgggccagggcaagcgggcgatccctgttcccaaacaagttggggctgaagaagaccctgttaaaagcacccggctcttacagcaattctgcaaaggaagtcctcctcgggggcttgtttggagcggggcatccagtgcgtgcactccccaaccagtggccaaagctaaatcaagtgaatttgcaagtattcctgcaaattagctccccggcctctgtccaaacatcagcaagtccaggcagaatgggacccgccatgctgcggccagctctggcctgcaggccctgtggggtgcatcctcctggcaggccaagcgggtcgatgtttctgagctggcagcggagcagctcacggcaccccccctcagcatcccccacccaaccccagactccggaaggtggcggcccagtggctgaactccagttgcgcttggtcagaatcttctcaattgaataagactagaagtatcagacggcgagattcctgtctaaattccaagacaaaggttatgcctactcctacaaatcaatttaaaattcctaagttttctattggtgactccgccggacagctcaacaccaaagctttcgcgggcacagcggccgcagtcgtgcacgtcagttggcagggtcactgtccacagcaccccggttagacgctcatctgggccagcaccacaaagcctgctgagcgcatggcgtgtgtcagccttgcccacacccgccagccggcgctgctctggccttccaccgatgacccccaaaacgatgcccagggccgtgggctctccccttgtgtgtgccagctcggagacgttcctctgagccccgcaagaactctgcaatgagaactgaaccaacaagggagagcaacagaaagacagattccagggctggtggatgtgtcccctgacaggggttctcctccttcccgtgtgcctcaggcacttaacttttctccagaggaaagcgattctactttctccaaaagtactgccacagaagtagctcgggaggaagccaagccgggtggagatgcagcccctagtgaggctcttcttgtagatatcaaactggaaccactcgcggtcactccagatgctgcaagccagcccctcattgaccttcctctcatcgacttctgcgataccccagaagcacacgtggctgtaggatctgaaagcaggcctctgatcgacctcatgacaaacactccagacatgaataaaaatgtggccaaaccttcaccggtggtgggacagctcatagacctgagctcccctctgatccagctgagccctgaggctgacaaggagaacgtggattccccactcctcaagttctaagccgaaccaaatcctttgccttgaaagaacagccctaaagtggttttcaaccctcagaaacaagctttaggctggtcgcagtggcttacacttgtaaccctagaacttgggaggctgaggtgggcggattacttgagcccaggagttcgggaccagcctgggaaatatagtgaaactcctgtccctacaaaaaatacaaaaattagccgggtgtggtagtgcatgcctgtagtcccagctacttgggaggctgaagtgggaggatggcctgagctcaaggagatgcaggctgcagtagggctgtgattgtgccactgcactcaagcctgggcaccaatgtgagaacctgtcttggaaaaaaaaaaaaaagaaacatgttttagtagaagttttatttgaaaaagaaaaataagcataaatatattcccagtgcctgccgagggtcgcctgcagcgactggggccaccacggaccacccaaggcctctgcttcccgccgccaccctcctcgctgccattctctgggctggaatgtgaagcctcagtcactctaaatgaagaattttcttttgaatgttttgtatgtaaaatagcaagtggctatttttaaagttaagtttgtataaatagttagatattctagatttacattaaattgtaaaataaatggacttattgaagcatatcttgatttttaagcttatcttgattttcaaacatgcatagctatttttatcactctaatcagtaaggctactatctagactcgaatgctttcatacaagtgattttcaaaaattagtcaataaaaattgatgtcagtgcagggcccaggcccgcccccagatacactagtttctaggtctggggccagcctagtaattgttactaggcacacaggtgatgctgactcgatggcctgagacacaccccttgagaagaagctgctctggggagacgagggtatgagtggaaagaggatgggcga

SEQ ID NO: 74689 - DNA, 6233 bp, Homo sapiens
ttttttttttttaaaaaatttacccattttattgatgcattgcaattgctctacattttaccatattatgtagaaaatactgaaaatacaagctactttgtaaaaccaaagacaaacattgaatccaaagataaactatgttttacacaatggacccttttcccatagttagtattaaattttaaatatctatttcttttgttaaaatgattattttacatactcccctaaggtacatctggcattacaaacataggctcagtaattctcaaaaactatctgtttctaggagggcttgttggttaaagggaaggcggcacaacccaaaaaagggggggaaggccaaaaaaagttttaaatcggcacacaataacctagcatatcaaatacatttattaaaagtagggaattcccattgcaatatcaaaggattcaaaggcagaaatactaacattacatataatgtacatataatgtactgctacatgtagtgagattatttttcaagctgaattgaaacccccccttatataaagtttagcaacaaacaaccatgtagacatgctgccccatttatcagttaaaaaaaaaaaaatcaaaataggaagcaggctcgggccactcctgtcactgagaggcaatttcatttcctatcctaaaacaaaccatctcaactagtgaatttttgcataataatgctgaacaaaacacacattactgtgcttgcctggctaagggcagtcaagcttagcccctctagtggaggacaatggatgagcaatcacaaaagcaggctcagaatggccagaactgtttgaaatggagttcttattcctggggttggtatttcagctgagcactgaaaataatatcacctcctgggagctattaaaaactctggagtgaccaagtgtccctatgagcccagagtggctacactgaacccttctccgcttcttctctcacccggaaaggaagaagttggaaatgccaagttctgagagaggacttaaagccttaagctggtttgaggtcaggtcactgtgacccaggccagctgctcactaaattcaccaggcttcctcccttcctgtcagggcccacagggctaaccccagggacagaatctaaagccacagtgagcacatacatacacattcagcagacacaggtggatttttatgctggaaaatcggaaatgccagtttgcagactaagactgaaaaatctctagtttttaaagccacacactgctaggcaagtgactaaggtaacaatacaagctcttggtattatccttttctgtggagtttagactcctatcttaagtggtatctgcttattggactggggtgcaggaatgggatttggttttctttcctgcatctcatttcttacaaaaacaacaaatcttgtcccttacagaaaaaagacaaggaacaaaaaatttgtcctttagaaactagacctgtgttccaacaagaaaatcagaatgtgcttggcaaaaaggagacacaaagatcacacatgttgaccagaaaactgtatgacactagtgacagaaattatacaaactgcttggctatcttgaccaatatagtgctgaaaacacaactcaatataatgattttaaaaaataaagaaaacacaacatgttcctggtaggctgtacggactacctgccccatcttggaagcccttactccttacaatgaagaaactccaaatactttgacagctcctcggtgttcaacctggtacagagctggctgaccaggctccatgaaatctcccatctccatcctgcacctccttgacaccatctctatctacacagaaccagtcctaaaattatatctcaaatatatcattttcaattcagatggaacacacctgtattttaggattaatcttctttccccaaatcctttatgggcaggaatgtccccatccccagtaccttctacttgacccagatccatgcaggagctgagagtacaaggacaatttcacagcttgaagggccccaagactatacaagctgttaaaaaagaaacctcaaaagcctcaatgactcaacaggctttggttccttctctatattcttcaccagctaagaaacctttctgtgagttccttgtcaccagcggcaccacaaaacttctcctcatagtatggggacatggtaagcaatacaacaggctctttggtataaacacatctgttaacatgtttttttcaacaagcaaatattttactaggaatgtcaactatgtgcaggaaggactgccccatgggaaaaggaaaaaaaaattcattctaaaagtgattgcacatactttaaaagaatgcatatttaatattggcttgactcctctcacctgcttcctgaattctcacagaagcaaggtagcaacgcacagtgagagagccacatggggaaaatgcttctgtgagaactcagccgagaatccaaaatggaaaggggtagaggtggtggtaaaggagaaaagctgctgtttttatttttcaatgttggcagggaaactgagaacaatgcattacacaatacagctactaatcctgttctgataaatcccggtgaacaacttagggtccacgggggcttgctggtccatcctaaggcaagctcactgtaaactctattaaccactacattatcatataaggcactacaataagggaaggaggaagaaagggaaggaagagacacacactgaaaaactcctcaccagacacacctgtgcaaaacaattccaagggtctcctctccttgcaggcaatgcccctgctcattcagcactacagtaatatgctctaatataattgcaattagttcacatacattccaacaagtatcagttcattttggtttaaatacaatggagacatcaatccatctccgggataacactggaggatcacatacacactaagtacacaattcaagtgtaatcactacacatttgattacaaataacattttgggttagcaggaaaaattgcttgttatatttttctaatcaatatgtacatatttaattatgtaaaatattaaaacaccaccattacaaaacttctaaaatatttttaaattcagtaataaatttttaaaatattttttgcaattcctacatgcccttattatataagtcttaataagagagcattcaatttgctgctggcatacaaaggaagctactttgaagtataaaagctatacccaagaaatgttcttatctggtttcaggtttttttagctttctccccaaacaaatcacataaaacagaagggagagatgagcaaaacagaggtgtattactgaaaattcatactaatctttaggcaaagctcatcaatgccagtatctcataatagacagagattttgcatataataaaaccaccaccaccatgtaataataaccaccttaatggctttttcgataaaaaaatttaagctgaatcagagagagaaagacttttaaaaaataatttaaaaaagaattcatggtgcttcatttaaaaagaatacttggtgttttcacgcagatatggattctctcacattaagttaccagcaaatggtgagctgccttttaaacactactttataacaaacacaggagcaattgagagaatctcaatagtaacacagagtaatacgtaaccagttttgcaaaaataacaattgcccattaagtataatatgacattaaaacaaaactgaaactctgtaagtttaaatgtccaataaacaaaagggagattgtgtaagccgcttttaaaataaaataggcaagtctgagtttataaacaaacaaaaagtaatttttttttttttgtcatcagatttcaactccttctatcagcatttttcctgaccagcaatcacaataacacaaaatgaaataaagaggggcttcacttgtttttaaaagcatttatagaaatcaagtcagagagacaaaatatttttcagagggtaacttcagaacaatctctcttccttggtaactgcagaagatgggcatctgaactcttccaagtaccaaaattactgtcacaaaaataatgaatttaaaaatagggcaaactttgagaagactacaacaatgcagtcaacactgagacaggttcccccagagaaaaaccttctgcttcagtgggcccctgcagaacaagttgctggctaagaaatttcaagagggtaaaggaggatctctccatagcccaatattaagaacgcagggccaggagaaggtagccatgattcctcctccctcatgctcaccaactataagtaggaatactggctgatcttggtaggactcagcgggtatccagtgtaaattgttgagcctcgggaagacccaatgtaggattgggtggcaaactggtgttggtactgagcaggggccacgctggcagaagtgaggaggctgggcccaacactgacagggacctggtgcaccaaagtgctagggtgagtggtataggctgcagcatgccttgaggaaccctgtggggagaaaagatgagcaatggagctggttgagcccagtgcagcagcagaagtcggggcagcatacgtatacagatgagcctggcttggcaggtgagcaggggccggggcaaggtgtgggtgccctgtcgagtgtagcgggctgccatgctggaaggtgtagggggcttgggagagaggggccacaaacgcctgctgcctgcggggggctgggttgctgcttctctcctgtgaggttggagccgccgatgactgctggttctggctaagattgagtggttgtgctgcactggtccccccgcgttgagctcgataccctgtgggggtgatacagcatccagatgactgcccactcactgaagcgactggcttagtcttattgctcaggagacctgaggcctgggttgctacagtgcagtcaccaagctgagttttcagtggaggcacaatgatagtgcgggtgccagtgccatctgccacaactctgccaggcccctccaaaacggatccactattgcctcggagagcactcagggtatcagtggaataagggctgctcaaagaagagtcagagtctggagaatcattgacagtgacataactgatgacattagaccttggcttcagtccagagctactgggcttgtatttgttgtcctcttcctcatcagtgtcacttcggatagtgatgacactcacaggagggctgggagtatctggaatgatgatgggctgatgctgatcttggacagggaccaaggaattataagaagatgtggtgcggaggggactgctcccaaccagagaatagacttgggaaggcagaacatctagagaggacttggaagagactggagctgactgctttattcctcttcgaagggagggaactggattgttgttgtctgacaacatgggcaacaccaacattcagaggctgagcagtggccaatgtcacatggttagtcagcaaggatggctgctgcatgatagtgctgtactggttgccatgagagtgggcattcctccagtcagctagctgctgtccactccccatggcctctggaatcattgctgtgggctggacagaattgtgtagagctaccccaggcaactgttgccaagttgaaggcaggagaatttgctgagtccctccaggccacgcctgcagtacagcggcagtctgttcaaccagcgccggccggccggctgcgcagctcagagtaaagggcaccgcatactgcggtgtgatggtggctacttgagggtggagagttgctaccattagtggtgtacagcttccctgcgtgagaactcctgactgaatctgtagtggctgagcagctggtgcctggggtacaatcggtacagcattatccatcctcacagggaatccagaatgctttgttgttgcttgtagtccagtttgaaacgcaggtggacatactataaatgtctgttggaatggatctgtctgagtgcaaatctgggtggttccaggctgcaaggaaacaccctgctgggcaactccaggaactggtgcagcagatgatgggtacaaagctgactggtagtttagtagtgagacatctgaattagccagagaaagagtagcagctgctgcagtagaactggaagctagaacactggctgattgctatgtggaaaatccaaaaggtgagtcatt

SEQ ID NO: 74690 - DNA, 4321 bp, Homo sapiens
agtcgacgatttcgtcggccgtggccgctcggggcgcagcggtagttttgtgtgtgtgtacagcgggggacgcgcgctgccggctcctgggctggcgacagattgtgcaggaatgcgaggaatgcaccaggggcagagtccacacagtccgccgcggctgccctagcgccttccctccccagctctcgccgcgcagccagaggtcaccggagcatcttcggagctggaggaatgccagctcctgagcaggcctcattggtggaggaggggcaaccacagacccgccaggaagctgcctccactggcccaggcatggaacccgagaccacagccaccactattctagcatccgtgaaggagcaggagcttcagtttcagcgactcacccgagaactggaagtggaaaggcagattgttgccagtcagctagaaagatgtaggcttggagcagaatcaccaagcatcgccagcaccagctcaactgagaagtcatttccttggagatcaacagacgtgccaaatactggtgtaagcaaacctagagtttctgacgctgtccagcccaacaactatctcatcaggacagagccagaacaaggaaccctctattcaccagaacagacatctctccatgaaagtgagggatcattgggtaactcaagaagttcaacacaaatgaattcttattccgacagtggataccaggaagcagggagtttccacaacagccagaacgtgagcaaggcagacaacagacagcagcattcattcataggatcaactaacaaccatgtggtgaggaattcaagagctgaaggacaaacactgggtttcagccatcagtagccaatcgggccatgagaagagttagttcagttccatctagagcacagtctccttcttatgttatcagcacaggcgtgtctccttcaagggggtctctgagaacttctctgggtagaggatttggctctccgtcagtgaccgacccccgacctctgaaccccagtgcatattcctccaccacattacctgctgcacgggcagcctctccgtactcacagagacccgcctccccaacagctatacggcggattgggtcagtcacctcccggcagacctccaatcccaacggaccaacccctcaataccaaaccaccgccagagtggggtccccactgaccctgacggatgcacagactcgagtagcttccccatcccaaggccaggtggggtcgtcgtcccccaaacgctcagggatgaccgccgtaccacagcatctgggaccttcactgcaaaggactgttcatgacatggagcaattcggacagcagcagtatgacatttatgagaggatggttccacccaggccagacagcctgacaggcttacggagttcctatgctagtcagcatagtcagcttgggcaagaccttcgttctgccgtgtctcccgacttgcacattactcctatatatgaggggaggacctattacagcccagtgtaccgcagcccaaaccatggaactgtggagctccaaggatcgcagacggcgttgtatcgcacaggttcagtaggtattggaaatctacaaaggacatccagccaacgaagtacccttacataccaaagaaataattatgctctgaacacaacagctacctacgcggagccctacaggcctatacaataccgagtgcaagagtgcaattataacaggcttcagcatgcagtgccggctgatgatggcaccacaagatccccatcaatagacagcattcagaaggaccccagggagtttgcctggcgtgatcctgagttgcctgaggtcattcacatgcttcagcaccagttcccatctgttcaggcaaatgcagcggcctacctgcagcacctgtgctttggtgacaacaaagtgaagatggaggtgtgtaggttagggggaatcaagcatctggttgaccttctggaccacagagttttggaagttcagaagaatgcttgtggtgcccttcgaaacctcgtttttggcaagtctacagatgaaaataaaatagcaatgaagaatgttggtggggatacctgccttgttgccgactgttgagaaaaatctatttgatgcagaagtaagggagcttgttacaggagttctttggaatttatcctcatgtgatgcctgtaaaaaatgacaatccattccgaaaatgctctcctcaacccttaaacaaaaacactgtgattggttccccacattcctgggaatggaaataactccttccttttgatggatgaatccataaaattaaattttcagacttcactagttcctgcgtaacacggacaggttgccctaaggaacctcagctctgcgggggaagaagctcggaagcaaatgcggtcctgcgaggggctggtagactcactgttgtatgtgatcccacacgtgtgtgaacacatccgattacgacagcaagacgggtggagaactgcgtgtgcaccctgaggaacctgtcctatcggctggagctggaggtgccccaggcccggttactgggactgaacgaattggatgacttactaggaaaagagtctcccagcaaagactctgagccaaagttgctgggggaagaagaagaaaaagaaaaagaggactccgcaagaagatcaatgggatggagttggtcctatcccaggactgtcgaagtcccccaaaggggttgagatgctgtggcacccatcggtggtaaaaccatatctgactcttctagcagaaagttccaacccagccaccttggaaggctctgcagggtctctccagaacctctctgctagcaactggaagtttgcagcatatatcccgggcggcccgtccgaaaagaaaaggggctccccatccttgtggagcttctgagaatggataaccgatagagttgtttcttccgtggcaacaagccttgaggaatatggcactagatgttcgcaacaaggagctcataggcaaatacgccatgcgagacctggtcaaccggctccccggcggcaatggccccagtgtcttgtctgatgagaccatggcagccatctgctgtgctctgcacgaggtcaccagcaaaaacatggagaacgcaaaagccctggccgactcaggaggcatagagaagctggtgaacataaccaaaggcaggggcgacagatcatctctgaaagtggtgaaggcagcagcccaggtcttgaatacattatggcaatatcgggacctccggagcatttataaaaaggatgggtggaatcagaaccattttattacacctgtgtcgacattggagcgagaccgattcaaatcacatccttccttgtctaccaccaaccaacagatgtcacccatcattcagtcagtcggcagcacctcttcctcaccagcactgttaggaatcagagaccctcgctctgaatacgataggacccagccacctatgcagtattacaatagccaaggggatgccacacataaaggcctgtaccctggctccagcaaaccttcaccaatttacatcagttcctattcctcaccagcaagagaacaaaatagacggctacagcatcaacagctgtattatagtcaagatgactccaacagaaagaactttgatgcatacagattgtatttgcagtctcctcatagctatgaagatccttattttgatgaccgagttcactttccagcttctactgattactcaacacagtatggactgaaatcgaccacaaattatgtagacttttattccactaaacgaccttcttatagagcagaacagtacccagggtccccagactcatgggtgtacgatcaagatgcccaacagaggaactctttctttctaaccttgttcagattgaggtgaaaagtccatcttgctgatttcatgattgaaatgtgaaagtgaagtggaaggaatgaatgaagtgtgttttttttttttcttttttgaggaattatcagggaagtgaggaaatgtttgggagaggactttctaagctctatttaggtgttagatctaattacttatagattctgtagtctggtgaaggtgtgggtgacgtgatgagaggtttgagaaatgggtgaaatgaaatgggggatatgtaggtcaaatcaaattaaagatgatttttttaatgtgaataaagttatgttctgataagtttgtacagaaaaaataaaatggatgcccatgttttattgctattactaaatgtcaagattgtatgctattatgtcttgtaaatttcttttgttggtgtaaatatggaaatgcc

SEQ ID NO: 74691 - DNA, 2197 bp, Homo sapiens; identical to SEQ ID NO: 61418

SEQ ID NO: 74692 - DNA, 4378 bp, Homo sapiens
gttcctgcagatagagtctgcctcccctgcccccttctcttctggattcctcgctgcccaccctcattctcccgggggaagcctcgcaacgaagggccggagccgcctttctgctcccggaatgcttcacctgtccgcagctccgcccgccccacccccggaagtgacggcgaccgcgcggccctgcctttgttccgttgggcgtcgcggcgacggcgggaagatggcggcggcgggagccctggaacggagcttcgtggagctaagcggagctgagcgcgaaaggccgaggcactttcgggaattcacagtctgcagcattgggactgcaaatgccgtggctggcgccgtaaaatacagtgaaagcgcgggaggcttttactacgtggagagtggcaagttgttctccgtaaccagaaacaggttcattcattggaagacctctggagatacattggagctgatggaggagtcactggacataaatctgttgaataatgccattcgcctaaaattccaaaattgcagtgttttacctggaggggtttatgtctctgagactcagaatcgtgtgataatcttgatgttaaccaatcaaacagtgcacaggttacttttaccacacccctcccggatgtataggagtgagttggtagttgacagtcagatgcagtcaatattcactgacattggaaaagttgatttcacagatccttgcaactatcagttaattccagcagtacctggaatatctcctaattccaccgcctctacagcctggctcagcagtgatggggaggccctgtttgccttaccatgtgcttctgggggaatctttgttcttaagctacctccttatgacatacctggtatggtgtcagtcgtggaactgaaacagagttcagtaatgcaacgattgcttacaggctggatgccaacagctatcaggggtgaccagtcgccttcagatcgtcccctcagtcttgctgttcattgtgtggagcatgatgccttcatctttgctttgtgtcaggatcataaactacgaatgtggtcttacaaggagcaaatgtgcctaatggtagctgacatgctggagtatgtccctgtgaagaaagaccttcggcttactgctggaactggacacaaattacggcttgcttattcccccaccatgggactctacctggggatattcaatgcatgcaccaaaacgaggacagttctgcattttccagttggtgagcactgagagtaatcgctatagtctcgatcatatttcttcactgttcacttctcaggagacactgattgactttgccttaacttccacggatatctgggccctgtggcatgatgctgagaaccaaacagtagtgaaatacatcaactttgaacataatgttgcaggtcagtggaatccagtttttatgcagcctctgccagaggaagagattgtcatcagagatgatcaagaccccagagagatgtatctgcaaagtctttttacaccaggacaattcacaaatgaagctttatgtaaggctttacagattttctgccgaggaactgagaggaatttggatctttcctggagtgaactgaagaaagaagttactttagctgttgaaaatgagcttcaaggaagtgtaacagagtatgaattctcccaggaggagtttcgaaatttacaacaagaattctggtgcaagttctatgcctgttgtcttcagtatcaagaagccctctctcaccctcttgccctacatttgaatccacacacaaacatggtgtgcctgctgaaaaaagggtacctgtctttccttattccctcatccttagtggatcatttgtatctcctgccttatgagaaccttttgacagaagatgagacaaccatatctgatgatgtggatatcgctcgggatgtcatatgtcttataaaatgcctccggctgattgaagagtcagtaactgtggatatgtcagttataatggaaatgagttgttataacctacagtctccggaaaaggctgcagagcagattctggaagatatgatcactattgatgtagaaaatgtgatggaggatatttgtagtaaactgcaagagattaggaacccaatccatgcaattggactacttatacgggaaatggattatgaaacagaagtggaaatggaaaagggattcaatccagctcagcctttgaatattcgaatgaatcttacccagctctatggtagtaacacagcagggtatattgtgtgcagaggggtgcataaaatcgccagtactcgtttcctgatctgcagagatcttttgatcttacagcagctgttaatgaggcttggagatgctgtgatttggggaactggtcagctctttcaagctcagcaagacctactacatcgaacagctcccctactcttatcttattacctcattaaatggggaagtgagtgcttggcaactgatgttccacttgacacactggagtctaatctccaacacttatcagtactggaattaacagactctggtgctttaatggcaaataggtttgtatctagtcctcagactattgtggagttattcttccaagaagttgcaagaaaacacattatatctcacctcttctctcagccaaaggcacctctgagccaaactggattgaattggcctgaaatgattactgcaattaccagttatttattgcagcttttatggcctagcaatcctggttgtctctttctagaatgtttgatgggaaattgccaatatgtacaattgcaggattatattcaactgctacatccctggtgtcaagtcaatgttggttcctgtcgatttatgctgggaaggtgttacctagttacaggagaaggacagaaggctctggaatgtttttgtcaggcagcatctgaagtaggcaaagaggaattcttggatcgcttgattcgctcagaggatggggagatcgtgtctacccccaggctgcagtattatgacaaggttttacgactactagatgtcattggtttgcctgaactggttattcagttggctacatcagccataactgaagcaagtgatgactgggaaaagtcaggctactcttaaggacatgtattttcaaacatcatttgggatttggggtcacaatagccaagcatatggaagcctttaaccccaaattcctgattccagcaggcaattagattgtttacggcagttggtggtagttctttgtgaacgctcacagctacaggatcttgtagagttttcctatgtgaatctgcataatgaggttgtgggaataattgagtcacgtgctagagctgtggaccttatgactcacaattactatgaacttctgtatgcctttcacatctatcgccacaattaccgcaaggctggcacagtgatgtttgagtatggaatgcggcttggcagagaagttcgaactctccggggacttgagaaacaaggcaactgttatctggctgctctcaattgtttacgacttattcgtccagaatatgcgtggattgtgcagccagtgtctggtgcagtgtatgatcgccctggagcatcccctaagaggaatcatgatggagaatgcacagctgcccccacaaatcgacaaattgaaatcctggaactggaagatctggagaaagagtgttccttggctcgcatccgcctcactttggctcagcatgatccatcagcggttgcagttgctggaagttcatcagcagaggaaatggtcactctcttggttcaggcgggcctctttgacactgccatatcactctgtcagacttttaagcttcccttaacgccagtctttgaagggcttgccttcaaatgcatcaaattgcaatttggaggagaggcagcacaagcagaagcctgggcctggctagcagccaatcagctctcatctgtcatcactactaaggagtctagtgctacagatgaagcatggcgactattatccacttacctggagaggtacaaagtccagaataacttgtatcaccactgtgtaatcaacaagctcttgtctcatggagtgcctctgcctaattggcttataaacagttacaagaaggttgatgctgctgaattgcttcgcttatacttaaactatgaccttttagacttaactccctatcaggtgatcagaatatgtggatgctgaattggtgaaaagacatcactacttatcaatcgacgtaccaatggccgctacagtcccagtgcagagacttacgtactcctctattgatcaacttaaccaaactttgggaaagaactgtgccatcagtacccacattccactggcccaaaaaatcctttactttttt

SEQ ID NO: 74693 - DNA, 3925 bp, Homo sapiens; identical to SEQ ID NO: 61421
  misc_feature (1)...(3925): n = a,t,c or g

SEQ ID NO: 74694 - DNA, 7030 bp, Homo sapiens; identical to SEQ ID NO: 61422

SEQ ID NO: 74695 - DNA, 3734 bp, Homo sapiens; identical to SEQ ID NO: 61423

SEQ ID NO: 74696 - DNA, 1038 bp, Homo sapiens; identical to SEQ ID NO: 61425

SEQ ID NO: 74697 - DNA, 994 bp, Homo sapiens
ttttttttttttaaagttaaagattcttttattaataaattctccctcccctccaaactctccccaaaataaatatctcctccccgctttggggagttgggggggtctgtatcttagggccagccctcctagtgggccagccccctagtgttaaaaataggtccctaaccccccagggtgacccccgtggtggaatttcaggacatctgagtgagtggggcctagtgtcaagtctgccccccaagtcagcctggcccccagggcctctaggaaggagggcacccccctcccctgtgcaaatgctgcagttccttagtcagtgtcagctgttttgtgtgagccagcgtgaggctccctttctgttctggagccagaggcagggcaaccagacaccttggaaggttcccctgaaccctgggcccaggcctcagaggtgattcacccgccccccaccccccttgtggttggaggagcttggctcccgccgcgtctgggaggcagagactggctctagaatggatgaatgaatgatgagtgggcgagccccggctggcagggggcacattgtcactggatcagcgccacagctgggcagccctctccgccggtctcctctatgggggtggtgaacttctctctcctgcggcatcgtctccagaccaaaaagccagaaagcagccccagcacgaaggtcaggctcagagcgcccccaaggatgggccaaagcagccggaagggggcaggaggtgctgcagcgcagcccaggcagaagtcgctgtgcggtcgcgccctgcaagacgcgcagtccatgcacttgtccaggtccgcgctccaggagctgccgcgggagcagggggcggtgcctggcgcttgctccccggccacggagcgcagcaacgccagccagagccccagcacgaggagccgcagcaaccggcgcagcgagccccgagccatagtgcacgtcctctcgtgccgaattcctcagcgcgga

SEQ ID NO: 74698 - DNA, 1671 bp, Homo sapiens
tttttttttatttttttttttcatgttagaaattcctttattccttatcaaaacaaactaacagtaaacgtatattatatgctttaattttatacatataagttatcttgtttggatacatctttcatcaggactctgccacatccatactttgtccttgtggtgagagaggataaaatgtgatataatttgttattcaaagaacatggcaaccgtaacagacaaaaggaagcatggcatctaggggaggagagtggagagttttccatacacaaacacatttaaacttccctgtacaaaaatacctgctgttgctttagaaatcgttttcctttatgaatagtcaggtcttgcagtacaaatccaggtgcagtgccagcaagtatttcaaataaatttcaacgacttgatattcaagtccaaactaaatatttaatgttttctttattgcaaatatgatgtctttgacctgaggtatagagttgtcctctagaatctttgcataaggcatagggacatcagcaccagtgacacgaacagcaggagcatccaggaaaattgaacgcaggaccttcccatgatcctggcacagatttcaagctcctactcccaaactgtggccagcctccttcccacagttacaagatgaattttgtcttcatgacactgggcttctatgggtttccatgtccattgggtctaatgggtacgcatatttatcacctcagcattcgactccttctttagataggcactggctggcaggcttctaaggcagtgggcccacaggtcttgaatgggaaaccacagttatatgtgttccgtgcatttctattttggcttttccaataggaatcatgaaaatcttttgactgagcttccggaggaaattcaaaagggaaccccatacatcaattcattctctagcgccaccactggattgttatcccgaatggctgatttaataagtcctttagcatcctacgaagtcctagggactgaccacctttaagcctgggcagtgcccataccaggcagcaaagcactgtgagtgctgggcagctacacctgctgaagcaccaattgggcccccatgatactataagcacaggctgaaggccaaccagaacatgtagtaggtcttggcagctgagtttataacctggtcaaatggcttgccatggagaaattgaaggtccataaattcaacaaaatgggccgcaaaccccagccaatagctgcacctacaagcaattcccaagcaaagcccatctctgatatgggagtgtcaaataatcctcttgtctccatatttcttccacagccctcgactaaccttgtatgccccatcatagctgggcaacttcttctccaagcagaaataccttctcatctctttccagctcctcatccataccctgatttatagcatcacgaactgtcaacctgcacggcagccggcgcggtccagtgaaagcgcctcttcagcagcccagagacctcccgaaggggtctccgcaccaagccagacaccgccgccatcttggtcgtgtcctctatccgctgccaaacgaccccagaggggccggcagacgtgagcacgcccgcctccaccggcgcgggcaatggcaaggcgcgccggctgcgtgacccgcccacccgcccaccggt

SEQ ID NO: 74699 - DNA, 3670 bp, Homo sapiens
  misc_feature (1)...(3670): n = a,t,c or g
tttcgtggagaaacccggcccccagaagattgtgggtgtagtggccacagccttacaggcaggcaggggtggttggtgtcaacaggggggccaacagggtaccagagccaagaccctcggcctcctcccccgccgccttcctgcagatctgcttggctttgaggaagagtggcagtactgcctcactgcataagggatgggatcagagaacagtgctttaaagagctatacactgagagaaccaccatttaccttaccctctggacttgctgtttatcccgctgtactgcaagatggcaaatttgcttcagtttttgtgtataagagagaaaatgaagacaaggttaataaagctgccaaggtaccataatagcatttgaagacacttcgtcacccttgcttgctaagatttttatcttgtactgtggaagcggatggcattcatcttgtcactgagcgagtacagcccctggaagtggctttggaaacattgtcttctgcagaggtctgtgctgggatctatgacatattgctggctcttatcttccttcatgacagaggacacctaacacacaataatgtctgtttatcatctgtgtttgtgagtgaagatggacactggaagctaggaggaatggaaactgtttgtaaagtttctcaggccacaccagagtttctgaggagtattcagtcaataagagacccagcatctatccctcctgaagagatgtctccagaattcacaactctcccagagtgtcatggacatgcccgggatgccttttcatttggaacattggtggaaagtttgctcacaatcttaaatgaacaggtttcagcggatgttctctccagctttcaacagaccttgcactcaactttgctgaatcccattccaaaatggcggccagcgctctgcaccttactatctcatgacttcttcagaaatgattttctggaagttgtgaatttcttgaaaagtttaacattgaagagtgaagaggagaaaacggaattctttaaatttctgctggacagagtcagctgcttgtcagaggaattgatagcttcaaggttggtgcctcttctgcttaatcagttggtgtttgcagagccagtggctgtttaagagttttcttccttatctgcttggccccaaaaaagatcatgcgcagggagaaactccttgcttgctctcaccagccctgttccagtcacgggtgatccccgtgcttctccagttgtttgaagttcatgaagagcatgtgcggatggtgctgctgtctcacatcgaggcctacgtgggagcactttcactcagggagcagctgaagaaagttcatcttggccacaggttttactggggcctgcgtgatnactagcgattccattgtggcaattactctgcatagcctagcagtgctggtctctctgcttggaccagaggtggttgtgggaggagaacgaaccaagatcttcaaacgcactgcccccaagttttactaaaaaatactgacctttctctagaaggcgatccattttctcagcctattaaatttcccataaatggactctcagatgtaaaaaatacttcggaggacagtgaaaacttcccatcaagttctaaaaagtctgaggagtggcctgactggagtggacctgagggagcctgaaaatcaaactgtcaacataccagatttggccctagagaacctttgtgatgatgtcaagtcccagtgcactaccttggatgtggaagagtcatcttgggatgactgcgagcccagcagcttagatactaaagtaaacccaggaggtggaatcactgctacaaaacctgttacctcaggggagcagaagcctattcctgctttgctttcactcactgaagagtctatgccttggaaatcaagcttaccccaaaagattagccttgtacaaaggggggatgacgcagaccaaatcgagccgccaaaagtgtcatcacaagaaaggccccttaaggttccatcagaacttggtttaggagaggaattcaccattcaagtaaaaaagaagccagtaaaagatcctgagatggattggtttgctgatatgatcccagaaattaagccttctgctgcttttcttatattacctgaactgaggacagaaatggtcccaaaaaaggatgatgtctccccagtgatgcagttttcctcaaaatttgctgcagcagaaattactgagggagaggctgaaggctgggaagaagaaggggagctgaactgggaagataataactggtgacaatagatgtgagttaaactttaggaaaaaggattccctttttttaaaaaaaatcaatacctcaaaagcaggctttgggacaagaaaaccccaaagtggcctgcttttcccatcccaggagctcattatccagtctgtgccaactgaagtaggagactgactgtgagtgctggctaaaagccctgggtggtgaggctcacagtactggtttccagggaggaagagcctttgtgcatttgactgaggccagtttctatggaagagccaagtaggcttgagggagagggtccgaatttacctgcctttttccccgggacaattccgggaagtaaagaaaatgtaattccaagcctggttagccttaattttgtgcccattcttttctttaacataagagtaagctctattatgaaatacaacttttaaaaaattttagcctataaattatataaatgattttaaattgctgaggtttccttaggcagcttatttatttgtttacagttagactatctgagtaaatggttctttgtggacctaggcagttcctgactgttccacatgtagtacattgtaccaaagttcttaataagaatattccccacaatcctgttctctaaatgtcaaataaagattattttcactagattcaactttacaaaatttgttttatatctgttagaaaatgtacagacataagtattttcagttgacaaagcatcaaacccagttctgcctagtgataagtttcaccctagagtatgtatgtaacgttttagcttatccatcctttcttggagcgcctccatttccattgaaagccaggctggagcaggacccttttggagtagtgactcagttgcttccaaagcccctgtctattgtatgcagcgctgaccatgtactcttcttcccagggggaactcctgacgagctcttattgcataaggctgtaaagatgacctctatgcttcttctacagtcacattaggcaaagggttcccaggaaaataccttttttcctgtttcacacgttccactttgggcagctttcagtttcatctacaaacccagtcttctccagaaaggatacaactttgttcttagtttcttcagaactgagacactgtggaactatctcttcatgatttgttccctcagcgaactgagtaaacgcctccaaggtatgttgttctagcagccaactcctgtcagctagcagtaaggcaaacatacaggacaggttgggcagaattctgtcctggatagcttcaggtataaaaagttttcataaagaagatacaaaatccaacattgcctaacgaacatagtcaggaagctctaatttaagtagcgaggtctgcaaagttacctcgtgccg

SEQ ID NO: 74700 - DNA, 1774 bp, Homo sapiens
agaaacccccaccccttctccgtgtctctactcttttctctgggcttgctccttcactatgggcaagcttccaccttccattcctttcttctcccttagcatgtattcttcagaacttaaaatctcttcaattctcacctgacctaaaatctaagcatcttattttcttctgcaatgctgcttgaccccaatataaactcgacaggagttccaaatagccagaaaatggcacattcaatttttccatcctacaagatctaaataattcttgtcgtaaaatggcaaatggtctgaggtgcctgaagtccaggcattcttttacacatcagtcccttcctagtctctgtgcccagtgcaactcgtcccaaatcttccttctttccctcccgcctgtcccctcagtcccaaccccaagcgtcactgagtctttctaatcttccttttctacagacccatctgacctctcccctcctccctgggctgctcctcgccaggccgagctaggtcccaattcttcctcagcctctgctcctccaccctataatccttttatcacctcccctcctcacacctggtccggtttacagtttcgttccgtgactagccctcccccacctgcccagcaatttactcttaaaaaggtggctggagccaaaggcatagtcaaggttaatgctcctttttctttatcccaaatcagatagcgtttaggctctttttcatcaaatataaaaatccagcccagttcatggctcgtttggcagcaaccctgagacgctttacagccctagaccctaaaaggtcaaaaggccatcttattctcaatatacattttattacccaatctgctcccgacattaaataaaactccaaaaattaaattccggccctcaaaccccacaacaggatttaattaacctcgccttcaaggtgtacaataatagagtagaggcagccaagtagcaatgtatttctgagttgcaattccttgcctccactgtgagacaaaccccagccacatctccagcacacaagaacttccaaacgcctgaaccacagttgccaggggttcctccagaacttcctcccccaggaacttgctacacatgccggaaatctggccactgggccaaggaatgcccgcagcccgggattcctcctaaaccgtgtcccatctgtgtgggaccccactggaaactggactgtccaactcacctggcagccactcccagagcccctggaactctggcacaaggctctctgattgactccttcccagatcttcttggcttagcggctgaagactgatgctgccggatcgcctcggaagccccgtagaccatcacggatgccgagctttaggtaactctcacggtggagggtaagtccgtccccttcttaatcaatacggaggctacccactccacattaccttcttttcaagggcctgtttcccttgcctccataactgttgtaggtattgacggccaggcttctaaacctcttaaaactccccaacgtctggtgccaacattagacaatacgtcgttttaagcactcctttttagttatccccatcgtgccaggttcccttattaggctgaggacactttaactaaattatctgcttccctgactattcctggactacagctgtatctcattgccacccttcttcccaatccaaagcctcctttgtgtcctcctcttgtataccccaacttaacccacaagtataagatatctctactccctccttgacgaccgattcatg

SEQ ID NO: 74701 - DNA, 4178 bp, Homo sapiens; identical to SEQ ID NO: 61429

SEQ ID NO: 74702 - DNA, 1010 bp, Homo sapiens
  misc_feature (1)...(1010): n = a,t,c or g
ggcacgagaggggggatcgctgggagcggttgcggcgtgcggggagctgagttatagctgtgacttctgccctgccaggccgcacacaagctggctgacccggtttgtaaaaatggaatttcaagcagtagtgatggcagtaggtggaggatctcggatgacagacctaacttccagcattcccaaacctctgcttccagttgggaacaaacctttaatttggtacccattgaacctgcttgagcgtgttggatttgaagaagtcattgtggttacaaccagggatgttcaaaaggctctatgtgcagaattcaagatgaaaatgaagccagatattgtgtgtattcctgatgacgctgacatgggaactgcagattctttgcgctacatatatccaaaacttaagacagatgtgctggtgctgagctgtgatctgataacagacgttgccttacatgaggttgtggacctgtttagagcttatgatgcatcacttgctatgttgatgagaaaaggccaagatagcatagaacctgttcccggtcaaaaggggaaaaaaaaagcagtggagcagcgtgacttcattggagtggacagcacaggaaagaggctgctcttcatggctaatgaagcagacttggatgaagagctggtcattaagggatccatcctacagaagcatcctagaatacgtttccacacgggtcttgtggatgcccacctctactgtttgaaaaaatacatcgtggatttcctaatggaaaatggggtcaataacttctatccggagtgaacttgattccatatttagttgaggaaaacagttttcctcagcttcctcacaacaggggacaaggaaggaaaaagagggagggtctaaaggaaaaaggggcttgaagtcctttaggatatcttacagtttttattaaaaggaagccaattacactggaaccggggctccctatggatggcctgctggggattgcctgttcgagggnggacggttgggg

SEQ ID NO: 74703 - DNA, 2189 bp, Homo sapiens; identical to SEQ ID NO: 61431

SEQ ID NO: 74704 - DNA, 3446 bp, Homo sapiens; identical to SEQ ID NO: 61432

SEQ ID NO: 74705 - DNA, 2531 bp, Homo sapiens
aatgaaattgaaaaacaattgaatgccatcagagataatatcaaaattggagaagatcgtgctgctagacttgacaggaaaatggaagaacagcaggtcagacttaatgaggcagaacaaaagtacaaggatattcaagacaaactagaaaagattagtgaagagacaaatgcacgagcaccagaatgtatggcattgaaagcagatgttgttgctaagaaaagggcctataatgaagctgaggttttatataaccgatccttaaacgaatataaagcattaaagaaagatgatgagcagctttgtaaacgaattgaagagctgaaaaaaagtactgaccaatctttggaacctgaacggttggaaagacaaaaaaaaatatcttggttaaaagagagagtaaaggcctttcaaaatcaagaaaattcagtcaatcaagagatcgaacagtttcagcaagccatagaaaaggacaaagaagaacatggcaaaattaagagagaagaattagatgtgaagcatgcactgagctacaatcaggggcaactgaaagaattgaaagatagtaaaactgatcgactcaaaagatttggccctaatgttccagctcttcttgaagccatagatgatgcttatagacaaggacattttacctataaacctgtaggccctttaggagcttgcattcatcttcgggacccagaacttgctttggctattgaatcttgcttaaaagggcttctgcaggcctattgttgccataatcatgctgatgaaagggtccttcaggcactcatgaaaaggttttatttaccatggacctcacggccaccgataatagtttctgagtgtcggaatgagatatatgatgtaagacacagagctgcttatcatccagactttccaacagttctgacagctttagaaatagataatgcggttgcggcaaatagcctaattgacatgagaggcatagagacagtgctactaatcaaaaataattctgtagctcgtgcagtaatgcagtcccaaaagccacccaaaaattgtagagaagcttttactgctgatggtgatcaagtttttgcaggacgttattattcatctgaaaatacaagacctaagttcctaagcagagatgtggattctgaaataagtgacttggagaatgaggttgaaaataagacggcccagatattaaatcttcagcaacatttatctgcccttgaaaaagatattaaacacaatgaggaacttcttaaaaggtgccaactacattataaagaactaaagatgaaaataagaaaaaatatttctgaaattcgggaacttgagaacatagaagaacaccagtctgtagatattgcaactttggaagatgaagctcaggaaaataaaagcaaaatgaaaatggttgaggaacatatggagcaacaaaaagaaaatatggagcatcttaaaagtctgaaaatagaagcagaaaataagtatgatgcaattaaattcaaaattaatcaactatcggagctagcagacccacttaaggatgaattaaaccttgctgattctgaagtggataaccaaaaacgagggaaacgacattatgaagaaaaacaaaaagaacacttggataccttaaataaaaagaaacgagaactggatatgaaagagaaagaactagaggagaaaatgtcacaagcaagacaaatctgcccagagcgtatagaagtagaaaaatctgcatcaattctggacaaagaaattaatcgattaaggcagaagatacaggcagaacatgctagtcatggagatcgagaggaaataatgaggcagtaccaagaagcaagagagacctatcttgatctggatagtaaagtgaggactttaaaaaagtttattaaattactgggagaaatcatggagcacagattcaagacatatcaacaatttagaaggtgtttgactttacgatgcaaattatactttgacaacttactatctcagcgggcctattgtggaaaaatgaattttgaccacaagaatgaaactctaagtatatcagttcagcctggagaaggaaataaagctgctttcaatgacatgagagccttgtctggaggtgaacgttctttctccacagtgtgttttattctttccctgtggtccatcgcagaatctcctttcagatgcctggatgaatttgatgtctacatggatatggttaataggagaattgccatggacttgatactgaagatggcagattcccagcgttttagacagtttatcttgctcacacctcaaagcatgagttcacttccatccagtaaactgataagaattctccgaatgtctgatcctgaaagaggacaaactacattgcctttcagacctgtgactcaagaagaagatgatgaccaaaggtgatttgtaacttaacatgccttgtcctgatgttgaaggatttgtgaagggaaaaaaaattctggactctttgatataataaaatgagactggaggcattctgaaaa

SEQ ID NO: 74706 - DNA, 2161 bp, Homo sapiens; identical to SEQ ID NO: 61434

SEQ ID NO: 74707 - DNA, 2293 bp, Homo sapiens
cccgaggaaggctagactgttaagtgtcacgtatatacggtctcaatggagcctcaggaagctattaaacaacctcaaatcacaaaatcagaaaagtgttgaacatttagaggaagaatagaaaggaaaaaaaagcctccaagttgtgtattatttgtcagtaaagcaaaacaaatgtgtaagcccacttatatttaataatgtctcactgaaattaaagtaataggggagagtctgaagtttccacagataaagagagtgctgtactcaaatttactacaaaattaataatagtaaatgtaaaatatgtatttatacagccttttgcagacttatgaactatctcaaattcacgaatcctattttttaaatacagttttaagtttcaaccacttgtatcaccagaattttgagacttaactcccatggttaagagatttccaagctgtgttcacacctgtagtcccagctacactgaaagctaaggcgggaggaccacatgagcccaggagttccagactagccttgctctatttaaagagcaagactccactgccaaaaaaaaaaaggaaaaccaaaaaaaaaaattccataaataactgggtttctaaaattccatcttttcagtgaaacagtacatcacttaaggctaaaactatgtcttttatcactgtaagtccccagtactgcttacaccctacacagagtagatgctcaataaatgtttgatgatttggcaattaatgggataggagggaatattaatatgtgtcaataaattactctgaatattataaataggcttatgagtatggaaaagacccaccctcaaggaatttgtgatcttttctcttacatcatactgctgttttcaatatgccataatttttcttttcttcagggtggggtcagggaaacaacacaaaatagctgtggatgctgtttaacaatcagcatttcataagcagttaagaatttctgtactttcacaaaaatgaaaaaatctctctaaagattatgtgagcccaatctatgcccaaatcttttttttttttttaatatagagaactgattatgttcacttgtaacctgtcattccaaaattcttcaggatgtttaatgttcaagtgtccatattcccagtcccactggatgcctggcaggatgcaaccatctgaatgagtggaagtataatgtttgcaccaggtattatattaggagccttgaacccagaatatgtctgattaagtcttttagcccaataatttgccactgctgccaagtctggtaattttgaaggagaaagttcaaccataacggggtgatacagggcacccccgtactcaaaaaaactttcaaagtgctttctaaacaagtttctctttctccttgaatacaacgtcagtcacaactgatggcagtacaatcgatccatccatacactgctctaagaacatcttgatggtataatatgctgtcattcatgctctacctgctactagtttaatttggtcaagtagctctttccctggagactcaaattctactagactcaaattctattagaccaaagacaaatgatctcaaccatggtcttcacttaaaccaatcactggccctgcattataactgagcaacaagttggcacaatcaccatgtgttggttgctggagagctatcatcagggtcttgaattgcttctgaacctggagactgctggcacggattctgtcacttgacccctactactatgccaatgccaatcagtagatcacaacagtacagtacagatgatagctccaagaatgtaaattgcggatccttccctttgtggctttggccatacagcattttagttttgttctttccattaactgaagtcacgaggtatgcctccttggaaactccaacagttaagagattctcatgtattccatgaaataaaaagcaaagaaaaatcaaacttgtcttaatgagatggaagtgttggatcaaacactgattgagctgttctatgtcctccacttccccagtgcctggatgtggttcatctgcatcgatggatactgtccaaatttgccacttggctcaaaagactgctgcccagtgaatggtaatgcagatagaggctcagaggtatccatgggttcctccatgatgaacaatggtcttgattgctgaagcgattgtttctgattggttcctatgcccagatctgtacctcccaccttgggaggctgagggaggatagcttgagcccaagtgttcaaagttgacagtgagctatgatcac

SEQ ID NO: 74708 - DNA, 1378 bp, Homo sapiens; identical to SEQ ID NO: 61436

SEQ ID NO: 74709 - DNA, 2473 bp, Homo sapiens; identical to SEQ ID NO: 61438

SEQ ID NO: 74710 - DNA, 1894 bp, Homo sapiens; identical to SEQ ID NO: 61439
  misc_feature (1)...(1894): n = a,t,c or g

SEQ ID NO: 74711 - DNA, 2699 bp, Homo sapiens; identical to SEQ ID NO: 61440
  misc_feature (1)...(2699): n = a,t,c or g

SEQ ID NO: 74712 - DNA, 1607 bp, Homo sapiens
ttaaagaaaatactttattatgtcatgaaaaaaaaggcctcaaccaactagattcatacttgatttgaaaaaaaaatggaaaatttattaattagacagtatgtgggcatcctgttccacatgggaatgagaagatgctataggttctctaagtattgcacagtctgaaaaaataacaaaaaaagggaaggggaggaaaaaaaaaatcacatgatattgggaaccatctcacattatgaataatctaccaagaaacatttaaaaaagaaaaccctttgtttctacagtagctttaagtttatagttcttggaatgactgtattccattgaagacatctcagtaacaggaagctgttttagcaatcccatgtgcaaatattaataaaaaatatataaaataatgcaattcatctcttgccttcaccccggcaatcatgacatttctgagaactgttttgcttgaaaatgggttaagctgtaagttttgcctgaagctccatctctgcagcccgtttgagtgcaacatccactagaagctgaaatccactgaagtcctggttgaggtccggtggagtagggggaggagtgttgaaaagaccactctgtgtattcgtacttggtccagatctacaagtgtccctctgggtaacatgaaaagaggtgtcctgtgaaagtttttggcccgcctatctgcctgtaatatctgtgttttgtccccacaccgaccgactggcagagagagaaagggacaatctttcaatggcagtcacagtggtatggcagatcactgatggacgagccaaaactgatccccagggatgaccggcttaggagacagtggccctccctagggttgggttttggccccagctgtacaggaatgaaatggggtctcctctagagctggcatgaagtttttgatgcccatcacggactccacagagctcgtttcagaaatcttggccccacggcgggaaattgtgaactgatttggatctttgccatcctttctcagcatgtcagggaggagcctgcggcgggcgttgatgaaccagttacagacctgtagcgtagacaggtgtgtttgctgggacagcaacgctttttcttgctctgaaggataggcattgtaacggtgctcatacagccaatcccgaagaatctgcacagactccttgggtaggttgccccttctccttctcttgcctgagccagcggatgaagaaaggtccaagggaatgtccatgctgtcctcatcctcagtctcactgccagatgctgcaacaatacctttcttgcctttcattctggatctcccctcccagcgcgaggcaaggcgggggtctggaggggccaggagcggggacacaggggataagcgaacgtctccttcacagccgactctcccgtaacttgtaggacgtgctccagccgttattgctaaacaggacgctctgatcccaggcgcccgctccttgggtggaattcaagtgacacttgggcttcctcccgccgggatcttctggcagccggccgggggctctccctcgcccaactctctcccctcccctctccgctcctttgttccctgctcctgctcggcgcac

SEQ ID NO: 74713 - DNA, 1529 bp, Homo sapiens; identical to SEQ ID NO: 61441

SEQ ID NO: 74714 - DNA, 4494 bp, Homo sapiens
ttttttttttttgaagtttttgctataaaacatttaatgttaacctacaatacaatgtaaacttttatgaaaaaaatttaaagtacactagatttcttcagtaaattatcacatgactattcaggcgcagtacaagttggggcactgcatcctttgtggatggatttccgttgctgtgttcctcacaagtcctaaaaaaaccagttgtagagcggagctccttgttcaagcaccggataatgatgcccctgattttgcattctgggggttatcgctccttctcagtcattttctgaaactctttgcttggccttggcaccattagcaattttcacaactgctcaattgaaggttctaggttctttttagcttagtttttaagagacaagtgttatcctctggccatctcttattcaaatatcatggtggaggcaagcaaggagaaagaagtatttgctagaggaaattctgcagaagtggaagaaaagaccagaagggctccactgagggtacaaatattcaactgactccaatcgagtgtctttgcttggtcacttcccatggttattcagctcaatctacaacttcagtcgtgggagtgcagaacaaaacttgaaacaagtgcttttagttgatgatttgccatttggaaacaacagctgaaatatcccagaggtgatgtggaaacaagagcaaatgcttgcagatcactggcttctcagtgtcttctccctcgcaggtctcatcaaaatcccaaaagtccttaggagtaacacagattgtactggcattaagtgacaaaatgtgcagcctgtatttgactgaggaggaaaggaaatggcacctaggcagcagcgctagggtcagcaaggagaccggcctagggtctcagtaaagcagaactgtttcaaatgggactagaccggggcatgtgcttccggtgaatcctcttgaaacctaaagtaaatgggaaggccgccctaacagttgtactgacataaagggagacccttcttaatattctggcagctgacttccttcactgaacaactattatcaaaaggcgagaggcataaagtgcacactgtagaataagaagagactgaattatgatggaaaaaaaaaatcgtaacttccccaaagaggtgtggacagtgtacctagcctcacaaaggtccttaataccctcctgtgtgctgccagggaacagctgtgaattccagatggggaggaaggctctgacttaagtggaaaaattcctctgcatggttgtcagcaggaaggtttcacgtaaggttatccttatgtggagaacatgggttatcctgctgttcacgccagatacattttattgacaacagtcagatggtgattccactcatctggccttgggacagcagaaaacgaagtggaagaacaatagctggccagggacagaattaaattttcctagagatggtgttctagacagctatgccaaggccactgggaatttctcaggctctccaagttaatttctgtggggtgccttactctgccatgtgggatttaccccaacaactgaggactgcagtggatagtaaccatataattgctaccaaaaacagtggtccttaggttttagttaagcaagagagaaagccttgagactacaactccagcaagttaggctttatgttgatctgaaccccccgccctcacagcattctaggaactacagtaacgtcagtcggttgcagtggtacaacgagcctgcaccagtctagctacggaacactttggaatacttgtcagagcgcactggcatctgttaatacatggcctgacccatgtacccattaccataaactcaaccacagacgagacatccagaggttaaaaaaaaccctattacttcaacatagcaatagagagaaaggataaaagctgcctccagaaggtggctgcatcagaaatgaaaatgtgccttccaatagattacacaggctgggagttctgtcttggctcccttcaaggcctctggttctatccttaaaacaataatacacttccactgagacaggcagggcactctcctgtggttctgctggctccaccacaggccctgctagtcctttggaaaggccccaggcttggcaattcaggaaagcccagggctggggggagcagcatgcacatgtcagaagaggaatgaagagctgctatcctttggttcagaccccataaccaccacctggtacagactccaaggaaaagctgcagttgtgtgtaaaggtgagttccaccacatacataggtgtatctttacatatacagcctttgtggggccacaaacccagatttcctcccactgctccaagtggggtgcacaggtggtaagaaaggacagcaagagttggaccaaaaagaatgacctctctgggaacgtgagagggacaatggcagaaataagcacaaaccagcccggggcacttttattacactattgtgggctaaggagcccagggcataaactcatgggtttaaagaattggctctttatcaaataaaggaaaaaaatatatatatatacctatgtcagcctcattcctttggtcattacaaaacagaaataaaagttattgaaaacttgtgggcagttcaaggaacatctctgcttctctgctctgtgctttctcttccctctcttccccagaggcaggagaagcaagtcctcaggagatgctgcaagtagctggttgatggaggtttttcacttttatttttcataaaagcaagaatgaatgagaactagtgggaatgtccccttcccagctgggacaatggatgggtcgaaggtgaagagtctctgttcactggaaggtgcgtgcacagaggccacaggaagggtgggcttgccaagcgggtacgtttgttgctaaccttgcgcgcacacacaggttgtgactcttacgggcagcatggtttctgatccttcctaaggatgcagcagtcttttaaaaaaaatattgtattataataataataataatatgaatttctctctcttgttttttttttttgacttgctgttgttttcttttttccccatttcttttagggactggggtaggaggggacaggaagaaaaaaatgtcattcgtcagttaggtcctgaacaaaaagaacttctgtgtggctgagtccggccctcctgtagcgtagggggattgggccacctcctctgaagggatgcagggcagcactccgcctgggaaaatttggcttcaatctgaaacttttctggggctttccttcaaggagaataagaagtcgtggattactgttagagactgtgaaaagtggaatcgtctctctactcgagaatcattaggtaatttgaagatgatcttgacactttcagggtcatcaggggaaggttcagggggcaggcattccaacttcctttccttttcctcctgtaaattctgccgccgtctctcctctgccaacttttgctgttgcacctcctccttcttccgccgcttacgctcccgctcctcccgtttctttctttctttctcctggtcagctctgagagaggccaggtaggcctcatcctgctgttgtctcagcacttgggtctggtttctttcttccctttctaggcgttctgacaccaggtaagtctggttagcatccatgataaatgtcagttggttaatgaggtcatcaggttgcaatgaggccttctagccgtcccacccacaggtcattcccttcgatccttcagcataatcatggccaggaatggataggtgttctctcgtaaagcctgtgagaccctgtatccctcaggtttgtttgtagagcatgcccagaagagcatcctagtgtttattagtgaaataacttcaggtgcacagagtgtgttgcgacaaaactcatcagagtcctggtgatcatctccatgaagataaaccaaaagaaagcgaagctcccttttggcatcgttaagtgcctggctgtacgttccctggtagaagacagggtgtgccctcccatatttctcttcaaaagagtgcataaatgaaacaatgtccccaacggggtcagtgacccggctgcgagggtcaggccgtataaaacgaagagcaaacctaaatatatcaagtatcgtgtaataggtaaaccggaatggaagcattatcaagtaataaccccatccaagcagcccccttggttgaggtcttgagacaacatagctgtagatcctgtggtcagctgtattaacctgcaggggtcgtgatggaggtgggttgaaaacactaggtacgccctcttgctcattcaatctgtcctgtacagcagcctctatgttccagttatgctgttccaaggtatggcgacactgatccatagattcgatgccagtgagatcctgaaactgcagcagcttctctgtctgctcctgggttagatcccgctcctcaggcgccgccattttgccgccgc

SEQ ID NO: 74715 - DNA, 1719 bp, Homo sapiens; identical to SEQ ID NO: 61442

SEQ ID NO: 74716 - DNA, 5769 bp, Homo sapiens; identical to SEQ ID NO: 61443

SEQ ID NO: 74717 - DNA, 2478 bp, Homo sapiens
  misc_feature (1)...(2478): n = a,t,c or g
ttttttttttttgggataaatttttcttttatttccatactcttttgtgacatgtgtgggcacaagtattccaatctcacagggatgttaaaacccacactcgaagggtgtccagtgtgcttaggaaatgtgggtttgcgcaatcaccaggccaagcctgggggtcctcggggaagctactcctccaggtcacctgccaggtggatgcacttccttgggcaatgggtgaccctcccaggacaaggggaaccagcagggactcgatggcaccacacagcagccacctgttctgacaatgtgacacagaccaactaatgccagagcccaggagaagccacagcagagctgcctgggttggtgtcagagcaacaggcagaagtgactgtgccgcccgtgggctgtcatccaccggtggctactgtgtcattctggaaaaactatgatgccatgagactctgagaaaccgaatcactgcagagacaaactcataaaaattaaaaccaatccataaaattgtatctagaaactctgtccctggtgccaataagcagcaaagtcaacaaagagtaaaaactaaaacttcaacacattattaaaaagcaaaactggactcaactacaatcacttctggttagtccactagtgaacccaaaagtgacttaaaagtaaaaatcattattagcaagagattaagaacataacttcattgagaggtcaatgttaagagaacagttcattaaaagtttctgtttaaaaagaaaaggaaaggcccaaatagccatttcaaggcagagcaggtgaaaggcctggaacactcctgtgcgctcactgtcggctgctgaacagggagcccaaggccagcaggatggagggtgtgaccgagggcttggaggaggtggtgtactggatgacatactctgggtagacctggtgtttctcaaagatcacaaagatggaggggtcggacacactgttcacgcagctatcatagaaggcgttgctccagccctccttggccggcggacggacaaaggaggcattgcccctgacgaactcgcccaccagcacccgggccaggaacatcgtgtgggtctgcgtgtcggatttgctgtagtggtgggaatatgcagcatctcgggcaaagtagctccccttgccgtaggaagtgccatgaacaccacagacccgccagtcaaagttctgctggcagatggcgtccacaaaaatggcgctggtgccgtggaacagctgccgctcgtccacggccttccctccgttctgcttctgcatctgtcctttttgccactggtagacttcccagagggccaggttctgtactcgctcaatcttctgaacaaagtaaaaaggcagcgtgcggttaaagaggttccagaccttctgatactcttccgaggaagaactaagggtgatcttctgaaagcctgggtctggcagggcagaggagtcccaatagtctgggatgctcttcgggcctggaaacttggtattgcaggtttgcatggtcgtcacatcctggggagacacgtatttgggtctgcggcaaacctttttagttgtgccatagaccaggtttttctgaacgaaggctttgaaatctaactcgtagttgtgctttccggcctggaacttcaaggtggctgcctggccgtcagaccccggtgtacagtaggccaggtaggccttctccacgtcgctactgctgacagtggtcacagggtgcaccgtgccctgtcttccatattcctgccaagaaccaaactcatcactccagtaccaaatccagtcagtggtgaggatgaagtgtggaggtttggtgacagaggaggccgtggagaggcggcgagcctgggtagcaccgtaagtcatggcgttaaagttcagacaatgagagtgaaaggtactggctgactcagagcacaggatcctttctattttgggattgcaatatgcctcttcaataagttccatgttgtccaaatcctcccatttgcctctatccaagaattgccatcgatacggcaaatggaaatgaactctatggcacttatcttgaaagctacaacttttccggatatggtacaaacagatctgatcaccctcctcctggctaagagtgtttggggacacagaacctgaactgtcttttctttcagaagtcccctgtgggacaaaaagaggaggcactctgctgggggcagagctcttattcttgatgtcatgtgcatttctataaatggtaggcagcctgctcaccaggtctgagctcatacccaacttctccaatttttccagattctcagaattagagaaatcatgggatctcttacagctagtgccaaacttgcattccccctgtaaaaaatactggcagatatggagcatgatgcactgcttttgaaaggcacaagagccgtgacgaaatcgtcgacccggnnnttccgggccggttccgaacgg

SEQ ID NO: 74718 - DNA, 4287 bp, Homo sapiens; identical to SEQ ID NO: 61445

SEQ ID NO: 74719 - DNA, 4593 bp, Homo sapiens
tttcgtcttcgcttgacgatttcgtaggggaggaggccgagtgtttcctggcgcattcccggccagcccgagtgactcactcggccaaggaaactcccagggcccgcccaggacccccaagccgccgcggacgcagaatgtggctcagctgcccctggtcccatcccagggcagagctcctcctgagtacccttgagactggagcagattcagcagaaggcagattgccccctctccctggagctggctctgaagcccaggatggcggcccaggtgactctggaggacgcgctgtccaacgtggacctcctggaggagctgcccctgcccgaccagcagccctgcatcgagcccccgccatcctcgctgctctaccagccaaatttcaacactaactttgaagacagaaatgcatttgttactggcatcgcaagatacattgaacaagccaccgtccactctagcatgaacgagatgctggaggagggccaagaatatgctgtcatgctgtacacctggaggagctgctcccgggccatcccacaggtgaaatgtaacgagcagcctaacagagtggaaatctacgagaaaaccgtggaggttctggagcctgaggtcacaaaactgatgaatttcatgtacttccagagaaatgccattgagcgtttctgcggggaagtgaggcgcctgtgccatgccgagaggaggaaggacttcgtgtcagaagcctacctgatcacactgggcaaattcatcaacatgttcgctgtgctggacgagctgaagaacatgaagtgcagtgtgaagaacgaccactcagcgtacaagagggccgctcagtttttacgtaaaatggcagatccacagtccatccaggaatcgcagaatctgtccatgttcctggccaatcataacaagatcacacagtctctgcagcagcagctcgaagtgatttctggctacgaagagctcctggcagatattgtgaatctgtgtgtggattactacgagaacaggatgtatttgacgcccagtgagaaacacatgcttctcaaagtcatgggatttggtctgtacctgatggatgggagtgtcagtaacatctataagttggatgccaagaaaagaataaacttatccaaaatcgacaagtacttcaagcaactccaggtggttccactatttggggacatgcaaatagaactggcaagatatatcaagaccagcgcccactacgaggaaaataaatctcgatggacgtgcacatcctccggcagcagccctcagtacaacatctgcgagcagatgatccagatccgcgaggaccacatgcgcttcatttcggagctggcgcgctacagcaacagcgaggtggtcacgggctcgggccgccaggaggcccagaagacggacgcggagtaccgcaagctcttcgacctggcgctgcagggcctgcagctgttgtcgcagtggagcgcgcacgtgatggaagtgtattcctggaagcttgtgcaccccaccgacaagtactccaacaaggactgccccgacagcgctgaagagtacgagcgtgccacgcgctacaactacaccagcgaggagaagtttgccctagtggaggtgatcgccatgatcaaaggcctgcaggtgctgatgggcaggatggagagcgtgttcaaccacgccatccggcacaccgtctatgccgcactgcaggacttctcccaggtgacccttatggagccgctgcggcaggccatcaagaagaagaagaacgtcatccagagtgtcctgcaggccatcaggaagaccgtgtgtgactgggagacggggcatgagcccttcaatgacccagccttgcggggcgagaaggaccccaagagcggctaagacataaaagtaccacgccgcgccgtgggaccctccagcactcagctttacatggtgagaaccatgctagagtccctcattgcagacaaaagtggttccaagaaaaccttgagaagtagccttgaggggcccaccatattggacatagaaaaatttcatcgagagtcattcttctacactcacttgataaatttcagtgaaacgctgcagcagtgctgtgacctttcgcagctgtggttccgagagttcttcctggagctgaccatgggcaggaggatccagttccccattgagatgtcgatgccctggatcctgacggaccacatcctggagaccaaggaggcatcgatgatggagtacgtgctctactccctggacctgtacaatgacagcgcccactacgcgctcaccaggttcaacaagcagttcctgtacgacgaaattgaggccgaggtgaatctatgttttgaccaatttgtttacaagctagcagaccagatatttgcctattataaggttatggcaggaagtttgcttcttgataaacggttacgatcagaatgcaagaatcagggagccacgatccacctcccgccgtctaaccgctacgagacgctgctgaagcagaggcatgtgcagctcctcggcagatcaatagacctcaatcgtctgatcacccagcgcgtctcagcagccatgtataagtccctagaactggcgattggacgatttgaaagtgaagatttgacctccatagttgagctggatggcctgttggaaatcaaccgcatgacccacaagctgctgagccggtacctgacgctggacggcttcgacgccatgttccgggaggccaaccacaacgtgtcagcgccctacgggaggatcaccctgcacgtcttctgggagctcaactatgacttcctgcccaactactgctacaacggctctaccaaccggtttgttcggacagtgttaccattttctcaggaatttcaaagagataagcagcctaatgcacagcctcagtatctgcatggatccaaggctttgaacttggcctactccagcatttacggcagctaccggaacttcgtgggacctccacactttcaagtcatctgccggcttctcggctaccagggtatcgccgtggtcatggaggagctgctgaaggtcgtcaagagcctgctgcaaggcacaatcctgcagtacgtgaagacgctgatggaggtgatgcccaagatctgccgcctgccccggcacgagtacggctctcctggtatcctggagttcttccaccaccagctgaaggacatcgtggagtacgcagagctgaagacggtgtgcttccagaacctgcgggaggtggggaacgccatcctcttctgcctgctcatcgagcagagcctgtctttagaagaagtgtgtgacctgctgcacgcggctcctttccagaacatcttgccgcgagtccatgtgaaagagggggagagacttgatgccaaaatgaaaagactagaatcaaagtacgccccgctgcatcttgtcccactgattgaaagactggggacccctcagcaaattgccatcgcaagagagggggacctgctgacaaaggagcgcctctgctgcggcctgtccatgtttgaggtcatcctgacacggatccggagctttctggatgaccccatctggcgcgggcctctgcccagcaatggggtcatgcatgtggacgagtgtgtggagtttcacagactgtggagtgccatgcagtttgtctactgcattcccgtggggacacacgagttcacagtcgagcagtgctttggtgatgggctacactgggctggctgtatgatcatcgtacttcttgggcagcagcggcgttttgctgtgctggatttctgctaccatctacttaaagtccagaaacatgatggcaaagatgagattattaaaaatgtgcctttgaagaagatggtggagagaattcgcaagttccagattctcaatgatgagatcatcaccatcctggataagtacctgaagtcaggcgacggggagggcacgccagtggagcatgtgcgctgcttccagccgcccatccaccagtccctcgccagcagctgagggcacgcgctgcactccgtaactcaacatggcatgcctttctctccgtaaactatttagtgagatttttagggactatttttcagtatctctgtacctgttaaagggggtgcttttcgatctaaaaacttaattttataaaattgacttatttttctagactaaaattgtatatgcttttggtaattaggaactcttgagaatattggctgctgattgttgccatcacgttcctacaaaattgtttttctatgggatgttctggcagctgtgtcataaaatgctgctgggttcattcattcattccataagaaacttaataccagcaaatgcattaaatcccttgccagttaccattaactataactatttagcttttgtttagggatctttctgatggtcttttatgagcaatcttagttctaagtcattgttcccatcccttttttgtgtgtttcagaaaatagtgaacttgattcccctgcttccactaaatccagttgtgacaaaatctaacgtgacatcagatcgaaaggttatagaaataaaactaatgagatctaaaaaaaa

SEQ ID NO: 74720 - DNA, 1635 bp, Homo sapiens
caaagcaaaagcaaaaacagctcattcacactttttatactgattttatattgaaatgaaaatattttggatagactgggttaaaaaaaaattaagttcacctgcttctttttactttttgaaatgtgactgtcagaaaatttaaagtaacatatgtggctcacactatttctgtgggacagccctgcctctagctaggggctttggtgagaaccagatgagttgatgggtctcctctgggccctgcttccctggctgctgaggtgcaggaactgtgaggggagggcagcctgtcacggtgcccaacacagggcagggctggacaggtacaagtggaacaggcggataagctgggaagggcacagagaaaaggagctcctcgtgacagcactttcccaccttttattattcaacacatggaagggggtggagacacaaggatagggcaatggtgagtttcaataaataagagaaacaggatggacaggcagtgggcccatgcctgcacggccccacataaataaccaggttgctgagccagagtggaagtcagggctgggcctggcagccgcctgcactgcccagaagcactggcaccacagggacacagaaaccactgaggcccaaggtgtgctccagccccaccaagtcttctccctaaagctcctgagatcttggggctggctgggcaggctagggctctgtatcacagtcctgccgggatcaagtctattttttcagtttcattaaaaacagctgggggaggggcaggcacatgcattaagccccttccgtaggcagagccatggatggacagccccatgggggccttgaaggcagaggccctggaagcagcaaaaacggggctggataaagctactaatgggagggatggtagagcccagctccccagtcccccacaacccagcccagaacctacaaagagctgaagaggccctgggtactgagacgtctctccttacttcacagtcagaaaaatggacccagcgatggccacagatgtgcccaagattagaacccagggactcactctcctagcccaggactttctgctaccccttccctttatagacctgctggaagaggagggggacgcacatctgctctagggccctgtacagaggcaagggtgtggctaattaccaaggaatggggccaggggtgacgggcacaggcccctcccctctgccaagcccagcctctgatgatacagagaatcccgtgggctcctaggatccagccagggcaggcacgggggtcggggcatccttcaggggagcaacatggcagcagggccaggggtggggctcagcctgctcctgtacacagtgcccgccggccacctgcctcctcactggggcggacgctcccacctccaggccttggtctttgctgtctcgtctgctgggccattgcttctcggtcctcacagtcccagctgcagctccacctcctccaggaagccttcggaacctcccagggcagggccgcagtgtccttagactagaccgcccctcagatgaccaggttgctctcacttagccggaccacatagcggttctcctcggccttgttctctgctgggggcttcagccactttgtacggcttccgcc

SEQ ID NO: 74721 - DNA, 4368 bp, Homo sapiens
  misc_feature (1)...(4368): n = a,t,c or g
ttttttttttttagaatataagttttttaatttttataaataacttatctgttacaaagatagtttacccagctaaatcacaaaaccatcaactcaagatatccaaattacgttttattaataaaacaagtaaaaactgatttatcaatcttcacatagaactgcagatgaagctgaaaaacaaggcctattttaaaaataaattggatcaaacgtaagggctttgggtctatggtttaattacctaggattgtcatatttcttcccatatacaaaatgcaaagcctgaaagttagggctctgacattcatagagatcaactgtaataatcccatttaaaacacagccacttgcaaacatttacagtgggtggtagtctatattatcttccatcctttgctctatttcagcacttcccttagccccattctaagcactcatataatttcataattctgtctttttaaatgcatactgttctttttcttgatttcagttatatacattcctgatcatctgaatattttccttacaaaaatatatcatcaaaataaagagatgcttgaggttgcttcagtgttcaagtttgcttgtttttttttccagcttttcttcagttgtcctaaatatggctagccttgttttataaatacacatgatactgtcaccaagtcaggattagaaatggactgccccaacagtaaagcatttaaacttctctccaaaaaaagggctgtaggtactgctgctgttgctggttttgagactgtactttcccaataacaactgcttgtgcaagttctgtgggacaccaagcagatgaagcttaaccttgttgttctgtcagtgggttaaaaatatcttttgttttaagcttccctgtggaagacaaacactgtgttgtgtcacccactgctcaagtcagtatttaatgtgacctacagacatcacttctgtaatatcatctgcaattcactgtgcagcatctgcctgtcttcacacaacattggaactcatgagggcaaagtacagaataagtagaggaaagttattcctgtgccatactttccacctcattaatgcttttttattttaaggcattgttcctctcaggtaaggcttaaaaagggacatgatcgtgcttaattactaaaaggaaaaaagaaaattagttaacaaaaggctattacactatacatatagaaatataagaaaataatcaagaagaaaagaaatcacttaaagcagactcgagagatctgtacagtaggaaaagctttggggtatttcgctgcacatttgtacagacaatgcatgctgctttcctttgcatctttagcccctagatgctggcttcacagagtggagacacgttcagggaagacaaagacaaggccaagagtaccacagatttctgaagttcttccctatccaatggcactatgcggcagcaaatggttcttaaatagttaaaccttgttccttttcttcgtgtatgtagtgtttcactgaaagctttacaaataaaacaagctatcattctattccttcctcctgtcaaaattcagtagtgacatgaggggaaaaaggtattgggaacacctaggtgttaacatattgagaattatccataatgggacactggtaacactgtacacagttaggcagtgggcaaccaagtctttcagcagattacttttcatgtgatgaatttcaactgctcatgacattatactgaggtattattagctctgtgggctgacatttaacattagcagaacaccatcttgtcacaccttcaatttgacaaaatcctatgtagcagtgaaactttttcccgatgacagactagtttcttgaactttagatgtggttttagagaagatacagggccatttggctcagaaatgccttggcatctcacactgttcacagcgaattaaggctggatggttcaaaaaagtacaggcggtacaattccactgagctccctcatcatcttctgtgtcttgagtctttggtgttttgatgatggacctttgatctttgggttttggtggcacaggacctacaaatccaatattgtcataaaagttatgaatagcgctggggttaaaatgtggtcctcgggcttgaaaaagatcaatttctttggttaagcagtcaatgtcaatctggagttgtctattacaacttctcagctgctgcatttcttcaagggaaggtatctgggatatagaatttgatcttttcaggcgccttcgagttagattattttccatttcattaacctcagattttaatttatccagctttttcttttgaatctcaagttctctttgaagtcgttccattctggccttctggtgtaccaaaagagctcagtctactgagtaactgggactacaggtgtgtgccaccatgcctgcataatttcaaaaccttctgtagagacggagtctccatatgttgccccagctggtctcaaactcctgggctcaaatgatcctcccatcttggcctcccaaagcactggaattacaggcgtgagccaccatgcccagccaagaattacttattcttcaaatatcttgtgtgtaggcagcatcatcagatcccatactcagtttccgtgtttcacttattctatccacatgtgctaatgtagggtccgtgaggtgatgaatattctcggtttctacataatgatcaggatgattaagaagatttgtaagttcaaaggtaggggacaccacccctggtgaaactgcagggggcttattgggagagactgtaattttgaaagtgtattcccgtattgggctgagtgactaccactcgaggagaggttgcagagttattgcctattgctcgacttttgggaggatggtgatgaataaaggcaggacccatgctcacttgcccagacatgttcctggaggcagcagatgctccagagtttgtggatatgaagagtgtgggctgattccgcatgacctgttcatctcctgtggcagcattcgctgaaatatagaccttaggttgactacgggacatcagctcatccgtatttggggggctggcagctatgtaaacagtgggctgatttctgtttaaggtctggctattgactgaagaggaagtgctggaggttcgaggtccagaagaacgcagttttgaagaattatttctttgtgggggttcaagtttgatttcaatctggttttttcgaggtcctgttgaaatattctgaatgttatattggctatgggcagaagactgtgagctaccagatgaatgaatggttggtggttgtgaagtagtaggtgaactgattggcatgtagacatgagaggtctggtggccttgctgatttggctgttgagatgaggtatgtgacagaggattagatgcaggacaagtagtccagggaccaggctgtgaaggctgataaacttgctgagggttcatgggattaaactgagatacccagccagaatgctgttgtgtctgtcgagttgtaccaccaggagttgtaatgtaaggcctaatatagatagaatttccctgtggactgttaagtacaggtggaggtacaccatgtatgtgcaaagatgtaggagtattacgaccagtctggatatttggggctaaagttaccataatgggattaaatctgggagtttgttgagaaaggctagatgttcctttgctgcctaagtgaaatccaagatgtggtgctgaatttgaagcaccagaggaactggacattccaaaaacattaaagccttgaggaacttgagctggtgctgtctgtggctcctgctgaaatagttcactattggactggccaccttgaagttgtccatcactaatgctgtgcgttagagtcctacttccattcatcctactcccttctcttccatggtggtaaatgttctgtgattgcaagtccaagttgagagaagtcatgtgattgcgtagaccagaaattccagaatcatctgaaaaattcaagtctccttcaccataaagatatcttgtactctcctgagagagaacagcacagcaggcatccaggttattattattctgtaacatgcacctggatacaacaacttcaggtacttcagggaatttttgtcgcaggtcatgtaaaacctgaaaatcaatttggtggcttccttgggccattcgtatattgcctgatcaggactatttgtacacgtacggcaattataggccttagtggaaatagtactcatctcttctgtccaagcattttctgtaaaagaaagaaaaacggacgcgtggntcnncccgggnnttggcnagaccacgttgcnctaagttcaaggccctggctcc

SEQ ID NO: 74722 - DNA, 2410 bp, Homo sapiens
ggcacgagccgtaggctccttcagggctgagccatcccgcgtgtcttgcgctcggtggaaatgcccagccgagggacgcgaccagaggacagctctgtgctgatccccaccgacaattcgaccccacacaaggaggatctaagcagcaagattaaagaacaaaaaattgtggtggatgaactttctaaccttaagaagaataggaaagtatataggcaacaacagaacagcaatatattctttcttgcagaccgaacagaaatgctgtctgagagcaagaatatattggatgaactgaaaaaagaataccaagaaatagaaaacttagacaagaccaaaatcaagaaatagtcaacctgatttcacataacaatgtgtggcatttgttgttctgtaaacttttctgctgagcatttcagtcaagatttaaaagaggacttactatataatcttaaacagcggggacccaatagtagtaaacaattgttaaagtctgatgttaactaccagtgtttattttctgctcacgtcctacacttgaggggtgttttgactacccagcctgtggaagatgaaagaggcaatgtgtttctatggaatggagaaatttttagtggaataaaggttgaagctgaagagaatgacactcaaattttgtttaattatctttcctcctgtaagaatgaatctgagattttgtcactcttctcagaagtacaaggtccctggtcatttatatattatcaagcatctagtcattatttatggtttggtagggatttttttggtcgccgtagcttgctttggcattttagtaatttgggcaagagtttctgcctctcttcagttggcacccaaacatctggattggcaaatcagtggcaagaagttccagcatctggacttttcagaattgatcttaagtctactgtcatttccagatgcattattttacaactgtatccttggaaatatatttctagggagaatattattgaagaaaatgttaatagcctgagtcaaatttcagcagacttaccagcatttgtatcagcggtagcaaatgaagccaaactgtatcttgaaaaacctgttgttcctttaaatatgatgttgccacaagctgcattggagactcattgcagtaatatttccaatgtgccacctacaagagagatacttcaagtctttcttactgatgtacacatgaaaggaagtaattcagcagttcattgatgtcctgagtgtagcagtcaagaaacgtgtcttgtgtttacctagggatgaaaacctgacagcaaatgaagttttgaaaacgtgtgataggaaagcaaatgttgcaatcctgttttctgggggcattgattccatggttattgcaacccttgctgaccgtcatattcctttagatgaaccaattgatcttcttaatgtagctttcatagctgaagaaaagaccatgccaactacctttaacagagaagggaataaacagaaaaataaatgtgaaataccttcagaagaattctctaaagatgttgctgctgctgctgctgacagtcctaataaacatgtcagtgtaccagatcgaatcacaggaagggcgggactaaaggaactacaagctgttagcccttcccgaatttggaattttgttgaaattaatgtttctatggaagaactgcagaaattaagaagaactcgaatatgtcacttaattcggccattggatacagttttggatgatagcattggctgtgcagtctggtttgcttctagaggaattggttggttagtggcccaggaaggagtgaaatcctatcagagcaatgcaaaggtagttctcactggaattggtgcagatgagcaacttgcaggttattctcgtcatcgtgtccgctttcagtcgcatgggctggaaggattgaataaggaaataatgatggaactgggtcgaatttcttctagaaatcttggtcgtgatgacagagttattggtgatcatggaaaagaagcaagatttcctttcctggatgaaaatgttgtctcctttctaaattctctgccgatttgggaaaaagcaaacttgactttaccccgaggaattggtgaaaaattacttttacgccttgcagctgtggaacttggtcttacagcctctgctcttctgcccaaacgggccatgcagtttggatcaagaattgcaaaaatggaaaaaattaatgaaaaggcatctgataaatgtggacggctccaaatcatgtccttagaaaatctttctattgaaaaggagactaaattgtaatgtgattcacaatgtaacaatataaaaataagtttttatataattatataaaagtaagatactctgctgctttactattgtataatatagtatttttaaagttca

SEQ ID NO: 74723 - DNA, 2102 bp, Homo sapiens; identical to SEQ ID NO: 61448

SEQ ID NO: 74724 - DNA, 4790 bp, Homo sapiens
gaggagaaaagaaagatttataattaaatagtatttagggtcccaatagtcagagtccaataatccaaaggtcatctatgcaaaattaggaatatgcatttttctccaaagagtatctttggctttaatctgattctcaaaaggatcctatgatccaagaaagtttaagaaccattgaaacagtaatttattcctgagctatttgactgccatcaatccatttgttataaaactgaagggaaaacacacatttgaatcacttcttctaaagctttagtaagtgatctgttcaaataagcaattacatgaaagaataaaaccaaatttccaacctaaaattctgacaggagagtcaacatgatggttaaggcctatttcatattcaaacttcagtctatgaaagagtagagagagaagggtctcctctttcaaattaaatattataaaaacaattaaaaaaaggtatcaatagtcctaaaatgcagcaactccatctcaaacaagcatgacacacttctgatcagatgaagtatttacaaaggtagcttgtgttttaagcatgtaacactttgggtgacgacagaagtttctcctctttgggtgaaacctgcctaaggctgtagagatgaccaacactctgcaggtgttagttctgaataactactgtgggcttttcatgatcttccctccagtaggagaccacaattgagtctaaagtcagatccaccgttgtctatgggtaggcagggttgattcaaacttaatccttgtttgtattcttttggattactgcaaaaacatctagggaccagagtgaatgtctggtgaggcataactgcagaggtgaaagatgtcaaacattttcaatttggcagtttcttcaaggtgtgtgaaaattcacatacagaaggtctggcagtgtcttctgtaagttttcgtgttgccgtatttctgaaggagctcttgggcctgctgctgcatttcctgggccagacagccaggaaagtgggacctgatgagaagcaggacgaggcagcactccagcacatctgggaagggccaggccttaatgctctcaggaaattttgccattctctgatttgcctcggtaagccttttggttaactcaggcagagaaagtggctcatttttttcttctttacactggctctgagaactgcagaggggctgctctgcttctacttccggttcattcttatcaggaccatttgctgtggatttacagagttgactcttttggtgttgtcggatcatttctgccaaggtctcttggacttcagcaacagttctctgtgagttttggagactggcatgcttttctgaaaagagctccttaaaagtactcagcattcgctccccttcttctgtgagtctcaagtctagttctgaaggcctgtttggctctggctgagaagtttcagggtccgtttcttcagtgctggcagtgtctaactgctggcttggctcaacagagagtgttctgtgaccagcccttacccagacactggaatttgggcaaggtctggagagagaccaccagaattcatacagacgcccataaagaaaaaaggcctccaaacttttgaaagctggtgtggcaggggattgatggtcccccaacttgtctcttaggtggtcacagccatcagggagaaaggctgagtacacttcctgcatgatggtgaagctccctgagtcatagctccggaccaccgcccgaaggagcgcctgcacagcctcgtcccaggaggccatctgttggctcagcactgccagggtcaagtcatggcaaatgtgaagcaggagctgtttggcaggtgtgttatttgtagcagatgggtacttgatgttctgcagcttctgaaaggcttcctgatactgctcaggggtgtcaaggctgaagatgctcttccacactgcagtcaccctctccacgaaaggcccttcggtgcccgtgttccaagtgtggtaagaggaggagcttttgccctctgaaagctgcttttcctccagatgcctggacagtagctccagaaggcaaaacaccaatctctgaccctgtagactttcatgcagctgcagggcttcctgggctcccacccagttgttggccagaagcagctcttgggcacatctgagagccagggaagcagacaactcatcctctcctacgatggcagccaactctgcagccgttctaagtgatgccgcatccccctttttggccaaaactttggctgcatcataagcacaagtggcccctaaatagcatttggcagctacagcatagtggccatctctttctaggacggttccccagctgaggtacaagtccttcaggactgggtcctccgggcgcagccgggccttggcaatcgcaatagcttccctgtaaaaatggtttgacttgagcagctccaccgcttcatacactttgtggatggaaagtaggtgagaagcagccttgacatactgatcctgaaaacacagctgtttggcaaaagcttccacagcccatagccacacatggtagccagctgctggtgccatagccacaaggttgtctgtcagctcccctctttctgctgcagtctggagaacacctttgagatcccctttccaaagcataagctggtgaaataactcagggtggccattttctaagtgaccttttccttcaatatcaatcattctatacagggtagccctgtctgtgaaaagccccagatgaaatctttcctcaacatcagcagacacatcttcattcagctctctggagtgctttgcagttgctagtaccaaacagtcctgatgaagctcctctttggatctgtggtccaggcttgtactcaggggaagcaaggaacgagcttttctcttcttgattaaggtttctggcttctcttttggtggctcctttttcagtaaaatgactttgttattaatggtgacttttgacttttcaaagcctgaggaaactggagtgcagataactggttctctagaaaccgctggagcaaggccacagggtaattccggctcccgtgcttgctcctccccttcttggtctgacacaccattctcaacaggtcctgagttctccttcatgctttcttcttcatttccatcaatcgattccagctttacaggagttctcaaggtgggctttttcttctttttgggctttgccttaggttgagagagccgttttttctccaattcaatactttttttgccttgaggaggccgggaatgatcttgcatggaagtgagccacttgtgcacacaaaagtcatctgacccctgaatagatgcagtctggatccaaaggagaccatgccacacaaagcagtcgaccttgatgtccctcggaaaattgccacaggggcctccttccccggaaaagcaatcccaacaccctgggctgtacccatcaataggaaagcaaaataccagcccttcccatcaatgaatgtggggctcccacgcccacactgggtaatcttgggccgtatgcccctgaggaggggtccggtaggggctctgtaatgggtcactgggagactcaggggctgctttttatggacagtttttcaggttgtggcacgtaaatggactgcattgttgggagccagagggcattcagatagctcaatttctgggctgggctgccatggctcatgatgccagctaatggtattcacaagcttgtgatgctgttggatagtacagatcagtttcaggttgggaattctgaaatatttctattgatccatcttcattgccaagagccatgattttgccatctgctttccaacttatctctgtgtgtacaggcaatttgtatttgattgaattggtgtccctgatgagtttgttgatgtcaaaggcttctccactaagcttccagggattatgctgtaagacaatcccttctcctccacagctgtataaagcaagggaaggtctgtctccttctcctccaagtgacatggggggtactggtggcccccaggctaacgtatatacagtcttcttatgatatgtgctagaaatctgtggaggcttgttggagtaggtgtcatacaatcccacttttccatcatcagttccaaaagctaagcaaccttccttggttgggtgccagcacagcgctgtaaccttggacttcacgccttgccaaaaatttttcacatcatagttgttctttatggagagtgtattccatacacggatcatgccatccccaacacctatggccaaagagcctatgtccacagaagagaaagccaggctgtatgcaaacccaccaagggaaggaagggtccagctgcactccaaggtggctatgtcccaacattttacatctctatccattgatgtagaaagtaacagctgtttgtcatcctctgtttgtaaaggacataaattaaacacaattcttgaatgattttgcccttctgatgaggcactgaagagggtgtatttccgtctccaagattgagtgagatcccattgcaacagttcacctccaaaacagctagataccagctgtgttggttgattgctgggccaatggagtgtcaaccaaaggcgctctttaacagttgggtctataccccctcctcttctcttcagaaagggcaatttcaaaatcatcacccctcggcctctagaacagctccagattcgaatggtttgatctttgcttccagtggctaagtagcaacaatttgttactggagcttgtgctacagcattcccgttgg

SEQ ID NO: 74725 - DNA, 4079 bp, Homo sapiens; identical to SEQ ID NO: 61450

SEQ ID NO: 74726 - DNA, 2276 bp, Homo sapiens; identical to SEQ ID NO: 61451

SEQ ID NO: 74727 - DNA, 795 bp, Homo sapiens; identical to SEQ ID NO: 61452

SEQ ID NO: 74728 - DNA, 4570 bp, Homo sapiens; identical to SEQ ID NO: 61453
  misc_feature (1)...(4570): n = a,t,c or g

SEQ ID NO: 74729 - DNA, 1949 bp, Homo sapiens
ttttttttttttaaaaacttttaacaatttattagtcttattttccagtaaaatattcacagagatgtcaaaagaatgagatggtgagcgatatagccaactacctttaattaattccacataaatagttaagatctaaaaacctcagatgagcagaccgagtcgaaatgtgattcttcaaagcaagtattgctttaccctgtgtcctggaatgcagtccgtcgatatgaccactaacttgcatgtgaccaaatgtttggagagtgttttttaggatatggctctcgggtgaggccggtcatcccgtcaatccaaggaaggaaggatgttgttggaactgcggttggcaccaaggtttcttggacctctttcattttacttccaatcagggtttggcattttttttggatttcaaaattaacataggggctcccggccggatcagacttcctttccaacaaccccagtaatcactcaaggcccttcaacaatgatctccctcatcttccacccactctggggtaaaggtcactgttggatggtcaccgaggaatcttcatttaaatccgggtgcacggaagtgagcggacacgctggggcgttttcctcatgtgaactgtgctcttctcggcgagattcatgtggttgaagtagataaacttaaactggggttcctttcctcagaccccggaacatcccccttgttgatgttaaaactgttccacaagatgtccagaggcccagccactgtgaagctggggccccaacgatgctgtcccagtccttcggcaaaaaacccaacgttgggtggacagaggcgtcgatcataaagcacacagccgcactcatggccttataaacggattaaatggagctcttcataagtgtcatctgtatttacaaaaattttggggaatctgcattttgcatctggatcattgaggttcaagggtccggtaagaaatcttccatagtgttgaagatttcctggcatttctgctcttattggagaatcccttcctgctaactcaggttcggatgtgccttgggaaaagggaggtggtaaggtatttgtataaaattctcatgtcatcttgttctaatccactccagatgagctgatcgttatagagaaaagcagtgtatttgactatattcaggctttcctccattcgtattaataaaggactggattttcaaataagtcattttatccaacgggaagaagctgattccaccaaaaatgtcaagtaggtcacatgactgcaaatgtagcgtttgcaaataccgatggaagaatttctctaatctttctttcagaagcttgacgcctccgtcttccatggctttcaggaaatgtaccattaaaaagcttgtacatgctgtagcactgccgcagcaccgagctataaaccttgtccaacaactcctcctcttggatattcaataactggttttccatctttactctgtttttcaattataggacaccgaacaaccatgaccatccaagaaattttcttctggttcaattgaagaactgtctgttcttctgtgtatgtaaagattttgcaggttttgatgggctaaatgtccttgtaaactgtacaatagcttcacacaatccgacatttctaatcttctcattcttttctacctcatttggatgataaaataaaatcttattttcctcctgtccttcgcgcggcccgaagcgcgggttgtagatgaagaaactcagcagcgccggcgggaactgcttctcctgggccgcccagggcccgctcccggccccggccgtcgctgcgctgcagccatcctggcccggcccccacctcaggaagcctcccacggcccgcccagagaccgagaaaatctcttaatttcagtggaactcagtttgtttctctttttaaacattgccagttataaatgtattttattttaaa

SEQ ID NO: 74730 - DNA, 947 bp, Homo sapiens; identical to SEQ ID NO: 61455

SEQ ID NO: 74731 - DNA, 1749 bp, Homo sapiens
caatttctgaatagcaactggaatattcaaccaacaatggtcatggtcagttttgtattttttccttaacttatatacttcattctttccaactattttaaagctaaatcttttttaaaaaagttttaaaaataagtcacaggcaaatcatgaagagttgggtttatttcaacagtaaatctgaaactcttgccttaagcaagagtactacagtaattatatcaggaatagacaatttcctacactgtcaaatatataaaagttccttttgcactttcttcaacactgatcaacaagcagattcagtccacatttgctttgatctaactactgagttaacccaagcttcttcttcagagactctggcatctcgggtggaggagggcgaggaagtctgaagtagaccttcacggagtcatagataaaccactgtagtgcagtcagggtaccaatcatgatgatacgggcaaacagtcccttccatacacctttaaatccaagtctcttgaggaccagagaagcactgctacctttttctttattcaacacagataccacagaatcagcagggtgagaaacaattgcacaaaagactccagctatgtaacctgctacaaatgttacaaccagctgctctggctttgaacattcactgcggggcttaggaaccacaaacttgtacagtgcttcaacagtacgttcaaagcaggcgaacttcatcatggtgtatggtatctgtctcatccagagaggagcaacccccttgtagaatgcttttaggccttcttccttatacattttgggagctgcatccctcaaagtgttggcataacctggctgggtttgaattcgaaccttagcagcttccataggagccagggcaatgtcagcaaagaattcagcactggcagaggcagccaaatatagtgatgtgcgccagagataagtattctcctctccaagcatattgcctatacaagcctttaaagacttcataaaagccaaacttgcagagtccctgcatggagtagccaaggaaagtcggagcccatcctttagccaaaccacgaacaccatcctctttaagtgtaactgagaatccgttaaatatgcccttgtacttttgggggtccacctgcatacggcatttcactaaatccaggggaaccacagcagtgtgtgtcagaccacaacttaagaccccaccaaagccacacagtgcataatacttcgcggagccaaattcacaactgtactctgtagtaagagaagacacaccatgcattttaatataaaactcatgttactggtcataaacttacctcctggacagttaggtttccacacagcttgttagatgactatatcttataacttaacagtcagtcatgcttcaatatgctctagtccagcatgcaaaacaaacctgcattctgcatttaaccagatctagaggaaccaatgctgtatgtgttgtgccacagctaataattcctccaagtccacaaaggataaagaatctgccagatccatagtcacagctatactgctcttccacggcggcggctgccaggttgcgagggcggcggggctggcccgtgggccctggggagctgctgcggaggtccccgagaccatcgtgcaccagctgcagatgtggcgtgttgaaggggttcgcccgcgccaggtgcgccacggacgagaacatcttttccctaagatggcgatcacacaaccactcccttggaa

SEQ ID NO: 74732 - DNA, 1600 bp, Homo sapiens
tttcgtgtccgtggcggctgcacgagcagttcctgtgggcagtgggctcaggggcctgcaacggaccctacctcttgtagtgattctcggggccacgggcaccggcaaatccacgctggcgttgcagctaggccagcggctcggcggtgagatcgtcagcgctgactccatgcaggtctatgaaggcctagacatcatcaccaacaaggtttctgcccaagagcagagaatctgccggcaccacatgatcagctttgtggatcctcttgtgaccaattacacagtggtggacttcagaaatagagcaactgctctgattgaagatatatttgcccgagacaaaattcctattgttgtgggaggaaccaattattacattgaatctctgctctggaaagttcttgtcaataccaagccccaggagatgggcactgagaaagtgattgaccgaaaagtggagcttgaaaaggaggatggtcttgtacttcacaaacgcctaagccaggtggacccagaaatggctgccaagctgcatccacatgacaaacgcaaagtggccaggagcttgcaagtttttgaagaaacaggaatctctcatagtgaatttctccatcgtcaacatacggaagaaggtggtggtccccttggaggtcctctgaagttctctaacccttgcatcctttggcttcatgctgaccagttctagatgagcgcttggataagagggtggatgacatgcttgctgctgggctcttggaggaactaagagattttcacagacgctataatcagaagaatgtttcggaaaatagccaggactatcaacatggtatcttccaatcaattggcttcaaggaatttcacgagtacctgatcactgagggaaaatgcacactggagactagtaaccagcttctaaagaaaggtattgaggctctgaaacaagtaactaagagatatgcccggaaacaaaaccgatgggttaaaaaccgttttttgagcagacctggtcccattgtcccccctgtctatggcttagaggtatctgatgtctcgaagtgggaagagtctgttcttgaacctgctcttgaaatcgtgcaaagtttcatccagggccacaagcctacagccactccaataaagatgccatacaatgaagctgagaacaagagaagttatcacctgtgtgacctctgtgatcgaatcatcattggggatcgcgaatgggcagcgcacataaaatccaaatcccacttgaaccaactgaagaaaagaagaagattggactcagatgctgtcaacaccatagaaagtcagagtgtttccccagaccataacaaagaacctaaagagaagggatccccagggcagaatgatcaagagctgaaatgcagcgtttaagagacatgtccagtggcctttggaaaggtggtggggatccagttcaggagggaggggtatgtttgtctcccagtctgggcaaaggagtgctatgcggaattctctgcatagcagaaaagctcccaccattttcttttgatgtggttttaaagtctcacgttctctataatagaaacagcaggtcttgtcagctccttgt

SEQ ID NO: 74733 - DNA, 4405 bp, Homo sapiens
  misc_feature (1)...(4405): n = a,t,c or g
cgggcatggtggtgtttgcctgtggtcccagctacttgggaggctgaagcaggacgatcgggtgagctgaggcagtcgaggctgcagtcctcgagtgggctcaggagaagcgtaagctgagcgtgttgcatattcacggagtctacaccaaccctagtggcattgtccttcatccggctggatatcagaacgtgctcaggaacactgaagtcatgagagaaattcagaaactctacgaaaacaagtcatttcttttcctgggctgtggctggactgtggatgacaccactttccaggcccttttcttggaggctgtcaagcataaatctgacctagaacatttcatgctggttcggagaggagacgtagatgagttcaaaaagcttcgagaaaacatgctggacaaggggattaaagtcatctcctatggagatgactatgccgatcttccagaatatttcaagcgactgacatgtgagatctccacaaggggtacatcagcagggatggtgagagaaggtcagctaaatggctcatctgcagcacacagtgaaataagaggctgtagtacatgagcgagctagagaaatcaccaccgtttagaccaagctgtaaggccctactacagacagtgtttaacaagtaaactttacaagaacccaacacaattccccagaaagtaacaatagccagaggttgaagggcggggtagaagaggggggaatgttgcaagcgtaatccttcataccaccctggttcttggatattctgccgcctgttcaagttcaagaataaaagcgaacagcaggaccccaaatgcagctccccaaccccactcccccaggcctagacatgccttgtgtcccacacagcacacccaatgtgatacttcccactgacccggctgcagctctgcatgaaggactcggggtcctggatgcccatgggaatcactgtgggctcttgttgcagttttgtacttctattacttggttttttcaattaagcttaatggcttttttaaaaacatgacttgaagctctagttttctaggaccttttacagtgttacagtatttttacataactaagcctgtatttaaaagcttgtttcatttacgttgccaggaccctggctctacttttagagctcattgtaagaaactctaacttgcatcaaggtactaataagcttaattttaataacccaaagtttaaaggttccgatctttctccttggggtggagtgatctcattctcaggacaaccgtttacttacctgattcctcggagcattatcaacttctgctctgttgtcctgaccatacatatgtcctagaactacagttaagtgtgttgtggaattttagttttgaatcctgtataagagaactccaagacctaaaaggcaatttatttatgaaatttattttcttatataaattacttatttctctgggcagacagccttcaccttattgcactaatagcacatctgtaatatcaagctacaggacaagtcttaacaagaggtttgtgttcttcaatgtagcacttgtctaccaggcactgtagaggggagtgatgaggaaaagccaggactgcttaggaggtgaaggatgggaggggagggggtcatcatacatccttctgacaattggtttcctcccaggaaggggaacatgcagagcttacttctggattctgggagtgggaagagttgggaggccaagaagcccaatgcaacgctgcagctgagctccttttatttctgagggaagcaaggactcatcttttgctcatttgtaacaaatcactccagcctagctgatgctttggggtaaacaatggagtaggagtcatcatcagaattagaattagcagcaattaacaggcaatacactgccacagtgaggcgggtgtcatccaggtcctggggacctgcaggctgtgtatcctagggagaggtgccattcaagacctggcgctggctctggaagagtctcttaacctaatgcagctgggactcattaggctcagacggctcttgaccacactaattattagcaaagctctggtgttgggttccaaccattggtcaaagctgtaataagactgagtctgtaggcagagtgaagggggtgcctgagtaggaagggggaggcccgctgggagagggtcagtgggcagtgattgtaacatgattaggccttccttgcagatggcggctgtgctgaacggggagtggggttggaaggagccacaagccccctcactctgcctttgtactacactgaagacaggttgctcacatactctaaagcacattcttgatacaggaagaagggcttgtggggaaagcggcgatttggtattgggcaagagccacgttaagccttcatgagggcagccaccacagccttggcattgaggctgcgtaggtcacagtaggtctggccggtgcccacaaagacgatgggtttgcttgtgatgtacgtcatagaaatagcagctcccaccttgtcatcaatggaatcaaatttggtaagaacaatgccatcaatgagccgaggtgtctgagccatagaatggtcagccaaggctctgttgaacttgaccagctggtccacggcttcattgcctactaaggcttctcctacaaacagcaccaaatcaggtgtattgacagtaatgagtttggccagggcagtcatcagaggggcattgtcttgcatgcggcctgccgtgtccaccagcaccacgtcaaagccttggttacgtgcaaaagcaatggcttccatggcaatgccagcagcatccttgccatagcccttttcaaacaactgcaccatggtgcggccaccatgcttctctggagggtgtagggcactcaaacgccgggtgtgtgtacgcagctgctccacggccccagcacgaaatgtatcacaggcagcaatgaggacactgaagccattctctaacaaccagaaggaaatcttggcaagattagtagatttccccactccattaacgccgcagaaggtgacgacataagggcgcttggcgacgctgggcatccatgatgtcccggagcatgtctacacggacgctgtggctgcacgaatctgcaccagggactcctgtagggcttgctttactgtggaagtcaccgtgctgaacgtccccatcaccttcccttccaacttgttggcaacagattcacagagctggacggcaatgtctgcagccacgttcttagcaatgagatgatcacgcatcttgtccagcacagattccatgtcttcacgactcaagctctttgaacccacaaggcccttcagcataccaaacatgccacccagtgttcccttggtcgcactaggtttggtagagttttgagcagccccttcgtcatcagagctgctgcagtccagatcctgaagctgccccccagacccagtccctcgaatcaggttgatgtcctcagacaaggcagcctcaggggttccattggtggtgggagtactggaatccaacacttctttgttagcacagccacccagttcccacacccggggtgcttttttgcccttctcctttggagcatctgacttcgtggacttgttggacttctccatacccctcccatgcttctgaatgaactcctcgcgcttcctgcggatcagctcctctttggaaagttctacctcgttctcaggacccactggaagacctgacttttctgcagggactggtttgctggtagccaaaggaccatcagaaccttccttcttggcccccttttttttgctattctttgctttttccttgggcttttccccccgtgtctcaatcatggacctcacaggtttcttggccttttcagaatcttcaaatttcttcatggtagtgggagcacggatcttactgctctcctctgcttcacgaaggagccgcaggaagtcattttggaaatcaaaagtgcccatttaataaactttaaagccactttgctgttggatctctgtgcggtacttgtcccgaaacagccgatgcacgtcatctatcaatttgtctacatatgtcagtgtcaggatcttctgaaaaccaaccacaaacaccagctcaaactggttgtccagtttatacttgagtgtgagtgcctcatgggtgaaagaaggttgttacctcnccccgttcctgcagcagcacggaacgaatcaacgcgttaacgggtccggtgcatgagtcgctaacgccctggaagcaccagagcacaagcccgcccttggagaaaatggtgaagaaagtcgagcatggcggcagcggcagaggagctggggccggcgccgggaattcaggccgcgttcgccgccgcttcctgctgcgccaagcgcgggacacgt

SEQ ID NO: 74734 - DNA, 7027 bp, Homo sapiens; identical to SEQ ID NO: 61459

SEQ ID NO: 74735 - DNA, 3844 bp, Homo sapiens; identical to SEQ ID NO: 61460
  misc_feature (1)...(3844): n = a,t,c or g

SEQ ID NO: 74736 - DNA, 390 bp, Homo sapiens; identical to SEQ ID NO: 61461

SEQ ID NO: 74737 - DNA, 2152 bp, Homo sapiens
  misc_feature (1)...(2152): n = a,t,c or g
ttttttttttttgcagcagcagtttcacatttattgagggcctgccccagaggagctcacagcctgggggctgaggaccccgaattgtgcagggggcggggaagaaaagaggtgaaggcaaaaaggcaggcaatgcagagacaccgtggcccaagcagagggggtgcaaggcaggcacagagcagggggcctgatggcggattggggaggtggagaaccggtcagccctgcctagaccttgggactggtgacacccacaactttgaagggctgccctcccccaccaggaatggcacttgcccggggcacccttgtggggagggcccagctcctccacctgccctgagccgggtccagctttcacaaaggcccctccacccaggacttcccaaccatgcagactcccggtggagggcaggaagctggggtctggggcccagccgggacgtggaggtggggcctatgagggagcagatgaagttgttggtggccctgggaccctgggcaagtccctaaggaacttccaggatcccatagaagcccctgagccagctaagaagggaaggaagcagaacccaacgaagcaggacggcgctccaacgaggcctggcccctcaaacctgctcctgtcggggaagctcaggagcagataggcgaaaagcagggggacccacctggggggagggggcagcagacagagcagccaggcgggcagcagagcagggacacgcacacacggctcaccaccagcaccccctttaataaaacatggggggggggtcatgtgacaggaagaagggggtgaaataggaccattttacaaccacagaaaaacctctgtaacaatgtcctaacgccctggcaagaagggggcaaccagggcaaccaagcgggctggaacccagccctattttgtagaggatatcgtagtgtcccaggccggtagagaaggtagacctttgggctcggaagccctcagggaaagatgtgcggattggtggttgccgccctcgnccgcggtcccatgtactcccaccctggatggacacgctgaaggccctgggccagcgcaatgatgtggatgtggtcgctctccttgcacatgggctccaccttcctgcttggcagaactccttgacagtccgtccaccctcgatgaagtgctcgaagaacttgctctcgcgctgcaggtagcccgaggtgagcagccgcaggtagaccacaaggtagtcggaggtgctctggtcattgaaggaggccagcaggtcggcgacagaggtctgcttctccacctgctcaatcaggtccatgaacgtgttgtggaaatcctcaattgtgaattcagtgaagccctgggacaccaggtcttccttgctcttggcagacacagccttgaacctgggggtgggatggaaaggcgggcccagcatgggctcctcgaccagcccagacgccagggccgagacagcactgccccgcctggcaaggccagagtccagcccatcgcccgggaaggagggagacaccctactcgagacacatcctactcgcccggggaggaggtagacacccacctgcctcggtgcccagtgcccacccttctcaccgctgcaactccttgctgtcatccagcagtgcctccaagtgggagaatccgaaagcccgatagaaacagttgccgtcaggcctggtcttgcggatgtacgagtactttttgtggaggtccttgatcttctgttgatagatgttgtcatcttcagcatactccttgtataggaccgagagctccagccgctctgacaccagagggttctgcacagcaatctcttgctgaattcggtcctgctgagccatgatggcttcatcataggccagacagttaacaccagaaaaagtcgcaggcctcagggacagatcccgcaggcccctcacatcccagggccgcctacgacatcccgaatggcccgcccggacctttgtgctccgtagcccagcgaaactcgaggccctcacggcgcgggccgccgctggagcaggccggggggctcggccctggcgtaggcctctctgcctgactgcaaggacaggggcgagagggctcggggcccctggagccaggagccgaggggttgggcagagggcggagacgaaa

SEQ ID NO: 74738 - DNA, 2044 bp, Homo sapiens
  misc_feature (1)...(2044): n = a,t,c or g
ttttttttttttaaacttttataaccttaaagggttattttaaaataatctatggactaccattttgccctcattagcttcagcatggtgtgacttctctaataatatgcttagattaagcaaggaaaagatgcaaaaccacttcggggttaatcagtgaaatatttttcccttcgttgcataccagatacccccggtgttgcacgactatttttattctgctaatttatggacaagtgttaaacaggaacaaggaattattccaacaagttatggcaacatgttgcttattttcaaagtacagtttaatgtctaggtgccagcctttgatatagctatttttgtaagaacatcctcctggactttgggttagttaaatctaaacttatttaaggattaagtaggataacgtgcattgattttgctaaaagaatcaaggtaataattacttaagctgattcctgagggtgggtatgacttccaagctggaactccatccttgatcgggtagggattttttaaatcccatttttggtaaaactatttcccaaggaaattttaaggccctttcacttcaggaaagaaaaaaggttgttggggggctgaggcactttaattttcttgagcagggaagggagtttcttcccaaacttcacccatctggggatactgggtgtttcttttacaggattcctcctttaatttctgttgagtagccgggatccttgggaggcatgtaggaagcccgctggatcatcacgggatacttgaaatgctcatgcaggtggtcaacatactcacacaccctattttcaaggcttgcagaaactgatatgtagtcaaatataatcaggtgctgcaccagttcacagaggccaactccaccagcatgggggcaaacaggaatttcaaactttttggccatcagcaatactgagaggttctcattgacactgcccagtctgcaactgtcaatctggaggaactgcagggccttcgcctgtaggagttgcttaaatatcactctattgtggcaactgttctccctggtgcaaatgcccaattccctaaatgggaccagtgccttggaaaatggtggcgtgccccaaaaatgtcaatcaaggggaggttggctcctcaatccacaatggcttgaacttggccagcttggacatccactccaccgcctcaggcacatcccagcgctggttggcatccatcatcaaagtcttttccggtccaatcatgtctcggatgatttggcatcttcgcatgtcatcctggagatcagcacccacctttactttaaacctggtccagccatccttcagcgcctgggcacagagctgcttcaacgtgtcatctgagtaccccagccaggcgcacgatgtcgtgtaagcagggtatccttgtgccagcatttgcttctctctttcttttttaccaatttgacctttctgcagtatttctagggcatcctcctcagtcaggacatcagtgatgtacctgaaatctatgcaggataccagcatcctgggatccatgtccacaagtaacttccagacaggctttccctcctgcttggcccacaagtcccacaccgcgtttaggacggccgctgtcgccaggtgcaccacgcccttttctggaccaatccatctgagctgcccatcacttgtgagctgcctatagaagcctctgaagtcaccaacaatgtccttgaggtccttgttgagcacatggtgggcgagggcattcacagcacagacaacaacttcagtgccttttcccagagtgaaggtaattccacaccccttgattccatcttctgcatcagtttctatgacgacataggcagccgagtagtcagggtccgtgtgcatggcgtccgcgccgtggcccccaagcgacgtggggaagcgcacgtcccggaccgagagccgggagatcctgccgcgcaccatggcccctgcgccccgtggccgcggcccccgtgcggtcaggactggtggaattacnccgcactggactagtgttcatcgag

SEQ ID NO: 74739 - DNA, 5154 bp, Homo sapiens
gtgtcatggcgctctccatctaaagtctgtgcagcttccggagagtggcgggttgattttctcactttggactggtttttacttcccgacttctggactcatctttcaagaggactttagactaattgcagataattaagagaatatgccttctgcatcctgtgatacactactggatgacatcgaagatatcgtgtctcaggaagcacagacaaggttgtgtttgacagagaaaggggctttcttggtgagataaaatagtctcttcctgtatttctctcctttctccttttttagttgctctgggaaaggaattctctctggtcatgcagatggtaccatcgttaggtatttctttgatgatgaaggctctggagagtcacaggagaagttggttaaccacccgtgtccaccctatgccttggcatgggcaaccaatagcatcgtggctgcaggctgtgatcggaaaattgtagcctatggaaaagaaggtcacatgctacaaacttttgattatagccgtgaccctcaggagcgggagttcaccacagctgtatcaagtcctgggggccagtctgttgtgctaggaagttatgacaggcttcgggtgttcaactggatccctcgaagaagcatctgggaagaggcaaagcccaaggagattaccaatttatacaccatcactgccttggcctggaagcgggatggctcacggctctgtgtgggcacactatgtggtggggtggaacagtttgactgctgcctccgaaggagtatttacaagaacaagtttgagttgacgtatgtgggacctagccaggtgattgtgaagaacctgtcatcaggaacccgagtggtgctcaagtcacactatggctatgaggtggaagaggtgaaaatcctaggaaaggaacgttacttggtggctcacacatcagaaacactgctgctgggggacctgaacactaatcggcttagtgagatagcctggcaaggatctggtggcaatgagaagtatttctttgaaaatgagaatgtatgcatgatcttcaatgccggagagctaaccctggtggaatatgggaataatgacaccctgggttctgtacgcactgaattcatgaacccccacctcatcagtgttcgtattaatgagaggtgtcagcgaggaacagaagataataagaaattggcttatcttattgatattaagactattgctatagtggatctgattggtggctacaacattggcaccgtcagccatgagagccgtgtggattggctggaacttaatgagactggacacaagctcctcttcagggaccggaaacttcgtttgcatctgtatgatattgaaagctgctctaagacaatgatcctcaacttctgctcctatatgcagtgggtcccaggaagtgacgtgctggtagctcagaaccgaaacagtctgtgtgtatggtacaacattgaggcacctgagagagtcaccatgttcactattaggggtgatgttataggtctggagcggggcgggggaaagaccgaggtgatggtgatggaaggtgtgactactgttgcctacacattggatgagggcctcatcgagtttggaacagccattgatgatggcaactacatccgggcaacagccttcttagagactctggaaatgaccccagaaacagaggcaatgtggaaaaccttgagtaaactggcactagaggcaaggcaactacacattgcggagaggtgcttttctgctttgggccaagtagcaaaagctcgattcctgcatgagaccaatgagattgcagatcaagtatcccgggaatatggcggagaaggaacagacttttatcaggtccgagcacgtctagccatgctggaaaagaactacaaactggctgaaatgatctttttggaacagaatgctgtggaggaggccatgggcatgtaccaggagctacaccgttgggatgagtgtatcgctgtggctgaagccaaggggcacccagccctggagaagctacgtcgtagttactaccagtggctgatggacacacagcaagaggagcgagcaggtgaactacaggagagccaaggggatgggctagcagccatcagcctctacctcaaagctgggctccctgccaaagctgctcggctggtgctgacccgagaggaactgctagccaacacagagctggtagaacacatcactgcagcccttatcaagggggaactctacgaaagggcaggtgatctctttgagaagattcacaatccacagaaggccctggagtgctaccgtaaaggcaacgcattcatgaaagcggtagagctggctcgattggccttcccagtggaggtggtgaaactagaggaggcatggggggaccacctggtgcagcagaagcagcttgatgcagccattaatcactacatcgaagccaggtgctccattaaggcaattgaggccgccctgggtgcccgccagtggaagaaggcaatttatatattagatctacaggaccggaacactgcatccaaatactatcctctcgtggcccaacactatgcatccctgcaggagtatgagattgctgaggagctctatactaagggagatcggacaaaagatgccatagacatgtacacccaggctggtcgttgggaacaagcccacaagctggcgatgaaatgcatgagaccagaagatgtgtcagtgctatacatcactcaggcccaggaaatggagaagcagggcaagtaccgtgaggctgaaaggctatatgtgacagtacaagagcctgatcttgccatcaccatgtacaaaaagcacaagttgtatgatgacatgatccgcctggtagggaagcaccatccagatctcctcagtgatacacacctacatctgggcaaggagctggaggctgaaggccgactacaggaggctgagtaccactacctcgaggcccaggaatggaaggcaacagtgaacatgtaccgggccagtgggctttgggaagaggcctacagggtggccagaactcaaggaggggctaatgcccacaaacacgtggcctatctgtgggcaaagagcctgggaggagaggctgcagttagactgcttaataagctgggactcctggaagctgctgttgaccacgctgcagacaattgctcctttgaatttgcgtttgaactctctcggctggccctcaagcacaaaacccccgaggttcatctcaaatatgctatgttcctggaggatgagggtaaattcgaagaggctgaggctgaattcatcagagctggtaaacccaaggaggcagtcctcatgtttgtccataaccaggattgggaggcagctcagcgtgtggctgaggctcacgaccctgacagtgtcgccgaggtgcttgtgggacaggcccggggggccttggaggagaaggactttcagaaagcagaagggctgctgctccgggcccagagaccaggcctggccctcaattattataaggaggctggattatggagtgacgctctgcgcatctgcaaggactatgtgcccagccagctggaggctctgcaggaagaatatgagcgggaagctactaagaagggggccaggggtgtggagggatttgtggaacaagctcgacactgggagcaggctggagagtacagccgtgccgtggactgctacctcaaagtgcgagactctggaaacagcggcctggcggagaagtgctggatgaaggcagctgaactctccatcaagtttctgcctccccaacgtaatatggaagtcgttctggctgtaggaccccagctgattggaattggaaagcacagtgcagctgcagagctctatctgaatctggaccttgtcaaggaagcaatcgatgctttcatcgagggtgaggagtggaacaaggcgaagcgtgtagctaaggagttagatcccaggtatgaagactatgtggagcagcattataaagagttcctcaagaatcagggcaaagtggactcgctggtgggtgtggatgtgatagctgctttggccctgtatgtggagcagggccagtggggacaagtgcatttgaaacagctaccaagcagaactacaagattctgcacaagtatgtggctttgtatgcaactcacttgatccgggagggtagctctgcccaggcattggccctgtatgtacagcacggagcccctgctaacccacagaacttcaatatctacaaaaggatcttcactgacatggtgagctctcctggaaccaactgtgccgaggcctatcatagctgggctgatcttcgagatgtcctcttcaacctggctgtgctgtctccctcctctagtgtgaaaacctggtgaagtccagtgaggcaaactctccagcccatgaggagttcaagacgatgctgctgatcgctcattactatgccacgcgctctgcagcccagagtgtcaaacagctggaaaccgtggctgccaggctttctgtttcactcttgcgtcacacccagctactacctgtagacaaagccttctatgaagcaggcattgctgccaaggcagttggctgggataacatggcattcatcttcctcaatcgctttttggacctgaccgatgcaatcgaggaagggactctagatggccttgaccactctgattttcaggatacagacattccctttgaggtgccactcccagctaagcagcatgtaccggaggctgagagagaagaggttcgagactgggtgcttacagtctccatggaccagcggctggagcaggttctgcctcgggatgacgcgtggcgcctacgaggcctccctagtggcagcgagcactggtgttcgagccctgccctgccttattacaggataccccattctgaggaacaaaattgaatttaagcggccagggaaggctgctaacaaggacaactggaataaattccttatggccatcaagacctcccacagcccagtgtgccaggacgtgctgaaattcatcagtcagtggtgtggagggctccccagcaccagcttttcctttcagtagttggtagagctgaggaagagttagggcctctccctcattaaagttttataaataaaaaaaaaa

SEQ ID NO: 74740 - DNA, 1690 bp, Homo sapiens; identical to SEQ ID NO: 61463
  misc_feature (1)...(1690): n = a,t,c or g

SEQ ID NO: 74741 - DNA, 2203 bp, Homo sapiens; identical to SEQ ID NO: 61464

SEQ ID NO: 74742 - DNA, 1100 bp, Homo sapiens; identical to SEQ ID NO: 61465

SEQ ID NO: 74743 - DNA, 1636 bp, Homo sapiens; identical to SEQ ID NO: 61466

SEQ ID NO: 74744 - DNA, 5221 bp, Homo sapiens; identical to SEQ ID NO: 61467

SEQ ID NO: 74745 - DNA, 5553 bp, Homo sapiens; identical to SEQ ID NO: 61468

SEQ ID NO: 74746 - DNA, 1669 bp, Homo sapiens; identical to SEQ ID NO: 61469

SEQ ID NO: 74747 - DNA, 1833 bp, Homo sapiens; identical to SEQ ID NO: 61470

SEQ ID NO: 74748 - DNA, 855 bp, Homo sapiens; identical to SEQ ID NO: 61471

SEQ ID NO: 74749 - DNA, 5663 bp, Homo sapiens
  misc_feature (1)...(5663): n = a,t,c or g
ttttttttttttgatgaaatagataattcaggttgtcatttataattttagagtttgcttcacatatacaatgctgtgttacgaaacaatgaacacttttataaaaaatttatttcacacttttatacaaatatccacaggtaatttctaatcatgaaataattttacaatgctagttagtacaaaaatgtatcaaatgcaaacagaccagtgacttgacttgagatgacatttttaacaaccataaatctaaacaccataacatctttgtttctttgttgaaccaccctcccaacacccttttcaggacattcatcttttttttagtaacacaggtctaaaaacactgtcaaagtatcagctccttagcaatctagcaatctaaacacattagggacacaagttccccaagcaagaaactgagactttaaacactgttataacctgttttacagaaatttttgtaaacaaaatatattttgtgactaagaattccaaagtacaaccaaaacaacgtccttagtattttaaggtttaagatttccgaaaagaaaaaagcccccccaaaacaacagtggccctacaaactgtgttttattctttcaaaacacagacactgcttatactatatccaaaacaaattagcacctgtttgctgttgctccccatataacttaacattgtgaagcatggtaattaaaaaaaatcagctttcatatctattcagtctctgttgaatgtatagagtaatcattccaccccctgccatttttacaattaaaacacaatttaaagttcttgttaaattagccccaaagtaatttttgggaatacagataggggaggaaacaaaacaaaaaatagaacatcgactcactgattaactgttttggtagcagattcagtagtcttatactggatcagtttggatccaccataggcattcaccatttctttcaagtcctgaatatacagtatttgcagcagtgagtaaaccgcactagagttcagtgaataaacccattttctccaagaattcctgaatgttacagtatgaaatccagaaacattatgcaggcttctaaagtaaaaaatatccaatgcctgaaataaacatctttacagttataattctatttcttaaaccttttgggttgtggggtggaggctgtcatgaaggagaggttatagtttatagataagttattaaaacaactctctctggtacatttataaagattttctttttgcagtaaataatttaggtcaaagtgatgacctcccatgctctaattctaattctgattgattaaacccaacctgaagggtaaactggagactctttggcctgttagtcaataacaaaatggtttgtaaagaaaagaaaaaataaataccatatacaaataagtataactagcattcaagtctgttgcacctgtgtgtttttagtgaaagggagaatgaaacttgtatgcatttgacgtgagcaggtattcacacagctaggaaacaggaaaagacggtaggatggcaacatcaccttctattgcaacatttagtttaaaagacagccactttccgttgaaaacacaactaccccaaatggcatagtcttgtgatgtgggacagctaacgtgatggacgtctgcgcagcaggcccgaggttaggacggccactctgttagtgcaggtgagtgtaggtgcctcctcagctacactatctggaggatgtcacctgagtgcaactgggcaggcccttccccaacacatgatgtaagtcagccacgccaaaaacaaaggcaacccagaaagttaaattacggcagttaaagaaaaatccattccaacagttttaaatttggctgtgcaaaacaggagccttaggctacgtaacaatatccacagttaaaactgtaggttcgtactgtgtgtagtcactctgaaatcagtcctcagggattgagcaggcttttaaatccaaattgaatttctgagttggaaaaagcagtttgggtactgtgaagcttttttttttttaggcccccgctatgagtagctttcattttcgttccactttgtgatccactgttttttttcaaggttatcaatatacttttaatttttgatctctcgctcttctttccggatccttacagcatggtatcggggaacactgtcatcgtacctagagcgtttaaagaatccacacaattacagaagtagatcaatactatgcatcagaagtaagcctctctttatcagatggctgagcatggatctcagccttgtgatatgtggcatcataatgatctttcttatttctcttgaagaaaccacacttccatagtataaacactaataaagcaagcatcaagatcccagcgagaatagccactaggatgatccaccaaggtactcccgaatactgagctacagtctttgagggaaacacagtcactcgaacctgagtgcctgcatttggcagcctgatattttcggcagcagcagtcacatcaatgaaggctcgcatgagaatgtccaagtagttcagtttggaatattcctctagaaatgtgctgttccataacctcgagcgcaaaataagagacgccttgctgtccagcccccgcagcgggcatctgatgttcacacagttcacgttcacgctacagttaagagtctggtattttctttcagcaaataaagaaaattttctgttatcatctatctgtttttcagtaatttcccgtttctttcttgagttgtgagactccgttaggttcagggagtttatctccttttgtggctcacaagttaccttttccaatcctttggattctactttcaccaaaataaagcaaccaatttccaattgctaatttcttttggccactgaatgttcaaggttgctgtgccgaggtttgtaagaggtttacctaagtttattaccctgaattcatactctattaaacttcccacttcatcttcagatttcatagcttgctcgccaacaactgtacctccaaaatacacctgggaaggtttagcaactcccgagaccgataaaagcagttcaataaccacttttgctttagctgtaattggagccaaattatcttgattgcttgttgtttctaacttcagattaatatccagatctggggtgtcaaaggtgacttcagttgtacttaaaaccaaataaaaagtgacatttgaatttcttttaaaaggatttccgagctcacagtcagcttgcgagccattctggttggcaacacaactcaactgtttctcagggaaagccctcagttctctatatgcagaataggttaaagtgtctggaaacgttgcaatcagtttagcctcatgggcatcatcgccatcttttgtgggattccttgggttggaagggctgtttgtcactgttatttctaaagcaatatccttctgatcttttagaactagttctggtacacctttttgaattggtaaataagaaaatttgtcttgatttccttctcggggtgcaaaaatttatattctagtttaagggttgctgttacatacaatntgtcgtctcccacatcccttcttttaagaagtgaacatcaatatgagctgtcttgggttcatctgaattcagaattggaagaacttctggaagtgaattcactcgcctacgagagcttggctcttggatctccactgagggcagttatgggaatgggacgcagtttatctctgatattatcctgtagccacagggtttcctccatgcacactttctgtttctgcctcttcagagttagttcttgagtatatttgggctcagaaccttggtttcgaaactgaactcttgaggatagcccagattttcttctttctttttcagcttcaagtgtgcccacaattgatattgaaggattataaccagcggggttagcagtatattcaaaacaggatttaacctggaggcatatcccactaggcgccccacacgctgttttctggcggaggtcaattctgttaggagttactgtgatggttttctgaatattaatcacaggccgggatctgaaaatagttactgaatctgagagggaaccaacagcaacatcagggtaggaatttcgatcaaggtccatgtttccagcaattgaatatccaaaataaggtgatatacccttgagaacctgtgttggtttggtatttattccatttgcagatccatgatagataaaaacctttcccaagtcatcatacggagctccaactgcaatatctgggtagccatcttgattaatatctccaatattttttactgcaatgccaaacatagagtccttgggttccattaagagcgaattggcttcacattattccatctgccttgctggttcatgtagacatacactgcacctccaacttctccatctctatcaaaatactgtggggctccaataactatatcttgccacccatccttgttgaggtccaccaccgccacatcatagccaaatgaagaggccagaccttctccatcgaatatgtgctcagggaggagatgtgcagacttcatgtctctcttcagcaaaaccacggctccactgtgattggctctgggagcaccagatacaaaagtgatctcatctttagaaacaatacctttccctgagtccaaagaaaaacctaagtaactgttagcaggaacaggaacgagactttcatcatgctcagtctctccaccaacttcataaggcccatcttcaaagatgttcatgtcaaaaaaagtgttattcttttgctctacacgaacaatccctttccagttattaagtaccccggggcttccaaatacaatgttaatggaaagtctttaggtaaaagtaggctggctacaccttgctggggcaagggccaaatttctcatggcctctcaatcgcccatcacaaaagctccaatctcccccatccatatcgttcttcaatcctgagattctgactcaggacataacaccgccccaaagatgtctcgggaatccctgcttcgtattaacaatgctgccctttttttaaaatatcggttaaacaaaatgtaaacgaccttgccccccctgaaccttggcctctggaacggttgacccccccacccactgatcttcccttgcctttcctgacgtgggggttcagcatcgttatcaaactcgatccgccgtgcatggcccccgggcggtggatgtcgcagcttgtacagccctcccgttctgttgggctctctgcagtgggaagcgcttctgcccgcggggcccccacggagcaacagccgcttgtcctcgggctgcagtttgccagtgcatgggccagcgagaaagccgaagaggttccccggggtctccatattttccggatcacgttgtcctcccgagtgttccaagttgaaagctgacgcccgagccgggacaggagccccgccgacaggtagagcaagcacaggctgcccggcggcggccatgggcggacgcacggggaggggagccggggaccctgcagcggccgccctgcgctccgggctgggtccgaggctgccgcgctgctgctaccgcagccaccttcgcctcctctcgccgctgcgcccggccccacccccgggacggtcgcgc

SEQ ID NO: 74750 - DNA, 610 bp, Homo sapiens; identical to SEQ ID NO: 61474

SEQ ID NO: 74751 - DNA, 1107 bp, Homo sapiens
ttttttttttttgatggctacttataatttatttataaaacattttaccagtgagtgatgtctcaagtgagaggtggtaacagatacacaaagcagtttatagcatgcaatatttcaatgcctctgagaggtagaaacagcttgtgctctcagatggccctcagtccttccccttgtcatctttctgtcctagactgtgtcctaactgctcacaagggttcagcggcatgcaaacagtctttaattggttttcttcaaagagggcattgttgactgggaaagactgggcttgtatttaaactctggctctttttgcaaatgacagactttctcaacagtatttccagaggaaaattttggttccggaacagttaactggaatctgaccagattacagacagcaccaccccatattactccaatggctaagacacagcatctttgattttctgtatgtcataacattctgaagcttgagttaccgatggagccatttttgcaactacacatcctccttatagttcttgctttcctttcaagcagatcacagggcccagggcaagatgatttccttgaggagaagtagcctgagccttagaaatgcaatttgtataactgaccagcctggctttccccctcctttaggaatctgattcttcttcctcttcctcctcctcctcttccgtcacatgactctttgtgctcagctccagggttgtttggttgattgatgcttcattgtctacatgcaccaacatatcatgtgactgttcaggtacagtgtgagaagacagcatctcatcccctcttctagaactgatcattgattggagggctaattcttcaacctgtttgtttgtaaacctctaaattggcgccaccacagctagtgagtagcggagaactggccgcagcaggtggtcaccacagaggcccaggttggggggaaatggtcgctcgggaggaatggaggaggggcaggagagggccgcggggtcaccttgaggcggttcagctggtcgtgcagggctgccttcaaccgcagcagcgtctcctcctccttgcgcagttcctgaagccggctcagcatgttgcctggtcacatag

SEQ ID NO: 74752 - DNA, 3443 bp, Homo sapiens
gcacgagtaaggacagaaaagtgaaatgcagtatggtgaagaggataccctgaatatgtatgaagacatgctgttgtgagacggagttgtgaaacagaggccacagaagctgttgtgaaggcagagcagcatctgctgaagagacagaaaccagccccagaggtgtcacaggaaggcaccagcaaggacattggtctttgatttgattcagcagtcctgtcaagtataaatgtgatggctgtgctgcctggccctctgcagctgctgggagtgctgcttaccatttccctgagttccatcaggctcattcaggctggtgcctactatgggatcaagccgctgccacctcaaattcctcctcagatgccaccacaaattccacaataccagcccctgggtcagcaagtacctcacatgcctttggccaaagatggccttgccatgggcaaggagatgccccacttgcagtatggcaaagagtatccacacctaccccaatatatgaaggaaattcaaccggcgccaagaatgggcaaggaagccgttcccaagaaaggcaaagaaataccattagccagtttacgaggggaacaaggtccccgtggagagcctggcccaagaggaccacctgggccccctggtttaccaggtcatgggatacctggaattaaaggaaaaccagggccacagggatatccaggagttggaaagccaggtatgcctggaatgccagggaagccaggagccatgggcatgcctggggcaaaaggagaaattggacagaaaggggaaattgggcctatggggatcccatgaccacaaggacctccagggcctcatggacttcctggcattgggaagccaggtgggccagggttaccagggcaaccaggaccaaagggtgatcgaggacccaaaggactaccaggacctcaaggccttcggggtcctaaaggagacaagggcttcgggatgccaggtgcgccaggtgtaaaggggcctccagggatgcacggccctcccggccctgttggactgccaggagtgggcaaaccaggagtgacaggcttccctgggcccccagggccccctggggaaagccaggggctccaggagaacctgggccacaaggccctattggggtaccgggggttcaaggacctcctgggatacccggaattggaaagccaggccaggatggggatcccaggccagccaggatttccaggtggcaaaggggagcaaggactgccagggctaccaggacccccaggccttccagggattgggaaaccaggcttcccaggacccaaaggtgaccggggcatgggaggtgttcctggggctcttggaccaagaggggagaaaggaccaataggtgccccaggaatagggggtcctccaggagagccaggcctgcctggaatcccaggtcctatgggccctccaggtgctattggttttcctggacccaaaggagaaggtgggattgtagggccacaggggccaccaggtcccaagggtgagccagggcttcaaggcttcccaggaaagccaggtttccttggtgaagtagggcctcctggcatgaggggtttcccaggtcccataggccccaagggggaacatgggcaaaaaggtgtaccaggactccctggtgttccagggcttctcggacctaagggagaaccaggaatcccaggggatcagggtttacagggccccccaggtatcccagggattgggggccctagtggccccattggaccacctgggattccaggccccaaaggggagcctggcctcccagggccccctgggttccctggtatagggaaacccggagtggcaggacttcatggccccccagggaagcctggtgcccttggtcctcaaggccagcctggccttccaggacccccaggccctccaggacctccaggacccccagctgtgatgccccctacaccaccaccccagggagagtatctgccagatatggggctgggaattgatggcgtgaaacccccccatgcctacggggctaagaaaggcaagaatggagggccagcctatgagatgcctgcatttaccgccgagctaaccgcacctttcccaccggtgggggccccagtgaagtttaacaaactgctgtataacggcagacagaactacaacccgcagacaggcatcttcacctgtgaggtccctggtgtctactactttgcataccacgttcactgcaaggggggcaacgtgtgggttgctctattcaagaacaacgagcccgtgatgtacacgtacgacgagtacaaaaagggcttcctggaccaggcatctgggagtgcagtgctgctgctcaggcccggagaccgggtgttcctccagatgccctcagaacaggctgcaggactgtatgccgggcagtatgtccactcctccttttcaggatatttattgtatcccatgtaaaaacaaaaaaacaaaaaacaaagaaaagaaagagattttatagaagaaaatgacacaccaaaaaatccaaatgaaaaacataattgcttcaaaacacttacacagttggaaagttatatgtaagtgaaaatttggaccattgtgtacaaataaaaactaagatgcatgtttaatactccacacagcagcctgtaattgcgaatgatgggatagagttatgtatcaagtactgacacttggttgtacccactggaatcatattagctgttttatgttatatgcttccacagtaacctgcttattcagatcagtcaaaatatatcagtatgaaagatcatagctaatgaaaggcactcactcatattgtttactttaaaatatttataaatatgccttaaagaaatacaaatgataacaattacataccgtatttacttgcttaatttcctctgtatttgtgtagatactttgacatggaatatatggtggggagacccgtagtgttaccgccccagtgggagggggccctggggaccctggtaatgctttagtcaaagggatatctctcttgtatcagaggctgtgtcttttagtaacaggagtcctcgtcagaattgcgtgtctgttgtctctaaaagaatgggtgaaccaatcggcctttgtgaatttattcagtgccttctctgtaccaagcactgggtaaggcacttttgtggagcattagacagtaaccctcaaggagctagagaaccggatgggagacatgagcggtaattaactcacttgttccccagagtttctatttgttttgattttctttttctgtgacttattttcctattttctttcctccatgtaattttcactatggcccaactaatataaacacctggaaattacaaggaaaaaaaattcttcctctaataactttccaaatttgtggaatatttatttggaatagcaggtatcag

SEQ ID NO: 74753 - DNA, 2091 bp, Homo sapiens; identical to SEQ ID NO: 61480

SEQ ID NO: 74754 - DNA, 3880 bp, Homo sapiens
ttagaaggataggggaagagattaagtaattgcagtttaacatgaaaaatgcacatgtgatagaatggagcacaatggaggattcataaaacatgctcatcagaaaaatctgttaagtcgactttgtccagattcagaaagagtaagtttatcaacatctggcatccctcatactttgtgaagatagatcttctactgcttaattatgagaaattattttattcaaagaaaggagctcttaatcttttgataaaacaaaataaaggagtagagagctgactagatgtcaagtgcttgctagaaatgatttttaaaatgcttctacacgtaaaatgtactgacaaattttggtaaaccatttaaaaataagaattagttttaaaatcttggagaaaatgcctttttgcccacatttaaaactgaaaatcaattttactatagataggagttctgtggagtgtacaaaattccttttagagatcaaatggccatcccagatagatatcatgtttcacaggcattacttttagtcaccctcaagtttcagccatgggaccaaaatttagtgttctgtgccatgtggtcacagggtcattggtttcacatcatggcttaagaaaatactggcattttgtttcttacgaagtaagtcctaccttgtgcatccaagcaaaaagaaaaaggaagaaaacaggggagggaaaggcgcaagaagctttttttgtttgtttgttttgaagacaacagattgaaggcaaaaaaacacagagctttcacaagctcaaagaaaaatatttgctggctgatcgctgatttgtatgcactataaaacaattccataaataaaaccaatatatcatttcttaatcatgaccctatcaaaaccaagttatttcctaactattctttcaatgtcaaatgtaccctagagttgacgtttcatttttaagggttacagctacctcataggaactgaactagatgtactcttaccctttctctgaagtataacagtacaccactgcacaacagtatccaatttgaagactaatggtaaagaaaattcttcaggaaaaactgaaaatccatcaagctgaaaatctaaaattagttctactttctaatgaaaaatacataaaagtgcatcatcagaataagtaattcttatgccagtttgtattgcaaattttccaaacaatgcatcaaacataaacccaatccagatgtcaattatgaatacaaatatagcttgaggttgttttttttaaaggcagtaatttttgaaatagttaatgcaactgttgctaacacaataataatagtactcctggcttcacatactaacctggacttccgatcaagtgctgattagcccagtaagggaggtcaccaaaaaacccaaatccatttcagtcatgtctagtcttgtaccctccattctccttttttagcatttgaagacaacaggttgagttggcagatattgtttatggacccctgaggttgtttttaccgattcaatctcagttttattgaattcttgataacaggaataggatttgcagggagagcagggatatcagaaaggtctgtactggatgttttctgagaggccaacagagaagccgctgtctgaatagtttctgattgagttgtacttgtctctgtatcaagttgttcctttgcttctgttttatcatgtccactcaaagcaagacagttagcatcttcacttgtttcatcctcttctgttttggttttcttgggactctcttctttatgaggtgaggatgtcctcttgactcctactataggagtaggtatttttgttgctgcatttcctgaagttgctgcatttcctgaagatctaggtggtgggtttaccagacgtgttgaagaaacaactctggagaccgtaggctttggtggtggagaaatggctggttgtgtggcagtttgaggaatgctttcactcgatgtaccccctgagctttcactggaatttacttgtggcacagaaacttcagtagcctgtatgttggtcacagatgctgctgttacagctggagcaggactgtttctgccctgagagctgccagaactgttcaatggactggtcttcgtagcactagtaggtgaaggcacagacatgctgttatcactgtccatagacaagtcgaggctgctgtcattgagagctgtcaatttgacaccttctgttgaatgctttttctttttctgaagcacatgattaggtagtagttgatggagttgctttctttttacatgcattgcagcaattttcatatccacctcaaacatcttgctgtttattgcttgcctataaactgtatctgtgaaagactgaatatcataggtgagatcaacactgaggttttcagagttttctgtttttttaaacactaacccaatcacccacatcgtgcgaaattcttccttgtcgggattttctttgggtgctggaaatgactggggattcacatgagccagtgtaataaattcattcttctccaagcttccaaccaggattcggatttttgattccaccaagcccacccattccaggcgttgattttctgttggtgcacttgctagaagtacaatataatgcttgtacttttgaaagaagtttggagcttcaaaaagtttggaccactctgccttactcagcaaaatttcatctgtgatagcaagaccttgtttaaactcctcaaccatgaccatccgtgttgaaacggacacattgtacgtggagttctgttgtgggtatgctggtgtaattataggcataagatggtacctatcactggggtttacccttgggtcccatacaggcaaattaagattgcattcttcaggctgtttcaatagcactggatttggccattcccatttagaaaataccaagaaaaatttatgtacaagagttgatgctattgcatttggataaagctggcaagttcttgctactagcatagcccaggaaacaccaccgaggaaacctaatatattggaatagatgttgtggcgtttggcccatagtttgatagctctcagagttaacctgaagttgtcaatgtttggtactagatgtaaaatttcatcggttaccctgcaaccgttaagacttcttatacatcttatatctaaattttttagcagactgtcatctcgtagatccaaatcttcaggaattgtctgcagtgctaatcttgcaaacaaaatatcaatctctatcccatcaaaacagagtttaataactggtacgaatgcctcttcaacagctcttaaatcttttacttcttcctgtaatttcaacttatcatagaatgaaggtgaaaaagtcacttcgatcaacatgtcttggtgcaaacacacaaacgccatcaatatcagcaccttttgtatgcacttccctaatctgtaagatcccaaaatgtaaaaatttttcctccaaacattttccaattacagattgtggaagattcttggcttttcactgatttcttcgtatccactcttttaccaggtttatttagtttttcccaaaattaaaattcctgcggctggcagttccctcttccttcttcaaaaaccccccaaagggtttcaatgtctccaattagttttctgtgtaagtacgcagtcagtctccttgggggctgctaagctgataggagaagtaatgccatagtgcttctgtggcggttgtgtttgttgtgatccctgtgttgtaactggaaacggcatcgtctccggcgccgcaccgcccagtcacttcccccccgcaatcgccgcctgccgccctggtatgatccactgaggcgggagggaggggggggcctgcctcagcctcgtc

SEQ ID NO: 74755 - DNA, 2379 bp, Homo sapiens; identical to SEQ ID NO: 61482

SEQ ID NO: 74756 - DNA, 2113 bp, Homo sapiens; identical to SEQ ID NO: 61483

SEQ ID NO: 74757 - DNA, 4450 bp, Homo sapiens
aaatgatgtcagagatttttttcatgggctccgtgttgatgcagtgcatttgttgaaagatcatgtaggtcgaaataatgggaatggattggttaagtttttctcccctcaagatacatttgaagctttgaaacgaaacagaatgctgatgattcaacgctatgtggaagttagccctgccacagaaagacagtgggtagctgctggaggccatatcacttttaagcaaaatatgggaccttctggacaaactcatccccctcctcagacacttcccaggtcaaaatcgcccagtgggcagaaaagatcaaggtcaagatcaccacatgaggctggtttttgtgtttacttgaaagggctaccatttgaagcagaaaacaaacatgtcattgatttttttaaaaagctggatattgtggaagatagtatttatatagcttatggacccaatgggaaagcaactggcgaaggctttgtagagttcagaaatgaggctgactataaggctgctctgtgtcgtcataaacagtacatgggcaatcgctttattcaagttcatccaattactaagaaaggtatgctagaaaagatagatatgattcgaaaaagactgcagaacttcagctatgaccagagggaaatgatactaaatccagagggggatgtcaactctgccaaagtctgtgcccacataacaaatattccattcagcattacaaagatggatgttcttcagttcctagaaggaatcccagtggatgaaaatgctgtacatgttcttgttgataacaatgggcaaggtctaggacaggcattggttcagtttaaaaatgaagatgatgcacgtaagtctgaacgcttacaccgtaaaaaacttaatgggagagaagcttttgttcatgtagttaccctagaagatatgagagagattgagaaaaatccccctgcccaaggaaaaaagggattaaagatgcctgtgccaggtaatcctgcagttccaggaatgcccaatgcgggactgcccggtgtgggactgcccagtgcaggacttcccggtgcaggcctgcccagcacaggactgcctggttcagcaataaccagtgcaggactgcctggtgcgggaatgcccagtgcaggaatacctagtgcaggaggtgaagagcatgccttcctgactgtaggatcaaaggaagccaataatgggcctccatttaactttcctggtaattttggtggatcaaatgcctttgggccaccaatccctccttccagggtttagggaggcggggcttttcgtgatggttaggcctggtatgccttcagttggaaacagtggtttgcctggtctaggactggatgttccgggttttggaggtggaccaaacaatttaagtgggccatcgggatttggagggggccctcagaattttggaaatggccctggtagcttaggcggtcccccggggtttggaagtggccctcctggtcttggaagtgcccctgggcatttgsggtgggccaccagcttttgggcctggccccggccccggccccggccctgggcccaatcccatattggtggttccccctgggctttgcatctagtttctggaaaaccaggaccgacagtaattaaagtgcaaaacatgccctttactgtgtctattgatgagattttagatttcttttatggctatcaagtaatcccaggctcagtgtgtttaaaatacaatgaaaaaggtatgcccacaggtgaagccatggtggcctttgagtctcgggatgaagccacagctgctgtcattgacttaaatgacaggcctataggttcaagaaaagtaaaacttgtattagggtagccattcacatcattttttatagggtagatcttcatattgctgtgattaatgcatccagattgttttcctagtatttccaggttagaacctgtggattgttccaatggccatatagcttggtttccataacatcgagcagcattggttgactgtttacagaaagactcactccacccaggataaacattgctgtatgttaccagtaaagctatctggagagaacacataaatgattttgggcataccattagaagaaaccatttgtaaacttcaaattaccacaataaggcttatcaaggagtctaggattggttttgttttataccatatgggatgaagaaaatagaaatgtcagtagaactcattgagggtgctcttgccagctgctgaaaatagaagttggctactctcagaatttggtttaaaagctggacagatttgccttgttaatagggtaaagctttgtcctaaagtccctcattttccttttaaaattgaataaaatttctgtatacagattcattgtatgtacctttattgccttccttaagggtccttgctgtatagacagtcctgccttcagaaggttgctgctttgtttgtctaattgactcatttgtaaatgagcagaactgttttgtgggtttttttccctaaatataaaagtcccacacttcgtttgtgctataacctcaaactttgatttctaatgtcacacttaaaactgtgtggaataagacttttgccataaaaataaactatggagtcctttatctaccagagcctttttggtttgaccgccacgatttaggttagtcagtttaaaaattgttcatgttgtttggatggtatcgaaaaccagaaaccacttttaataatgtgtttaagatacttgatttgaagtccttttcatatggactaattgtagtatcaatttcctcctgtcccgattatgtgaaattttggcctttaaacaaagaggggcccattcataagaaagtgttatatctaggtttttaaaactgaagttgaaattatctttgttagcagtagtagtatagaataaaagatccgtatgctggttcgtagattgatacgtgttagtcctgttatttggaggctttttggcatagttgttcgatcaggagcctgtttactaaaagtcttcatacagagtacaagtgcagccgccagaggagaaaattgagattcttgaccctttcatactcttttctttggtattcaggacactaaggcaggaggaccacatgagttctggttggtaagtgtccttgtcatgaaaacacttgccttacaaggctctaattatgatttccctagtcagtgctctgaagatgtgtcacattatattataaacaatacggaaggggagataggtgagatgatatgaaaaacaaattttctcactgtcataaaaggctctaattatggttactttccttgtgatgaaaaacttggccttacagggctctagttatggttactttccctagtcaatgctctgaaaatgtgtcacattataaacaatacagaaggagagatagatgagagatcatgaaaaccaaattttatcttttacatggcccctttgtcttcgtttgaaacatccccaacatttcctacaaatcagcgtagttacaaaggggtcagtcttttaaaataagtatttcctattaaactatatatatatacagtgcctttttggtgttgtgagtcagtggaacactgaaatacagcggttgtgtaatttaagagtggcaacagtttcatttgataagatttgaaaaggctttttatcactacaatcttagaggattgacagtacaggatttttgtttaagagaaggattgtttagactcaagaggtgactatgttgtgggtcttttgataattcatgaatacagatttgctttgaccgatcactagatactgcctcctcaatttcaaaagcaatataacgtttgtatatgctgtttaatttaagttaatgttaagtaatcatttctcattccaaagacaatgcaaaaaacttcagcactgcttgagagttgtatttcagccacagatattttctccattggaaagctattttcattttagaaaaatgggttgtttgaagatgaaagtcttttatcttttttcacaatttattttggttatatgttcgtacattcttattaaatatttcatacactttattgcaactactttgttatttctacatcttagataaatgctgaaaaggaaaacgatttcattgttcatctaattaaataaattaaaagagcggtttgtgtagaaattggagagaactatgttttatatgaatcacaacagtgctcgttgtggactgtaattaaatgctttgccctctggaacttgatttttgtgtatctgagatttattaacagtgctaactgctaaggatactgtttatcttgttctgggcattggagtttcagtttttaaaaaattcttgaaaatgtattctgtgaaactactcatacctctcttcctgcgaattttctcctaagaactaggtttggggtagaaatgaattgacattatt

SEQ ID NO: 74758 - DNA, 659 bp, Homo sapiens; identical to SEQ ID NO: 61484

SEQ ID NO: 74759 - DNA, 1300 bp, Homo sapiens; identical to SEQ ID NO: 61485
  misc_feature (1)...(1300): n = a,t,c or g

SEQ ID NO: 74760 - DNA, 892 bp, Homo sapiens
ttttttttttttaaaatatatttgctttattatgtacacactatatttacatcacccaccctgaaaacagcaggttctggcttttccgtgaacccccagatgaatataaattggagcctctgagaacagttccttccccagagcggggagtgtgcacgtgtgtgtgtaaccttctgattccatgggacctggccagctcctctggagccacacagcacctccttgccttacaccctggctccagcttcactggtccgggggacgcctcagcctggggcagctgtgatgtaaaccagtcactccacctccatcttcctcttctgcaaagaatcgaggaagtcttgccactctgctgggtaaaagcgtttatagacgttgatcttactccgaatctgttttggggtatcttgatagtaattcttctcatcacgggccatggccttatagtcctccccgtggttctctaccatgtagcgtacatagtcaatgaggtcccaagacagagtatttcctttcttttctggaaggctggcttctgcctccaggtcattcagcacatagggcttccggtacaagttcttttaggcctcttcctctatgtccaccttccatggccttcacctttctcttacgggagggcaccggccctgttggggtccacagccaaccccatctcggccaaggttctgccgtaccgatttacgcgtggtcccacggcatgtcggatgtgggagcattcgagtcctgcgcgctgccttccgtcgagcattccggttcagacgctttcggttgacactgtaaccaaacttcatgctaccgggtttatgcccttggccttgggcatcgcgctgaccaccgcaccagcagctcaaacacgctgcctctgtctctc

SEQ ID NO: 74761 - DNA, 1366 bp, Homo sapiens
cgggttgtggtcaatatgttttttagaaataaagacggaaaaacatcacagtgcataatatataaggtcaatgtcttgtgatacttgatgtatgtatgtatcacacacacacatacacacctacacacaaatacacaaacatacacaatgaattccacagatattggattgtgatgtaatctttatttcttactctgagctccagttagaaaagtttgacaatcattgttatagagctatgttcagaaagtggagactttctgactcactgtgagctctgctgtatctatgcgctccctggagagggagcaacttgctaaggtacagtcctggccattggcatggatatttattgttccacatgttgggaaaaccatgtgcaataaaaatcaaacatatgaaacaatggctgtcattgtaccacagtatacattgtatcttggtgaaggttcttaaattactccttggagtttcctaattcacttcaggaaggatttgttgtgttccgtctttatgctgtcacttgcaaacacttttgctttgctagttcttgtattagatcttcatatacttgcaaaaagaggtcctcttcagattttgttccatccaggtacacaacttcccatgtgatgtcctgcatttcttgtctgtactttagatacatgggccacacatggccatcaaagtatcccggagagtctggaggctgatagacccttgtactcctcctccttttacattcttcatatggaatagtcaggaaatagcttctattccatatagtgtcaaggggcttataattaaaaagaagaaaaccttcgatgattaaaatgggaatttcctcagcactttcctggtctgttgataccacagagtgtcttgcgctttccatccagcaggaaatggctgacatcattttttccatgttaagtgcttcaagcacatcgtactgcaaaaatccatttttatctgtctctatctcagactctggcttgaagaaatcatcctgagatatgacactgcaatttgggaggtgtttctgcaaattcttagccagtgttgttttgccactgtttgtcacaccactgattccaatgataaatgttttcataattagctttgaaaatcacagcttcctaatatttcctggcgccagttcgagtcctcccaaacacagcggcagaggcgacagccaagcgcgcgcctgtacccagtgcgccgctacccgcagctcgctccccgagaggcccacagcccctttccccacgctcctcctgggttagagggatgccaggtaggggcggtcaccagaggccccttttctctactctcggcgccgggttccagcccccgttggggcacgaaa

SEQ ID NO: 74762 - DNA, 908 bp, Homo sapiens; identical to SEQ ID NO: 61487

SEQ ID NO: 74763 - DNA, 1642 bp, Homo sapiens; identical to SEQ ID NO: 61488

SEQ ID NO: 74764 - DNA, 1249 bp, Homo sapiens; identical to SEQ ID NO: 61489

SEQ ID NO: 74765 - DNA, 2042 bp, Homo sapiens; identical to SEQ ID NO: 61490

SEQ ID NO: 74766 - DNA, 2937 bp, Homo sapiens; identical to SEQ ID NO: 61491

SEQ ID NO: 74767 - DNA, 3883 bp, Homo sapiens
ttttttttttttggagcttattagaacatttatttttttctgaatgacaggccgggagtgggagtagctgaacagggcatgttagtggtgtgagtgctggcttaagcgaaggagctggagtgggggtttgtgttgggggagcagtgggatgggaaacacacctgtggggcagctgaactagaaagaaggatgcccaggatagctatgagacacctacaaagcatgggaacccagttcccctaagcccaccccatccccagatccctttttttctcccttaagttaaaaaaattcctttgaggcagcttaagtcaagaggcctgtaaggggtcaagactgggtcacaggtttaggacagcagagttttgctcccggccagcagagccaaggttctgggctgggatgggcagcttcagggccttcctcagctgtgggcattcaattgcccgcgtaagtgaaagtttttcaaacagcgacatggtttcacatagggccttcctgggcttccaagcatgcgggcctagctgttagcgcaatctgggcaaaggggggttcgcttcatagggacggtcccgccagcactgacgcatcagctcgtacacttcatcgtcacagtttcgaggctgctccatgcggtagccctggggcagcttttcatagagctcggcacaggtcatgccacagtagggtgtacctccaaggctcactatctcccaaagaaggactccaaaggaccagacatcactcttggtggtatagacactgtagttcagggactcaatggccatccagcgcacagggagacgccccatcgtcttcttcacataaacctcctctccccgagaaaggccgaagtctgcaatcttggaggctaggttctctccgaccagcacattccgggcagccaggtccctgtggatgaactgcttctcactcaggtactgcatgccattggccgcatcactggcgaaaacgcagcagctgccgggagcctaagggtagaggctgtcccatgctctcgagcaaaagctgggtcagtctctaggacccggcttttccgcagaaaatctagcaggttcccgtagggggcatattcaatagcgatatacaagtaacctcggttcttacaggcccccaggaggttgatgatgttggggtgatgccccaatttgcacagaacttccagttctcccgcaaagtcacgatggtcattttcagaggcatactctttcagcattttgatggctgcgttcatcttcagcccgtccttcttgatcatggcccggatgacctggccgaagttcccctccccgatgaggtcctcaaaggtgatgtcctcccactctagcactgggtagctcaggggctcgggctgcagttttggccgccgggtaagtgtcaaggtccctgagctgaactgcaggatggtctcctcgcccgagcctgactggtaggtgaaggtgcgtctccgatgcaggcagcttctgcggatgcacaccagggttaaaagggcggccaggatggtgaggcaggtggcagacacggagcccaccaccgccaggatcagctgctgatccaggccctcttcagctgcccggctctcttggactgggccctcagcctgcagcccgttgcccagggtggactcttctactgtgttgctccagtccccgagcccctgaatgctggcccgcatgcggaagaggtagcgcgtgctggcgttgaggccacggatgatggtgcttgtctcctcaggcctgtccacgtctatccacagtgggtctcctgcacccccagccacctgcacctccacaacgtacttggatattggcccaggcagagcctccgggtgcttccatgtcagctggatctcggagtctgagagggcctgggcgtggaggtgtcggggggctggaggcccactggggggcagaagcacgtgtgcagggggcgaggccgggcccaggagggtgcagtggtagagctgcacatccagctggtagtgggtgccaggcgtgagtcccgtcaggagggcagtgcgggcctggggggatgagacgttctcccgccgctcctgcccccgtgtcccgtcccacaggcgcagcaggaaaccgtcgcccaccagtggcccgggcaccaagggcaaggaccagctcactcgcagccggtcagtgccttccacatgccagccctccaaccacggctgcaacaaaggctcaggacagtctgtggtcatgagggtgggaggcccccaggccccctctcctccttcccctggccggctcagctgcacacgaacactgtatcctgtctttggcctcaggttcattaacgtcacgttctcactggggtccaccacaatggtcgaccagtccatggtactgtcctggggccggtagtgcaggcggacagtggagatgggtccatccccagagaacgagaccagcggggagaccacaagctggcggctctgcttggtcaggagccgaggtgcagccaggggcacggggggcactttcacattgaccttgaagcgccggctgtcttggccgccagatgtggacacacggcactcccagaacccactgtccgcaagaaccaagcggggcacctcgaactcagctgtggtcttctctggctccacaatggccttggtggacaggagcacagtgccgtctggcttgcgtagctctatgctgccccgcacggggaaggggttccctgcagctgcacagttgatccggggcatcgtctctaagttgaactccagttctgaggccatgttgaggatctgggggatccggtctgacttctcacagtgcactccatgccacccagaggggcagacacaaccactgaaccggtcacaagtgccaccattctgacactggcactggagtcggcaatcagccccaaaatgaccaggggcacaagcttcttggcactggcttcctctccagccagatccacaagagcagccataggggtctgggaggcagaaggtgaggccccggcagcctgatatgcctgggcactgctcctggcagctctgcccaaaacggccctctctgcaggcctgttcacagcgggtgccagtgaagccaggggggcatacacattcgccgtcatggtcgtggcagacacctccatgtaggcaacctgggcactccttggtacagcctggcccccagcgcccagccccacaaccccgcacgatgagccgaaagaaggcgctgcccagggggctggcttccaggtaagtggcactgtagatgccgctcgatggtggctgcacatttgggagctgcagcaggaaccgcccatcctgggcttcatgccagtccagggtgtagaagtaggatccgttgctcttccagatcacgtctgtctgcttctccttgtgcacacgtgcagaaagtacagcggtgtcacctttgttcacagtgtgtgtgaccttgtctggaagcaggtgggctccagggctgttgtgcacgtagatgacgcgcgtgcgccgcgccccagcaccgcccacgcaggagaagacgcccacgaggtccgagggcttggagaagccgcgaagcgtgacctggtgcgaaccgttgcgcgccaggcgcaggggtggcccgggcggggtgcgcacgatacggtcgtccttctccagcagcaggggcgggccccaggcgtccgagcccctccccgccccggcctccccagacacgcaagtcaggaagaagcgctgggggtccgtgagccgcaggttggccagcagcgtcaggtccaccgccgcgcccacatgagaagccaagaagaggatggggagcaagaaagggggcacccgccagaccatactccagaggccgacccaggccagccaggacgagcg

SEQ ID NO: 74768 - DNA, 4588 bp, Homo sapiens; identical to SEQ ID NO: 61493

SEQ ID NO: 74769 - DNA, 1838 bp, Homo sapiens; identical to SEQ ID NO: 61494

SEQ ID NO: 74770 - DNA, 1020 bp, Homo sapiens; identical to SEQ ID NO: 61495

SEQ ID NO: 74771 - DNA, 2856 bp, Homo sapiens; identical to SEQ ID NO: 61496

SEQ ID NO: 74772 - DNA, 3556 bp, Homo sapiens
gatgttaacatactttgttgctatatggaacttaactctctactgtttttttaacaacaaaagctacccttatacaacccaccaatttaatgaacaccatactttataaattaatacaacgcaatctaaatgcaccataaatttatatttgttaatcttgatattagaacatttttacatttcaaactacataaaaatataacaatataaaatagaaatttgttgacaacttacgtccaaaacatcactatttcttatattgcaactaagcaacaagacagcttacacagctctccagaaaacatagtgttttttgtgttatcaacaaaaatcagcacaatcccacacaataatgtcttcaatttattatcttttccacagtacacatttttcacaaaccgtaaatcctttgcagttattcaaagtgtgtaaacaattgcctgaatccccatatccccccccctcggcttaaggttgtgaatgttttaagtccttcaatcaagtttcaactcttccacttgcataaggaatcaagagccttctctctttaaaatatgtgtgttttatcatacagcctgcaatgcagtaaatcacagtgaaagccctggggaaaacaaaacaacatgatctttacagcgggacttgaaacttcacaatagtaaatgcagttcaagaagcttcccataataaaagcgcgggttttcatttccagaaatcaagtcaattagaaaccctaggttctacttaaaaacccattttgatttaaaagtgaaaacagtcccctatccatagtcattttataaactctatacagtttcacttgcagagatttttttttttccagtctggaaaacagtagtgcaattacgttttacttcttttaagttatatagtccaggatgtaaatagctctgtggaaagataagaagatgctctggtaaacaagaaatttttgcaagcccatgctggcttacgagtccattaaagcttgtaagtccatcgtggctttcaacaaaatgttgcatatacatcactgagaacaaagcagaaataaataggcagaaatgactgtaaactgtctcatttcaatgatttttcagtaataactggcttgatgaattgattatatatagtcacttaaataagcagacagtagacagttgcccttctggatgttccactatggcatccggcctggaaagccccaatggagttacattcctaaaattaaaccaaaaaaaaggtggggagtggagggtgggggataatagtttacagatgccacttgaacatgattccatcaagtcagccagttcacttagatttcttcttaaaaaggcttttgatttttgatggctttttgcttttctctccattatgacaaaggtcatgtgggatgctgcttattctggcaacacttggggcttcctgaactggtttactgtcgttgccagctgaggaacatgatgtgtggcgaggtttaggcaccgggatgccactggaaagctggttcatgctacaggatttctccaaaatgccattgtacactttgcttgcaggactgaagatcatactcttagtttctgtcagacctacacagtcgggagaaccccaagacacatccacagttacaggcgaatcccctcgggaggaatcctctagggacacctcatctcttgatatctttcgcggagataatgtttggtatatctcgaggcttaaaggaggagactgtttccttccaatggaagaatttaaggagtcacattctgaagctgtgtctggcacttcccattgcttttcagcagagaagtaaatggcctcttcctcctcttcatttcgataaagcgcagggcaacttgacactgagaggatatctggatcaggggaaggcaaggagtgtggtgtgtgttgcgggtggtgagggtgccgagggtgtgacgggtggggggcgtgtggagcaagctgagctcgctgaggctgaggcgaggacggcacaatgctgcggcgtgaacggcacaggctgctgcttctggctaatgatccaggaggtttagccatggtcccgggaaattgtgacactattgggggtgtgtcttcatctaagtcatcaactcctccagcaattggatagggtggaatggagactctgggcatcaccacccagctgtgatcagaataaagggaagaggtcaggctggggagtcctgagttatgggctatctgaaagccacagatcttctcaatttgttgccagcgaaaaagtcgttctcgtaaacaagttgtcaactcagagagagctttctttgcttccagaattttgtggtctacctcatctagggaggagctgtgtgcaacgtgcagagtcccaaagactgtgcttctcttctttttaattttttctgcctcatctttagcaatagctagctgcatttcagcgttttgtcttttaatattgtagtattgcacttctacttcatgtgttaactgaagccatttctgaagtgcatctggaacagaccaactgcttctcagttcaaattctttttcggcctttttcagagccatgcgaacctgttccaattcctgttctgcatactgacgtctactcaattcacattcagctccctcccttagctctctcagccgacaagcctcctcctttgcataattgatttcatccatcattttgcgctataaattttgcttttctacagcaacatttctgttttcttcctgtgccttttcaagcctctcttgtaagtccattagactttgctctgcagtttgtaagctctctaaatctttcatcatttttgcaacatgttcttttgatgtcttattctgcgtataagcaaaccagcagcctccaacaccaattactatagaaactgtgaggataaaatctttcatccagttatgaggtgggcgtgttagaggtccaaacaaaaccacatccaatgccttgagctgaagtttttgtctgtgactccggtcactgattttcaactgggagatcataaatgaaggttcgtgcactgctatcctgggaagtgtcgttcctttgacattgttgtctctaaaattcttctcatattggggtagttcaacaaactctatcaaccactgaagagtgtcttcaagggtccaattatgaacttctgatgttttccatcgtttccataaatcctcaatcgttatatgtttatcttctctgtgcagatggctgtgtttattagtagcatctttatatttcatatcttctctgatgaattcatcactttcctctacttcaattccaccatctttgtcatcatccatttgtttatgtattgtttgaagagcttccagactaaatctgtcttcttctgtaaagcatggtggactcagtgacatgcagggatcttatggctggacttggtgtctcatgcctgtaatcccagcacttctggaggctgaggagggtggattgcttgagctcagaagttcgagaccagcctgggcaacatggtgaaacacagtctcttttatttctcttcttttctaggttatattc

SEQ ID NO: 74773 - DNA, 446 bp, Homo sapiens; identical to SEQ ID NO: 61498

SEQ ID NO: 74774 - DNA, 1979 bp, Homo sapiens
gaaaagctgtgttaaacttctctgcatctggaagtgtgatttcccttactgggtccaatccaatgcatgatgctagcatgtggcatctgaagaaaaatggaataattgtatacctggatgtacctctactaaatctaatttgccgcctaaaattaatgaagacagataggattgtaggtcagaattctggaacatctatgaaagacttacttaaatttagaagacagtattataagaagtggtatgatgctcgtgttttctgtgaaagtggggcttccccagaggaggtagctgacaaagtgctgaatgcaattaaaagataccaagatgtggactcggaaacattcatttcaacaagacacgtttggcctgaagactgtgaacagaaggtttcagcagaattctttattgaagctgtaattgaggggttggcttctgatggtggcctctttgttcctgcaaaggagtttccaaaattaagctgcggggagtggaaaagcctagtaggagcaacctacgtagaaagagcacagatactgttggaaagatgtatccatcctgcagacatacctgctgccaggttgggagaaatgattgaaactgcttatggggaaaactttgcctgctcaaaaattgctcctgtcaggcacctttcaggcaaccagttcatcctggagttgtttcatggaccaacaggatcatttaaagatttgtctttacagcttatgcctcatatttttgcacaatgtatcccaccaagttgcaattatatgatacttgtagctacttcaggagacacagggagtgcagtcttaaatggttttagtcgtctaaataagaatgataagcaaaggatagctgtggttgcattttttcctgagaatggagtaagtgattttcaaaaagcacaaataattggcagtcagagagaaaatggatgggcagtgggtgttgagtcagattttgatttttgccagacagctataaaaagaatttttaatgattctgattttactggctttcttactgtggaatatggaacaatcttaagttcggctaactccataaactggggccgactacttccgcaggtagtttatcatgcttccgcatatcttgatcttgttagtcaaggatttatttcttttggaagcccagtcgatgtctgtattcccacaggaaactttggtaacattttagcagcagtgtatgccaaaatgatgggaatcccgattcgaaaatttatctgtgcctctaatcagaaccatgtttggactgattttataaaaacagggacattatgatctaaggggaaaggaaaactaggcacaaacctttttcaccgttcaatagatatttcttccaaatctttcaaacctagaacgacatttacacttgatggctaataaagatggacagctaatgacagaattatttaatcgattagaaagtcagcatcatttccagatagaaaaggctctagttgagaaacttcagcaggattttgtagctgactggtgctctgagggagagtgcctagcagctattaactccacctataatacttcagggtatattttggatccacacactgctgttgcaaaagtggttgcagatagggtgcaagacaaaacttgccctgtgattatctcatctacagcccattactcaaagtttgcacctgctatcatgcaggctttaaagattaaagaaatcaatgagacttcatcaagtcagctctatttgctgggttcatacaatgcattacctccactgcatgaggctttattagagagaacaaaacagcaagagaagatggagtaccaggtctgtgcagctgatatgaatgtcttgaagagtcatgtggaacaacttgtccaaaatcaattcatatgaaagctttcagagtaaatttttttttctagctataagcatgcaataataaatctcaaacactgatttggagtaaaaaaaaaaaa

SEQ ID NO: 74775 - DNA, 4567 bp, Homo sapiens
agaggaagaaaatggcagagaatacaaatttgatgtttcgtcagagttactagagtggatttggcatgataacatgcagtttcttcaagacaaaaacatttttgaacatacatattttggatttatgtggcaattgtgtagttgtattcccagtacattaccagatcctaaagctgtgtccttaatgacagcaaagttaagcacttcctttgtcctagagacatttattcattctaaagaaaagcccacgatgcttcagtggattgaactgttgacgaaacagtttaataatagtcaggcagcttgtgagtggtttttagatcgtatggctgatgacgactggtggccaatgcagatactaattaagtgccctaatcaaattgtgagacagatgtttcagcgtttgtgtatccatgtgattcagaggctgagacctgtgcatgctcatctctatttgcagccaggaatggaagatgggtcagatgatatggatacctcagtagaagatattggtggtcgttcatgtgtcactcgctttgtgagaaccctgttattaattatggaacatggtgtaaaacctcacagtaaacatcttacagagtattttgccttcctttacgaatttgcaaaaatgggtgaagaagagagccaatttttgctttcattgcaagctatatctacaatggtacatttttacatgggaacaaaaggacctgaaaatcctcaagttgaagtgttatcagaggaagaaggggaagaagaagaggaggaagaagatatcctctctctggcagaagaaaaatacaggccagctgcccttgaaaagatgatagctttagttgctcttttggttgaacagtctcgatcagaaaggcatttgacattatcacagactgacatggcagcattaacaggaggaaagggatttcccttcttgtttcaacatattcgtgatggcatcaatataagacaaacttgtaatctgattttcagcctgtgtcgatacaataatcgacttgcagaacatattgtatctatgcttttcacatcaatagcaaagttgactcctgaggcagccaatcctttctttaagttgttgactatgctaatggagtttgctggtggacctccaggaatgcctccctttgcatcttatattctgcagaggatatgggaggtgattgaatacaatccttctcagtgtctagattggttggcagtgcagacaccccgaaataaactggcacacagctgggtcttacagaatatggaaaactgggtcgagcggtttcttttggctcacaattatcctagagtgaggacttctgcagcttatcttctggtgtcccttataccaagcaattcattccgtcagatgttccgggcaacaaggtctttgcacatcccaacccgtgaccttccactcagtccagacacaacagtagtcctacatcaggtctacaacgtgctccttggtttgctctcaagagccaaactttatgttgatgctgctgttcatggcactacaaagctagtgccctattttagctttatgacttactgtttaatttccaaaactgagaagctgatgttttccacatatttcatggatttgtggaaccttttccagcctaaactttctgagccagcaatagctacaaatcacaataaacaggctttgctttcattttggtacaatgtctgtgctgactgtccagagaatatccgccttattgttcagaacccagtggtaaccaagaacattgccttcaattacatccttgctgaccatgatgatcaggatgtggtgctttttaaccgtgggatgctgccagcgtaatatggcattctgaggctctgctgtgagcagtctcctgcattcacacgacaactggcttctcaccagaacatccagtgggcctttaagaatcttacaccacatgccagccaataccctgggagcagtagaagaactgtttaacctgatgcagctgtttatagctcagaggccagatatgagagaagaagaattagaagatattaaacagttcaagaaaacaaccataagttgttacttacgttgcttagatggccgctcctgctggactactttaataagtgccttcagaatactattagaatctgatgaagacagacttcttgttgtatttaatcgaggattgattctaatgacagagtctttcaacactttgcacatgatgtatcacgaagctacagcttgccatgtgactggagatttagtagaacttctgtcaatatttctttcggttttgaagtctacacgcccttatcttcagagaaaagatgtgaaacaagcattaatccagtggcaggagcgaattgaatttgcccataaactgttaactcttcttaattcctatagtcctccagaacttagaaatgcctgtatagatgtcctcaaggaacttgtacttttgagtccccatgattttcttcatactctggttccctttctacaacacaaccattgtacttaccatcacagtaatataccaatgtctcttggaccttatttcccttgtcgagaaaatatcaagctaataggagggaaaagcaatattcggcctccgcgccctgaactcaatatgtgcctcttgcccacaatggtggaaaccagtaagggcaaagatgacgtttatgatcgtatgctgctagactacttcttttcttatcatcagttcatccatctattatgccgagttgcaatcaactgtgaaaaatttactgaaacattagttaagctgagtgtcctagttgcctatgaaggtttgccacttcatcttgcactgttccccaaactttggactgagctatgccagactcagtctgctatgtcaaaaaactgcatcaagcttttgtgtgaagatcctgttttcgcagaatatattaaatgtatcctaatggatgaaagaacttttttaaacaacaacattgtctacacgttcatgacacatttccttctaaaggttcaaagtcaagtgttttctgaagcaaactgtgccaatttgatcagcactcttattacaaacttgataagccagtatcagaacctacagtctgatttctccaaccgagttgaaatttccaaagcaagtgcttctttaaatggggacctgagggcactcgctttgctcctgtcagtacacactcccaaacagttaaacccagctctaattccaactctgcaagagcttttaagcaaatgcaggacttgtctgcaacagagaaactcactccaagagcaagaagccaaagaaagaaaaactaaagatgatgaaggagcaactccaaataaaaggcggcgtgttagcagtgatgaggagcacactgtagacagctgcatcagtgacatgaaaacagaaaccagggaggtcctgaccccaacgagcacttctgacaatgagaccagagactcctcaattattgatccaggaactgagcaagatcttccttcccctgaaaatagttctgttaaagaataccgaatggaagttccatcttcgttttcagaagacatgtcaaatatcaggtcacagcatgcagaagaacagtccaacaatggtagatatgacgattgtaaagaatttaaagacctccactgttccaaggattctaccctagccgaggaagaatctgagttcccttctacttctatctctgcagttctgtctgacttagctgacttgagaagctgtgatggccaagctttgccctcccaggaccctgaggttgctttatctctcagttgtggccattccagaggactctttagtcatatgcagcaacatgacattttagataccctgtgtaggaccattgaatctacaatccatgtcgtcacaaggatatctggcaaaggaaaccaagctgcttcttgacattaggtgtagcatgtctacttttaagtccctcacccccaacccccatgctgtttgtataagttttgcttatttgtttttgtgcttcagtttgtccagtgctctctgcttgaatggcaagatagatttataggcttaattcttggtcaggcagaactccagatgaaaaaaacttgcatcttcagtatacttcctaaagggcaatcagataatggatatgttttatgtaattaagagttcactttagtggctttcatttaatatggctgtctgggaagaacagggttgcctagccctgtacaatgtaatttaaacttacagcatttttactgtgtatgatatggtgtcctctgtgccagttttgtaccttatagaggcagattgcctccgatcgctgtggttcttattatcaaaattaagtttacttgtatacggaacaaccacaagaaatttgattctgtaaagaatcctctttagctgtggcctggcagtatataaatggtgctttatttaacagaatacctgtggaggaaataaagcacacttgatgtaaaaataattgttttatttttattgacatgactgattgattgattgctattctgtgcacttaattaaactgattgtgatgacttttaaaaaaaaaa

SEQ ID NO: 74776 - DNA, 3213 bp, Homo sapiens
tttttttttgtgttcagaaaagtacagtgttgacattttattttttatgtaaagaagccatatttacataatacattcatatttttaagtatgttacagctcctgtagaaaaccatttccattaagacagcaacaagtgatctggattcaatctttaaaatattaagtcaaattaaaatgttcttatcaagactccaatttaatttcacagcccatctgccacaggggaactgaggagaaacaggaatgaagagtgggcgacaaagagaaagcatcccttcccacacgccaagagtccagtgcaacgatccctgccacacggtcagccgaccccacttggtgccacagggtccagcctcggccactctgggctcaacctttccagcacgtctgggagcccaatgaggctatgggacagtgtgcatttccctcaaggcctccggaaagtcacctgccacccactgtgaccttctgaggctgaaaggacttaaggactcctttcccccatcatttcagctggcccagtggctgggctaaaatcagcgcagcatttcccattcttctgaaaagccacagctgaaataatgcaccagctgaaaaccaccagtggagagacttgagatgggcctccctctgggcctctagttggcaactttctcacccgggggctcctctttctccttttcccgctccttgttccagtccttaaggccttctggaagtgaggtgtcctcatccaagctgccagtgccttccacaaattcttcataggtaagatttttccgcaaatggtctgggggccaaaaagttcaaccatatcattcctaaccaatacttctttttctaacaacagaagagcaaccttctccacgtcagctttcttttctgtgagaagagctactgttcttttataagcatcattaataagtattcgtacttcatcatctatcaatcttgcagtggcttcactgtaaggtttctccaataccattgtccccctgacgtgggaggtcaaaggagatttgcccaaccttttcattcatgccaaactgaaacaaatttgggcataatggcactctgaagttaacttttcacaagtcatcttgagcaccagttgtaattcttccaaagaagatttcttcagagactcgaccacctaaagtcatacacatcctatccaagagctgctctttggtatagaggtattgttcttttggtaaatactgagcataacctagtcctttgccacgtgggatgatggatacctttaaaagcgggtctgcgtgctccagataccagccggcaaccgcatggcctgcttcgtggtatgccacagtcttcttctcctcaggctgcaagaacctgcgttttcttctctaagccaccaatcactcgctcaattgcctgttcaaagtgtttctgatttatggaatctgacagatgccttgcagcaatcaacgcagcttcattacagacattagcaacatcagcacctgaaaaccctggagttaaagatgccagttttcttgccaatttatccttctccagggtactgtccagttttagcggtcggagatgaactttgaaaatagaagctcttccttttatgtctggtggtccaataaagatctgcctgtcgaaacgccccggcctaagtagcgcggggtccaggatatctggtcgattggtgccggccaaaatgacgacatttgttgttgtattaaaaccatccatctccaccagcagctggttgagtgtgttctcctgctcactctgccctccaaagttgcctcttcctctcttccttcccaccgcatcgatttcatcgatgaagaggatgcaaggggcattcttccgagcaagggcaaataagtctcggactctagcagggcccacaccaacgaacatctccaaaaactcagatccactaacggtgatgaaggggacattggcttctccggctgtggccttagctagcagcgtcttcccagtgcctggaggaccagtgagaatggcaccctttgggatttttgctcctaggtcttgatactgctttgggtttttcaagaaattcacaaattccatgatctctagcttggcctcctcacagccagccacatctttgaacttcacatcaatttcatcctttaagaccttggcagtggtttctccgacactgaagagtccgcccatccctcggcctgtccggccaatggcagcaggccctcttctgatggtgtagagcaagaaggcgatgatgagcaccgtaggcagcatgctcagcagaaaagagccatcactttcagcaatgtagacaacaggcacccgattttctccttctatgcccaattcctgctgtaaagtttccagattccgttcaaaggtgtccacactgccaatattaaaccaaacgtattgcccatcaacaggagtttttcctggtgtaaaggtcactcgaacaaaacgcttgttgacgacttccaatctgtctactactccttttgaaagatagttattgacaaagtccttccaagtgatttctctcccggatctcttgagcagcaagtaaaacatgactccaccccagaacagagcagtccagaggaagaacatcctgaaatccttgtcgtcccatggaatgtcacccttctgaaacctggaccaccagtgagaatcatctttcttgccacctcgttttccaccgccaccacctcctcctccagaagagcgtgtggtagcagctggctttgattcttttttctctcccataacttctttaggttcactagctttttttccattttttccattaggaaagtattttccaaatccttttgggggtcgagaacagaatctttgataagcagcaattatatctgtcaaaagagaatttctgctggcccttgcttgagttgtaacaaatcggtaaagcgtccggaggcagggctgctcgcccgggcccacgccgccaggcacgaggagctgctgtaggccgcggggccagcagccgccccggccccacagccgcaaacagcggtgcgccatggccgccgccgtggccctctcggcccgggacgctgcgcaggcgcgggcaggcgacgactggcggcctcgggaagcgggctcggctcggggaaaggccgccaggcagcgaagcgcgccggcggctcacggaggagcccaagctctcaacgcggcgtctcccctcgtgcc

SEQ ID NO: 74777 - DNA, 2896 bp, Homo sapiens; identical to SEQ ID NO: 61502

SEQ ID NO: 74778 - DNA, 3328 bp, Homo sapiens; identical to SEQ ID NO: 61503

SEQ ID NO: 74779 - DNA, 1727 bp, Homo sapiens; identical to SEQ ID NO: 61505
  misc_feature (1)...(1727): n = a,t,c or g

SEQ ID NO: 74780 - DNA, 818 bp, Homo sapiens; identical to SEQ ID NO: 61507

SEQ ID NO: 74781 - DNA, 1836 bp, Homo sapiens; identical to SEQ ID NO: 61508

SEQ ID NO: 74782 - DNA, 1450 bp, Homo sapiens; identical to SEQ ID NO: 61509

SEQ ID NO: 74783 - DNA, 1883 bp, Homo sapiens; identical to SEQ ID NO: 61510
  misc_feature (1)...(1883): n = a,t,c or g

SEQ ID NO: 74784 - DNA, 1633 bp, Homo sapiens; identical to SEQ ID NO: 61511

SEQ ID NO: 74785 - DNA, 821 bp, Homo sapiens; identical to SEQ ID NO: 61512

SEQ ID NO: 74786 - DNA, 2245 bp, Homo sapiens; identical to SEQ ID NO: 61513

SEQ ID NO: 74787 - DNA, 630 bp, Homo sapiens
  misc_feature (1)...(630): n = a,t,c or g
tttttttttttttcctagagaagagacgaaggtgattcagggccgagcagggctccctgggaagccccctcttcctgccccaactttattttggttctagaatcattccagttggcatacccggtccccaccacggctgtcctgggcacacagttaacatgtcatgcagttagggggagggagagaggggagagggcagggggggagtcagtggcctgcaccgcacagccactgggttagagaaagtcggggtctcccaggctgcaaagccttgtccagccatgtgtctcctggccctgggctgacctcctgctgtggccatagggtagacagcctggccttggggctgggccatggctgtgtcaggtagggaaagccaccatcctgcctccagtcccctgggcccttgttctagcccctcctccccccatatcactggggataatttgttggcctgggtctccatagctcaccagttatggaccaaggaacaggggcagccagcctgagggtccatgctgtcacctgtgggtggccccaccgagcagatgatcggacgcctttcgaccggnattccnnccngncgncntcgaggatctcagggctcaggnnnncggcccccgttccccc

SEQ ID NO: 74788 - DNA, 2069 bp, Homo sapiens; identical to SEQ ID NO: 61516

SEQ ID NO: 74789 - DNA, 1089 bp, Homo sapiens; identical to SEQ ID NO: 61517

SEQ ID NO: 74790 - DNA, 1596 bp, Homo sapiens; identical to SEQ ID NO: 61518

SEQ ID NO: 74791 - DNA, 3681 bp, Homo sapiens; identical to SEQ ID NO: 61519

SEQ ID NO: 74792 - DNA, 2004 bp, Homo sapiens; identical to SEQ ID NO: 61520

SEQ ID NO: 74793 - DNA, 2789 bp, Homo sapiens
ctggggacgctaggttccggaacctgacctgagctggggcctgtgcttccagcgggtggtggggggcctggtgtgctggcatcaagtaagccgactacctcggcaaaggcttagggacaagagaccagcagcctgaactggctggggcatccggaaggcttagatcttgtggccaagagttcagaccgtggcgaagtggagagtgacatgcagttggatggcggtgactgcgtggtcctgcaaccctggttccagtctggcaagcattgtagacctggctgctgaagactgacggggcccagggtccgctgcccccaccgccatcaccacctcggaacccagggtaacgctgtcagtctttggaccaacctcgctgtgcctaacaagaattccagaagtcacccatccgaaaggcactggcccatgacactctccacttccaatcttaaatcttttacttcataccttgtctcagatctctcctggtaccccttccccacgcccttagataatccatctcaattcctcatgctaattgaggagctatggctgcaaggcaccttccaggatttcacacctacacaaatctcctttttctccttttgccttctctgcttatgggatattctgagtccccacccccaatcactgacagctgggcccccttcatcagcctcacacaccacgtattaagtcagtcacaatctcccctctcctctaactgctggatttgtctttctacacacacccaatgattcacggctcttccggctgacctacttacatggacacagtccaacgtgagcttacacatttcttacttggctataccattcttggctgattcattcctgaaaccggttcataacctggaaactcagctaaacacctttccttcaaactcagctctctcagcatggtttcaggtagggctgttgccctccttcacctaatagcttctggactaacatccatacaaaccaacacagcatcatctaaaccaccaatatgggggtaccatttctactcaaacttccttcatatccccaccccccttatgtctcagccgaacctaccctaatccagcccacgccacaatggtgggacaggttccccagtccctatgtgggcttatttttacccttgcactccctgtagaccatcaattctacaccctaattacaaaatcatatccacctctgcctggcagaaggtgttatgcttttctggctcgcctaccatccacacatccctacacctcaccaccggatcctcttttctttccttccatccaattcctggcttccccgctgccaactctgctctctatgtctccagtttaaaggggccccctggaaaaaatgtaacaattccctcacctgtgactggtacctgacagccaccacaccggggcagcaatggctaacggttgacaaagacaatttctttctctctccaaaaccaaacagccttcatcaactccctagccaagactccctatcaggcccttacaggtgccgctctggctggcagttacccaatttgggaaaacgaaaataccctatcatggctacctaccttcacctacaacttctgcctgtccacccccagtctcttctttttgtgtgatacaaactgatatctttgcctaccagccaactggtcaggaacttgcaccctggtctttcaggctccaaccatcaacatcctaccccctaaccaaactattctaatttctgtagaagcctctatctcctcttcacccataagaaataaatgggctctacatctcatcaccctgctaacaggattaggcatcactgctgcacttggcactggaatagcaggcataaccacctcaatcacctcataccaaacactattcacaaccctttctaacaccgtagaagatatgcacacttccattaccagtctccaacgacaattagacttcctcgtgggagtcatccttcaaaactggagagtcctggacctcctaaccactgagaaagggggtacctgcatatacctccaggaagaatgctgtttctgtgttaatgaatctggcattgttcatatcgcagttcgtaggcttcatgacagggctgcagagctttgacatcaagtcgctgactcctggtggcaaggatcatcccttctaagatggataccctgggttgcccccttcctaggacccctgatcttcctcttcctgttactaatgattgggccatgcatatttaaccttgtatcccgcttcatttcccaaaggctgaattgttttatccaggcaagcatgcaaaaacacattgataatatatttcacctttgccacgtctaataccagagcctacgaggaaaccattcggaagctccagaacccaggccctaatcacaacgcccctatccagcaggaagcagccagatgatcaacgacgccctttttcctttttatactaaagtaagaaataagaatgttagcccaaactgcactattttgcagacccctaccattttacaaactggtcagagtggaaaattccaccagggcctgagctgtgagaaacatcctgtcaggcaggtcccaggcctaacccctggctgcactaaattccttcattatcagcagccaaacacaccgcccccaccccattttcacaacaatcccagacctctcctgcccgggactgtaactggtccagcctgtaagcgggaagggggctctggcactagctggtaccccctctccgcaggtctttctcccaataaatctgtgttgccattgaaaa

SEQ ID NO: 74794 - DNA, 1726 bp, Homo sapiens; identical to SEQ ID NO: 61522

SEQ ID NO: 74795 - DNA, 1127 bp, Homo sapiens
aaaaagcgccggcaattggggtcgcagctggagatgctgcggccggcagggctctggcgcttatgtcggcgaccttgggcggcgagggtcccagcggagaatcttggccgtagggaagtcacctctggtgtctctccccgcggtagcacctcgcccagaaccctgaatattttcgaccgggatttgaaaaggaaacagaagaactgggcagcccggcagcccgagccgaccaaatttgactacctgaaggaggaggttggaagtcggatcgcagaccgtgtatatgacatacccagaaatttcccccttgctttggatcttggttgtggaagaggttacattgcacaatatttgaataagcttcagttattccattgcaggaaactattggaaagtttttccaagctgacattgcagaaaatgctttgaaaaattcctcagaaacagaaatacctactgtcagcgttttagctgatgaagaattccttcccttcaaagaaaatacatttgacctggtggttagcagtttaagtttgcattgggtgaatgaccttcctagagcacttgagcagattcattatattttaaaaccagatggagtgtttatcggtgcaatgtttggaggcgacacactctatgaacttcggtgttccttacagttagcggaaacggaaagggaaggaggattttctccacacatttctcctttcactgctgtcaatgacctgggacatctgcttgggagagctggctttaatactctgactgtggacactgatgaaattcaagttaactatcctggaatgtttgaattgatggaagatttacaaggtatgggtgagagtaactgtgcttggaatagaaaagccctgctgcatcgagacacaatgctggcagctgcggcagtgtacagagaaatgtacagaaatgaagatggttcagtacctgctacataccagatctattacatgataggatggaaatatcatgagtcacaggcaagaccagctgaaagaggttccgcaactgtgtcatttggagagctaggaaaaataaacaaccttatgccaccggggaaaaaatcacaataaatatttattcagtgtaaaaaaaaaaaaaggggcggc

SEQ ID NO: 74796 - DNA, 1940 bp, Homo sapiens; identical to SEQ ID NO: 61524

SEQ ID NO: 74797 - DNA, 1512 bp, Homo sapiens
ttttaattacaaaaaaaattttattattacaaaacatacaatctcacaaaggtacaatttgaaatacggggacacccttctaactaccacccaggtgaagaaacagaactttgtcaggcaccccagaacccctccaagtgcctcatcacaatgacaactccttccctctagaagtagccattattcttgtatagtactgactgtgtttctttatggttttatcttattttttagagacagggtcttgttctgtcacacaagaacaagtggacaggtggagtgcagtggtgttcatagctcactgcaatcttgagctcctgggctcaggtgatcttcctgtcttagcctcccaaggtgctgggattataggcgtgtgtcattgcacttgacctagttttattttttttttgagatggggtcttgctctgtcacccaggtgttgcccaggcttgagtgcagtggcgcgatctcagctcactgcaacctccgcctcccaggttcacgcaattctcctgcctcggcctcccgagtagctgggattacaggtgcccgccaccatgcctggctaattttttgtatttttagtagagacggggtttcaccatgttggccaggctggtctcaaactcctgacctcaagtgatccgcccgcctcggcctcccaaagtgctgggattacagatgtgaggcaccgtccaccgtgcccggccgagttttattcttgaatcgtgcatgtctctgttcactacagtttagtgcaccatttaaataaatttgttgtcttttaagttcatcaaaaatatttcttttgaagcactataataatgctggtgatggaactcgccaccattattccctgggagcttctggcagattctgtcagttggaatctctaattcttttctcagtggacctttttacttgactcccacagttctttaagtagcttctttttttccagggtttcctttgctctttttttcctttcttgttttttcttcgccgcttctcgtttttctttgtgaacaggactgttttcaccattgtagaaaacatctactttctcttgtaggattttccgagctagctttctgttctgatcaactgatcttgtctgatggcactttacaacgatgcctgaggggatgtgcttcagcaccacgcagttgctggttttgttggttgcctggccccctggaccgtgtcctttcacaaactgctcttcgagttcattctcatccaaggaaagcagtgcagggtagtccttcttgcctgccatctggaccggagtgacagctattcctggggataacaacgtcagcttctcccaaagccggagtccccatggcgccgggcatattcgggtcagtggtgtaggaaaatgaaataaacccacggtgctcataaggaacgtggctctgctggctgaggacctggtctcaggacccgactcgtgccctcaacgttctagggatatccaaatcacctcagcggaggattcgcaatcgcgat

SEQ ID NO: 74798 - DNA, 963 bp, Homo sapiens; identical to SEQ ID NO: 61526

SEQ ID NO: 74799 - DNA, 1521 bp, Homo sapiens; identical to SEQ ID NO: 61527

SEQ ID NO: 74800 - DNA, 789 bp, Homo sapiens; identical to SEQ ID NO: 61528

SEQ ID NO: 74801 - DNA, 1045 bp, Homo sapiens; identical to SEQ ID NO: 61529
  misc_feature (1)...(1045): n = a,t,c or g

SEQ ID NO: 74802 - DNA, 928 bp, Homo sapiens
ttttttttttttgcgtgagcaataaagctttttaatcacctaggtgcaggcaggctgagtccaaagagagtgtcagcgaagggagataggggtggggccgttttataggatttgggtaggtaaaggaaaattacaatcaaagggggttgttctatggcaggcaggggcgggggtcacaaggtgctcagtggggaagcttctgagccaggagaaggaatttcacaaggttaatcgctcagttaaggtggggcaggaacaaatcacaatggtggaatgtcatcagttaaggcaggaacaggccattttcacttcttttgtgattcttcacttgcttcaggccatctggatgtatacatgccaggtcacaggggatatgatgggctttgcttggggcttcagaggtcttgacacacatcactaagcttactctatggattcgcctcaaattctttcttgcaagagatccaagaatgctctcttggggtctggatagggacccctttccgttgacaagacctccccgcctccgcttttaattgtttggccttcattcctcttctacagtgctccctgcaatcagtactggtgctgtacatatttgctagcttcgtacatacggcacgaagtagatgctcagtaaatgttggttgactgagtatcctctgcatctcggtgacatcacatcctgcgtgccgtggcgtcattctgcattcctctgcgggaggctcagatccggagggtttaagtggttgtttataacatgcaccgaacatatccaacggaggctgtggtttccgaccgcccacaaaaagcgcggttggcgggagtgcgggttcggggtcggctggcagctgggagactccagctctgggcggaaacacactgcctcggaggcgcccggacgcgtgggtcgagccagtaataacga

SEQ ID NO: 74803 - DNA, 3918 bp, Homo sapiens
gcgcggaggagggggcgaccacaagatggcggacctctcgctgcttcaggaggacctgcaggaggacgcagacggatttggtgtggatgactacagctcagagtctgatgtgattattataccttcagccctggacttggcctccacaaagatgaaatggttgaacgccccctgggaagattgggacaaagtatgctgcaagtgagaaccatatttaaccagacaaaatggtggccccggagtttgcctcgatacccttgagggaaagtctgcgatgatgaaagagattgtattgctgttttgggaaagaattagccagattgggccgatgattcagaaccaacttgtgagagcggctgaattggaacaggtgcctcacatcgcactgtttttgttcaagaaaacccgcctttcaattaccatatgctttttttcaaaattcttactaccctattgtgggttagataccttggcagatcagaattaatcaggtgaggaaaacaagtcaggcagctttgcttggctctgttggagcaggagctcattgaacgatttgatgtggagaccaaagtgtgccctgtcctcatagagctgacagccccagatagcaatgatgatgtgaaaacagaagctgtggctataatgtgcaaaatggctccccatggttgggaaggatattacagagcgtcttatcctccctaggttttgtgagatgtgctgcgattgcagaatgtttcacggttcggaaaggtctgtgctgccaattttggagatatttgcagtgtagttggccagcaagctactgaagaaatgttgctgcccagatttttccagctttgttctgataatgtatggggagtccgaaaggcttgtgctgaatgcttcatggcggtttcatgtgcaacatgtcaagaaatccgacggaccaaattatcagcactttttattaatttgatcagtgatccttcacgttgggttcgccaagcagcttttcagtctctgggacctttcatatctacttttgctaatccatctagctcaggccagtattttaaagaagaaagcaaaagttcagaagagatgtcagtagaaaacaataaaaggaccagagatcaagaagccccagaggatgtacaagtcaggccagaggatactccttcagatctcagtgttagtaattccagtgtcatactggaaaacacgatggaagaccatgctgctgaggcatccgggaagcctctaggtgaaattagtgttccactggacagctctttactttgtactttgtcctcagaatctcaccaggaagcagctagtaatgagaatgataaaaaacctggtaactacaaatctatgttacgaccagaggttggcaccacttcacaagattcagctctcttagatcaggaattgtataactccttccatttctggaggactcctcttcctgaaatagatctagacatagagcttgaacagaactctgggggaaaacccagcccagagggaccagaggaagaatctgagggccctgtgcccagttctccaaacatcaccatggccaccagaaaggaactggaagaaatgatagaaaatctagagccccacattgatgatccagatgttaaagcacaagtggaagtgctgtccgctgcactacgtgcttccagcctggatgcacatgaagagaccatcagtatagaaaagagaagtgatttgcaagatgaactggatataaatgagctaccaaattgtaaaataaatcaagaagattctgtgcctttaatcagcgatgctgttgagaatatggactccactcttcactatattcacaacgattcagacttgagcaacaatagcagttttagccctgatgaggaaaggagaactaaagtacaagatgttgtacctcaggcgttgttagatcagtatttatctatgactgacccttctcgtgcacagacggttgacactgaaattgctaagcactgtgcatatagcctccctggtgtggccttgacactcggaagacagaattggcactgcctgagagagacgtatgagactctggcctcagacatgcagtggaaagttcgacgaactctagcattctccatccacgagcttgcagttattcttggagatccaattgacagctgcagatctggttccaatttttaatggatttttaaaatgaccgtcgatgaagtcaaggataggtgttcttaaacacttgcatgattttctgaagcttcttcatattgacaaaagaagagaatatctttatcaacttcaggagtttttggtgacagataatagtagaaattggcggtttcgagctgaactggctgaacagctgattttacttctagagttatatagtcccagagatgtttatgactatttacgtcccattgctctgaatctgtgtgcagacaaagtttcttctgttcgttggatttcctacaagttggtcagcgagatggtgaagaagctgcacgcggcaacaccaccaacgttcggagtggacctcatcaatgagcttgtggagaactttggcagatgtcccaagtggtctggtcggcaagcctttgtctttgtctgccagactgtcattgaggatgactgccttcccatggaccagtttgctgtgcatctcatgccgcatctgctaaccttagcaaatgacagggttcctaacgtgcgagtgctgcttgcaaagacattaagacaaactctactagaaaaagactatttcttggcctctgccagctgccaccaggaggctgtggagcagaccatcatggctcttcagatggaccgcgacagcgatgtcaagtattttgcaagcatccaccctgccagtaccaaaatctccgaagatgccatgagcacagcgtcctcaacctactagaaggcttgaatctcggtgtctttcctgcttccatgagagccgaggttcagtgggcattcgccacgcatgtgacctgggatagctttcgggggaggagagaccttcctctcctgcggacttcattgcaggtgcaagttgcctacacccaataccagggatttcaagagtcaagagaaagtacagtaaacactattatcttatcttgactttaaggggaaataatttctcagaggattataattgtcaccgaagccttaaatccttctgtcttcctgactgaatgaaacttgaattggcagagcattttccttatggaagggatgagattcccagagacctgcattgctttctcctggttttatttaacaatcgacaaatgaaattcttacagcctgaaggcagacgtgtgcccagatgtgaaagagaccttcagtatcagccctaactcttctctcccaggaaggacttgctgggctctgtggccagctgtccagcccagccctgtgtgtgaatcgtttgtgacgtgtgcaaatgggaaaggaggggtttttacatctcctaaaggacctgatgccaacacaagtaggattgacttaaactcttaagcgcagcatattgctgtacacatttacagaatggttgctgagtgtctgtgtctgattttttcatgctggtcatgacctgaaggaaatttattagacgtataatgtatgtctggtgtttttaacttgatcatgatcagctctgaggtgcaacttcttcacatactgtacatacctgtgaccactcttgggagtgctgcagtctttaatcatgctgtttaaactgttgtggcacaagttctcttgtccaaataaaatttattaataagatctatagagagagatatatacacttttgattgttttctagatgtctaccaataaatgcaatttgtgacctgtattaatgatttaaagtggggaaactagattaaaatatttgtcttttaactagttaaaaaa

SEQ ID NO: 74804 - DNA, 1933 bp, Homo sapiens; identical to SEQ ID NO: 61532

SEQ ID NO: 74805 - DNA, 4268 bp, Homo sapiens; identical to SEQ ID NO: 61533

SEQ ID NO: 74806 - DNA, 1817 bp, Homo sapiens; identical to SEQ ID NO: 61534

SEQ ID NO: 74807 - DNA, 2610 bp, Homo sapiens
  misc_feature (1)...(2610): n = a,t,c or g
cttgtgggaagagctgaagcaggcgctcttggctcggcgcggcccgctgcaatccgtggaggaacgcagccgccgagccaccatcagtgcctgggcacttacaggaaggcttcggctgcgtggtcaccaaccgattcgaccagttatttgaccgacgaatcgggancccgttccgaggtgctgaaggcagcagagaacaagaaaaaagaagcccggcgggggcgcgtgtgtggggccctggggcatagagcgcagctcagggccggcgggcccacgaccaactccaacgcggcaggcaaacagcgtgcgcaaggagtcccagaaagaccgcaagaacccgctgccccccagcgttggcgtggttgacaagaaagaggagacgcagccgcccgtggcgcttaagaaagaaggaataagacgagttggaagaagacctgatcaacaacttcagggtgaagggaaaataattgatagaagaccagaaaggcgaccacctcgtgaacgaagattcgaaaagccacttgaagaaaagggtgaaggaggcgaattttcagttgatagaccgattattgaccgacctattcgaggtcgtggtggtcttggaagaggtcgagggggccgtggacgtggaatgggccgaggagatggatttgattctcgtggcaaacgtgaatttgataggcatagtggaagtgatagatcttctttttcacattacagtggcctgaagcacgaggacaaacgtggaggtagcggatctcacaactggggaactgtcaaagacgaattaactgacttggatcaatcaaatgtgactgaggaaacacctgaaggtgaagaacatcatccagtggcagacactgaaaataaggagaatgaagttgaagaggtaaaagaggagggtccaaaagagatgactttggatgagtggaaggctattcaaaataaggaccgggcaaaagtagaatttaatatccgaaaaccaaatgaaggtgctgatgggcagtggaagaagggatttgttcttcataaatcaaagagtgaagaggctcatgctgaagattcggttatggaccatcatttccggaagccagcaaatgatataacgtctcagctggagatcaattttggagaccttggccgcccaggacgtggcggcaggggaggacgaggtggacgtgggcgtggtgggcgcccaaaccgtggcagcaggaccgacaagtcaagtgcttctgctcctgatgtggatgacccagaggcattcccagctctggcttaactggatgccataagacaaccctggttcctttgtgaacccttctgttcaaagcttttgcatgcttaaggattccaaacgactaagaaattaaaaaaaaaaagactgtcattcataccattcacacctaaagactgaattttatctgttttaaaaatgaacttctcccgctacacagaagtaacaaatatggtagtcagttttgtatttagaaatgtattggtagcagggatgttttcataattttcagagattatgcattcttcatgaatacttttgtattgctgcttgcaaatatgcatttccaaacttgaaatataggtgtgaacagtgtgtaccagtttaaagctttcacttcatttgtgttttttaattaaggatttagaagttcccccaattacaaactggttttaaatattggacatactggttttaatacctgctttgcatattcacacatggtcaactgggacatgttaaactttgatttgtcaaattttatgctgtgtggaatactaactatatgtattttaacttagttttaatattttcatttttggggaaaaatcttttttcacttctcatgatagctgttatatatatatgctaaatctttatatacagaaatatcagtacttgaacaaattcaaagcacatttggtttattaacccttgctccttgcatggctcattaggttcaaattataactgatttacattttcagctatatttactttttaaatgcttgagtttcccattttaaaatctaaactagacatcttaattggtgaaagttgtttaaactacttattgttggtaggcacatcgtgtcaagtgaagtagttttataggtatgggttttttctcccccttcaccagggtgggtggaataagttgatttggccaatgtgtaatatttaaactgttctgtaaaataagtgtctggccatttggtatgatttctgtgtgtgaaaggtcccaaaatcaaaatggtacatccataatcagccaccatttaacccttccttgttctaaaacaaaaaccaaagggcgctggttggtagggtgaggtgggggagtattttaatttttggaatttgggaagcagacagctttactttgtaaggttggaacagcagcactatacatgaaatataaaccaaaaacctttactgtttctaaatttcctagattgctattatttggttgtaagttgagtattccacagaaagtggtaattatctcttctctcttcctccattagaaaattaggtaaataatggattcctataatgggagcatcaccacttattaaaacacacatagaatgatg

SEQ ID NO: 74808 - DNA, 1026 bp, Homo sapiens
ttttttttttttaccaacagtacacttttaattaaggacctgtagctgtgcaggatgcaaacagctgggcatcagtgactttcctcctgcccccggtttgtccctgatggtggcagaagatcccagctgaccacggcccctttctctggggtcagagggagaagacaggcgcagtcagcaggggcagctgttgcaggtgggagggttattttcccacaggaacaaaggtctccatgatgatacggggtctctatagtcatgttgagagcctaatggcccttggcataattgctggtgtcggggtagaaggtgtcttggagtttgctcaagtggttgagagggagggaggtgccatagacttggaggaactgggcacgaagccaaggatacaaatccaggcagggctgtggggcaggatagagagcagggccttctactgaaggagtgactcaggaaggaggaggggaaggtgacaagcccctgggcaggagccctgtggccatggatcattttaaattgagaccagagagtgagcagtccagggcagctataaccttggctagaaagggcagaggcagatgggcctgctccatctcgcctcttaagaaggtgggcaggacggagatgccacagtggatgccactgctgccacagcctcctgcggactccaggaaggaagcctggctctcagccatgcaggatggaaagaaagattctattccaggaggggagctgccctggaacgccccaaggacagccaggacccactgttcattcaggattcccgcattttctcctacgggagctaacgcctgtgcctgggtcctggcagcgctctggactccacactctcctcctgggtttcacctttgtaacaggatccctgcagaccacgcccacgacaaacactgtctccagagggcaggacaaaggaagggcacggcgccgggcggtggtgtggttgcccatcaggaagaggccgacttcttccagtgaaactgggcagacagaaggcagtgagaaatg

SEQ ID NO: 74809 - DNA, 6521 bp, Homo sapiens
agtgtggtggaattcgctggagctggtgctgaaaaagggggtttgcagaggctgccctggggctggtgctgaaagaagagcccacagctgacttcatggtgctacaataacctcagaatctacttttcactctcaggagaacccacatgtctaatatttagacatgatggcaaactgggcggaagcaagacctctcctcattcttattgttttattagggcaatttgtctcaataaaagcccaggaagaagacgaggatgaaggatatggtgaagaaatagcctgcactcagaatggccagatgtacttaaacagggacatttggaaacctgccccttgtcagatctgtgtctgtgacaatggagccattctctgtgacaagatagaatgccaggatgtgctggactgtgccgaccctgtaacgccccctggggaatgctgtcctgtctgttcacaaacacctggaggtggcaatacaaattttggtagaggaaaaaagggacaaaagggagaaccaggattagtgcctgttgtaacaggcatacgtggtcgtccaggaccggcaggacctccaggatcacagggaccaagaggagagcgagggccaaaaggaagacctggccctcgtggacctcagggaattgatggagaaccaggtgttcctggtcaacctggtgctccaggacctcctggacatccgtcccacccaggacccgatggcttgagcaggccgttttcagctcaaatggctgggttggatgaaaaatctggacttgggagtcaagtaggactaatgcctggctctgtgggtcctgttggcccaaggggaccacagggtttacaaggacagcaaggtggtgcaggacctacaggacctcctggtgaacctggtgatcctggaccaatgggtccgattggttcacgtggaccagagggccctcctggtaaacctggggaagatggtgaacctggcagaaatggaaatcctggtgaagtgggatttgcaggatctccgggagctcgtggatttcctggggctcctggtcttccaggtctgaagggtcaccgaggacacaaaggtcttgaaggccctaaaggtgaagttggagcacctggttccaagggtgaagctggccccactggtccaatgggtgccatgggtcctctgggtccgaggggaatgccaggagagagagggagacttgggccacagggtgctcctggacaacgaggtgcacatggtatgcctggaaaacctggaccaatgggtcctcttgggataccaggctcttctggttttccaggaaatcctggaatgaagggagaagcaggtcctacaggggcgcgaggccctgaaggtcctcaggggcagagaggtgaaactgggcccccaggtccagttggctctccaggtcttcctggtgcaataggaactgatggtactcctggtcccaaaggcccaacgggctctccgggtacctctggtcctcctggctcagcagggcctcctggatctccaggacctcagggtagcactggtcctcagggaattcgaggccaaccggtgatcccaggagttccaggtttcaaaggagaagctggcccaaaaggggaaccagggccacatggtattcagggtccgataggcccacccggtgaagaaggcaaaagaggtcccagaggtgacccaggaacagttggtcctccagggccagtgggagaaaggggtgctcctggcaatcgtggttttccaggctctgatggtttacctgggccaaagggtgctcaaggagaacggggtcctgtaggttcttcaggacccaaaggaagccagggggatccaggacgtccaggggaacctgggcttccaggtgctcggggtttgacaggaaatcctggtgttcaaggtcctgaaggaaaacttggacctttgggtgcgccaggggaagatggccgtccaggtcctccaggctccataggaatcagagggcagcccgggagcatgggccttccaggccccaaaggtagcagtggtgaccctgggaaacctggagaagcaggaaatgctggagttcctgggcagaggggagctcctggaaaagatggtgaagttggtccttctggtcctgtgggcccgccgggtctagctggtgaaagaggagaacaaggacctccaggccccacaggttttcaggggcttcctggtcctccagggcctcctggagaaggtggaaaaccaggtgatcaaggtgttcctggagatcccggagcagttggcccgttaggacctagaggagaacgaggaaatcctggggaaagaggagaacctgggataactggactccctggtgagaagggaatggctggaggacatggtcctgatggcccaaaaggcagtccaggtccatctgggacccctggagatacaggcccaccaggtcttcaaggtatgccgggagaaagaggaattgcaggaactcctggccccaagggtgacagaggtggcataggagaaaaaggtgctgaaggcacagctggaaatgatggtgcaagaggtcttccaggtcctttgggccctccaggtccggcaggtcctactggagaaaagggtgaacctggtcctcgaggtttagttggccctcctggctcccggggcaatcctggttctcgaggtgaaaatgggccaactggagctgttggttttgccggaccccagggtcctgacggacagcctggagtaaaaggtgaacctggagagccaggacagaagggagatgctggttctcctggaccacaaggtttagcaggatcccctggccctcatggtcctaatggtgttcctggactaaaaggtggtcgaggaacccaaggtccgcctggtgctacaggatttcctggttctgcgggcagagttggacctccaggccctgctggagctccaggacctgcgggacccctaggggaacccgggaaggagggacctccaggtcttcgtggggaccctggctctcatgggcgtgtgggagatcgaggaccagctggcccccctggtggcccaggagacaaaggggacccaggagaagatgggcaacctggtccagatggcccccctggtccagctggaacgaccgggcagagaggaattgttggcatgcctgggcaacgtggagagagaggcatgcccggcctaccaggcccagcgggaacaccaggaaaagtaggaccaactggtgcaacaggagataaaggtccacctggacctgtggggcccccaggctccaatggtcctgtaggggaacctggaccaaaaggtccagctggcaatgatggtaccccaggacgggatggtgctgttggagaacgtggtgatcgtggagaccctgggcctgcaggtctgccaggctctcagggtgcccctggaactcctggccctgtgggtgctccaggagatgcaggacaaagaggagatccgggttctcggggtcctataggaccacctgggtcgagctggaaaacgtggattacctggaccccaaggacctcgtggtgacaaaggtgatcatggagaccgaggcgacagaggtcagaagggccacagaggctttactggtcttcagggtcttcctggccctcctggtccaaatggtgaacaaggaagtgctggaatccctggaccatttggcccaagaggtcctccaggcccagttggtccttcaggtaaagaaggaaaccctgggccacttgggccaattggacctccaggtgtacgaggcagtgtaggagaagcaggacctgagggccctcctggtgagcctggcccacctggccctccgggtccccctggccaccttacagctgctcttggggatatcatggggcactatgatgaaagcatgccagatccacttcctgagtttactgaagatcaggcggctcctgatgacaaaaacaaaacggacccaggggttcatgctaccctgaagtcactcagtagtcagattgaaaccatgcgcagccccgatggctcgaaaaagcacccagcccgcacgtgtgatgacctaaagctttgccattccgcaaagcagagtggtgaatactggattgatcctaaccaaggatctgttgaagatgcaatcaaagtttactgcaacatggaaacaggagaaacatgtatttcagcaaacccattccagtgtacccacgtaaaaaccactggtaggccagtaaattttcctgacaataaacctgtttggtatggtcttgatatgaacagagggtctcagttcgcttatggagaccaccaatcacctaatacagccattactcagatgacttttttgcgccttttatcaaaagaagcctcccagaacatcacttacatctgtaaaaacagtgtaggatacatggacgatcaagctaagaacctcaaaaaagctgtggttctcaaaggggcaaatgacttagatatcaaagcagagggaaatattagattccggtatatcgttcttcaagacacttgctctaagcggaatggaaatgtgggcaagactgtctttgaatatagaacacagaatgtggcacgcttgcccatcatagatcttgctcctgtggatgttggcggcacagaccaggaattcggcgttgaaattgggccagtttgttttgtgtaaagtaagccaagccaagacacatcgacaatgagcaccaccatcaatgaccaccgccattcacaagaactttgactgtttgaagttgatcctgagactcttgaagtaatggctgatcctgcatcagcattgtatatatggtcttaagtgcctggcctccttatccttcagaatatttattttacttacaatcctcaagttttaattgattttaaatatttttcaatacaacagtttaggtttaagatgaccaatgacaatgaccacctttgcagaaagtaaactgattgaataaataaatctccgttttcttcaatttatttcagtgtaatgaaaaaggtggcttagtatttatgaggaaattcttcttcctggcaggtagcttaaagagtggggtatacagagccacaacacatgtttattttgcttggctgcagttgaaaaatagaaattagtgcccttttgtgacctctcattccaagattgtcaattaaaaatgagtttaaaatgtttaacttgtgatcgagacctacatgcatgtcttgatattgtgtaactataatagagactctttaaggagaatcttaaaaaaaaaaaaaacgtttctcactgtcttaaataaaatttttaaatagtatatattcaggggcattttggaaaacaaagggaatttacttcgacttcttaaatttttgtaaaagactataagtttaaacatctttctcattcaaatttaaagatatctttctcctcttgatcaatctatcaatattgatagaagtcacactagtatataccatttaatacatttacactttcttatttaagaagatattgaatgcaaaataattgacatatagaactttacaaacatatgtccaaggactctaaattgagactcttccacatgtacaatctcatcatcctgaagcctataatgaagaaaaagatctagaaactgagttgtggagctgactctaatcaaatgtgatgattggaattagaccatttggcctttgaactttcataggaaaaatgacccaacatttcttagcatgagctacctcatctctagaagctgggatggacttactattcttgtttatattttagatactgaaaggggctatgcttctgttattattccaagactggagataggcagggctaaaaaggtattattatttttcctttaatgatggtgctaaaattcttcctataaaattccttaaaaataaagatggtttaatcactaccattgtgaaaacataactgttagacttcccgtttctgaaagaaagagcatcgttccaatgcttgttcactgttcctctgtcatactgtatctggaatgctttgtaatacttgcatgcttcttagaccagaacatgtaggtccccttgtgtctcaatactttttttttcttaattgcatttgttggctctattttaatttttttcttttaaaataaacagctgggaccatcccaaaagacaagccatgcatacaactttggtcatgtatctctgcaaagcatcaaattaaatgcacgcttttgtcatgtcagtggtttttgttttgtgaaattcctttgaccatattagatctatttcatttccaatagtgaaaaggagatgtggtggtatactttgtttgccatttgtttaaaagatacaacggataccttctatcatgtatgtactggcttataaatgaaaatctatctacaacattacccacaaaggcaacatgacaccaattatcactgcctctgcccttaaaaatgtcagagtagtattattgataaaaagggcaagcaatagatttttcatgactgaataaactgtaataata

SEQ ID NO: 74810 - DNA, 4188 bp, Homo sapiens; identical to SEQ ID NO: 61536

SEQ ID NO: 74811 - DNA, 728 bp, Homo sapiens; identical to SEQ ID NO: 61537

SEQ ID NO: 74812 - DNA, 2892 bp, Homo sapiens; identical to SEQ ID NO: 61538

SEQ ID NO: 74813 - DNA, 1692 bp, Homo sapiens
  misc_feature (1)...(1692): n = a,t,c or g
ttttttatcattgacaatgtttattatcaagaaactttaggttttttaaaagaatgctcgttttagaatacaccaagaggacactctgtgacaggacatatacaaacaaggataattaaaatattaaatactatctaaattaaaagaccataattcaaattgctaattataatatttgtgtcggtagaaataactatagttccccttcatgaaattcacccccacgttctcatgaagactatgacgtctcaccacaatttcagttatttaatttacaataatcaatgctgagttttctgtgctgaagcatgcactgttacagaaagcacaaaatcctatttacagggatttttagttttctttaaaatgtatctcaagcatcttttaaagtgcgagctacaaataggttgtatccttaatgaaaaaggcttctttctaaaagaagtatggagataggctatccaatactgcnggcaggaacagttatataactaaccgaaggaaccagcagcactctgctaactctgttttagtgtagcaacctccttcttggtgttctactaccagccaaacatgtactccattgctttggatacaagactttcatctttttttggcgtttgtctgtcagaaataacctgataatcactagtagaggctttgtatgctgtagcaagaggtctcatggtagaaatcctaggagtacttccaggttgtgttggtgtacctagagttttgattggtggtgtaaaggctaaagatggagatgataaagcacatctgtcactgctttccataacacttttgtcaatacatggttttacaccaatcatgatggattctccaaaaatcctcccatctttgcttaaggctttccgagcctgcagtttagattgataacgaatatgcatccaatttcctgtattagacatccacatgttttaagatattcccccatactgtgcaaattgtaagtaatatgtaggaaagcagatgccttgaggaaaccccaaatacagtcaccccaagagtcatcgagggtgatcttctgaagtcaaagaatctccttgagtataaaaaggatccaactgggcaggagataatgtcgtctttcgtggctgaccgatacttgctggactaaacatactttgccctgttccaggagtagatgtaactccaacaagaggactctgcattactgaaatgtttggctgtcttcttgaagttaaaggtgttgatccaagtcctgggctagaaatgtcatcatatatacttctaactggtggagcgccacttttatctttatgagctggtacaactggttgtggtggtgacccacctgcaagtaaaggtgatctcatttccattactcctactgaagggccactaattgatcgaggttgtggagtcaccggagctggcaaatcccccattaaaaatccaggtaagaactgggcattaactcctggctttggagatgtgggtgaacccagcatcattggttcagatcctaacgcgggcccctgaggttccactgcaaaggctgccattgcgtcggcaactacacttaaaaccagtaccttcccaattaattttcaaaaatggcggaaaccggacgcgtgggcggacgcgtgggcggacgcgtgggtcgttccagggttatcagtcggtacgcaggctttcagtggcaag

SEQ ID NO: 74814 - DNA, 3593 bp, Homo sapiens; identical to SEQ ID NO: 61541
  misc_feature (1)...(3593): n = a,t,c or g

SEQ ID NO: 74815 - DNA, 9654 bp, Homo sapiens; identical to SEQ ID NO: 61542

SEQ ID NO: 74816 - DNA, 1639 bp, Homo sapiens
gcggtggaattccgaggatggccgtcatggcgccccgaaccctcctcctgctactctcgggggccctggccctgacccagacctgggcgggctcccactccatgaggtatttctacacctccgtgtcccggcccggccgcggggagccccgcttcatcgccgtgggctacgtggacgacacgcagttcgtgcggttcgacagcgacgccgcgagccagaggatggagccgcgggcgccgtggatagagcaggaggggccggagtattgggaccaggagacacggaaagtgaaggcccagtcacagactgaccgagtggacctggggaccctgcgcggctactacaaccagagcgaggccggttctcacaccatccagaggatgtatggctgcgacgtggggtcggactggcgcttcctccgcgggtaccaccagtacgcctacgacggcaaggattacatcgccctgaaagaggacctgcgctcttggaccgcggcggacatggcagctcagaccaccaagcacaagtgggagacggcccatgaggcggagcagtggagagcctacctggagggcacgtgcgtggagtggctccgcagatacctggagaacgggaaggagacgctgcagcgcacggacgcccccaaaacgcatatgactcaccacgctgtctctgaccatgaagccaccctgaggtgctcgggccctgggcttctaccctgcggagatcacactgacctggcagcgggatggggaggaccagacccaagtacacgaagctcgtgcagaccaggcctgcaggggatggaaccttccagaagtgggcggctgtggtggtgccttctggacaggagcagagatacacctgcccatgtgcagcatgagggtttgcccaagcccctcaccatgagtatggtagccgtcttcccagcccaccgatccccatcgtggggcatcattgctggccctggttctcctttggaagctgtgaatcactggaagctgtggtcgctgcctgtgaatgtggaggaaggaagagctcaggtggagaaggggtgaaagatagaaaagggggggagctactcttcaaggctgcaaagccagtgacaagtgcccaggggctctgaatgtgtctctccacaagctttgtaaaagtgttgagacagcctgccctttgtgtgggactgatgaggcaaagagtttgttccctgccccttccccttgtgaccttgaaagaacccctgactttgtttcctgcaaaaggcaccctgcatgtgtcctgtgttccgtgtaggccataatgttaaggaggttggggagacccacccccaccccccatgtcccacccatgacccctcttccccacgctgacctgttgctccctcccccaatcatctttccctgttcccagagaggtggggcttgaggtgtctccatcttctgtcttcaacttcatgtgtgcactggagctgtaaattctttccttccctattaaaatttagaacctgagtataaatttactttctcaaattcttgccaatgagaggttgatgagttaattaacaggagaagattcctaaaatttgaagagacaaaataaatggaagacatgacgaaccttccagagtccaaaaaaaaaa

SEQ ID NO: 74817 - DNA, 845 bp, Homo sapiens
ttttttttttttggaacctcgggccacacagctcaggcacacaccatcggggctactggctgcttggagtttattttccgcttggtgccaggtgcacagttccaggtgtcaggaaagctagcgagtgctggggccgggcggtagagagcggggctctcactggtttttggtgtctgctgtgttgatgcgaaggtctgcttgctgcagccgcctagtttacagggtggggggtgggaggtggggaggggggcgagggatgcggagtggggagaggggcggggaggggctctggtggactagcgcctccgcaggccgtggggctcggtggtaaccgctcaggtcaggacgggggcccagcgctggctgtgctggactgaccccccgggtctgcttcctcggggcgtcccgagcccaggccacaggcggtcatgctgctggaggcctggggaggttccgagtgctctgcggactccaacaccgtggcccatgaacgggagggtggacttcccgaaaaagaagctggcccaccaatgacccgggtcagccttggggagacctggggggtggggaatggcttccccggggcactcggtactgctgcaggagctgttgctggaagtggaacccaggcggcgccggtagtagtcgtgggtggccacgagcgagccgctggaggggatggccgccatgctttagcttgctggctggtgggatctgggcggcgacccctcgcgggcctcggcgcacgatcacgggtggcggggacgggggcggctaggccacggagcccatttgcagagaagaccgcgggaagccgcgccacgacagagaggcgcgcgcggggt

SEQ ID NO: 74818 - DNA, 1555 bp, Homo sapiens
ttttttttttttcacacaccagcacgtcccacctcgtgctcacggattttattacacagatagtggcggcaatggcctcagcccagcccaccctcacctgcttttccagcccacaaagggggacgatcacggcccagcaaaagcgatgctgagaggggaaacagtccagagtccaacagcagaacttgggggaagcggtcggggtggccaggaacataaactatgtataggggccgggggcttctgcccagggctcccctggaccaggacgccaggtagggcagggaacctcagtagtcctccacccagccattctcagagatgaatgcgtcaataacctccttcatagccaagttggggatgagctgttcctgggtcagggggctccgggtcacggggtcaaaatgacccacacgctgcaggtgctcctcgatgtccttgcggtcgtaggtgatgccactgggcgtgatgcacggctcccgcatcagctcaaagctgatcttgccacacaggtagtcggggatgtctcgcttcttcctcttctcatccacctgagaaaaaagctcgtccatgtccgccatgtacttgtcgtgcttggcctcaatgcaggcctgctgggcccggacgtggctgtcgtcctcatcaccctcgtggtttcgctagctctcttccagctccctctcaccgcttccgcggcatgaagcctggagaggtaggagtgcagctcgctctcctggtggatgcgccgctcctcaatgctgttccagcgcttcttcttcgcgaattcgaaagagcgcttgggattgtcgttccccgaagttcagccgcttgttcctttggccaggctgtaagctcgctgcagattggcgatggcctcatcatagctctccatctccagctggcactgccccaggaagaagtgcgccttcacagactgcccgtccagctccagggcgcgccggcagtcggccagggcctgctcgtgctgctgcatcttcaggtagcacaaggcccggttggtgtaatacacggccaccagcgggttccgggtgatcgcgcggccgtagcaggccgccgcctccgggtactttcggcccacgaacagacgattgccctgctccttgagctcctgcgcgctcgggctcttctcggggcttccgccgccagcgcccagccgtgcgccgccctccttctcctccttgcccttcatggcgccgcgcggcacggcctgggctccgctcccaagctccgcgcctcgcggcccagcgcccgcagccggagccccgcagcccgagcccgcgatccgctcgggcccggcccaggtccccccgccggaacttccggccgggggcgggaccagcggggacgcacgcgtgggggcgagtggggccgcgcgtgcgcccaaccagcctggacggggacactgggcccgcgacgtcgggggctgggaggaacgctccagttccctgtccccgcgctcttaagggtgggcgttcgcgtaggccctggcctgccctgctgaggtctcttcggcacccgcctcggcggcggccgc

SEQ ID NO: 74819 - DNA, 743 bp, Homo sapiens; identical to SEQ ID NO: 61544

SEQ ID NO: 74820 - DNA, 946 bp, Homo sapiens; identical to SEQ ID NO: 61545
  misc_feature (1)...(946): n = a,t,c or g

SEQ ID NO: 74821 - DNA, 2338 bp, Homo sapiens; identical to SEQ ID NO: 61546

SEQ ID NO: 74822 - DNA, 1055 bp, Homo sapiens; identical to SEQ ID NO: 61547

SEQ ID NO: 74823 - DNA, 1642 bp, Homo sapiens
tatggcacgagtcagaatttatctatttagagataacttaaatacaacacagaagctaagcaggttcttaaaattactggtgtctacaaactgcctgaatttttgtctttgctagttagtttcaccctgcactgctagaaagaagcaacaacagtcagtatgtcattcttcaacatttaatggtgccacagggttaaataatggccttacttttttggcctgaattttgccaaaattagcttcaaactctttttttgatccatttagatttgctagatgtccatcctttattctgtagcctgaggaattcagtttccttatcctgtactgtactatctgtggtgttaattcaagaaccattggcgtctctcttatctgagctatggaaattccttctctcaataatccttgcattctctcttctaaaactggaacagaataatataaaagggcaggacatttcaaaactaattgcttcaggtcatgatctgtgcatttaaaagcatttttagagaaggaaatactattctgtatacttcttgggcaaagttgaaaaagaaatcctttgagtttggatagaagctggagaatttcaaagctggtgaaaccttgctcctggagaaattctagtgtttcctttatagctgtgggagaatttaacaaaataaatgggttttggcttaacaattttagtagccaaactttcatgttggcctcagagccacctacatctagataactctcttggagaattcttaccatttgcttattcttctcaacaggattatgaaaaacattaggtgcagctgtcaaaagtctgctaatgaccacattttttagtcccaactcttgaaagaactgaacattcagcttctggttctcttggtctttaatagtaaagaaagattctggaaactgctctattaacttgattaactcttcctcatttttgcagaccaactgccagagttttctctgggtgttaacagcggttggactacagacaattgcttccgggcagcgttccaaaatactggctacagcagtctcatcggcacctagttcttgtaaaatattcgcaatttcttcaacataggtttcatcctctaaaagtacccatccttttaatctacgaattttcctaatgtcaactgaacatttatagagcttttccactgttcttgtattttctttgctcgactgtttatcagttgtataggtgaagcatgctaagaaaggtctgtattttggaggtgatcgcatctttctgaaagaacacagcctgcaggactgggatctcagcagcagcttccacaacatggctgcaatctactagctagtttccaccgtcctgggacttaaatggactcattctatcttacagtctctccccacagatcttgtcctcatccagatattcagttcatccacttgggattctttccaacttcttctcaaaatgtgatcttgtcagttccctgcaataaaccgtcggcgtcagctccaagcaaggcacagggagtcccgggggccaggccccgtccttccctctctctccggccagcctccccacagtccgcagtccccgaggcctggagccgggatttcggtcctcggtctcaagaagctcccgacagttctc

SEQ ID NO: 74824 - DNA, 3005 bp, Homo sapiens; identical to SEQ ID NO: 61549
  misc_feature (1)...(3005): n = a,t,c or g

SEQ ID NO: 74825 - DNA, 5889 bp, Homo sapiens
  misc_feature (1)...(5889): n = a,t,c or g
ttttttttttttcggattagaaaacctgtttattaagactgggtcacatccagctagtacatttcagtgccctttctggtgctgcctcccaggagcagacactgcaaatttcagaacccccatctagagaaacccctaacctgtgatctagcttccgaggctcagtgttggttcttgtggtagtgctgatgtgtgggtaccactgaggccaggccacagtcgcatgtaccctcctctgggctgactcacgaggctacaggggacagcacacctaatgagcaggtctgtcctccagacatactcattaacaagcacgttcctggctaaaaaataaccagatctttttggccgtgccctcaggttggagaaagaaaacttttaatttggaatcactacaaagacaaatggtttctacaaattattttattagaatgtcagactcaaaagaactaccaggaacatgcctgaaaatgctatatatgatttatgcttgacccatgacacctgctgtcactggatccagagtgagcaagggaaaggaagtggaggtaggcggggacagcaccagccctggctggccagacctgaggcccacagacctggtccccacaaccaggattcctacaatgtacacattcctaattcaggctcaactctccctttacccaaaaagtaaaatgcctcagggactcaatctgaatcactgtctgtctcaggcttctttcacatcccacgcttgaatttgtactcctgggtcacatccccatgtaaagcggtcacttcatggaaggtaccagagtgtaagtttgtgggcaacccagtgggctgggggccaaaaaagtccaaactttcacctttgggcccttctggctggcaaaggtcagcctcttgatgggagatgaggcctattggacttggcatctccaatcaccacccaccagcccttcttcacgtttcctgcggaagaaaaggcgcattgagcaggggcctgtgacttccctcctctcgcttcagctgcaccagcaccacaactgggccggcacttgcggatgcctgtccttatctacccacctcataaagatagtcgattattaggggtaggggttacaaaagcgaggcaccatctgcaattctggctgtcaagtcaactgaagccaacgcgttcccgttcttcatccttccatctcccatgatgtcgaaaaacactctccattccccttgtctgtgccaacgttttgaatatgctccagaaggtgaaagtgtggcagctgctttcaaggtatgaagtccttggaccacatggcttgggtgaccatctgggccagttcccatagcttgccaggagcagggctgagccaccccatttgctggaaaggacatcccacgcagccctggatgagccggattgccttactaaggatttcctccgtatctgactgcaactcagcacttcagctgcatgcgagacaagtgaggcctgcaggagcaggtttggtcttgacgtgcggatcattgaacttagggttaattcagcttgtgggggaccttctgagccaactgcctcaggagattgtcttcatggtgccggatgggaatgttctcatactctgctgcattggagatgatctcgataagccctcgcaccttggtcttggcattgagggacatgctgaagagcttcaattggtggtgtagttgatgtaatagtaggcggcgatcatgccttaggttcagaggcgccacgtccatctcgtcctcgatgctgatgcacttggactgctccaggtcactcagggtctgctccaccagctctgacaagtggtccgacaagtgacgatgggagatgccctgcaggttgtagtaattggggttctgtgtcatgcggcggtacagaaaggtccaggtgaggtagtccacagcatcctgcttgttctcaatggtcttggtgacgatctcagcattgaagtggtcatgcatacagtggtcccaggtgaagattctactggcaaatggctcaataataagaacttcttgaaaaaatccttcttggagccctgacacatgatgacacagcgcccctcatcgtcctgcaaaagggcggttggcgtggcccaccatctgaagcacgtcatagatggggtaatccacataggcgtggatcttgccattgtagtactgggtatccatgatgattaccaggtgggcagccacgttcatgccccagcagagactccgagaagccaccaccacctgggatagcccctgaagctgaagagctgctccaccagggcgtcgctccatggggctgagcccctcagtgcaggtagcccaccccattttaggcagcttttcctttgagtgtgctgttcatttagctttttccaggtacggattcagatccttctcggtgcaagtgcaaagaacctctgccgttggatgtctgctgcacaggtggtgaggatgtcaatggcagtgaggcgggtctgcttgcgagacggcacaaagacaatgacaggcttcttgggcgagtgcttggtgatagcatggtacacaggcttggctatggagagcaggctggtttgtgtatggctgatgttgaagccctggatgtgcagctccaaggggacgggacgcacattgggatggaagttgaaggtggaggtggcactgcagcccagccagtgggccacatccttggcattggagagcgaagagctgagtgccacaatgcgaatgggccgctcaatctgggaggagatgtagcgcattcgggagcagatcacttctaagacaggcccattctcgcccccgataaggtggacctcatccaccacgaagaggttgatgttctgcacgttcttgcgctgcttccatcgccgggaaagtatgtcccacttctcaggggtgctgatgataatgttccctttgcccagcagcttcaggtctgtgctggtctcgcctgtcaggagtaccaccttcttgttgagcctgtcctggaacttctcgtaccagtccatgtataccttgctctgccagggcctccatgggggtgatgtacacacagcgcccctccgagctctgcagcagcattcgcaggatggcaaactctgcacaaatagtcttcccgctgcccgtgggggcccccacaaacacgttgtcgtcactgttgtatacagtgttaaacacctgggtctggatgggattgaagaaaggaaatttatcttggtaaagactctcaaaggcactgtttctcagagcagacacgggcaagggctgcaggtccaaaagttcggttggaggggggtacttctccggcaagatcaggtgccggaaggagacaggcagctgggtctcacaagagagccagcggtcagacaccactcggatgaagtactgagggggcagcggttcaaagacaggcacgaagaatgtaatgaggtgctcgtcctgggcgtacttggccttgaggagaaaatactcatggtgcagaatcacctcgctgtccacatcctccaccagaatccaaaaagcctcggatgaaccatgcaccttttcatcccactggaaagtnctggccgtgatggtccaactccaccttcagggtggaacgtgtgataggctgcaggtgcactgacaactcccaacttgggaaacagatggacatatttgtggatggtcttccccatctttggcatgcggataagctccccaatctcattatgattcaggtcgtacagacgctcaaaggggaaattcttcttctcaatcttcttcactacttcctcagggagtttccggaactggcgcagaggacacatggactgccacatgcgtttgtcgatcatcttgcagaggttcagggtcttgtctgtaagctgtgcccaacctcggttcaggacaatttcaaatatcgctcgcatcaaccggccagccgactgtgtgacatacaccatgtcagccatcagtgcaaagccctccaatttcagctgtgagatgaaggcttgcagaagaacgttgatcttagcactgggttcctcaatgctctcctttacagggataggcaccctctccagcaacttctgcagctccagcttctcctcctctctcactgtgatgttcttgaactcagaggacaatgagaagaccctgaaaagctcaatctcactcagggtgggcttcagcagctggttgtaagtctgcactgtatcattggtgatgtagtagtggctggctatacggcccagttctgtcacctggaagttgcccgtcttcttgtcgtacttgaccagattgttcttgtccagcatcagggcagctgtatgaaccagatctagtcggcgctggtccagcaggggatctcccttgaggtcatcatgagagatgccatagagggttggggatcgcagcattcggatatagaggtaggcatagcccagccagttcaccgcatccttggcattctggacatttcctagcacgatttctgcattgagcatgtcaggaagctttgaaaccatctggctttcaataggaagttgttgattgaggagggacaggtagtactgtagctccccatgagatgtgatgagtatgccttcacccttggtgtcatactggggtcttccggcacgtcccagcatctgcagaatgtccagtgctcccagttctgtccaacgccccttctctggactgtacacctgggtgcctttgatgatgactgtatgtgcagggagattcacaccccaagctagagttgcggtggaaactaaaacctgaatatgtttatcaagcaaaaagatcctccacgagtgttcggtcaaccctggtcatgcctgcatgatgaatagcaaagccatagggcaaaagatccttcagctccaagttcttgcactgctctgcttctgtacgaaggacttcagtggaggcagaaccctcgcgaagaaacagacccaaagtgtccttctccagacacatgtcacggattgcccttgctgtcttcccagtttctttgcgagaatggacaaacacgagcacctgattttttccagcatgttccatgattttctcatagactatttcattcatgatctggaaacgtttgatagcttttttctctgtgatgcccacatatgtttgttccagaggcacggggcggaagctgttatcaaagtagaagaggcccttagcagggtcgactcgcagaaaggtggccacatcttcatagttggggagggtagcactgagaccaatgagtcggacatcttcttgggtcatctcaatgtttcggatggccctggccaccaaagcttctaagacaggacctctgtcatcatgtagaagatggatctcatccaagacaatgagtcgcaccagctgggtgtaggtgcgctccccgcccttgcgtgtgatgatgtcccacttctcaggggtgcagacgataatctgtgtggcactgatttcctccttgcatagctggtgatccccagtcagctcagcaacagtgatgccatatgtggccaggcgctttccaaaactgcccaccatctcctggaccagggaccgcatgggagctatgtagatgatcttgaagtcatccacattgattgtgccgtccatgttgatgtgtttccctatctctcggagcatacacatcagggccacgttggtcttgcccgcaccagtgggagcacacagcagcaggttctcatcagtctccagggcagcacggtagagcttactctggatccggttcagcgttttgaagccctcaaatcctgcctgggcatactttggcagcttctccaccgggagcaattgttcttctgagccaaagggcttgggcttcaaagcaggcacatgcacctcttcatagcccttacgctggcgacg

SEQ ID NO: 74826 - DNA, 2716 bp, Homo sapiens; identical to SEQ ID NO: 61550

SEQ ID NO: 74827 - DNA, 2022 bp, Homo sapiens; identical to SEQ ID NO: 61551

SEQ ID NO: 74828 - DNA, 2296 bp, Homo sapiens
cgcaggcacgtgctaccaccacgcctggctaatttttagtttttttacagaagcgggcttttgccatgttgtccaggctggtctctactcctgggctcaagcagtcctcctgcctcagtctcccaaagtgctggaattacaggggtgagttgctgcgtctggtgttggtgactttctagagattactttttggtttacatcattttccttgtgactatttttacttttttggggggcggggggacagtcttactctttttagtttacatcattttccttgtgactattctatttttacttttttagggggcggggggacatgagtctcactcatgttggtcaggctggtctcaaactcctgacctcagttgatccacgcccttcggcctcccaaagtgccgggattacaggcgtgagccactttgcccggcctgtatttttacgttttaataaatccccgtatttttgttaaaggctgggtaacctgactcctcccctcatttctactgcaaaataggagtacactggggcctcccagtggagctgttctctgctgttttaaattactttctactcctccctttctaacgtccactcctggactcatttgttagatcaatatatactgggactgttgtgttttctttgagtgtactagatctctttccagaagagcttcccttgatccagatctccctaattgggaatgatgatttcacagactagagtctccgatgctggtcatgatgtcaaaactaagttctgactcatttagggaactggatacttgggtctccagaagggccaatgggagggccataattctgtttattttcaaattgtcttgttttcaccttgttagaatgaactctggaagcccagccagggacaatgcaccttcacagagattctgcactaatctgagtgaaggtctaaggtttggaatctccccctcatggagagaagctttgtatggctgtcatgcttagacagtgattcctgcaacttgaccttcaggctgggagaggtggagagccatgcctgttctccttccttgctatggaatttgctgacacaatatcttccgcctggtgctgggcatatcctaagaacttacaactttcctgtattatcctgtgtgagcagctgtcaccttattgggggaaaaatgcctgaaaattagggggcacttcaagtagatagcttctatttcctatatttgtcttatatacaagtatttgcttttatcaaaataattccaataaagcattttaaagtaaagaataatataggaaatagaagctatcatacttgaagtgccccctaattttcavtgavattttcccccaataaaggtgacagctgctccacacaaggataatacaggaaagtttgtaagttcttaggatatgcccagcaccagggcggaagatattgtgtcagcaaattccatagcaaggaaggagaacaggcatggctctccacctctcccagcctgaaggtcaagttgcaggaatcactgtctaagcatgacagccatacaaagcttctctccatgagggggagattccaaaccttagaccttcactcagattagtgcagaatctctgtgaaggtgcattgtccctggctgggcttccagagttcattctttactcaaggataacacggcgatgaacgtcttacaactcagttgttttgagtcagcaggggctgtggggccgctagccgagttccccctgccacgagctaggtcagttccaagcaaagacaccagaaactccagtgtgcaacggtagttcacccaactgcactggggaccgccctctcctaccccagccaggccgcgacgtggccgcccgccggctgctgcgcaaaggcagcgcaagccgttgggatcccctgctccccctcactcaacagtcgggccattacaactctcatactgccaacccacgagcccacttcgcaaccacacttatccccaccttggctatcatcacccgatgaggcaaccagccagaacgcctgaacgcaggcacatacttcctattctacaccctagtaggctcccttcccctactcatcgcactaatttacactcacaacaccctaggctcactaaacattctactactcactctcactgcccaagaactatcaaactcctcagcctcccaagtagctgggactacaggcatgcaccaccacacctggctatttttgtatttttactagattttcaccatgtttactaggtttcaccatgttagccaggttggtctcaaactcctgg

SEQ ID NO: 74829 - DNA, 1671 bp, Homo sapiens; identical to SEQ ID NO: 61553

SEQ ID NO: 74830 - DNA, 3035 bp, Homo sapiens; identical to SEQ ID NO: 61554

SEQ ID NO: 74831 - DNA, 1832 bp, Homo sapiens; identical to SEQ ID NO: 61555

SEQ ID NO: 74832 - DNA, 1651 bp, Homo sapiens
ttttttttttttcagtgaaattgaatttttattccaaatgactaatatctagaaaggcagtagctaacactcaaaacaatttgtttaagtgtaaattaaaagcagttgatttgcaggagagcaaacagtggggtagtggccatggcactctgatcatggttatatccaagaaagcataaaataaccaatgtcctgatatgcaatctggatgtgcagcatttacagcaaacaacataaaaagaaagaaagaagaatggaaaagaaaagaagaaaaaaaccaccacaaagtcccaaacctcagaaattaacattcacttaagaacacagtggtgaagacttttggtagcaaaatctgcacggttcttaaaatgggagtcttcaaaagtacttcttcaaattcaaaagctaagaaaaccaaagagggaacagttacacaggcttagtggagatgccgcctgtcatgaagatgaccatcagtcctacttcccagacacagtgagaaccggtgagcctgacgaacctgaaggaaaaggccggctgacgggtgctgatgccactgactatacaagaacacaccgggtcaactcatcattgacagcgagagacacactactgctcctcctggctgatgccaaggctgcctttctgcacctcaagctcctcggcactgaccattgatgggtcaatggccgcgtatttggttccatggaattgcagcaaatgtatctgtacataaagattgacctctgcacttctgcacaggtatgggaaattgcctcctgttttcagatgagctcttcgggcattaggatacagcttgtacatttcttctttagcttcagttgaaagcgcactctgatcaaacacatccataatagttacaggtatgtcccgaattttatgaggttccacataagaattttgacaattcaaggtaagtcttgaagccagttcactctgacccaaactttctagcctgtctaccatgaaatcaatggcatcagccatcatagggtccaccgggccagatgaaaaatttccaagaactatttttttgagcataaatgcaggcatcagccaaaagctgtttgcagtccaagtttggttgaagatagaggtgtcactgaaggaattgcagaggattagggaatggactctaggagatttgtgagtgtattcagcaaatttctgggccaaaaagcctcccaaagaagcgccaaaaagatgaactttatccaattgtaaatggtctaaaagttttctgaatccatcacagaactcgagatggtcccaataaactggatactgcaaagcgataacccggtaaccccatccagtcagagccaaaatctgccggaaaaagacatctgcagttccactgacagggggcaggaatatgagaggacacctgatacttcgggggcccgcgtcatagagcgaccatatcttactgtcatcatcatccacaataatctttttaaggggaactgtacctctaaaccagttataatcaggagagactttaatctctcccatgattagctgaaatggaggttaatcctgccgtggccgcccccacgtcccttcccctccttcaggaggccgctcttcgctccagtacgagcgcgggccgtggaggcggctgggcccg

SEQ ID NO: 74833 - DNA, 3019 bp, Homo sapiens; identical to SEQ ID NO: 61557
  misc_feature (1)...(3019): n = a,t,c or g

SEQ ID NO: 74834 - DNA, 1617 bp, Homo sapiens; identical to SEQ ID NO: 61558

SEQ ID NO: 74835 - DNA, 867 bp, Homo sapiens; identical to SEQ ID NO: 61559

SEQ ID NO: 74836 - DNA, 1722 bp, Homo sapiens
agcttccagcccagtcggcccggcccgggggccatggagctccgagcggcggatcgcgagcctcctgcgaaccccagcctgcacgcccggttagcattcggccgggagatgcggcagtggaatctggaagggcggtgaaaaacctacgtcctgccctcgcccggcctctccattcgtcccccgggtagagaggtgcccggctcccaccccttcccagccccagccctggagacagcagcccctagactactgagggacagcgacagcatgaaggctccgggtcggctcgtgctcatcatcctgtgctccgtggtcttctctgccgttctacatcctcctgtgctgctgggccggcctgcccctctgcctggccaacctgcccctggaacaaccaacttccccaacaggctcccaggccccactgtgcccgggacccctgcaacttcaagtggaataatagcagtgtgccaagatgggaaagccgctggtcccgcgaagcccctgccgcaagctgtgcccgtggtgtcccagctccggcccaaatgctgggctcaggccctgggtgctgagatcgacagtgcccgagtgcgtgttccgcatgaaccaggcgccccaccgtgggctttgaaggcggaatgttgggcccagcgcagcaccctgcgtgtcgtctcacacacaagcgtgccgctgctgctggcgcaactattcacactacttccagaaggcccgagacacgctctacatggtgtggggccagggcaggcacatggaccgggtgctcggcggccgcacctaccgcacgctgctgcagctcaccaggatgtaccccggcctgcaggtgtacaccttcacggagcgcatgatggcctactgcgaccagatcttccaggacgagacgggcaagaaccggaggcagtcgggctccttcctcagcaccggctggttcaccatgatcctcgcgctggagctgtgtgaggagatcgtggtctatgggatggtcagcgacagctactgcagggagaagagccacccctcagtgccttaccactactttgagaagggccggctagatgagtgtcagatgtacctggcacacgagcaggcgccccgaagcgcccaccgcttcatcactgagaaggcggtcttctcccgctgggccaagaagaggcccatcgtgttcgcccatccgtcctggaggactgagtagcttccgtcgtcctgccagccgccatgccgttgcgaggcctccgggatgtcccatcccaagccatcacactccactccctgagtaattcatggcatttgggggctcaccccacctccaggtctgtcaagtggcctttgtccctggggctgatggcccccaactcaccagcatcatgaccttgtgccagtcctggtcctccctccccagccgctcctaccaccttttggtgccacacttctcaggctggccgccctggttggggcagccgagagcctggggttcattggtgaaggggccttggagttgtgactgccggggccgtatcaggaacgtacgggtaaacgtgtgttttctggatgctgtctctagcgtggtcatgtgtctgatgtgtttaggggtggagatgagggtttctttccctgtcacagacccagaagcattttttttttgggaagggggttttttctttttccccacccgggtattgctgggggccccttttggcttatttaggc

SEQ ID NO: 74837 - DNA, 9502 bp, Homo sapiens; identical to SEQ ID NO: 61560
  misc_feature (1)...(9502): n = a,t,c or g

SEQ ID NO: 74838 - DNA, 1682 bp, Homo sapiens; identical to SEQ ID NO: 61561

SEQ ID NO: 74839 - DNA, 1145 bp, Homo sapiens; identical to SEQ ID NO: 61562

SEQ ID NO: 74840 - DNA, 1242 bp, Homo sapiens; identical to SEQ ID NO: 61563

SEQ ID NO: 74841 - DNA, 922 bp, Homo sapiens; identical to SEQ ID NO: 61564
  misc_feature (1)...(922): n = a,t,c or g

SEQ ID NO: 74842 - DNA, 3556 bp, Homo sapiens; identical to SEQ ID NO: 61565

SEQ ID NO: 74843 - DNA, 2242 bp, Homo sapiens; identical to SEQ ID NO: 61566

SEQ ID NO: 74844 - DNA, 2329 bp, Homo sapiens
  misc_feature (1)...(2329): n = a,t,c or g
tccccacctgaacctgtggttaccaatgctatgcgagaagacctggcggatatctgttacatcagggctgtgaccgtctacgacaagcccgcatctttctttaaagagacacctctggacctgcagcaccggctcttcatgaagctgggcagcatgcactctccgttcagggcccgctcagaacctgaggacccagtcacggagcggtcggccttcacggagcgggatgctgggagcgggctggtgacgcgtctccgtgagcggccagccctgctggtcagcagcacgagctggacagaggacgaagacttctccatcctgctggcagctttagaaagtagagtttgaacaactgactcttgatggacacaaccttccttctctcgtctgtgtgataacaggcaaagggcctctgagggagtattatagccgcctcatccaccagaagcacttccagcacatccaggtctgcaccccctggctggaggccgaggactaccccctgcttctagggtcggcggacctgggtgtctgtctgcacacgtcctccagtggcctggacctgcccatgaaggtggtggacatgtttgggtgctgtttgcctgtgtgtgctgtgaacttcaagtgtttacatgagctggtgaaacatgaagaaaatggcctggtctttgaggactcagaggaactggcagctcagctgcagatgcttttctcaaactttcctgatcctgcgggcaagctaaaccagttccggaagaacctgcgggagtcgcagcagctccgatgggatgagagctgggtgcagactgtgctccctttggttatggacacataactcctgggccagaggctaaaaccccaggacccctgctgtccttcccgcagcttcttcttggagtctcagggcaaaccctttcgagcagcacctcccagtggccagaagctgaaatgacagcagtggtactgcctggtaaaagaattggttctgtgacccgggaagctttggttggccttgatttcttctctggaggcttggaaacgcttcctctcttcttctgttcttcacgccccatgcccctgctagcgtattactgttctgtgacttccctgtgacctctgcagaactcctcatcctgcgtttggtctccaggtgtcccctttctgccgtgttcctaacattttgattcctgtcttgaaaaaagcacctgctgcaccgtaagcccagggatgtggcagctgcagtgggcttggctttgtgaggaactgagtgtgtccacgttgggggaacatcatacttgatacacacgtttttatttgcacaaagaaaatgctgtttttggagccagaattttcatgtctgatttatggtgattttcttaagaaccagaactgctggcagaaagggggcacccacacgcttagatagccgatgtcttattagagggcagtttgtggttcctgatttggaaattaacattctccaaacattccagtccaatgaaagttttatccgctttcccatataaaaattcttcccatgagagtgacttgattctcacaatcccgttggagtcgtgtgtgagtcctacagtattaggttcagcattgccatctccaagtgctcttcgtagggaaacagtttctggtcatgacaagcttccacttcccatctgatcccggcccggccggcctctgcccgagttccctgcatggtgtgggagtgtggggcatgctagctttacgccggcgcccagttctttcacttccactggagtcctgcagggacagctcggggaccatgcaggcccgggtgggcgtggggactcaactagctcagtggtgaacagctggcacgtctgtgggttgtggacggtaaaggccacgtagacctcaggagcccgctggtgctcccggcaggcagccagcctccgcaggaccccgaccagcgacacgatggcttctgggcaatacagcacgtcagcaaatagctccggtggccctgggtggactccttggccatcagggtctccgccagcacctcgtacagctcatccaaaggctctgtgtggacagcctcgtgctttttgatgagttctgagagaaagcaccgggcatacttgactgacggcgggtgcttcacacacacaggatgcttcacagtctacttctgcaaaatatcccgcagcagctcagaatctgatgagtctcttaactttgcttctaagctctgccaggggaaggagcgcagggcgcgcgccgccaggaagcggcgcttgaaactctgcagcaagagttcgctccccgacgaaatcgtcggtnnnngaaaaag

SEQ ID NO: 74845 - DNA, 2166 bp, Homo sapiens; identical to SEQ ID NO: 61567
  misc_feature (1)...(2166): n = a,t,c or g

SEQ ID NO: 74846 - DNA, 3136 bp, Homo sapiens
  misc_feature (1)...(3136): n = a,t,c or g
ttttttttttttagattttccaactacacagtttattaagtaaagtatctcaacaatatctcagagcagtaaaaaccaaggcatccccaaacactgcatgcgtgacttagaccagcaaagaagtcctcaaactttgcaccaagtcccaacattggccagcagggggcaagtggtgaagtcttccggaacccaagtgccttggcgctgactggcccccattcgatgagtgagcttggatgacagggccggcttggagataggacaatcggcttcacagggtccttttcatgtccgatccccttaagcattcccgagggagccacaaggaacttgggggcggtccgtgcaaagcgtcggcattgaacagggggtctgtttgggaggcttgaatggctctggctgcctctggggtggccttcaagccaaactgggaaacgacttgtctataacccctggggaactcgaagtgttcgatgctcactcgggaagcactgataaccttccccataggggaaacgactcacaaacacaggactccgtcagtagtttctgcagagaaacttaaaatcatgaaaagggtcatcaatcaacagatctcagaagtcactgtgcagggactactgagggccgcgagaggaagtgcaaacctcagctgaaaagcaactcagggtggctgagtgagccctcacttcccggaccacccgcacgtgcagccaacacctcccaactacttgggccaagtcggctcttcgcctccaagtggaggctgctgggtctcttcggtctcctcctcgccccaagtcctgtttctccctctgggcgtcggaaccaacctctgcggtgcggatcattttcctttcgnccatggggcggcgggccaatgagagcctcaatgtccctcaatagtttatcacttccttttccagaagggcgtttgccagcgcctgcaacttgtcccaggttgtcctgcagcaccttctcggtgtgtctgtaggccttggccaccagcagtcttgcttcatggtccatcatctgctgcaggccttggctgaaggggcgccgcccgatgcccatgaggccctcctgcgcctcagggaaggagatgggcccgatgccaggtgccatcccaaactgcttcaccatggagtaggcgatgcgggtgaccttcctcaggtcgtcctgtgccccagaagtgacctcgttgaaggacagtgcttccgaggcccgtcctcccaaggccatgcacatccgctcaaacagctgctccttggtgaagaggtgctggtctctggggagcatctgagcaaagcccagggcggcgtttgtccgaggggttatggagaccttcatcacggcctccgtgtgctccagcatccagcccaccaaggcgtggcccgactcatgaaacgcaaccactttctgttcttccttggacaggatcttgctctttttggcagtccctgcgaggacgcgctccacggcgtactcgaagttgagagtgtgcacgagaagtgtgtccctaccgcgccgcgtgcagcacagcctcttgccagatgttggcgatgtcagccccactgaatcctggtgtcagctctgccagacgctgggagtaaaaggtgctggactgggtcagcttcaggctcttcaggtgctgctcaaaaatctcccgcctctcctgcagcgtggggagatcaatgaagacgtgccggtccagtcggcctggcctcatcagagcaccgtccaaaatgtcagctcggttcgtggacgccaggacgatgacatggtctgtggtacccattccatccatttaaaccagaagctggttgagcgtctgctcctcctccgtgttggagaagccggacatggtggtggagcgcttcttgcccaccgcgtcgatctcatcgatgtagacgatgcagggggcccgggctcgggcttccttaaagaggctccgcacacgggcagcgccgaggcctccaatgacctccacgaactctgggccggccatcgccaggaagggcacctgagcctccgtggccaccgccttggccagcagcgtcttcccacagccgggggggccgagcagcagtgcgccctttgggaccttggcgccaagctggaggaagcgttctgggctcttcagataatccacaaactcgcggacttccagtttggcttcgtgcattcctgccacgtctttgaagctgactcctttccccatcttcccatccacaatggtgaaacgagccattttaagctgattaaaagcactgaatccaccttcccttccagtcatcccggccagacggaaaacataccacaggatggccaggcccactgccgtcatccccacagagtacagggcatttccaaagaatcctgttcgcttgtaggaaactgggatcctgtccttggcctcgatattcagctcatcttcagctgctcgaagcttctcttcaaacttgtcaatatttgcaacctgcattcggtacatcaaggctagccgaggccgcccaaacaccacggctccagggtgcaggtagacttccaccacgtcgctctcaggcaccacctggacgcgctgcacctcgcccttggccagcatctcgtggacaaagtcgttccaggaaatgctgcctccgctggtgctgagagcattcaggaggctcatgacaaccgcgatgaccagcaaggtgcgcagccgctctcggtacatctggtcgtcccgctcacggcgtctcctctcctcttcgtcctcttcaggcgccttccccttcgacttatccttctccttattcttctgcttcaaccttgaggtgttaaaatagaaagtaccacctaaaagttgccagagtctgactggattctgaactaaatgttgtttcaacaacaatccgttgatcccttcaaaggtaggggttagcagtctcaattgtaagctctgcagagctcggcctccagcctcggcgaggtcccccggaggcctgctggccatgtacggccgccccctcccgggcctggcggggaaccctggactccaggccgggcctgggccccacagcggccgaggacccgggcctggaccccggcggagggcacggagcagcagcagcagcacggccatgttggcctgaaa

SEQ ID NO: 74847 - DNA, 2137 bp, Homo sapiens
ttttttttttttctgtttatgacactttattgatgctgggggggtggggaggagacctggagaaatatgtgggggcaagagtccccaggtggggacagggaaagtgttgaagcctggccactactgggcagggaagacagagttgccactgtatgcacaggggatgagcagctgccggtactccaggggcaggtgccgctccactagcacgtgcagtgagacttggtcagtgaccaggccctgccgccgcatcagcagctccaggtcctctggcttcacagtcttgcggccagcatgagcagcaaatacctccagatcatcacaaagatgctggaaatatttatctaggcacttctccaccatctcaagagccttcctctccatggggcatcttgggcataagaagctaaaagagttttcacattagtggctcatatcccagccttgtggggatcttgccggggccctggggccggtggtccggggcctagggggatgccctgaccaacagaggctctgcaggctctgaagataagactgcagcaccaggcgctggggctggctcaagaaactgatgatgtcgcctggcctggagagactcaggggtgctggaggccgactctggacttgctgccctgccagaggcatcctcatcccctgaagatgctcctggcccgtcagcctcagcagtcccctgggatccctctgcttctgtcacctctgtgtgtccctcagcctcttctaccctgctgggtccttgtgctcctgttgcctccatttcactcacactcacaccttcttcttccatctttttctctgcctcttcaactccatcgtgtaagggctctacttcatcttctccagagacaccactgctggtgctcaggaagcccagagcaaaggcattgacctcctctgcctctcctgccagaaactgggctggtttcccagggcctgagtgaaggggagagaatacaggccggagacgcagcaggccaaggctgcatagctcagagaagggtaaagatggaccagcagacccagtcctgcccactgaggaaagacaaagccagaggcagcaccaggacatggatctgaagtctcctggcccaacatggactctgctcttggatgaaggaggcagccacagccagggtgctctaggggcacagaggggcttgaggaaggaaaactaccattgtcaactctcacccaagctaaatttggctccaggccaccagtgccacacactcactattcttctgcagcccaggcccactgctctgtgtcttgcgaccggcagcctgctcagcgtcttcagccccagtgtgaggcgtgcagggcagggagtgatacacgttgggggagccaaccatgggctgagagaacggctgggtgtcctccaacacaatgtttggaggagccagggaagtatctcgcagatcccgcaaaaaggcacccacgtctacagctcggcgggctggaggtctgcgggccaagccaggcctctgcactgactgtggctgaagaggtgtggcaaaggtcaggttgagggatctggtgagggaagaggcatcagcattcccttgaggctcttgggagagagacagcccctggtccactccctgctgaaacactgacagtctcagcctctgtttcctcctgccaggggccagcagacctggagccagggttgtggggggctcgagctcaggaagttgcagctccaggctgccgcaactgctctcttgtctggagggttggaccgcctgcggtgctggcactggcttcactaccgactcaggcatcaggatggaagattctggggcagttagtaggatgttcttcagcagcgtccgaggtgtctgttcctccaagtgcccactggcctgaatatgggccgatctgccaacagacctggctccatgggaacgccctctggctatcgtccttgtttggccactcaacttcctgggggaagccgtttcaagcagggctctccgggctccagcccgagcactccggggtcgccgcggggtgcgcgggtccgctgtatccagcacgcgtcgcagcagcgtgcgcggcgtggagtcgctgtcagggttgtggtcagccatcgtctcggccccggacgaaa

SEQ ID NO: 74848 - DNA, 824 bp, Homo sapiens; identical to SEQ ID NO: 61569

SEQ ID NO: 74849 - DNA, 1212 bp, Homo sapiens; identical to SEQ ID NO: 61570
  misc_feature (1)...(1212): n = a,t,c or g

SEQ ID NO: 74850 - DNA, 756 bp, Homo sapiens; identical to SEQ ID NO: 61571

SEQ ID NO: 74851 - DNA, 2932 bp, Homo sapiens; identical to SEQ ID NO: 61572

SEQ ID NO: 74852 - DNA, 777 bp, Homo sapiens
  misc_feature (1)...(777): n = a,t,c or g
ttttttttttttaagggagaacagttttattagcatcacagggtccatttttccctttccatccaagcatccagagtctggtgtcctttaatcagttggcaggttcaacctggaggccactggagctgccggcccccaagtacatgaatgtgcagatgatacacagattgtgcacccagcttcccatcgttgatcacaagtcggtatccatctcccaggccctcagcctttgctgtctgcttggccacaaggagtaggtgtcctagaagctatagagagagcggagggacataggtggctgctggtcttcttcttcagcctggctaatccgaggaatgggcttcttaggaatgaccaggaagtgcacaggagcctgaggggccacatcacggaacacaagacactgctggtcctcatagagaatgtcagctgggaggctcttgtccaggatccgggagaagatggttggggctgctcccccaggagttgcctgctgggccttggccacttcattcccatcagtcacacctgcagctcctcggacctgccccccgcgcacccccgtggccgccacggctctgcgcgccgcgcgcaacccagcagccagcaccacggctgccgccatcttccctgagccgcgggaacctctcacccgggtcagcactcggctccgcggccaaccgtgggtggggactccgggcncggcgaacgcgtgggcgnacgcntnctcacccanngtnnaacnnntnctaaatttcccnnnaaagaaagcagcct

SEQ ID NO: 74853 - DNA, 6313 bp, Homo sapiens; identical to SEQ ID NO: 61573

SEQ ID NO: 74854 - DNA, 3206 bp, Homo sapiens
ttttttttcctaggcaactgttggcccaaaaaaaaaatttattttcctttcaaataaaatgtacaaccaaaatttagggtttggagcagtagggaagacaggagataccagggagcccattttacagtagagatctgcatctgacccctctatcccatacctttgcaaaggaagggaggggtctacaagccagaactttcagaagagaagaaaatacatgctgtgctggtgctgtttctggagcaggtcatcctttaggtatagaacaccacctccacccgatgacatcagaaccactgactggtagagcccttggaaatcatacagtccacccatcccccgccagacacatggacacaccgaggctcagatggggaagggtacataccctagggcacacaccaaatcaaaaaggtgaagtcaggactagaacacctgagcaactttagcaggggactgtggccacaggcctggatgtgcacagtagatcatgaaatacattagtcctagtgaatgacccccgtgcagagaaatggcttgtggttgtcagggagcagccacttgcctcaggggctccctgaccctcagtgaaaggtgactgtgtaaaggccaaaaactggatggtggtcatgaacctcaggacgttttttttttttagcaccaaatggtggagctctctgccagctcagcttcttggggcctctcaggtaaaggtgatgtttgaggaccccacgcccatatgaggggtggagagaagccagcagcactggggtgagccttggcctacacccttccttcttacccttcccccatcttcagtaaggccaagagaggatgtggggtggggaaggccagaatggtatcgtgtttcttgtttctgggcagtgggctgcgtcctcccaagcaggactgaagggttcagaatcgcttttcctcaggctgagaggttatgagcagctccttgttcccgaagtcccaccaggccgtcatgtggaacgccatgttggttaagacaacagtgtactccaggatggcaaagatggtgtacactccagcctcacaatacatgttgtgccgaaagtagacagccagcgccgagaagaaggagatgaagttgatgatgaagagccgctgtttccagctgtaggacttgcgatcctagggaatgggctgtctgatcactctgcagcttgctgggtatgagagcgtgggctcccctctcagccctaactcctaagggctgggccttatctcccttggctcccactagcggtcatggaagggagcacaggcaggggcagcaagaatgacgactatgtgttcacgtccctgcctctgggggagtgatgggccgaggagcagtggtattcctgccgcttccacttcagggggatggagtatgaaagttacatggagtcacccaccaaccccacctccaaatactgtgggggaaaagaaacccatgtacatgggtggggcgctggaattatgacagaccagtcctctgacactgttcctaactcactgccgcctagatgcgactcctcattctatccccatttgcagcctccatctcttctattctccagtctcccacactacccaaacacagtgctatagtcctagattctgaccaaccaccctcagtttgttcccaagccccagccccaaccccagcacccctctgccagggttcccattagaactcagttcccacctcaccattacccgaatcctgaggacagatgtccttgattttcttctgggctgccttggagcccccgctagggatagaccgtacctcctgacttactgtgtgcttcttggtcaaccgccagagaatgcaggtgaggagcatgtgcccgagggatgaggcaatgaacacaatgaaagcattttcgtggatggctggagggaaagaggattgggagccacattgcagggagtgcccacaccacgaagtaggaaggtccgaatgtggtaggggcaggcccgtcccctcagggaacacttccccactcctccctcatccaggcacccactgaagtcctcggaggaggagacataagtgagcactagcaacgcgaggttctccacgacattgaggccgaagttgaggcggcagagcgggcgatagcaggaacacggggaggtgcagctgaggtagtggttccagtaggcgaaggccaccaagaagcgaggcgccgagtgcaggccgatgcagaaacgccacacgtagcgctggggcacctccccgccgatggctgagctcaccgagggcaggtaattgggcacctagagagttgtgacctgtctgggcatctgcctctgccagccccgcccatgtggagaaccttctctccatctgacaaaatcactcttgcctctgctccagcccctccccttccaagaagtcctccttcagatgtccccatacctctcccaaaagacctctccttccaggtcctaggcccaaagtgctggattctcattccccagctatcctgggatttgtgcagcagcatggtggcaccttctccatctcccccgcagactggaacctgcctgtgtttggtcaatgtgtagatgggttcagatgctcttcacccatagctcagagctgtgcctccactaagaccctgggtgagttccaaggcctcagattcagtccagaggacagggatgagtcacagaccatctgagcttccttagaacagtgctggattcactgctcagctaagatgttcctcagtctgctcccagcgccactcactcctctaggcaggtgtgccaaggtggtagaatggcacccctgctctgatcatgattaacaaagtgggtgggctgggcacgatggctcacatctgtaatcccagcaagaatatggatttttaaaagtttccaaaactgtggaaatggccagtccattgcccacactttctgtgcacttctgcagacctccaacgagggccagcgcagtgccagagcccagcaacccagcaagggaatgaatttgctctaactatggagggacagtcttcggaagtggagttcttaaggaccatcattcctttctttcaatgagatgccagactgctgagaaggtgagcaatgctgcaggcggctcatagggcagcccacaggtaggcctggggcaagactagccatggggcttcacagcctccacaaaaaaggagatggattcc

SEQ ID NO: 74855 - DNA, 4441 bp, Homo sapiens; identical to SEQ ID NO: 61575

SEQ ID NO: 74856 - DNA, 1105 bp, Homo sapiens; identical to SEQ ID NO: 61576
  misc_feature (1)...(1105): n = a,t,c or g

SEQ ID NO: 74857 - DNA, 1731 bp, Homo sapiens; identical to SEQ ID NO: 61577

SEQ ID NO: 74858 - DNA, 1482 bp, Homo sapiens
actacagcagtacataaagttttattaatattctgattctcgtgtcatagcttttatggcaggaaaggatgaggacatgccccacctgtaacgtagagcaagcaaaccaccaagtagaatcttgagattctctctcaactgttctctagaaacacgcttgtgcttttaatctgccttttaaaagggacacagaacaaaaaatggttgtttgcaaataaacatctgaaagaaagtaacagctgacctgggctgaggcatccaaacaaagcagtcattgtggaaggagacaatgcaaaccacactggggcaagaaacggggcagagaacgtgcggtcatttgtgcgttgggtatttctaccagccccaaaggccccatctggaacaagtatcaaccaggaggggctctatggcttgatttattaacctaactcaaaagaagtcactgccaccaacagcactgtgcagttttattaaccattcaagtccagtagcatctggtaagattgggacagaattgggattgaaaagtgaacagatattcagcatctaacagttcaaaagaagccactacatactcttttcacaaatatgttttcacagagccaatacagtactagccattaacccagtacaccaagtgtactgaagtagaaaagatgcaacaagaaaaatagctacattagaaagaccaacactttagaaaaagagtaaaacactttcagtttcttccccttttagcccccctaaaaacaaacatttttacagtcctggatcctgggatcttaccttttacagtcctacattaggctttcttaaaatatttgtccaggagggggaaaaaataaaattggccactgggccaggtaccagtctttgggatatttaggaaggggggatggggaagaaagtcaagttcctcagaaacaaattagtcaggcttcaggtctcgtcgcggacagggtctttgggattccttggttcttccggaacttcttcaatgtgcttaacccttcctcctcgcaaaagttcccaatttggcaacccatttgtgccctctcgggttcctcctttaattagcttccgattttgtgggtgragttttctcttctgcccatttttactgaagttgtttgttctcttctaattgcctttctgcaagcacttctttcttcggtgcctctcggtttctcagccagctgccttcaagacctcaagcttcatggggacttgcgtctttcttctggcagcttcctaattctctcggaatttccccccggggaagaacccttcttctttggggggggagagggggaattctggaacaaattcctttgcccgaggggctgagaatcaggctcaaaagcctggcctgaggcacgcttctccagttctttcacctggatatcagaagaagccatggtgaatagaagacaagcgacagggcagtgtattctgcacaatcaactgggataaggaaagtcc

SEQ ID NO: 74859 - DNA, 5716 bp, Homo sapiens
tgcgaccgccacccccttccccgctgccagcactcaccctctctccgctcctgctcgcaacctcgcggttcctggggtgcttgtgcccactgtgtggacagcgcgggcggacttttgggccggggcgtggcgtgcgggggaggctctctaaggcctccgcctctgcctctcccgcccccttacccgccccggagacgacagcgtcggaggctccgccatggcctcgggagccggaggagtcggagggggcggtggcggcaagatccggacgcggcgttgccaccaggggccaattaagccttaccagcaggggcgacaacagcatcagggcattcttagcagggttacagaatctgttaagaatattgtgccagggtggctacaaagatacttcaacaagaatgaagatgtatgcagctgttcaacagacacaagcgaggttccacgctggccagaaaataaagaggaccatctggtatatgccgatgaggagagctctaatattactgatgggagaatcacacctgagccagcagtcagtaatacagaagaaccttcaacaactagtactgcttcaaccttatccagatgtgttaacaagggtttctctttatcggagccatctgaatttttccatgttggaatcccctgcattacactgtcagccatctacatcctcggcattcccaattggcagttcgggattttcccttgtaaaggaaattaaagattctacctctcagcatgatgatgataacatctcaactaccagtggtttttcttcaagagcttctgataaagatataactgtttcaaagaacacttcattgccacctctgtggtccccagaagctgaacgttctcactcactctcacagcacactgccaccagctcaaaaaaaccagcattcaacttgtctgcctttggaacactttccccttcacttgggaattcttcaatccttaaaaccagtcagcttggagattctcctttttatcctggaaaaacaacatacggtggggcagcagctgctgtaagacagtctaaactacgaaatacaccttatcaggcaccagttagaagacaaatgaaagctaagcaactcagtgcacaatcttacggtgtgaccagttcaacagctcggcgaatattgcagtctttagagaagatgtcaagccctttagcggatgcaaaaagaattccatccattgtttcttctcctctgaattctcctcttgataggagtgggatagatatcacagattttcaggccaaaagagaaaaggtggattctcaatatcctcctgttcagagacttatgaccccaaagccagtttccatagcaacaaatcgaagtgtttattttaaaccatctctgactccttctggtgaattcaggaagactaatcaaagaatagataagaagtgcagtactggatatgaaaaaaatatgacacccggacaaaatagagaacaacgagaaagtggcttttcatatccaaatttcagtttgcctgcagccaatggtttatcttctggagtaggtggtggaggtggcaagatgagacgagaaagacacgcctttgttgcttctaaacctctggaggaggaggaaatggaaggtccagtattaccgaaaatctctctaccgatcaccagttcttcactgcctacctttaattttagttcccctgagatcacaacttcctctccatcacccatcaattcgtctcaagcattaacaaacaaggtacaaatgacctctccgagcagcactggcagtcccatgtttaaattttcatctccaatcgtaaaatctactgaggcaaatgtactacctccatcatctattggatttacatttagtgtgcctgttgcaaaaacagcagaactttctggttctagtagtactttagaaccaattataagtagttcagctcatcatgtcactacagtgaacagtacaaattgtaagaagacaccacctgaagattgtgagggtccttttagacctgcagaaatcctgaaagaaggaagtgttctagatattctgaaaagccctggtttcgcatcgccgaagatagattctgttgctgctcagcccaccgcaacaagcccagtagtttatacaagaccagcaataagtagcttttcttctagtggaattgggtttggggagagtttaaaagctgggtcatcatggcagtgtgatacatgtctactccagaacaaagttacagacaacaaatgcatagcctgtcaagcagcaaaattgtcacccagagatactgctaaacagactggaattgaaacaccaaataaaagtggcaaaacaactctttctgcatcagggacaggctttggagacaaatttaaaccagtgataggcacttgggattgtgatacctgtttagtgcaaaataaacctgaagcaataaaatgtgtagcctgtgaaacaccgaaacctggaacttgtgtgaagcgagcccttacattgacagtggtttcggaaagtgctgagactatgactgcttcatcttccagctgcactgtaaccactggtaccttaggatttggagataaattcaaaaggcccattggatcttgggagtgttcagtatgctgtgtttctaataatgcagaagacaataagtgtgtgtcctgtatgtctgagaaaccaggaagttcagtacctacttcaagtagcagcactgtacctgtctctctgccttctggaggctctctaggattggaaaagttcaagaaacccgagggaatctgggactgtgaattgtgcctagtgcagaataaggcagactctaccaaatgtttggcatgtgaaagtgcaaagccaggcacaaaatctgggtttaaaggctttgacacatcttcctcatcttcgaactcagcagcctcctcatccttcaaatttggtgtctcatcatcctcttctgggccttctcagactttaacaagcactggaaattttaaatttggagatcagggaggattcaaaataggtgtgtcatctgattctgggtatataaaccccatgagtgaaggcttttaattttctaaacacatagtaggttttaaatttggagtttcatctgaatctaagcctgaagaagttaaaaaagatagtaagaatgataattttaagtttggactttcttttggtttaagcaacccagtttttttaactccattccaatttggggtatctaatcttggacaggaagaaaagaaagaggaattgctcaaatcttcatgtgcaggttttaggtttggtacaggtgttattaactccacccgtgttcctgctaacaccatagtgacttctgagaacaagagcagcttcaaccttggaaccatagaaaccaagagtgtttcagtggctcctttaaaatgtcagacatctgaagctaaaaaagaagaaatgcctgccaccaaaggaggattctcttttggcaacgtggagcctgcctctctgccatctgcctcagtgtttgttttgggaaggacagaagagaaacagcaagagcctgtcacttctacttccctagtttttggggaaggaaagctgacaatgaaggagccaaagtgttcaaccagtgttttcctttggggaatttcagaggcaaaccaaagatgagaattcttcaaagtccacatttagttttagtatgacaaaaccatctgagaaggaatctgaacagccagcaaaagccacttttgcctttggagctcaaactaatactacagctgatcaaggtgcagcaaagccagatcttagttacttgaacaacagttcctctagttcaagtacaccagccacttctgctggtggtgggcatatttggtagttccacctcttcctccaatccacctgtggctacctttgtgtttggacagtccagcaatcctgggagcagctctggcctttggtaacactgctgaatccagcacctctcagtctttgctattttctcaagatagcaaactagcaaccacatccagcacaggtacagctgtcaccccatttgtctttggtccaggagccagcagtaataatactaccacctctggtttcggctttggagccacaaccacatctagctctgcaggatcctcctttgtatttggaactggaccctcagcaccatctgccagtccagcatttggtgctaaccagaccccaacatttggacaaagtcaaggtgccagccagcccaatcccccaggctttggatctatatcatcttccacagcattatttcccactggttctcagcctgcaccacctacttttgggacagtgtcaagcagtagccagccccctgtgtttggacagcaacctagtcagtctgcatttggctctggaacaactcctaattctagttcggctttccagtttggcagcagcactacaaatttcaacttcacaaacaacagtccatcaggagtgttcacatttggtgcaaattctagcacacctgcagcctcagcccagccttcaggctcggggggctttccatttaaccagtctccagcagcatttacagtggggtcaaatgggaaaaatgtgttctcttcttctggaacttcattctctggtcgcaagataaagactgctgttagacgcaggaaataaaggtcacattggtgttgtactcaattttaacaacagctggtgccctgctttcagatactggattgtactttgtgctggggttatctgaagtcagatctgcctaaggacttctttaattttggaattttcctcctttctctttcgttacagaagccccaccctgcctcacccacccttttttaaataaataaatagctagactggtgactgattcttcagcaaaaatattttatgatccagcagattattcactgatttgacatagtctggctgtacccaggaatggagcctgcacggtgaatggctttgtatagaacctctttgtctacaccattatgtgcgctgataagcgttcatggaacgcgttgaaattgtaattatatctgaggaattctgtatagattagaattctgtatagattagagagtgttgaaacggatgatttctatgctgagtttgtgctggtgtatgtgtgaagtgagtgagttgggtgtattgtgcgctaaacttttctgatagaggaagcctgattaaagaatggtccgtgctaaggacttgttagatctagttcactctccatttaataattatatgctatttctatattttcattctcctatcacctgtcttgcctttttcattattttattatgaaacttgtgtaaatacaattttgtttctgtactttttggcataacataaatctgtgaacttgaaatttgaattttgtgttagagatttttttgttgtttgtttagtcttgtctcagattttattatgtaaatcccattattcaaagttgcctaaatccatttggaaatctttaaaaaaaaaattggggattcttaaagttgaatttattggcttttctgatccagttttgtttggaccaaaaaccagtattgtacaaagtattaagcatatatttttatatttactaaaatggactgtggtgactttggataataaggaaaagtttaatattaaagccatgtttattacagtataattaacatgttaaaccatgggataaatgccatcaataaaaattattatgacat

SEQ ID NO: 74860 - DNA, 2351 bp, Homo sapiens; identical to SEQ ID NO: 61580

SEQ ID NO: 74861 - DNA, 2238 bp, Homo sapiens; identical to SEQ ID NO: 61581

SEQ ID NO: 74862 - DNA, 2123 bp, Homo sapiens; identical to SEQ ID NO: 61582

SEQ ID NO: 74863 - DNA, 798 bp, Homo sapiens; identical to SEQ ID NO: 61583

SEQ ID NO: 74864 - DNA, 1624 bp, Homo sapiens; identical to SEQ ID NO: 61585

SEQ ID NO: 74865 - DNA, 2641 bp, Homo sapiens
ttttttttttttaagagagaggcaattttattcttccaaaaaaatgcaccaagagagggtgagcacaggagcacccctggccacatcccccatcctaagcagggtctgagatgaggccaggcctgacgtgggcttgggagaagctgacggagctccctgtggccttggggagggaaccaggcagacctggaagtggaactttgttgttagcaccaggagccgcccacagctgggctcggcaacagggcagcacatggccctgttgcctccacctgagagtctggggaggggctggtggcagaaggctccctgcaggaggtcacctgaatgactctcagattcacagaccccctctgcccccacaacccctgtaaacatgagaatgggctcgtgacaccctcaacacctcaggacaagatgagggtccgagatgtgtggctgggcttcaggcggcccaggagctgccgggctttctcctgcatgaaaagctggtccctggtccccccgcaggccaccgtcttccaggcactggacataggggcaggtgtcgtgaagtggcttcggggcttctgggccactgctgccttctcgggcttggcctgcaagaagccctggttgagcaagctgttgtcttctttgatacctgacagggtgaggctggaagagtttgaaggggcagttgtcggcaaggatagagacttgggcagtgtggacatcatcagcttcatatcctcatccacaatgtcaagagccagagacttccggactttcttgatggggctccgccgcagcccaggcttcctcttctgcttctcgggcctgatgtcgtcctcgatgatgagttcgatgccagcctcagaacgcagcacctccttcaagtcctcctccaggtgcggggtctgtggcaggggcttcaggggtccgtacttctccagggcgttcttgaacggggttggcgtgtggggagtgttgtccatggagtacttctgatctggggttacaaacgcagcatgtttctggtgcaggggtgtcttgtcccggtgcagtggtgtggtgaccaccaccttctggctgcacactggggtggatgtcagcgaggggctctccagctccaatgtgtcctgtttgttccagaagttcagaaactgggagggcgagaagggcagggtcttaacaggtgtgctcttgggcgtgaggctgttacaggaatccaggaaggacagactggtgctattctcagtgacaggggacagagccacacgcctcttcctctgccgcttgagcacagagggcggtgtgccaatgccagagcccccgacttcagtgctgggggagatggggatcagctcgccccggctgctccggctcaggtctgagatggtgtggccatccaggcggtactcggtcacactgggcaccacgggcggaaggctggcggggtggcaggacttgctgctgatgtgacgcttgcagctgcactaggctgttgttgatactgtcctctgcagatggttcctcagggaggtcaaatttactcaggtcacaccaagcatcagggtccgactcgatcaagtccagggcttcagagaggctagaacccacagcggggatgaggaggttagctgcctccaccacccacttgtaaggcaggctcgtttctggtggggagccttcctggtcctcacgcttcgggaattcctccaagggctctggtgttcgcactgcgtccagatctgtaccgatgggctcctgttccttcgatgtggtggctgctgcaagttcctcctcactgttttcctcctcctttatggtaggagggacggagggccagttggtcagaagacttccctggccttccgtgggctgggcactctggaggccgtccttgtcctcgagctccagcagcaagtacactgggggcttgcagtctttggactcgctcaagaagcctcctgtgtccaccttccttttgatggtagagttccagtgattcttcacagcattgtctgtcctccctggcaacatcttggcgatctcggcccagcggttgcccagcaccttgtgggcctcgcagatgatgcggtcctcctcctcggtccagcaagacttcttcacctcagggttgaggtggttgtgccagcgttcacggcactgcttccccagccggcccttcaggtgcttggcaatcagtgtccactgctttgtgccatacttcttaaccagctcgatgactttttggtcttcctctttggtccatggccccttgacaaggtctggattcaaaactctcagccacctgtactggcattgctggtcagtgcggttagggaagtggctggccaggaacttccagtcctgctgtccaaactgcctcaccagggccctcagctgctcgtcctcctcatgggtccatttgaccttgcacttgctatccctctgctccggcacatctgaatctgtgtcctggtagtgcagctcatccatgattcactcagcgcgcgtccgccgagacaatcccccggcccggaccgcgccgcgctcgcccgcccgccggcagagcccggagcgggagccgggccggggtcaggacccgggctgctccggccgctccgggccccgggccgcgctcgaaggcgtcagc

SEQ ID NO: 74866 - DNA, 1523 bp, Homo sapiens; identical to SEQ ID NO: 61586
  misc_feature (1)...(1523): n = a,t,c or g

SEQ ID NO: 74867 - DNA, 6582 bp, Homo sapiens
  misc_feature (1)...(6582): n = a,t,c or g
tgcatgtccccgcctcgcgcggcggcggcggcgggtgaggagcctgaggcggcggcgggggtggctccgcgcgcggtggtctcgggggcaaaataacatggcagccagacgaattacacaggagacttttgatgctgtattacaagaaaaagccaaacgatatcacatggatgccagtggtgaggctgtaagcgaaactcttcagtttaaagctcaagatctcttaagggcagtcccaagatccagagcagagatgtatgatgacgtccacagcgatggcagatactccctcagtggatctgtagctcactctagagatgccggaagagaaagcctgagaagtgacgtattttcagggccttccttcagatcaagcaacccttccatcagtgatgacagctactttcgcaaagaatgtggccgggatctggaattttctcactctaattctcgggaccaggtcattggccaccggaaattggggcatttccgttctcaggactggaaatttgcgctccgtggttcttgggaacaagactttggccatccagtttctcaagagtcctcttggtcacaggagtatagttttggtccctctgcagttttgggggactttggatcttccaggctgattgagaaagagtgtttggagaaggagaagtcgggattatgacgtggaccattctgggggaggcttgactctgtgcttaggggcagcaagtcaagtccaggccaagaggtcgagctctaaacatcgttgaccaagaaggttccctcctaggaaagggggagactcagggcctgctcacagctaaggggggtgttgggaaacttgtcacattgagaaatgtgagcacaaaaaaaatacccaccgtgaatcgtattactcccaaaactcagggcactaaccaaatccagaaaaacactccaagtcctgatgtgaccctggggacaaacccagggacagaagatatccagttccccattcagaagatccctctggggctggatctgaagaatcttcggctccccagaagaaagatgagctttgacatcatagataagtctgatgttttttcaagatttgggatagaaataatcaaatgggcaggattccacaccataaaagatgatattaaattttcccaacttttccagactctctttgaacttgaaacagaaacctgtgctaaaatgcttgcctcattcaaatgttccttaaaaccagagcacagagatttttgcttttttactatcaaatttttaaagcactctgctttgaaaacacccagagttgataatgagtttttaaacatgcttttagacaaaggtgctgtgaagaccaaaaattgcttttttgaaatcataaagccttttgacaagtacataatgagacttcaagaccggcttctgaagagtgtcacacctttgcttatggcctgcaatgcctacgagctaagtgtcaagatgaagaccctcagtaaccccctggacttggctcttgccctagaaaccaccaactctctctgccggaagtctttggcccttttgggacagacattttccttggcctcttctttccggcaggagaaaatcttataagctgtcggcctgcaagatatagctccctcacctgctgcgtttccaaacttcgaagactccactttgtttgggcgagagtacatagaccacctgaaggcctggctagtcagcagcggatgtcccctccaggttaagaaagccgaaccagagccgatgcgagaggaggagaaaatgattcctcctacgaaacctgaaattcaggccaaggctccaagtagtctgagtgatgctgtcccccagcgagcagatcacagggtagtgggcaccatcgaccagcttgtgaaacgtgtcatcgaaggcagcctgtctcccaaagagagaactcttctcaaagaggaccctgcttactggtttttgtctgatgaaaatagtctggagtataaatattacaagctgaagttggcagaaatgcagcggatgagcgagaacttgcgaggagccgaccagaagccgacctcagcagactgtgcagtgagggccatgctgtactcccgggctgtccgcaacctcaagaagaaactccttcccgtggcagcggcgggggctcctccgtgctcaaggggctccgggggctggaaggcgaggagagccgaccaccgggacccagaccctcctattcctcagggcaccagggctgaaacaccacggccggcaggctccaggcctctcacatggcaaaaccatccctgccagacagaaatgattgctgccaaggacttgcccgctagacccagtttggaccttctcctcaggaccccagcttagaagcctcaggcccatcccccaagccagcaggagtggacatctctgaagcacctcagacctcttctccctgcccatctgctgacattgacatgaaagacaatgggagaactgcagagaaactggctagatttgttgctcaggtggggaccagagatcgaacaatttcagcataggaaaacagcaccgataaccctgacctgtggtttctacaatgaccaaaatagttctggctttcaaattctatccgaaagaaagtgtttgaactatgtccatcaatttgtttcacgtcatctccgcacaacctttcacactggtggtggtgacaccacggngttctcaggagagccccgtggacctcatggaaggggaagcagagtttgaagacgagccccctccgcgggaggctgagctggagagcccagaggtgatgcctgaggaggaggacgaggacgatgaggatgggggagaggaggcccccgcttcctgggaggggcgggccaagtcttgagggcagcacccctgccgacggccttcccggcgaggcttgccgaggacgacctgggcttggagcacctgccttgttcacaggcctccttcaggttacctgctttcccttcggaagaggattcagcagcaagtcattgaaggttggcatgattccagctcccaagagagtgtgtctcatccaggagccaaaagtccatgaaccagttcgaattgcctatgacaggcctcggggtcgtcccatgtccaaaaagaagaaacccaaggacttggacttcgcccagcagaagcttgaccgataaagaacctgggcttccaagatgctgcagaagatgggctggaaggagggccatggcctgggctccctcggaaagggcatcagggagccggtcagcgtgtacgcagcaggcagcctggggtgggagtgggtggggcctcagtccttccacctgcagcctgccgcttggctccttcacagccaagatggcttacagctggcagttgatttttgttttttaaacagaaggcatcttcagatgagaagctgatcatttacatgtgcaggtgtttacagggctcctttctgtcctggtgtagattttttaaccagcttgttggccctggtcattttggccacatttgtgaccatcataaaagctaagtggtatttctgtgtagtttccgtctggaactgctttcccattcccgggaacccatagccgggccagccaggggtcccgaacacaggcccaaagtttattaaaccccgattcataacctccaggcagggcattttcatttaattactgagcttagtttcctgctggggtaagggcatttccgagggtaaccaggggccctctgggcaccccctcaaaagccagctcttcgagggtgagtactccttgtttctactgtgagtcgcgtcttgattttccctttctttgatgtctcagtgtgtgtcccaaacacctgcatctcatggactgtttgtgcccatgcccagttcctggcatgccaggccctgggctcaggtgcacaactgactctctttttcactccctaggggaaccccctcggaaggggaagggttgggtgctgacgggcaggagcacaaagaagacacattcgatgtgttccgacagaggatgatgcagatgtacagacacaagcgggccaacaaataggtatgttcacaggccagtgtgtaaggccgtctgccctcgctggcgtgctggtatgcagagaaatttcccccaacaaagttgatgttccctgctcccccaaaaatgccacacacaaaaaaaatcacaaaattctgtgagggaaacaaaagggtctatggatgtggatatgccccattcttaccttccaggtttgctgaaggagcaaacctcacactggccaagggcagatgcgcatggccaggctggtgccccggctgtgagcccctcaaggcctccaggccagcctccgtggatgtgcgtgtggaaataggccacgcctgtctcttctcttgctcaagttttctctcacagatgacagccacctaccacataacatgaccagcaaacggactgttcctagtccagagggccttgccatcatgcaagtggaagggcgactgtgacagccactgccacagaggatggcagttggctgtgtccctttgtgagggtcttcaaatccttttccttctgcagggccttgggcctggaaatatcctcatctttctattcttttttttttttagtgccccctcacctaatttccacctcagttttgaacaaaatcgttctcttcctgaatagatcataaccactgatgtgaaagataagccttgaagcagcaattgcccttaaaacatcatccctgccctggatcggcctggagccagtgcccaagtacggtttggtgtgtacatgaaaacaaacgtctctgcagtctctggggcggaggtttcgctggcttttctttctctcaaagaaaaaaacatgcaccattttcaatgtgcttttgcctctcctctctgttcacatgcttttagcagcaagtcccctccaaatctgtcttggttccccctcggaaggtggcgctgcccccgaaaggcacctcagcctgtgagtgctgaggaaccagctcctctggctgattttccagttggactggccattgctccacatcacgtttgctaacagagcacttctggagagcaattgccagtccaactggaaaatcagccagaggagctggttcctcagcactcacaggctgaggtgcctttcgggggcagcgccaccttctgaaggggaaccaagacagatttggaggggacttgctgctaaaagcatgtgaacagagaggagaggcaaaagcacattgaaaatggtgcatgtttttttctttgagagaaagaaaagccagcgaaacctccgccccagagactgcagagacgtttgttttcatgtacacaccaaaccgtacttgggcactggctccaggccgatccagggcagggatgatgttttaagggcaattgctgcttcaaggcttatctttcacatcagtggttttgatctatttgttggcccgcttgtgtctgtacatctgcatcatcctctgtcggaacacatcgaatgtgtcttctttgtgctcctgcccgtcagcacccaacccttccccttccgagggggttcccacgctgaccggctccctgatgccctttccgagggagcccaggccatggccctccttccagcccatcttctgcagcatctggaagcccaggttcttatcggtcagcttctgctgggcgaagtccaagtccttgggtttcttctttttggacatgggacgaccccgaggcctgtcataggcaattcgaactggttcatggacttttggctcctggatgagacacactctcttgggagctggaatcatgccaaccttcaatgacttgctgctgatcctcttccgagggaagcaggtacctgaggaggcctgtgacaaggcaggtgctccagccaggtcgtcctcggcagcctcgccgggaaggccgtcggcaggggtgctgccctcagacttgcccgcccctccaggagcgggggcctcctctcccccatcctcatcgtcctcgtcctcctcctcaggcatcacctctgggctctccagctcagcctcccgcggagggggctcgtcttcaaactctgcttccccttccatgaggtccacggggctctcctgagaacccgtggtgtcaccaccaccagtgtgaaggttgtgcggagatgacgtgaaacaaattgatggacatagttcaaacactttctttcgatagaatttgaaagcagaactattttggtcatgtagaaaccacaggtcagggttatcggtgctgttttctatgctgaattgttcgatctctggtcccacctgagcaacaaatctagccagtttctctgcagtctccattgtcttcatgtcaatgtcagcagatgggcagggagaagaggtctgaggtgcttcagagatgtccactcctgctggcttgggggatgggcctgaggcttctaagctggggtcctgaggagaaggtccaactgggtctggcgggcagtccttggcagcatcatttctgtctggcaggaatggttttgcctgtgagaggcctggagcctgccggccgccctcgtggcaagctaggagtaa

SEQ ID NO: 74868 - DNA, 2107 bp, Homo sapiens; identical to SEQ ID NO: 61588

SEQ ID NO: 74869 - DNA, 9401 bp, Homo sapiens; identical to SEQ ID NO: 61589

SEQ ID NO: 74870 - DNA, 2746 bp, Homo sapiens; identical to SEQ ID NO: 61590

SEQ ID NO: 74871 - DNA, 2841 bp, Homo sapiens
  misc_feature (1)...(2841): n = a,t,c or g
ttttaattgtttttctttttctttttttttttttaataagttaaagttaatacaaatataaaaaggggaaagtcctctagattcaatgacatccacaaattgtacattatttacaccaaaagcacagggctcgtgtgggtgaacagtctgcagtcaaagccgatgctgggtgtccctgtagtgtagcagcccccgcgccgggggctcaggcctcaactgagggttttggtcatttttcaagtctgaaaagtgggctgttctccttgcctttgttgtttcttcttttcctggccgtctgggttttttctccacaatggggtggggtgggtttgtgtccccgattcacttgctagtccccagaaagggtgtcccagcccgagactcctttccgggaaggaggctccttccgtgctgggtactgggtggttgtgatcggaacgtgttcgatcccctcttctcatcactgctgctccaactggatttattactcccgggaatggtcagagccttggttggagcctaagagaatggaggagggcgtctctctggagccagaaaggtcaagggtcgagccactctccttgcttttctcagctgacgtctccttctctttggaaggcgctggccgtttctgaaggtgctgattgtgtgctcgaggagctcccctgggaggacttatttagtgtttctgtgttcaccttcagcatccgcttcctgcttgaggagcagtagctgactgggtgcaggacttcaatgtgctcaggccagtgggcttgcttggcaggggtagtcacagtagctggtgttccaacagcagtaaaagatggcctccttcttgaagttggcgcaccactgcttcttcttggtctcatccaccgcctgctgcttctccaactccagctgcttcttcacctcggcgatgagccggtcccgctcctgctcccagctctgccgcatctccgccatggtcagctctaagttgtgtttcatttcggagaagctcttgctggtgcagccactggagcttctctatctcgatcctcaagccttgcgaatcttcagctaattgtgctttccaagtagtggtttttagaaagatcgttgtatatttctgtccattgtaccttttattgcatccatccaatttgctagtgtacttggcaatatcagcggcgacatcagctgaggcagtgccgatgggcaggtcaccgttgactgaggacacaagggtgctcatggaccccgagctggtgaccaggggcgatgactgtgtgctggtcaccagggtgatggtggacgtggatgggctctgtgtgatctccttctgctggacagttgatgaagttccacacgaccgctgcacggccggggcagtcctccttcggtaaaagcggcctctgctttttcactgggcttcctgtggcggcgggggccggggccgtgacggtgaccgtggaggacgtgctggtggtggctgtggcgccagccgcggaagtttgggcggaagagcgggtgagcaccggtgtttccgggggagaatggctgcccaccgtcgtggatggtggtgttttacctacaacatcctgtttgggagatggttctttgggttccttcttattttttcgaccctcccgcccagaatggtcttctcctaaatctatgacaagttcgttcctctgaatcagagtccaggcccaaatgaactgtgggggaatccgtctcatcttttcccttcagtttatccttaatggggtgaggtgaaggttttgcctttccggaaaagtccttctcaggctcagggctggccttgtccttgactgctccagggtctgccttctcgctggctggtgacgtgcttttcagctcctctttaatctccactgggtttgtaggcttgggcttttttttaacagcagatggctctttgtccatctgacaaccttctttgtcctctgtgtcttcctggctcgttccttaagacttctgctcatcatcactgatatactcactatcgctactatctgacttctcagaatcctccgaatcgctgtgctctacggccgtatagacatcttccgagatttcatttatgcctaattgtgctttgcaactctctatggtcttgtcaagattcagctggaacctgctacgaatctggcgcttgggagagatgagaggaacaggggtggactgttgctggaccgactcgctcagctccttcaaatccatctcagctttgcttcgatccaggttaagattcaggatgctgccggtggtggaggttttgtccgttttcgtcgtgataggagctgacagttgaggagagaagggctttgggctgccggataaactccctgcttgtcccgtcttggtggaggctggtgaagctgtgctcttatccaggaagtccatggactcctcgctcgcactgaagtggctcgacgtggccttcttctcagcatcctgctccacgtcggagcccgtgtgcacagaagagtttgtgctcatgggggagcgcggcatatccgacaaggaaatccggcggcctgtgcccccactcagcacaggcttgctcatcaggatcttgggggatgccgtcatgtcaaagttgagcttgaccttctcctgcttgtctatcttggcagtgccggcgctggggttggtgggatcgagcagcatttgatactggctgttgggtgtgtagggtgtcctaaatggagagtaattaaaaaccccaaacttcctgcggatgttctccacgtaaacctccatctcttgcatggcactgttgaagatgctcttagtctttttcacanaaaaaggaatttctttagacatgag

SEQ ID NO: 74872 - DNA, 2522 bp, Homo sapiens; identical to SEQ ID NO: 61592

SEQ ID NO: 74873 - DNA, 3152 bp, Homo sapiens; identical to SEQ ID NO: 61593

SEQ ID NO: 74874 - DNA, 878 bp, Homo sapiens; identical to SEQ ID NO: 61594

SEQ ID NO: 74875 - DNA, 892 bp, Homo sapiens; identical to SEQ ID NO: 61595
  misc_feature (1)...(892): n = a,t,c or g

SEQ ID NO: 74876 - DNA, 1207 bp, Homo sapiens; identical to SEQ ID NO: 61596

SEQ ID NO: 74877 - DNA, 2131 bp, Homo sapiens; identical to SEQ ID NO: 61597

SEQ ID NO: 74878 - DNA, 1120 bp, Homo sapiens
  misc_feature (1)...(1120): n = a,t,c or g
ttttttttttttaagagaaaaggctttttaatatgaaaactatgtatttgggcacaaaaatgcaacacacagtaagaaaccatattctatcaattatgatattctgtaatctaagaacacagaaagttttgttattaggaaatgccaagaggaaaaagaactctgtaaagtcctattcaatttactttgttagggaaaaggatgtttatttggcttttgtcacagttccatcatggcttactcttcttgtaagttcagcttcaatgcctcgctagttctcagctttgcttcttcaattcttcactttgagcaatgagacggatttcggcattaagtctaaataggactccaattttttccttcaaaggtatagtctgttgctttaatcttggccagttttctctgatgagtgctactaaggactggatngagacagagaaagcatccctggcctctggccgaaagttgctcccctgcagcctggatcccaaatctgaattcctctgacttggcttttagaaagtcccatgttctgacgacgattatcaactttggcccctttctgtagacagatgcaactctgctttcttgacatcctcttgtagacatttttctaatactaaagttgcagttaaatttttttcaagtttttccagttcaatcttgatttcttcacttttggatttggtacgaaagagatcagaggtcaaatcattcactgcagggataaaactagctagcgaggtatcctttgtttcaagggccaccgcactgtcaaccaaagcattcagatacctggaaccagtgctagagagattggcgggggaaaaattcacactctccatgagaaggtcttgaagatacttggcttctgactcgtattcacttgctttctgcttcaagtcctctattaccaggtagacatccctgtcccggaccctgttgcgttctgaaaggtgatgtaaaatctctgtggtccgtgggttcacctcatactgtggaataggatgatctccaaatattttttttaaccacgcagcaacctgcgtttctctctcctcctgcggctccatagctgcggctcccgccactttactaggaactcctagcgggagatgcg

SEQ ID NO: 74879 - DNA, 3022 bp, Homo sapiens
ttttttttttttcaggagccaaggaagtttatttactctactgggtgacaggagggcagagtgctccagaggagacccagatacatcaaccaaggacttccctgagatttggctttgctcttccaggcctgcacatgctgcgtgatgaaatgaggcctgcctagacatctgtgagggcctcgagggctgctgcctcgactttctccctagctaagtccacccgtccagggacacagccagggcactgctctgtgctgacttccactgcagccaagggtcaaaatgaagcatctgcggaggccaggactccttggcatcggacacagtcaggggaaaagccaccctgactctgcaggacagagggtctagggtcatttggcaggagaacactggtgtgccaagggaagcgagcatgatttctggagtggactacatgcatggtctggagttcagtaaactggaaagtttcacccccaagtcttaatttaatcaaaattgctgaactctgttcaatcttcattgttaaaagcagctttaaagctgggtgatttcttagtcaaatgtataacgaagcttttacttatcaatttctttttgggagggggcatgggctgaaatacatcttgtgctcaataaacctccccacatcaatatttcaaagcactttctaggttacaataatgacatttcaattccatatacgcatacatagaatatatatttttaaacagagtgggtcttaagagtatacttggaaccctcggagtcctccatggacaagaacagggtggcccatggacttccagccaaaggctccactgtggggctgctttggggagagactcacagctggacttctctatccgaccatgcaatgttagccagcaccaattacccacaatgctttgcccataagagatagaaataatggaactcacaggaagaaacagtattgataacatacacaggcttacagaggccaggcccagtaattaccatgagacagaagcctacaggtggcggtgctttgactgggctgggattattgatacatttactgattacatcacttcttttataaggcatatgttaaaacgcagtgctacttgaaagtcgaaaggcacagctttccgggggagtcatggaactcctttcactatctcatccgtgacctcctttgcgccggggcctggttgctcttgcgatcaaggggctgcagaacctcctatgagtgcccttcttgaagctcaccaggtgagcatcggctccgctggtgtaaatccttccctgatctggctcgaacctggtcgtcggtcctcggagaagaaggtcaggtacctggagagcacagtcaacatcacagttgccgcccaaactggctgtggtccctcgatgggttctgtccctccagaaaacgcatgcttattggaccttgggtttgacctgtttggccctgtcggtgaggaagatggaggagttggggtcgctggcactcattttggtctgggcgccctgcagggctgggaagaaggtggagtgcaacagggctggtttaggatagccgatccctgggggcgacgtcccttgtcattctaaagtaaggatccctggtcaatggcacatgggataaggcaactggatatccgtcctgtctcggaagatctgtgggaaatgagttgctgaaaggagggagcagcctggatggcaggaaaacttgatctttcccaatggaagtcgctgtcagtgaagcccgaaaatgcctttcacttgggttgaaaggtacatgctttttgaatcttcaccacattttttgtagaaacctgagctcatccccatgtagtcccaggtcagagaatatgaaagtcttgttgatgtcaaagcgacaggcgatgatgtccttggcattctccacagcatagctataggcctggtccagggtcaggtccttccacagatacttctcgtcatccgtcatctggatgaccaagggcacgttaaatacatcctggagccactttgtgaaaaataaatggaatgaggtgacctacatgcattgcttcaagaagaagggccccggcccgtgtacagataaaaatggcttcttaattttcataggcaatcaagaacctgattcatatctctgtgtgagaagaagatgcctctgcgcagggaagtggtgtggtctttggccgggtggctctctctattcgggtttattagctctttgtcaattttactacttccaaaaccgaaccaatggagcttaaccgtagtctaatgcccttttgcactgcttgtctgtactgtccatgggtccacaaaatcctcttcagcttctgtggcatctgggccatgattactggtaggtgctgggttccctggaggacagtcagccttgtaatcctcccccgcggcagctttgtagctcatttttaatgacaccaacatctttactgcagaatcaatttcatcctttgacgcatttcccgctttgagggaccttacgagctccccttgtgtggcgatgctgttgaacagctccagcagagatgcgggctcactgttgggcatgtttgctatctctcaggaactacgttcacagccggcctgaggtcagaggatttgttcagcagacgagtcaagaccaggttgtggaagacactgcagaggtggccactggtcacgctgggcagttgagctgctgagagtgccctgcccagccagaaatggtctttaatactcttcccctctttctttcagtttcccttctgaaaaaagatgcttttgtctttcgttctccccaccctgcattcagctaagggtttcttataaatcacccagattctcagaaacacttgagctcttgaccaaccttcttgatgagactgtccaatcaggggtgggttgcctggggggccaggttgagaccaatgaaaccctcttgagaatcgagccattagctggtcattgcatcagccacccctcaccccccgctggacgaaatcgtcgacccgggaattcc

SEQ ID NO: 74880 - DNA, 1829 bp, Homo sapiens; identical to SEQ ID NO: 61600

SEQ ID NO: 74881 - DNA, 1327 bp, Homo sapiens; identical to SEQ ID NO: 61601

SEQ ID NO: 74882 - DNA, 2029 bp, Homo sapiens; identical to SEQ ID NO: 61602

SEQ ID NO: 74883 - DNA, 3356 bp, Homo sapiens; identical to SEQ ID NO: 61603
  misc_feature (1)...(3356): n = a,t,c or g

SEQ ID NO: 74884 - DNA, 2319 bp, Homo sapiens
ttttttttttttttaaagtgcaaatggcttttattgagggcctactgtgtgctgggcaacatgtctgcaagggtcctgctttacctccctgtactttgcaccggccagggaggagggtgctggggagacccaaacatcaagctgggggagggtgctgaggtggaggtagaagggggcagaggggcccctcagctgagtccttagggagggaagggatcctggggtctgcccagcttgaaacagaagctgggggccacaaggccctgaatcaggccaggcagggtacaggggcctgggagtcctgctcctttgctgtgagacctttagggaatgggatccatctctgagtggtttctcccgatgaaagacaggtccagagggcagagtggccatgcccaaggtggtggccaggtctgacaggatctgcagtccctgccaacaacctcctcctctgctctctgggcagtagtggcctgctcctggacactgctttgcagtcatcacctggacctagagctcatctcggggctggggttggaggctgtgcccgctgctgccagtcaggtccaggcgggggctgcgcagggtcttttgggagccgctccagctgatgaggcggccgctgtcatcatcccatggagaggatgtctccgtgtcactgagccactcggcgtccccggcatagtgggtaggggcagcgagcaggggctgggcggagaaggccaccaggtcccgtggccagaagtgtgccttgtactgctcgttggggtgctggtcgaacatgatgggcaggaactcgtccacgggcagcatgcggcgcagaggctgtgaggccagcagcttgcgggcacccgccagacgcagggcataggccagcgtccagtaggagtacccagccaccaccaggcccggcagcccctccacggccgtctccttctcagggttcacctgcttccgtccgaggtagatcaggtcccaagacagtttctctgcctccacatcctccatcagcccgctccagccgccccctgaagttgctctcaaagcgcacgtcattccttcaaacaaccaggaccccggggccaggccccctgggaaaccacctcttccccagatggagtaatggtctgaggaaagcaagcccacctccgctcttggtcagagtgcggcccgagtaagggtcctggtagcccgggagcaggtctacgccgaggttcctgatggcactgctgttgagcatccagccatccacagcgtccaccaccctcccagagatctccatctcccagagcgaggcgagcatgcgttcccgacggtcaggcctgcgagccaggctgatgacaaagacctcgtcaaaccctatcttgctgggcctcttagagggccgagtcacatgagctgaggcctgcatgcgggggccgtccactagtgcttctaagatcaggtggatgaagttgaccctctcgtcttccagcccctggtgggatttcaccggcacattcatgtacccataacggtgctcattgcacacgtggacggagaccccagcagcctggcaggcataggcgaagacgatgatgtcgtcgaaaggccaagtgtagttgggatgtggcgggtagaaagcaagctggtctgccccttcagcccgcagggatgcaaggaaggtggagtggaccatggggacacggaagcagccccggcgctggcggttcttggtggggaagtactcggctgtgcggcggtagtagccctggggggtgatcccacaccagaagttggagtagtaggtctgggagtccagcattggggccaccactggaagcccctgccccatgagaagccgcagagtctgattgttggtcagaatgttgtctgtgtctgcaaacaggatatagtcggccccccagttcctggcaaaggtgagggcttcctgcttcagctccatcagaaactggtgcctttctttggtccagtgcttgggaccctcttcatctgggtagaacctgggctcgccctcaggcctccagaccacagcagcatagtcatcgcccacagccgccagccactcctgcagcatctctgtggtgttgtccacattgtggtccgtggcacaccagagggccatcctggcccgggggtagtccagccgctccagagcgcccaggtagtggggcagcgagtgttcggcattgcgggccaggatggcaaggaccacggcgggcagcggcgactccgcaacgcccgcagcctccagccacggccccagcaggagcagcagctggagcaacggcgcggcgcgggcagcgcgcatggcgggcg

SEQ ID NO: 74885 - DNA, 3679 bp, Homo sapiens; identical to SEQ ID NO: 61605

SEQ ID NO: 74886 - DNA, 4721 bp, Homo sapiens
aaatgcaggtagtttttcccccttttccccttaaaaattttttttttccctaaaagctttaaactttggagggagggtgggccaatttgtcccccccccaaaaaaaaggttcctttccaaaattcccaagtaggtttttaataggccccccataaagaaaaaaatttttccttgccatccccggttaaaattgggccccccaagggttcttttaaaagggccccccttttttttttttttgcactgaagcagaagttgctttaatcaaggggtgaagtcctcaatcaaggggacctcacttaacctttggtggtggggtctcagcctaccccccacaagccctgaggcccctcaggaaggagggagcagttgaacaacaaattatggcagaggccagggaatgggagtgggggaacccgggtcaaggtgaaggggcaggacgctgaaagggtgggagtgaagctgaacggggcaggaagagcttaacccacgtttctacctgggggctggctgaggtggctgtgcatcgggcagagcggcaccagagggctgagggtcgaaggggacagcaggggaaaggagtgcttaggagatgaggcgactgtgaagctggtgcagctgctcctgggtcagcaccagccggtgtcgctgtccaaaaccagccgcacatgagaaggtcactttgcccatgtagactgtgtcatcctgctgctcctccttggccctgaggaaggctgatgaagggaaggtggcaaagtcagtgggtactgtggctccagggcgctgagatactgtctccttgaggacctcatccttgagcttctcgacggtgtcactcagggacttaagctgagccacttgctccataagttgggccgacgggctcttggcagcagggctggtgcgagtgatgtctactacgtgcgtgtgtgtgctcaattgattcaatgtctccagcagctggctggtcttacgatacagcgctccagctggtaactcactgccagggccctcatgggatagctttgcaacatgcagagggggcagggatgccaaggatgccttcatctgggctcccttgaggatgctgttctcatgctggagctgggagatgtgcagcctcatggcagagatctgctgaagcagcagtggtgagtccttcaccagccctgggcctggcacagaccctggagcctgcccagggatggctcctcgctgctgttcttcaccagcaatgccagagaccagagtagcaatgcctgaaggaggagggccccggagtccctcaatcgtgcgtttggactggctgttcagacgctgctttagttctgccttctctgcctccagctggtcgatgtcagcctggagtgcatccattgtctcctcaaactctttctccttctttcgcagcagtgcctgggtctcctccagccgagtctggactttctcgatgcgctcatctgcatccttggcagcactgtccaacttcttctccaggagggtcagccgcacattggcctcacttagctcctctcccttaatcttgagtgacttcttcaactccttaataactgtctctcgatcttcgagcttcaaacccaggccttcagcatctgtgatctctgcacgaagggcagcagcccgcagttcaaccggggggaggcttgctggggggccgctctgcatcatactccccctcctgcatggctgtgaccaactttgttcatggtactgatgaggatgttgcatgactggcgcagacactcataggggctgctggagggggtcccatagatctgctcgcttgctttgaaagccagttcctccagagcagccacaagtagcccctcattctctgccagtggggcaatgagctgggcagcagcagctgccacctcctgcagcacagccacgacccacgtcaagtgtttcctgcagtctaggagcgtgtcagatacctgtggtccaaaggccagcgcagctgggatcccaggagcatctgtccctggcattcgccttcggatcttcttgcagaactggcggatgtgcactgcatgaagtttccagatcccggagcaggagggcaatatctgtagcctcctgcccaccctgcaagaaggcacgcagccgtcctacctccacactcatgcagtccagagcactctgcgtgaacttaatgtggtcagccagctgcatagtacagtcctcaggctgttcggcaaggtggatgctgtacagatgctgatagtacttgatggccttggtgagaggctccacattgacagtctcatccagctgatccttgtgcagcagttcaatgaggaaatccaaggagcgctcatgggcactcatctcagggtacaggctgcccactttcttatacacaatccaacctgcactgagagagggcatggcatcaatagcggtggtagcggtggcctgcagcaggcatcagcgaggtacaccagtcctatggctgcaaagctgagttgctccccagcagctcctcgcagcccaggccgctctgaacagttctcacttagttcaaacttctcctgggcctgcttccggatcagctctgccttgcaaatgagacgaggcatgagcaacagcaccagaacgcagtcatggtccccacctggccgaaggaagctgtcaggcatgaaggctgtcagcagggacatgtgtcgattggcctgggccacctccatctgcctcaattccatctcaattgccttggcatgggccttagtctcagcaaacttgattttgaagtcaaaggtctctggaggtggctgctgttgcctctccacagatgcttcctgctggtttgtcagttcccgattcacatcctgtagatgggcggtcagctggcggtacttcttgatggtctgctggtagtctgcaaccgtctcctgggctgcctccacacgcttctgggcctcacgaacccgcgcgcctgccatgtccagctgctcccgcagctccagttctgtctcacgtgcattctcctgcagctcatcgttcatctcattcatcgcttccaagtctcccacagtctccctcaactcgcgcactttctcttccagattcaggttccgatctgtcagcatctccaccatctcctcagcacccagagcagcatcgacctgctccttgagctcatcaatggtgctctctgcctggcttagctcctcctgcagacgctcccgctgttgcctcacaacttccagctcttggttcttcttttccatgagcttctggagctttaacatgctcctgcttctctgaggaagaaagatcccgcatcctcaccagggcatccttcaggcgggcattctgctcctcaagctgcttgagctgataactggatgcagcgccatctgagcccttctcttcaatctcagccttgaggatctctaagtcagtagtgagctcgtccacccgctccttcagtgcctccacctcctgctgcagggactcagcccgctcttcagccatctccttgtccaaagtggccatctcaatggcatcagcagtatcagccatctcctccatatagcgttcctttgcctccagcgcctccttggcttcctttctcgcctccttgaggcgccgctgcaggtcggcctgctgctcctgcattttgctcttccattcctgcacctgctccagctggattttgtgtttctccagctcttttagctttgctttgtcttctgcccgtttcagtctcagggtctctagtttctcctccaggtcccgcacctgagcccttagtccctcctcctccttggatggggaaggaagcggggggactgctccaggagaggtgaggaccggcgtggggatgatgggtgctgccagcggagtctgagccggggtgctgggctcactgctgctcagctcacctgctgacgctgagccagaggggcccagggagctactggccccagccaccccagtactggctgggcgcgtgggcttgggtcgccgagttgtggtctttcgggctgtcggtgccttcttaggcttcagtccccgcagtttgctagtctttgcagttgtatcagttccctctcttttgaggacttttgaagcagaagaatcaggtgtctctggggaagtagtatctgctccatcttcaaatacctggatctgggactggcgcacaaagatgccatgcccttcatcacaagtgaagtacttcctgccttgaacagttccatcatttttgccctttgcttcatccagaatcacgcctacccatttgccagtggcaaacagtgtggctccaacataggccacagtgcctcggtggccttttccaatcacctctacacgggagcccacccgcagaggccgggcgcttgcctccgcactcatcctgctgccgctgggcgtccggctgtacacgtgcctcttgctctgtgccatgttgctcacccggcctctaccccctcccccagctggccaaagacagagagaaaaggtagaaacctaggcaggagggtcagggcgctgggccctcatagagggacacaggagtcgtcaggcacagccctccccagtccatgggcctcactcggtggcctacacgggtaggggtgggggcagtgatgggggctgaggagcaagtcccctctgctgcctgaggattcctgaacccagagacacagaatcctgcttgccagctgatgagtctcactctgcgctagtgc

SEQ ID NO: 74887 - DNA, 786 bp, Homo sapiens; identical to SEQ ID NO: 61607
  misc_feature (1)...(786): n = a,t,c or g

SEQ ID NO: 74888 - DNA, 1070 bp, Homo sapiens; identical to SEQ ID NO: 61608

SEQ ID NO: 74889 - DNA, 1502 bp, Homo sapiens; identical to SEQ ID NO: 61609

SEQ ID NO: 74890 - DNA, 1143 bp, Homo sapiens; identical to SEQ ID NO: 61610

SEQ ID NO: 74891 - DNA, 1929 bp, Homo sapiens
cagacagcgattaggtctatttcaaggcattctgccaggagcacagcgactgggggcccacgtaatgagcccacatctgagcccacggaacccagccaggctggcgaggacctggaaaaggagaccctgcgcaagcagcggctgcagcagctatgaggaggacttctacgagctggtggagccggctgaggtggctgagcggctggacctggctgaggcactggtcgacttcatctaccagtactggaagctgaagaggaaagccaatgccaaccagccgctgctgacccccaagaccgacgaggtggacaacctggcccagcaggagcaggacgtcctctaccgccgcctgaagctcttcacccatctgcggcaggacctagagagggttagaaatctgtgctacatggtgacaaggcgcgagagaacgaaacacgccatctgcaaactccaggagcagatattccacctgcagatgaaacttattgaacaggatctgtgtcgagagcggtctgggaggagagcaaagggcaagaagagtgactcgaagaggaagggctgcgagggctccaagggcagcactgagaagaaagagaaagtgaaggcggggcctgactcagtcctggggcagctggcaggcctgtccacctcattccccatcgatggcaccttcttcaacagctggctggcacagtcggtgcagatcacagcagagaacatggccatgagcgagtggccactgaacaatgggcaccgcgaggaccctgctccagggctgctgtcagaggaactgctgcaggacgaggagacactgctcagcttcatgcgggacccctcgctgcgacctggtgaccctgctaggaaggccggaggccgcacccgcctgcctgccaagaagaaaccaccaccaccaccaccgcaggacgggcctggttcacggacgactccagacaaagcccccaagaagacctggggccaggatgcaggcagtggcaaggggggtcaagggccacctaccaggaagccaccacgtcggacatcttctcacttgccgtccagccctgcagccggggactgtcccatcctagccacccctgaaagccccccgccactggcccctgagaccccggacgaggcagcctcagtagctgctgactcagatgtccaagtgcctggccctgcagcaagccctaagcctttgggccggctccggccaccccgcgagagcaaggtaacccggagattgccgggtgccaggcctgatgctgggatgggaccaccttcagctgtggctgagaggcccaaggtcagcctgcattttgacactgagactgatggctacttctctgatggggagatgagcgactcagatgtagaggccgaggacggtggggtgcagcggggtccccgggaggcaggggcagaggaggtggtccgcatgggcgtactggcctcctaactcacccccttccctgtcccaggccctgccctggtccccccacaaggcctcagcccagtcacaactgccatttccagtctctgctgagtgtcccagaccctcgaggctgccactccgtcgtggttttatttttaatatagagagagttttgaattctacactgttgtctttcctctgtgctggcctaggacattaggattccttccacggctccggccgctaggaccctgccaggtcccgcgcaccatccctgccctgcccacgtggtattgctgggctcctggctagatgcaagcaaggtggacaagagctcaggactccagcccactgccactgggtgacacagactgtcgtttgggcattatttcatggcagatgggccagtccagggcctaccccgccttgcccccagatcccactggggtccatttgaggggtcatgctacactccaccgatccccaagtgtatt

SEQ ID NO: 74892 - DNA, 2711 bp, Homo sapiens; identical to SEQ ID NO: 61612

SEQ ID NO: 74893 - DNA, 1760 bp, Homo sapiens
ttttttttttttgagcggttttcttaagtgtctttaatactccactcagggcagtcccctccctctactgagaggctcttggctctggccccaagagcagctggaaggccctggcctgaacttcaaccaacttgaatgtccaaggctgtgtgtgccacgctccctggctctggtacgtggtatgcaagcacctctcgggccttgggggagtttgatcccctccagccactcctgggtacagctcctgcacgtgtgcacctggactccggacgccgcacagggatgtcagcgtaaatgccttccattctgccgcagcaggggccttatccgcatgtccgtcttgaatcttgggctttggcctcttgccattttaagcatcctccagcacaggcgaggacctccacaaagtggaattgggaaatttgcccttcttaagctttaggatcatgttctggatgtttcgaaagccataggctgcagcaaagcgtaacaccacctctccgttcttctcaagggtgacctcttggaagtctttgtttctcagggctcggtaagtgacctcctccacatccctccgttgaacagctccttggccgcatgtctgaagatgtgtgccaggtgcccgtctgagctggctccatcatgacgcgtcactttgtcctccttcaagtctccaaacagagtgtcgacggcagcatctctcactgagaggtcacccttgctcccattaatttgaagcaaatttcaaccttgatgttaaacaacgcaagtcaagcgcccccgggaagccatgcaaagccagggggaagggctttccctgaagagcctcccagcttcttgtcattaaccaaggggccaccaatgaccgtggaaaaatcttctctggagacaaggttctgctgtctggcggaaataatccttcaccaaagagcccatgacctgctggggggactttggcggtgccaagaaggtgggccagtgatggggcgaccccagcaacccgctccggcgtatcggaccccagcccaggacaggcagaggtcagcatggggcagggtgcgttccctccctcactgtgctggcgaataacgacgcacgaattcttttttgactctcccaggatactaaaatccgcagctatcgtcgtatcaaatacatagtgcaccccaagacttttgaggaaaccacagagtcttctggatgcatcagttacactgaggttgaatttagcagcaaaataaggcaaagattgaggacacacagacactaacccagctttgtgctttgaggtatcacatttcttgttaaggttcagaacgcggaagaagtccttggcattttgctgggaaagttggactccttcctctgcagtcatacagctgtcacatgccaggcagtcgctcaaaaatatcttggcatcagccaacttgtggaattctcccttctgtagtcccagctactagggaggctgaggcaggagaatcacttgagcctcagaggtcaaggctgcggtgagccatacagtgagccactgcactccagcctgggtgacagtgagaccctctccattttcctgggctggactcggtgcatcggctgacacattctcttggtcatcagtttttgttttcttactacattccttgcgcgtgcagtgctcacacttcatctggagcgcggcgggcgggaggccgggcgcctcagcctcagggaagcaccgggagactgggacaccactgcccgccgcccgcggccctttg

SEQ ID NO: 74894 - DNA, 2194 bp, Homo sapiens
tttcgtctcccctcccttccccggccccggctctggccccggcccattcgctgttgggtcttctgctagggaggatgtcgggttcgtcgctgcccagcgccctggccctctcgctgttgctggtctctggctccctcctcccagggccaggcgccgctcagaacgctgggtttgtcaagtcgcccatgtcagaaactaagctcacgggggacgcctttgagctgtactgtgacgtggtcgggagccccacgccagagatccagtggtggtacgcagaagtcaaccgggcagagtctttcagacagctgtgggacggtgctcggaagcgccgtgtcaccgtaaacaccgcctacgggtcaaacggcgtgagtgtgctgagaataacccggctcaccttggaggactctgggacttacgagtgcagggccagcaacgaccccaagaggaatgacttgaggcaaaacccctccataacatggattcgagcccaggccaccataagcgtccttcagaagccaaggattgtcaccagtgaagaggtcattattcgagacagccctgttctccctgtcaccctgcagtgtaacctcacctccaggctctcacacccttacatacagctactggacaaaagaatgggggtggaactgaagtgcaactcgtaagaatgccagcaacatggaagtacaggatcaaataagccgagagctgaggattcaggcgaataccactgcgtattattcactttgttaagcggctcctaaagcaaacgccaccattgaagtgaaagccgctcctgacatcactggccataaacggagtgagaacaagaatgaagggcaggatgccactatgtattgcaagtcagttggctacccccacccagactggatatggcgcaagaaggagaacgggatgcccatggacattgtcaatacctttggccgcttcttcatcatcaacaaggaaaattacactgagttgaacattgtgaacctgcagatcacggaagaccctggcgagtatgaatgtaatgccaccaacgccattggctccgcctctgttgtcactgtcctcagggtgcggagccacctggccccactctggcctttcttgggaattctggctgaaattatcatccttgtggtgatcattgttgtgtatgagaagaggaagaggccagatgaggttcctgacgatgatgaaccagctggaccaatgaaaaccaactctaccaacaatcacaaagataaaaacttgcgccagagaaacacaaattaagtactgcttacaatatctttaggttcctgaaactggtggcaacatgacctgctaaaattttctgcttggacctctttggttctctcccctttcaagtgagcaacaccacaatgactgtctaaagcatgccttatttagcctctcctgtaagggtgatctagccaggtacattttaaacaatgcttcagtgtagaaggtgtaaactattttgggcttgatgtgctgtgaatgttgcttttttttttcctttgttaaaatatttaaataaaagtgaaaaggtcctctgaggatcaaatcatgcatgcgccattttttacttaatgcagctgttaaattggcaaagctctaaaatgcactgctgccatctagggatacacttttgtaaagtacagcaaaacctacagatatatacagtatataaatatatatatatatatatttatatttttgggggtgggagaaatccaaaataaagtaaatgcttgtttcatttttaagctgctgatattcattccttattgtatgttgtcagatgaggaaattgtgcagttctggtacataaagatgagtaatataaactgaaatctataattttaagggcttaacctgtgactttaataagctggaacagtccactgaatgggtataatgaattgcagtatatacgtatgattgctttttaagtgattatcttttcttctgttaagtcatgtaaattcataaatccttttgcactgatgtgttgaaccttattcttgtacattcattcaatcaaggcaaacttttataatttttcttttgtttccaatgaccttgaaatgttatagcatggtaatattctatgcaactatagttatactttttggtttgacactgtattttttcacattgatttactggttgatgatagatt

SEQ ID NO: 74895 - DNA, 694 bp, Homo sapiens; identical to SEQ ID NO: 61615

SEQ ID NO: 74896 - DNA, 1372 bp, Homo sapiens; identical to SEQ ID NO: 61616

SEQ ID NO: 74897 - DNA, 1345 bp, Homo sapiens; identical to SEQ ID NO: 61617

SEQ ID NO: 74898 - DNA, 1233 bp, Homo sapiens
aggggtttttttccaaggcaattaatttgggtaaccccagggtttttccattcccgcggttttaaaacgcgggcccgggaatttaatttaggggccccattaaaaaaatttttcctttgcaacccgggggagttaaatttggttcttttaaaagggcgcccctttttttttttttttttttgatggttaaaaaaatttgggttttattgtttttgctaaataatactaaaaaaaaaatttcattttgaaggcagggcttgaattatttaatttgatccatttatttaattaaaaaaaaaaggaaggggaaagagatcatggccaaaaaaatagtagttaacccccaccccacccccaaagctctagccagtcatgtgagcatcacccacatcccactcagtgcctgatattcggatggtggcatactctgccccaggagactgcctgaaggcacggggcaatgggtgccaattttagctctcagcaggttagtcaaccagacaaactggtgggctaaagtccagaaattctttccaggttttctgctcattggctgagcacatacaaactgtcataagcctgtaaaatttaaggggagttggggtggggcgtaagagcaaaaggacagcaggagaagagaaattacgggtcacccaagtttttcctgggctagtggctctggatatagatttaaagagaggtcagagtaaatggactccaggtttcttatcaaagaaaactatccctcaatgaggagctgagatgtgccatgcaagagagttcttcctgcagaggcacaggagaaagggcagctgactctctcatgtggagagagtggcgaggaaggtcttctagtaccatgaagtaagacaggcagagggagaatcctgaggtttgggccaaatgtgagactggtacacacacagttaaagactaaaaagccatcaggaaccctcaaagccaaattctatctgcacactggctctacaaagttcgcagcaagaatctcttgcaccaagtcaagttagtggcctggctatgatggatggtggggagggcaatacatttttattttcagagggatgaggtgggaagaacagccatgatctagtaaaaagagacctgcaagaagcagaaaatatttagagaacattttaatatatattttcatatatatatttaaagttaagaaaaataaaactaattcaagccatgccctgtgcaaaaaaaaaa

SEQ ID NO: 74899 - DNA, 2173 bp, Homo sapiens; identical to SEQ ID NO: 61618

SEQ ID NO: 74900 - DNA, 1849 bp, Homo sapiens
tttttttttttaaagataaaattaatttatttgacttcacaacttcattgggccacacaggggcccacaagtcctagaagcacaaccttgtggaagtgggctggggaggccagttctctggactgcctgctcccttgtccagagctgccttgagccaggtccctcctgaccccatcatcctgttcccatatgcaagggctgctcaggtccacctgcaataaacccaggcctgcctctggcagcagaggacagggcctcgtgggtggcagcagcactggtcctcgtggctgtgggtgtgggtgggtgggtaggtaggtgggaaggagggcaggcaggagggtgtggttcagtgcagagagctgctgttctgctcttcaaaggccatcttgcccagaagctggctgtccaactccaccccacttacaggcagctggaagaagttcatttcagctgctaaggctgccatggcagaagggtcctggccaaactgagctcgcaacatcatgtccattttctccagcctcctcttgagccgcttggcctctcgctctcggatgagccgggcctgccgcttttccggggtttcaatggcccgcttcagcctcatggcctcccgatcccgctgcagccggcgtgcccgctgctcgtctgtctcctgcatgcgctgcaagcgcttggcttcacggtccctcatgcgcctcacctcccgctcctcgggggtctcattgtcccgccggctcttcttggccgtgcgctctcgttccagccgctgcagccgtacttccaaaggctcattctgtcgacgtagagcccacttgcgtacactgggagtctgggcttccagcagtttacggtaggcagcacagttgttgcacacaagcagaattccagcagggtacactggaggactaaaggcaatatccttcccctcagcactggagggaccctcattgtggactgtgggtagggattccatatttagtacttcaggaagtttctcactgttaaaagtggcatggctggtgaaccgggctccacacacagcacagttagatcgctggtcctccgagtggattaagaggtggcgacccaatgaccccggggagctaagggcccggccacagacaggamcacatgtagctcttggcgctcaccactgctgcagtgtgctggtacacgtgagcaatcaactgctcccggctcccgcagtctagctggcagaggggacactggcagagttcaagcaaggggtcagaattcaaattccctgtgacctcgtgctcttacccttcgttcccaccaacaggctgttctgtattttctaactctttctccaatttggacaacccctcccatcttccctctgaagtgtggggaaaaagattcatcttgtgtcgtctccctccttcatcaccctcaactgtcacagtgaaacttttatttggatttgtctgtttcccgaacgggacatgtttccctgatgcaagagctctggtctttccccagtttcacgactggatatgttactacctccttgcaagatgctaacctccagctctggtgcagttcccacggagcaaagcaaactcgactgaatccaagtgatctgtatctgccaaaaaggagaggacaagaaagctggtcacttagccgcctggctgttcacctgacccctggggttgggtctggggcgtgtctaatcagccgagatggtccctctgcttcttcaagcatgagcccaggtaaattcccaggaattaccaagacaagagcctgacaaagagccggaggtcttccgaggcggctcagacaaacccttagacaacacaatctccgaaatctaaattta

SEQ ID NO: 74901 - DNA, 1278 bp, Homo sapiens; identical to SEQ ID NO: 61620

SEQ ID NO: 74902 - DNA, 826 bp, Homo sapiens
tttcgggcccggaaagatttaagtttcgtgaatgcatacgcaagactcggaggtagttccggttccggcgtggccactttcgttggtggtgttcagttgtggcggttgctggtcagtaacagccaagatgctgcggaatctgctggtgaggagcttctcatcttgcatccatgatgggggcgagggagtggagaggaggctgaggcaccacgacagaaaaccctcacctgggaggggtgccgaaggcggctaatgaagtcaccttgattcgtgtcctttttccctgaccttactttcccttccgtctattcctctcgccccaggccgttactgggtagatgtaaggagtggagaggcaggggaagtgaccagagactcgtgggttagacccgtcttgggttcttagtcaccacctctaaccctgtcggtcattgatgaggctcttcgtcagattgggcagaggacgataagcactgcttcccgcaggcattttaaaaataaagttccggagaagcaaaaactgttccaggaggatgatgaaattccactgtatctaaagggtggggtagctgatgccctcctgtatagagccaccatgattcttacagttggtggaacagcatatgccatatatgagctggctgtggcttcatttcccaagaagcaggagtgacttcagtcatcccagcaatcgcttggttcagtttcattcagctctctatggaccagtaatctgataaataaccgagctcttctttggggatcaatatttattgacttgtagtaactgccaccaataaagcagtctttaccatgaaaaaaaaaa

SEQ ID NO: 74903 - DNA, 2568 bp, Homo sapiens
ggcacgaggcgccctgcagattgtctcttgttgcgtaagtttttttgaccgtcactcgtgtcagcttcaaagtcagatagatttttctcccagcatgttctacttccgaggctgtggccgttgggtcgcggtttccttcaccaagcagcaatttccgttggcacggttgagcagtgacagcgcggcgccccggactccgcacttcgacgtgatagtcattggtggaggacatgccgggactgaggcagccaccgccgccgctcggtgcggctctcggactctgctcctcactcaccgcgtggacacgatcggtcagatgtcatgtaatccttcctttggtggcatcggaaagggacatttaatgagggaagtagatgccttggatggcctgtgttctcgcatctgtgaccagtctggtgtacattataaagtattaaaccggcgtaagggaccagctgtgtggggtctgagagctcagattgataggaaactctataaacagaacatgcagaaagaaatcttgaatacaccactgcttactgttcaggagggagctgtagaagatcttattcttacagaaccagagcctgaacacactgggaaatgccgtgtcagtggggttgttttggtggatggaagcacagtatatgcagagagtgtgattctgactactgggacatttctgagaggcatgattgtaattggattggagacgcatccagcaggacgtttaggggatcagccttctataggattggctcagacactggagaagttagggtttgtggtgggaaggttgaagactgggactccaccccgaattgccaaagagtccattaatttcagtattctaaacaagcatataccggacaatccatccataccattcagctttaccaatgagacagtatggattaagccagaagatcagctgccatgttacttgactcacaccaaccctagagtggatgagattgtccttaagaaccttcaacttaatagtcatgttaaagaaacgacaagaggacctcgatactgaccctccattgaatcaaaagttttgcgttttccaaaccgtctacatcaggtttggttggaacctgaaggaatggattctgaccttatctacccacaggggttatctatgacgctaccagctgagttacaagagaaaatgatcacatgcatcagaggcttggagaaagctaaagtgattcagccaggctacggtgttcagtatgattacttagatccccgtcagatcaccccttccttggagactcatttggttcaacgactcttctttgctggacagatcaatggcaccactggttatgaggaagctgcagctcaatgctcttgtagggtgtgatagccggaatcaacgccagtcttcgggtcagtcgcaagcctccctttgtggttagccgaacagaaggttacataggagtcttgattgatgacctcactactctgggcaccagtgaaccataccgcatgtttaccagccgagtagagttccgtttgtcactgcgccctgataatgctgacagccggctcacactgcgagggtataaagacgctggctgtgtgtcccaacaacgatatgaaagagcttgttggatgaagtcttctttaaaagaaggcatttctgtgttgaaatctattgagtttttgagctctaaatggaaaaaattaatcccagaggcttctataagtactagtagaagtctgcctgtcagagctctcgatgttctgaagtatgaggaagttgacatggattcattagccaaggctgttccagagcccttgaagaagtatactaaatgtaaagagctggctgaaagactgaaaatagaagccacttatgaatcagtgttgttccatcaactacaagaaataaagggagttcagcaagatgaagctctccaactgccaaaagacctagattatttgactatcagggatgtgtctttgtcccatgaagttcgagagaaactacattttagtcgtccacagacgatcggggctgctagtcgcatacccggagtaacacctgccgccatcatcaatctgctgagatttgtgaagaccactcaacgaagacagtcggctatgaatgaatcatccaagactgatcaatacttatgtgatgcagacagacttcaagagagagagttatagctttcaattcataaaagattttttaaagagccatataaataatttggatcaataccaacagtatagataaaagaattatttagcacatgttaaaatagcctttattaggttacctatgggtttgcccattaatttcctgagtgggacagaaattataattgtgctttttcgtgtatatgaaaaaactagtcgtaaacaatttgtactctttctttaaggagctgtaatacaaataactttgtgcagtgttcatcaaagagagagacagtgaacctaaaactgaacctggaataaaactcaacatgcagatttgcctactcatagggactttgcctattaagtctaccaaattaaaagtcttatcattcagaaaaaaaaaaaaaa

SEQ ID NO: 74904 - DNA, 1409 bp, Homo sapiens
cccacgcgtccgggttggtgcttcctgttcgcagctgcggcaacagcgtcttgccctgtcgccacgctggagtccactgcaacctccgcatcctgggttcaagcaattctcctgcctcagcctcccaagtagctgggactacgggagaagatggtataaactggtccatcagtgacaaagacattgaggcccagatagctaataaccgaacacctggaagatggacccagcggtactattcagccaacaaaaacattatctgtagaaattgtgacaaacgtggtcatttatcaaaaaactgccccttaccacgaaaagttcgtcgctgcttcctgtgctccaggagaggacatctcctgtattcctgtccagcccccctttgcgaatactgtcctgtgcctaagatgttggaccactcatgtcttttcagacattcctgggataaacagtgtgaccgatgtcatatgctaggccactatacagatgcttgcacagaaatctggaggcagtatcacctaacgaccaaacctggaccacccaaaaagccgaagaccccttcaagaccatcagccttagcatattgctatcactgcgcgcaaaaaggccattatggacacgaatgtccagaaagagaagtgtatgacccgtctccagtatctccattcatctgctactatgatgacaaatatgaaattcaggagagagaaaagagactaaaacaaaaaataaaagtactcaagaaaaatggggttatcccagagccatccaagctaccttatataaaagcagcaaatgagaacccccaccatgatataaggaagggccgtgcctcatggaaaagcaacaggtggcctcaagaaaataaagaaacacaaaaagaaatgaagaacaagaatagaaactgggagaagcacaggaaggctgacagacatcgtgaagtggatgaggattttcccaggggccccaaaacctactcttctcctggcagttttaaaacccagaagccttctaagccctttcaccgttcatcacattaccacacgtcaagagaagacaagtctcccaaggaaggcaagaggggcaagcagaagaaaaaggagaggtgctgggaagatgatgacaatgataacttatttcttattaagcagagaaaaaaaaagtcttaagccgtcaggcagcctctgatgtggcttttcattgttcatttggcctttgtgtctataaccttctggcactgtgtttattatctatgattaaataaagtgagtttttggttttgtttttttaatttcagccattcctagagttactgaatatccatggagatctcaattctctgtgtccaacaggatattaggtaagaaagtacaaagataaacctggacttctcctattccaatatgtcatct

SEQ ID NO: 74905 - DNA, 1612 bp, Homo sapiens
  misc_feature (1)...(1612): n = a,t,c or g
ccttttttttttttttacctaataaaaatctttatttttttattaaaaaagaggggcgtttggtagctatttaaataagaggggggggggaatgaatgtccagatacgagcacctgcatcttttagtcaattgtcagtggagtcagtggggtgctaagtgttctgaactgaagtaggtgcactaaggttccaagcttccctgcaaggatctggacgggaggaaaagcagaggcccctgaagggaaaaaagccttgcttcccaatacttatttttttattactgtgcaaaagagcacactctccctctttgtgtctctcccacccaacggcaccccccccacccccaacccaagagggacttatacatgggagtgcaggggacagagttgaccagggggggcctttgtccggcaccctggcccacaggctgagctcagccccaggccctttcaggcatctagacactcccataagcctgtcagggtggggggcaagggagatcccaggggncacacatacttccctggaagagttggacttaggggtaagagcgggggggcacggtacccagccttgctctcattcccagggacagggaacaggagagcagtgcacctcccaggggatggactaggggcagacccttgcccagcccaattaaagatgggcaggggcaaactcatacttaaatgttggtagggattcaaagggttataaaaagtctgtgacaatctgatggcccataccaggagcaagctaccaaagcggcaaagacctgccacgatgaaaaattatgcctccacccatggctatacgggcctttctttcactttgtcgtcttcccccacagcgcggtgcacttcatgccccatcgtggccacaaacatggccaggaagcccagcaccagggagaccaccattagggctcgagtggcctgcaagggccgcggacagggcgagcaccgagtcgtacattttgcagctcatcatccccgtgctctgcgtgacgcagtccatccacagccccttgtacatggcctgggccgtgatgatgttgtcacccgcataggagctcatctgccactgcgggatggcggtgcaggccaccagacccacccagcccagcagggccatggagaagcccagcaactgcaggcccgaattggccatttccgccctcagaaaacactgggggcgccgggcggggagaccctacagtaaaacaaacgacacttggggggcagccccacaaaagaaaacttgaggtggagttttccggtcacccaaagagacaaaaagggtttgggccaggtgaatgcaaatcttgtcaccaaactacacacaaatcgacccctccagtgaagcgatggcctcgcggcacagggagtaggatacgccgggagggtggttccagacaaaattggtggtccccgaaggccaggcggttccctccgggcgctctcggcgaccctaggcaaacaaaaggtggaggggccgtctgggcgcgtttctgagcgccggcaagtcccaaagtatcctgggctgtaggtccgaggctgcggtgcgcagcagaggtgctcgcccggtccggcgcgtgggcgacggaatcggc

SEQ ID NO: 74906 - DNA, 3881 bp, Homo sapiens
  misc_feature (1)...(3881): n = a,t,c or g
ttttttttttttactatctacaaaaatttattatatatttacagaagaaaagcatgcataatcattaaacaaataaaatactttttatcacaacacagtacatatttgtcatttttaaaaagccacacaatagaaacaagacaccaagatatttaaattatcttcgttgactccccccngtaaaaatagctaaacactcatcattcgcggtgcaattactcataggacataagttcctggaaacaatagtttggcatgcgtaagggcattcgcacccaaaggaaatctggggttttattgcgggcagcccctggcatttcatatggtatggggtcccgggtgttgggccaatcgccattaattccacaaaggattggcaaagcatggaacctggatatggggttctggatggcctccaaaccaatccttttccccttaaaaactggggctggctccatgggggcaatctggacaatctcgttcccatttcttcaaaaacgcaggccaccattcgggagaactaccctccatggggctggtctattgagggattggaataggtcccccttagcacgaagagtgaaccttatccatcccaccatatgcttcaaacgctggtaataagtggggcccaataaaaaatcgggatgggatttttccgaccagtgaaacccattgtacagggacctccatttccctcctgaagaggatagcccataatccaggataaaaagattaggaaaccttcctgccacgttaaacagcatccattaaaatggagtggcatccacccaatttcaccccttgttaagcccgatacccttccccttgaaggcattcaattaagtgacccaatagtcatacggagaggggatgggcatggggattgatgatgatatcagggggtgataccttcacaggtgaaaggcatatcctcttgtctatactgaataccacaagtacccttttgaccatgtcgactagcaaatttgtctccaatctgtggaatcctaacagagcgtacccttattttacaaaatttatatccttcctgattgagagttacccataacctgatgaacaatgcccgtctcgctagttctgagaaaagtgctacagtctcttcttggtatagcggtctattggtgctctcccaaattcatcttcattttccaggcaaggtgactgttttgcctataataacatcatctcctgataccacgaaccccctgggagctatcaaaaccnatcatcatccagcttgtcgtaaatggcatgcgcgtcntgccctggcatggttcacgtgtaggcttctcaaaaacttcttcttgatcaaatccttttttagactcctgttctttgtatgagcgatagaaaacagacctgaagaagccgcggtcctacagctgaacgattcatgataacagagtcttccctgattatatcccagtgtatgatgcaatggccacaattgagttgatgcctgctggcagctctctaaatcgtagatattccatagaccgtgtagtcacaagtggcttttgaggataatagagaacatgggccaatgtgtccatgcgaacatggaagttggtgatgtaaactcccatagcctgcttacccatagcagactggtatgtgtttctaggggactggttatgatcaggaaagggaataatagatgcacagacaccaaggatcattgagggatgaatctcacagtgtgtatatgtggaacaataagctacttctttctcctgtaaatcatctggagtcattgcaagcatcactgtttcttcttccagggtatcaatatactccactaccccactggccacaagatcctgccaactatagttgttatattctctctctttcaattggtcaatatgcctcttcttcaaaagtagcttttgtttttccacaatcagaagtggtctacaaatacggcctgcatccgtatagatccgaatctccctctctcgaatatctctgatcatagaaacttcagacacaatgatgtccatctgacgtctcaatttccttagggtgttcataagttgttcgggatctttatgtattccaacccagcagccattaacaaaaatcttggttgcatcagcaatagctgcaggagaaatttcttctaaattttccatactccattcttctaaaaattccagaattggagatggttgagatccaactgaaatatacgccatcaaggctaaattcttcacaagtcctacagcatggccctctggggtctcggcaggacacaccattccccacaacgtattatgcaactgtcttggttttgctagcttgccgtctctaccaataggagaatttaaacgacgcaggtgagaaagagtagacgcaaaagtcaggcggtttaacacctgagatactccagctctggcttgatgagctttcttttgatcaccccagtttccagtagctaaagagtattttaggccatcagatatgatccgtgttttaattgccaactccaagttaaaatcctttcctcgatcaataaatttctgtgcatagatccgcacttctttaagcaaattcttaaacatacctctaaataagaatgcaagcagcggcccagcaagatccaatctcttgtttccatagtgatctctgtcatctagttctcttctacccaaagctgccagaagtaacctatgaaccatgtatcccaagaaataggcttttttggtctcacaaaaatcactgacaccaacatgagggagcatttctttttgtaaaacttcctttgcatatttaattcttttctctttagtaacaccaggctttgctcctcttgaaccaatgaaatttagtgcaacattctgttcttggatgacaaaagcttcatcgagagaaggtttaaccatttccatcatctctggatcttcaaaatcataaataatatgttctaaaatatctctgtcggacacaaaacctaatgctctgaacacaataatgatgggaacttcttgcttgatatatggtagagttgccacaatgcgctgaccaatagcactcttcttggcaccctgtcctcctcttgccagcatgctaacccatatagtactggtgggtcgggaagaattctcaagacatgatctacactctcctgtgtaggcatatttagaatcctttttggcaaacacataaactgtgtttgttgccattttctcttgggcaatcagaaccttttctgatccattaataatgaaatagccaccaggatccaaagggcattcatttaactcacaaagatcacgatctgtcaagccattcaaaaggcagtaagttgaccgcaacataattggaatttttcctataaaagttttctgatgctgagtctgaagttgttcttcaccttctttaatgactgtttttgttatatcaacataaagcggagcagaatacgtgagattccttaatctagcttcattgggcatcattggtgaaggagcaccatctctttcccaatgggtaggcttggaaagataaatttgttcaaacttcagcaaatatcgtggcggttcttcaacttctccactagcatgctgagcttcagcctgtaggtctataggaggagcgtcttccacaattctttgaacagacatctgaataaactcatcaaaagaatccagctgttgtctaaccaagcctttctcgtcaaaataggaactgattacaatccagcatgcttcttgccacaaatccggggtgatttcatcatcatcctcatcatattgcatatcctcatccgcgtcgtacatattgccaaacggttctcgagctcctaactcttgaaatcaaaagacaaaaaccgcccagaagccagcagcgccagg

SEQ ID NO: 74907 - DNA, 1678 bp, Homo sapiens; identical to SEQ ID NO: 61624

SEQ ID NO: 74908 - DNA, 2007 bp, Homo sapiens
tgaattccggggatgggatccggctcctccagctaccggcccaaggccatctacctggacatcgatggacgcattcagaaggtaatcttcagcaagtactgcaactccagcgacatcatggacctgttctgcatcgccaccggcctgcctcggaacacgaccatctccctgctgaccaccgacgacgccatggtctccatcgaccccaccatgcccgcgaattcagaacgcactccgtacaaagtgagacctgtggccatcaagcaactctccgctggtgtcgaggacaagagaaccacaagccgtggccagtctgctgagagaccactgagggacagacgggttgtgggcctggagcagccccggagggaaggagcatttgaaagtggacaggtagagcccaggcccagagagccccagggctgctaccaggaaggccagcgcatccctccagagagagaagaattaatccagagcgtgctggcgcaggttgcagagcagttctcaagagcattcaaaatcaatgaactgaaagctgaagttgcaaatcacttggctgtcctagagaaacgcgtggaattggaaggactaaaagtggtggagattgagaaatgcaagagtgacattaagaagatgagggaggagctggcggccagaagcagcaggaccaactgcccctgtaagtacagttttttggataaccacaagaagttgactcctcgacgcgatgttcccacttaccccaagtacctgctctctccagagaccatcgaggccctgcggaagccgacctttgacgtctggctttgggagcccaatgagatgctgagctgcctggagcacatgtaccacgacctcgggctggtcagggacttcagcatcaaccctgtcaccctcaggaggtggctgttctgtgtccacgacaactacagaaacaaccccttccacaacttccggcactgcttctgcgtggcccagatgatgtacagcatggtctggctctgcagtctccaggagaagttctcacaaacggatatcctgatcctaatgacagcggccatctgccacgatctggaccatcccggctacaacaacacgtaccagatcaatgcccgcacagagttggcggtccgctacaatgacatctcaccgctggagaaccaccactgcgccgtggccttccagatcctcgccgagcctgagtgcaacatcttctccaacatcccacctgatgggttcaagcagatccgacagggaatgatcacattaatcttggccactgacatggcaagacatgcagaaattatggattctttcaaagagaaaatggagaattttgactacagcaacgaggagcacatgaccctgctgaagatgattttgataaaatgctgtgatatctctaacgaggtccgtccaatggaagtcgcagagccttgggtggactgtttattagaggaatattttatgcagagcgaccgtgagaagtcagaaggccttcccgtggccccgttcatggaccgagacaaagtgaccaaggccacagcccagattgggttcatcaagtttgtcctgatcccaatgtttgaaacagtgaccaagctcttccccatggttgaggagatcatgctgcagccactttgggaatcccgagatcgctacgaggagctgaagcggatagatgacgccatgaaagagttacagaagaagactgacagcttgacgtctggggccaccgagaagtccagagagagaagcagagatgtgaaaaacagtgaaggagactgtgcctgaggaaagcggggggcgtggctgcagttctggacgggctggccgagctgcgcgggatccttgtgcagggaagagctgccctgggcacctggcaccacaagaccatgttttctaagaaccattttgttcactgatacaaaaaaaaaaaaaggaattcatgatgctgtacagaattttatttttaaactgtcttttaaataatatattcttatacgg

SEQ ID NO: 74909 - DNA, 443 bp, Homo sapiens; identical to SEQ ID NO: 61626

SEQ ID NO: 74910 - DNA, 2756 bp, Homo sapiens; identical to SEQ ID NO: 61627

SEQ ID NO: 74911 - DNA, 2356 bp, Homo sapiens; identical to SEQ ID NO: 61628

SEQ ID NO: 74912 - DNA, 1928 bp, Homo sapiens; identical to SEQ ID NO: 61629

SEQ ID NO: 74913 - DNA, 465 bp, Homo sapiens; identical to SEQ ID NO: 61630
  misc_feature (1)...(465): n = a,t,c or g

SEQ ID NO: 74914 - DNA, 1605 bp, Homo sapiens; identical to SEQ ID NO: 61631

SEQ ID NO: 74915 - DNA, 1503 bp, Homo sapiens; identical to SEQ ID NO: 61632

SEQ ID NO: 74916 - DNA, 1945 bp, Homo sapiens; identical to SEQ ID NO: 61633

SEQ ID NO: 74917 - DNA, 1002 bp, Homo sapiens; identical to SEQ ID NO: 61634

SEQ ID NO: 74918 - DNA, 3270 bp, Homo sapiens
  misc_feature (1)...(3270): n = a,t,c or g
ggaccgcgctcaacggcctcttctggttgctgtcttcctcgtccctccggcccattgttcctactcacgcgtctcactttatggcctattttctgcatggatctctggcagcctcgctttctccctgacgtttcagcatcatccccagaggagccacactctgacagtgagggtgcggggtcaggcgcccggccgcacctgctgagtgtgcccgagttgtgcagatacctggctgagagctggctcaccttccagattcacctgcaggagctgctgcagtacaagaggcagaatccagctcagttctgcgttcgagtctgctctggctgtgctgtgttggctgtgttgggacactatgttccagggattatgatttcctacattgtcttggtgagtatcctgctgtggcccctggtggtttatcatgagctgatccagaggatgtacactcgcctggagcccctgctcatgcatctggactacagcatgaaggcagaagccaatgccctgcatcacaaacacgacaagaggaagcgtcaggggaagaatgcacccccaggaggtgatgagccactggcagagacagagagtgaaagcgaggcagagctggctggcttctccccagtggtggatgtgaagaaaacagcattggccttggccattacagactcagagctgtcagatgaggaggcttctatcttggagagtggtggcttctccgtatcccgggccacaactccgcagctgactgatgtctccgaggatttggaccagcagagcctgccaagtgaaccagaggagaccctaagccgggacctatgggagggagaggagggagagctggcccctcccgaagacctactaggccgtcctcaagctctgtcaaggcaagccctggactcggaggaagaggaagaggatgtggcagctaaggaaaccttgttgcggctctcatcccccctccactttgtgaacacgcacttcaatggggcagggtccccccaagatggagtgaaatgctcccctggaggaccagtggagacactgagccccgagacagtgagtggtggcctcactgctctgcccggcaccctgtcacctccactttgccttgttggaagtgacccagccccctccccttccattctcccacctgttccccaggactcaccccagcccctgcctgcccctgaggaagaagaggcactcaccactgaggactttgagttgctggatcagggggagctggagcagctgaatgcagagctgggcttggagccagagacaccgccaaaaccccctgatgctccacccctggggcccgacatccattctctggtacagtcagaccaagaagctcaggccgtggcagagccatgagccagccgttgaggaaggagctgcaggcacagtagggcttcctggctaggagtgttgctgtttcctcctttgcctaccactctggggtggggcagtgtgtggggaagctggctgtcggatggtagctattccaccctctgcctgcctgcctgcctgctgtcctgggcatggtgcagtacctgtgcctaggattggttttaaatttgtaaataattttccatttgggttagtggatgtgaacagggctagggaagtccttcccacagcctgcgcttgcctccctgcctcatctctattctcattccactatgccccaagccctggtggtctggccctttctttttcctcctatcctcagggacctgtgctgctctgccctcatgtcccacttggttgtttagttgaggcactttataatttttctcttgtcttgtgttcctttctgctttatttccctgctgtgtcctgtccttagcagctcaaccccatcctttgccagctcctcctatcccgtgggcactggccaagctttagggaggctcctggtctgggaagtaaagagtaaacctggggcagtgggtcaggccagtagttacactcttaggtcactgtagtctgtgtaaccttcactgcatccttgccccattcagcccggcctttcatgatgcaggagagcagggatcccgcagtacatggcgccagcactggagttggtgagcatgtgctctctcttgagattaggagcttccttactgctcctctgggtgatccaagtgtagtgggaccccctactagggtcaggaagtggacactaacatctgtgcaggtgttgacttgaaaaataaagtgttgattggctagaactgctgcctccctgactgtgagctgccttccacaccctgcactgcactgtgttctctcctcacccttaacctgcttcactccagtctgttctggctgtttattaccttgttgcaaaacagggccgaagcaaggattaccttgacaaccctagcttctccttagccatcttccttgacagtgtgatctgtttagtgagatttagcatgtgtgaataaagtatatgcaggaggaaattgctttgtcttcccaatcggtagaaattcgggaccataaaaattgtgttttaccatgtggcctacaaccttaacactgctttcttaagaagtcttcacccatctacatgctaacaactcactcagcctggatttatctttactggggaagccaaacaagcaatagaggacctttacctgtgttagaaatgagttggagccaaggaacactgaagaaatagtatcttaacagttactgagtccattgtatgtgcttggctctgctctgagtgatttatatgtattaagatttttcctcacaggtcagatatatactgttactaatttcattttatagacaggttaagcttcctgaaggccacaggtcccagtaaattgtggagccagaacccaaacccaagaagttttggcttcagcaaatgcatcagacagcccctgtccattaatagggcacaggtaggaagatgcacaaggatgtgggaactatagagaaccaatctgatgccttggcttaacaaagagtggacatggcaagccttcctcttcggggaanaaaagcccagaactgagcagatggcctcctttatgagttcatgtcctccgccttcagctggaggtaccatatggcgatgctacctgtctttctgctggaggtaccatatggtaatgctgcctgtctgtctgctggaggtaccatatggtaatgctgcctgtctttctgaggttgacttttatgccatgtctttcctaagtgtgtaagaatttttctgtttgcttcacatttgactgagaa

SEQ ID NO: 74919 - DNA, 5010 bp, Homo sapiens; identical to SEQ ID NO: 61636

SEQ ID NO: 74920 - DNA, 2481 bp, Homo sapiens; identical to SEQ ID NO: 61637

SEQ ID NO: 74921 - DNA, 2793 bp, Homo sapiens; identical to SEQ ID NO: 61638
  misc_feature (1)...(2793): n = a,t,c or g

SEQ ID NO: 74922 - DNA, 1711 bp, Homo sapiens; identical to SEQ ID NO: 61639

SEQ ID NO: 74923 - DNA, 925 bp, Homo sapiens; identical to SEQ ID NO: 61640

SEQ ID NO: 74924 - DNA, 2129 bp, Homo sapiens; identical to SEQ ID NO: 61641

SEQ ID NO: 74925 - DNA, 901 bp, Homo sapiens; identical to SEQ ID NO: 61642

SEQ ID NO: 74926 - DNA, 2463 bp, Homo sapiens; identical to SEQ ID NO: 61643

SEQ ID NO: 74927 - DNA, 1403 bp, Homo sapiens; identical to SEQ ID NO: 61644

SEQ ID NO: 74928 - DNA, 1791 bp, Homo sapiens; identical to SEQ ID NO: 61645

SEQ ID NO: 74929 - DNA, 3143 bp, Homo sapiens; identical to SEQ ID NO: 61646
  misc_feature (1)...(3143): n = a,t,c or g

SEQ ID NO: 74930 - DNA, 863 bp, Homo sapiens; identical to SEQ ID NO: 61647

SEQ ID NO: 74931 - DNA, 1168 bp, Homo sapiens; identical to SEQ ID NO: 61648
  misc_feature (1)...(1168): n = a,t,c or g

SEQ ID NO: 74932 - DNA, 1345 bp, Homo sapiens; identical to SEQ ID NO: 61649
  misc_feature (1)...(1345): n = a,t,c or g

SEQ ID NO: 74933 - DNA, 3101 bp, Homo sapiens
  misc_feature (1)...(3101): n = a,t,c or g
ttgtatctagctctccaccagcagaatggtggtccgggcagcgttccgggaatcactctgcctttgcatgtggtagtccggagaagatcctgattgcccacatcagacagtgtgggctgcagattccttatgaggcagaaataggttttcatcttttccatgctccagagcttctctgatttgcttgggtaacctttattttctaagataaaggaggaaatgatacgatcccagtcttcattcttggtatcaagcaaaaccaggatcaggtcaaatcgacttaagagtgggctgccgagggcaatgttcacagacacggactcctgggggtcgtactggcctttggggttcgttgctgccaggatggtggtccttgtgttcagcttgcacacgaggtttgttctccgcctttgtcctaatccacaccagcaggtggagccgcagttaaagtttccgagtccattccgggagcgggagcccatcttgctggctgccgaggccctcgctggaggaggagggtcagaactcgggtgcagccaatcgagggcaacgctgctacttataagagcagaatgggcnggnnctcgtagtttagtgaaataggaaagctgcaaaacactgtggagtgctcccgtgtaaataaaaagaggaaaaaagtttctcaagtcgccgctgcacgacgtctggccggcgctggagcgggggtctgcgctctcccgagcggccgcgcgctggactttattgtgccgcaaccagccccagttcccattgtttgtgtttttttcaaaatatggcaaaggttcaggtgaacaatgtagtggtgctggataacccttctcctttctacaacccgttccagttcgagatcaccttcgagtgcatcgaggacctgtctgaagacttggaatggaaaattatctatgtgggctctgcagaaagtgaagaatacgatcaagttttagactctgttttagtgggtcctgttcccgcaggaaggcatatgtttgtatttcaggctgatgcacctaatccaggactcattccagatgcagatgcagttaaggcgtaaactggttgggcctaattacttggtacctatccgaggacaagaatttattaagaagttgggctaattaatgtaaataatgaatatactggagacagaattaaggggaaaatccaccagtaaaacccagacttttcctaagcttcaaaggaatattttggcatcctaatccccagggtcacaagattccacattaattgggaagataacacagaaaaactggaagatgcagagagcagtaatccaaatctacagtcacttctttcaacagatgcattaccttcagcatcaaagggatggtccacatcagaaaactcactaaatgtcatgttagaatcccacatggactgcatgtgaccacctaccatccctttagtacaaattaagctattaaaaatacacagaactatttccctgaaattccgtaagtacatagtcaaaacacaatgtgaagaatttgtttaaaaacatcctgtagaaagtttataagaaaaccagtatttgaacaaattgtggaatataaatacaactattttaaggtaatttttttctctaatgtgttattttatttgttctgaaactaatctgattaaagcatatatattattttcttctcctttatatgtaatgaaagcacttataaagaaacaggaatcattagaccaggttgtaaagatgtcttggcctcccagacagtctttggaccactattttactggcctttgaaagaacaaagtttacttcaactaaaatgtttcttcctgtgaagacatatggtatcattttaatttaaggggcagatttccattcttttttggcatgtccttaaaaagaggatttgaaatcaactatatgctaccaagaactttaggatccaattttccaagccaccgtgaagcctcttatggctactattatagttcatgagatgttggacagcatttggtttgtttggtaagagaagaacaaatatggctaattgttaataaggtcccctggctatggtttttgttcttataacagagtttagaatatcagagcatttcttgaatcatacatcattattgtccagtgaattcaagaccaaatacaatatcgggagaaaatacaaactccctgtgtttaagaataggggattataatggctcaaattggttcatttgatttctaaaaataccatgacctttaaaaattcttttaatagatcatgttattggcagtatttatataaaaaccatggatttagaaaggtatatttagctttattataatagatacgttactattttggaaatatatatattttcacacctgtagtactcttccccatttcctctgacactcatgcagaatgagatcaggcatatttgtggttgacatactctagatagcttttccaacaaatctttgaaaagcaatcttggaaaggaattcattaactaaatggggtaaaaggtttctttttctttgagagttaagtccttcctcaaaaaaattttcttatgctccataaaattgaggtagaatattttccattattcttgccagctaagcaagacagcccatatgatgcaggttatgcagtgccttcatatcttaaaacttttaatactgcacctttttaaagcttttatgttgagggcaagggaaaaggggcatttgtcgtaaacatggattctgagttgtatatattccccatccattcctaaaaaagtgaatttgtgaagcaaagttttgcccagatgttaaactttgaatttaatataccagattattaaaatattgtccattaactagttcatagattttaaaagtaaaatacttctgactgttaaaactatataaagaaaatctcatttgtctaattgcaattaaaagaaaaatgttaaaatattaaaatgaaaataaaagcattactttccaacaaagagctcagtggttaatataataggaacaacatatgtgcttattagaaataaagcatatacagccaaatcaccaaataaagccatttactgctgagtttttatcggaa

SEQ ID NO: 74934 - DNA, 2829 bp, Homo sapiens; identical to SEQ ID NO: 61650

SEQ ID NO: 74935 - DNA, 2320 bp, Homo sapiens; identical to SEQ ID NO: 61651

SEQ ID NO: 74936 - DNA, 4331 bp, Homo sapiens
atctctgtctaggggtcacaaattgaaatggcaagtgcttttccattcaatctaatacttccggattcctactaaaaaggaatacattaagagcatggaaaagttgcttactgaaaggaaacccccgaagagtaagggagggaatgtagaaattaagaagttatgtggaatactctttaaattgtaattaactacattttcttattttcacagtaatacaaaacacagtcacttgcagaactggttcagattacttaaataccagatacatttttagtcctctacataagtgtttgggagttacttatgtttatatgaaatgaagctattaatacttttctactgaatatataatatgatcccatttatttaaaaaataaagattacatatttgcttatatacgcatacaaattttctgaaaattacataagaaattgttaatagattacctctggagaatagtactggggtaagaggtgagggggcagaattctcattttacagccttatatactgttgtgaatttttttttttaccatgtactttttaaaaatacaaaattgaggagggaacctcctactccaaaattacgaagcattcttttatgtacatttctctaagagttatatttgatatttttcaaggcaaactgacttgaggtactcgatgtttttaaatgtatttctaataattattagtagggtcacacctatttgacagcttttttaaaaagtcacatattgctgtatttttaaagatgacaaacctttatttaaatgagatgcttgctggagattttctttttcaaactcactttttaagttatggaaataatatcactgctgaaagtttggaaaacatatataagggtgccaaaaataccactaaaatcacataaaccaatcttaccattattaatggtgtgatttctttctttacatatctattaatacctagtactatctatgtagaaaatgtgtttgcaaagctgagatcacactgtacctatagctctggatcctgctgctttttcccccaacacttaacagatgctcagtaaacatgttaaaccaagttgttaattagtattgtaccatttctcctcatcaaaaattacttctatagaaggcatttagttggtttccagttcttgagtaaaataaataacacttaatgagtatgtctttacctaaacattgtctgcatttatgatttagaagaagctactggatcaaacggtatgaaatattttaagtttctgataaatgtttttcagaagaattatactggttttcactcctaccaacagcgcagcctgtgttgctgtttccttgccaacactgtcaccattttaaaaagtcactgttatttcacaggtaaaaaatagaaagtttgctctgagaaaatttcttcctcccattacaaaataaagtcacagtctttccgtatgtccactctagagtgctatcttccaatctaaaacagaggaactgttttcaaacatcattagtttagcggtctccactaacaaagacatacggataaagtaacatgtaagtcagattaagaatctcaactttttaagaaaaaccaaatgactaaaggcatatttttattctatactttttgtcctataggtactctaggtccttgtgtaattattgaggacaaaacgtcagttaaaggtgagagggaaaactaggttgcagactagcagctgttttgcatctcacaagaacaaaggccttaacaaaccgtatactttatgcaaacaaagtgatgcctcactgacttaggagacaagtcacatgccatcagtgtgtcagaaaatttctttcttcagtgatagttaaggtaacctcgccagctactttccagagacagctccagggcaatactggggaaaaaaaaaatcagagacataggacctcaatagagccctgtgcaacaaaaagatgctagataacaaaactcaaagcaaaactaagatcattccaatttaggggaaagtttttttattcagtgtttaagattaaaaactacaagattttgcttgcagctgatgagtaaaaagagaagttaaacataaattctcatctgagtggctagttaaaatgctctgacaccgagtcaagttactcagtgacataccagttactttgggcttaagagtcttggagcaaagtagctctaaacaaaacgtgtcatctgaagcatagggctaatgggcatatgaaatactaaataagaagctgatggaggcaggctgtggcagatttttggttcttttagggttctagcagtggttgccatataagcaaggacctagcagagagttatttcctgtctttacttttctgagttaaacaccttcaacccacacccactaagcaggaataaagagacattttatagaccagttggaaaatataaagcagtcccacttctccagtagaattttagttgaattaaatcataagagaaacaatgattattgcacatattatacttgtcacactacatctgttgagtggaatttccattccaagtgttgttttcatcttcaccatcatcttgagtccttaatctataaattttcccctcctttttaaagtcgtctccacgtttttccagcactctttttctcactggttcccttttttctgatttgctagatgatgcagggtttgggggttctgacgatgttactctcactgaagtctgtgtgggaggcggattactaaacaagaaattgctaattaatctccagatggcaaggaatggataaagcactgttcccaacaaggtccaaatgtctccgctggaagagtgtacaatggatgcagttggtcttcctgcctagaaattaataaacaaactggcaacagtaccaccgaagcgcttggggcaagttccaaatccagtaacttctttttataatcttctttggtaaattccctcctgggaaacatggttgctaacgaaaaattaccgtaagtgttgccaacagtctgtgcagcaaactgccttgcctcttctagaggagcatcagaagggaactgatttgtaaaggaagaaccatcaggaagacggaattgaattcttgcaacagtgcttctttctcttgcataagattccctcttgacttccatttctgcctgttttgctagcaaggcagcagctttggcagcctctacttcttcctttgtctttgcaaaacgagcagctctctctgcacggtccaatgcaatctgctgttttatacgttctcgagctgccctatcttctgctttctctctgtttctttcctccagcattctttttgttaattcttcttcttgttttcttttataatccaacatttcttttccagtttttctcctctcaatttccttcttaatttctctctgttcttcctcttttcttttctcttctctcctttcttcaagtttttttgttagtctttccactcggatgttgaggtcctctgcaggtctctgatctgagcatccactaggctcctgagaggaagtggcatggcctgcactttctcctcctgttgcagtatctgactttgtatcagaagtggatggtatctcacaaagctctgcatttctggactgagagttttcacaagtgttgttaggttcaaatgacgcagatggagtagacactgaactttctgactgactgccatttgctactgatgtttcactttttagcaaatgcatctgtcggaccttgtgaattcttgtaacaagttcatctgcagaaacacttcctgctattacttccaagggaattccactgtctccaataaagaaactggatggaacacacactacaggatagatttgtgaaaactgtaggcaggcttcacttttggtatcgattttaatagcaacaaaactgtttgaagatgcttctgtaactttatcatcttcccaacttgcagccatctgtgtagactgttcatcatcacctgccacgaacaccacgaagaccgcgccgctccttttggccgtcgcgatggcggccggaatggcgccctggaaccacagcatcgctcccttcgggcccaggcgctcgctcggtgtgtagtctccgcagtcccgaagccggctccgccctccgtcttcgtccggctctgcggcccccgcaaccttggctggttcggcccccacctccggctccgcacaagcgcgcacgcccgtcagcggcacccggagacgcgcgctagcgcgcgcgagaacacctcacgtcacagtcgcaacccgtcggtgtccgtgccccaggaccttctctcgttggcgagtcgatggtcggcgca

SEQ ID NO: 74937 - DNA, 2077 bp, Homo sapiens; identical to SEQ ID NO: 61653

SEQ ID NO: 74938 - DNA, 2268 bp, Homo sapiens; identical to SEQ ID NO: 61654
  misc_feature (1)...(2268): n = a,t,c or g

SEQ ID NO: 74939 - DNA, 2363 bp, Homo sapiens
  misc_feature (1)...(2363): n = a,t,c or g
actataccgagagactgaagaagtggaaatatatgtggaacagagccttcctccatggtatgaaatagatttcctttaaaaaataaaaaaaaaagaagtgaacaatataagcatattacttagaaacatggaggtatatacctgaaaaactcaagagttgaaagtggtcacctctggggagtgggaatcttgaatgggaggaatgggctggggcttttttgttataagccttgactttttaaattatgatcatgtgtaactgataaaaataaaagttagaataaaagccctagcacaatgtctgccataaagtaggcccttgataaagaatggacatttatctaattgtcccatctctccacggctgctgccccactttttgcattcagcaatatagacatttgatccgttcctcaagattctattctcccccttcctaacaaagtatggcaggaaaaaaaaaaaatcacggtttcaatggacacttttattgtttacttaatggatcatcaattttgtctcactacctacaaatggaatttcatcttgtttccatgctgagtagtgaaacagtgacaaagctaatcataataacctacatcaaaagagaactaagctaacactgctcactttctttttaacaggcaaaatataaatatatgcactctagaatgcacaatggtttagtcactaaaaaattcaaatgggatcttgaagaatgtatgcaaatccagggtgcagtgaagatgagctgagatgctgtgcaactgtttaagggttcctggcactgcatctcttggccactagctgaatcttgacatggaaggttttagctaatgccaagtggagatgcagaaaatgctaagttgacttaggggctgtgcacaggaactaaaaggcaggaaagtactaaatattgctgagagcatccaccccagtgaaggacgtttacacttcaaggagctccaaaactgggcaccacccccccagtgactcaacatggctggacttttatcctccggtgttcccatttgggcaacagccaagtgggcaggtgtctccaaccaacctatgatggtgatggcaagccccctagaagtggatntgctttcacccacctcatccatgagagctttggttccccggggcaaaagcttcccattcaaatacccccacaggaccattccacacaatctgcttagcccgagtgacagcctcagcatacttcttgctgctttcaggaccacagtccaagcccatccagccagcaggtatgccagaagccacagtggcttggccagtcttggcattctcatcaaacttgtcagcagtgacaaagtcaacaggcaaggtaatcttcacaccattcttctcagctttggacattaggtctttgacaatcttggctccctcttcatcaaacagagaagtgccaatctccatgttgttgagcaccttaaggaaggtaaaagccattccaccaccaataatcatctcattgactttgtccagcatattattgatgagctggatcttgtctgcaactttagctccgcccaggatggccaggaagggtcgctctgggctctccaaggcctttgcaaagtagttcagctccttcttcatcaaaaacccaccagccttctgtggcagattgactcctaccatggagctgtgggctctgtgagcagtgccaaaagcatcattgacatagacatcccctagcttggaaagtgaagctcggaaagcttctattttggctggctcggctttaaccttgttcccagaagcatcttttcccttcccttcttcctccacatgaaagcggaggttctccagcaggatgacagacccagcagctgggttggcacaggctttctccacttctgggcctacacagtccttcaagaacagaacatccttgcccagcagagatttgagttctacagcaactggctctaaggagtacttgtcaggcatgggcacaccatcaggccggcctaggtggctcataaggactaccgacttggctccattgtccaagcagaatttgatgcttgggacagcagccttaatcctctggttgtttgttatctggttgttcttcataggaacattgaagtcgactctcataacgacccgcttccctttaacgtccagcttgtccagcgtcagcttgttagaaagcgacattttggaaatacagctggggagagaggtcggtgattcggtcaacgagggagccgactgccgacgtgcgctccggaggcttgcagaatgcggaacaccgcgcgggccctcgtgccaagcttggcgtgtcnatgtcaganggctatcaatnagggtttcaattggggacgtcc

SEQ ID NO: 74940 - DNA, 3182 bp, Homo sapiens; identical to SEQ ID NO: 61656

SEQ ID NO: 74941 - DNA, 869 bp, Homo sapiens; identical to SEQ ID NO: 61657

SEQ ID NO: 74942 - DNA, 1766 bp, Homo sapiens; identical to SEQ ID NO: 61658

SEQ ID NO: 74943 - DNA, 1647 bp, Homo sapiens; identical to SEQ ID NO: 61659

SEQ ID NO: 74944 - DNA, 1544 bp, Homo sapiens; identical to SEQ ID NO: 61660

SEQ ID NO: 74945 - DNA, 1598 bp, Homo sapiens; identical to SEQ ID NO: 61661
  misc_feature (1)...(1598): n = a,t,c or g

SEQ ID NO: 74946 - DNA, 1040 bp, Homo sapiens; identical to SEQ ID NO: 61662

SEQ ID NO: 74947 - DNA, 1086 bp, Homo sapiens; identical to SEQ ID NO: 61663

SEQ ID NO: 74948 - DNA, 701 bp, Homo sapiens; identical to SEQ ID NO: 61664

SEQ ID NO: 74949 - DNA, 427 bp, Homo sapiens; identical to SEQ ID NO: 61665

SEQ ID NO: 74950 - DNA, 829 bp, Homo sapiens; identical to SEQ ID NO: 61666

SEQ ID NO: 74951 - DNA, 1344 bp, Homo sapiens; identical to SEQ ID NO: 61667

SEQ ID NO: 74952 - DNA, 1522 bp, Homo sapiens
aaccccgccccattatatttatcacccccccccttcagcggaatggggcccccggcccccccccacacacagttattctctaatttgtatataaatttcacttttaagcattttttttttttttaagaaataataatacattttaatgcaagagaaatcatagccctggtacacaccccttccccgatctgtcctgcctggggatgtgtttatggtgagtgtgtccccaggactggtagtcacctggctgtccgggtccccgccctactggcggcagcatgcctgtccccagcattacattcaactgctgctctggctctcgagaggccggctggcctcgggcctccggcttggcgttctttgctcccctgtctccctgctaaggccagcagggccaaactgctaggccaggtcagccagggctgggggaatgggctgtaccctgctcctccccaggcacgactgtccccccggggctccatcaccgggtggggcggagcgtctgctggggcagctctgtgggccacaggatccccccgcacccactgcatctctctgcccagggtgcctgcctcataggatgccccgcgccacagagtctctctgcccagggcgcccgcctcacagctggtcctcgtccacccagatggtcttgcgctgctcctcgccgatcttgtccttgacaacgcggagcagctcctctacgctgccccacatgtcaggttccaccgtggcgtacaggcacggcagggcctccagctccttctccttcagccggcacacgcgcaggaactcctcctccgtctcaggtcggggcagcagctttctgaacctcttgatgttcttctcacacacccggatgaagagcacgatggggtagatgttggacttgatcaagtctcttgtgcagccgatcccagcctccagcaggcagtgcttgttcttggcggccacagcttcaatgttggcaggggcgatgcattcgaacgcgttggggttcttctctcgggagtagatgatggtctccgtcttctgccttctgaggaactcatctcttgtgacgatatctgacttgcagatggtgaactccatggcacctcccgagttgagcagcctctgcaccagcgtcttggccagcacggtgggtgtgaagagcacgggccggcggcgctcgcagtagaaggcgcgtaccaggctgtaggggatgaggctgaggttcttgcccagctcgctctcagggtccagctcttcctgcttctcagtcaagagcttggtggcgtccagcgaggaccgggccaggctccctagcggactccccgagatgatgcggacccgctcgttgctgttcatccgcttatacttgttctcggacctgctgacgaactgaaggagctggccaaaaaggaagcttgctcgcgagagacgggggctgacccgggggtcgcttgttgaaagcgcttcttctggctgcagggtgttccggagtgcccgcagggtgtggtgggtgccgtctcctgcctcc

SEQ ID NO: 74953 - DNA, 6155 bp, Homo sapiens; identical to SEQ ID NO: 61669

SEQ ID NO: 74954 - DNA, 1447 bp, Homo sapiens; identical to SEQ ID NO: 61670
  misc_feature (1)...(1447): n = a,t,c or g

SEQ ID NO: 74955 - DNA, 1498 bp, Homo sapiens; identical to SEQ ID NO: 61671

SEQ ID NO: 74956 - DNA, 1188 bp, Homo sapiens
ttgagccccaagaggcagaggttgccgtgagccaagatcacgccactgcactccagccagggtggcagagcgaaaccttgtctcaaaacaacaacaaaaaagaagtaaacagctggtaaagcaacctagcctaaaacttacaaagtagcagagtgaacacatatgtgcatgcacacacacacacacacaacacacatacacacagatgagagtagcacacacgccaaagatacatcaagcaagtgcttttttaatcaatacatcaaatgatatttttgctagcctgaggaagcttctctttgcctgtcctatcattcccacccattgcctcacagggatggaaagaaattccttcttggacccaacattagataaacataaccaagtctttacatgtggctttggagaaggctgctaggatgcttgcgaacacgacatcgggggtctgggatgcatcgatggcggagtggatcccccgtttcctgtagtacttctatgagtggggtgggtttgagtgtgggtagggcttgcaggcgggattttcaagggcctttttcatttatcatcttgatcgacgggatcaaggggttccccggttgattgtcatcttttcatgggggctcttttgggaggggttgaactcctcgtgggtagggaacggccactctttgggggtgaaatcagccatttctgcgtgcctcacagtccgagggaagccatccagaagaaaaccatttttgcacaagggggtctccaaattcttctcaatgagctccactaccatttcatcactcaccagtttcccagcatccatagttgccttcagcttttttcctagctctgagccagaagccaccatggccctcagcatgtccccagtagctaaatggcagacacagaagttttcagccaatctgggtgcctggggcagtagatagcagcagaaagagcaggagctttggagtcattcagatgcaagctctgtaaattacttgctatgtagcctagagaacaagccattcaaacttcagtttctccaactgggtccctttaccggccccgggaggccccagcagcacggcccggatgcctttaggatactcgggttctgccgctggcacgctgggagccatgtccgccgaagtctctcactgaacaccagttcgcacgcctcacaggtccacgaaa

SEQ ID NO: 74957 - DNA, 2134 bp, Homo sapiens
ggaattcgggtgaggctctctcattccagatatggagactaaaaagttcaagatggaagtaatagcaaaaaaattacagtactaatcacaacagctaccatttctcagcattagacacagtaactgtatgaaagaagtatgattattaggtctgttttacagatgaggaaactgagacccagaaaggtggaagcacttgtctaaggtcacgcctccaggaagcagtgtgtccacgactccagtccaagtggtcaggctccagagcccacagtcccaggggtccatgatgccgagctgcaatcgttcctgcagctgcagccgcggccccagcgtggaggatggcaagtggtatggggtccgctcctacctgcacctcttctatgaggactgtgcaggcactgctctcagcgacgaccctgagggacctccggtcctgtgcccccgccggccctggccctcactgtgttggaagatcagcctgtcctcggggaccctgcttctgattgctgggtgtggcggctctgaccactggctatgcagtgccccccaagctggagggcatcggtgagggtgagttcctggtgttggatcagcgggcagccgactacaaccaggccctgggcacctgtcgcctggcaggcacagcgctctgtgtggcagctggagttctgctcgccatctgcctcttctgggccatgataggctggctgagccaggacaccaaggcagagcccttggaccccgaagccgacagccacgtggaggtcttcggggatgagccagagcagcagttgtcacccattttccgcaatgccagtggccagtcatggttctcgccacccgccagcccctttgggcaatcttctgtgcagactatccagcccaagagggactcctgagctgcccacatggcctaagatgtgggtcctggatccttcccccttctcaccataaccccctctcagtgtttccccaacttctcccttttagcagggtccctttagagcccaactccaggtcaaatctggagctcaaatcccagtgctccctccccaggagtggggccccaactcttccaagataccagcattcctcaagtcctcccaaaacttcctacccacaccctcttcccaaggccctcaggggcagaaaacatctccttcaacccgtccccactccttcctctgcatgaccttgggcaaacccttgccctttcaagccatcagctcctgcctctctgccatgagggctttggatcagattcctcttctcgccaggatgaggacacgcactgccctccatagacacagatgaaggggtgggggtcattcagctcgaatgggtcccagatgctcacttggcctttccctgcaggatgagtgaagacgtttgcctctcacagtgtgtcttctacctgcattttggcatcagagccccccagcccacccaccacaggcaattactagccctagttgataggtgaggtgggtgaagaaggctggaggtgacatgtccgaggtcacacaacaaagcagcatgcaggaactagaaacacatcttcagcctcctcctgggccagctcttgtgctacaggtggggcggagccagcccctcaccttcctggttccctgagggtcctcagggtggaggacaggtttggcccagaaagactagccagaggcctgatggtcccaggtggctctggatatactttggatatggatttaaatggtctctaagagccgggggtagggggcaggaaaagtgggttgtctttgcccctcaaagtccacctacctagaaaccaagcccacggtcttggccgtgaccctgataataaatgggctctctcagaggcgccagcccctccctccccagccggaggcgtcatctctcttctgtaccactagagggagctctgatgcagctggagagcagcgctcaaggctctcgcccctcccctccctaacccttaccttcagtctccaccagcctgaagggcctcctaggggatcctcaggcggcccccaccagggcacaccctactgtccttgtgcctcacgccccctcctcatcctgcaccccttccatcccaccttccctttcaataaacagctgggatggaaaaaaaaaa

SEQ ID NO: 74958 - DNA, 1936 bp, Homo sapiens; identical to SEQ ID NO: 61674

SEQ ID NO: 74959 - DNA, 2697 bp, Homo sapiens; identical to SEQ ID NO: 61675

SEQ ID NO: 74960 - DNA, 3464 bp, Homo sapiens; identical to SEQ ID NO: 61676
  misc_feature (1)...(3464): n = a,t,c or g

SEQ ID NO: 74961 - DNA, 7104 bp, Homo sapiens
tttcgtccgggcttgaggttgaattaagaatagtcaggtggtgagtggaacgtctcttggggtgtcggaattcaaaacggacctggaggatgttgatctccaagaacatgccctggcggcggctgcagggcatttccttcgggatgtattcggctgaagagctcaagaaattaagtgttaaatccattacgaaccctcgatacctggacagcctggggaacccatcggcaaacggcctgtacgatttagctttgggccctgcagattccaaagaggtgtgctccacctgcgtgcaggacttcagcaactgttctgggcacctgggccacattgagctcccactcacagtgtataaccctctcctcttcgataagctgtacctgctgcttcggggctcttgtttaaactgccacatgctgacttgtccccgggccgtgattcacctcttactctgccagctgagggttctggaagtcggggccctacaagcagtctacgagcttgagagaattctgagcaggtttctggaagaaaatgccgatccctctgcctctgaaattcgggaggaattagaacaatacacaactgaaattgtgcagaacaacctcctggggtcccagggcgcacatgtaaagaacgtgtgtgagagcaagagcaagctcattgctctcttctggaaggcacatatgaatgctaagcgctgtccccactgcaagaccgggcgatccgttgtccgaaaggaacacaacagcaagttgactatcacatttccagccatggtgcacaggacagctggccagaaggactctgagcccctgggaattgaggaagctcagataggaaaacgaggatacttaacacccaccagtgcccgcgaacacctttctgccctgtggaagaatgaaggattctttctgaactaccttttttcgggaatggatgatgatggtatggaatccagattcaatcccagtgtgttctttctagatttcttggtggtgccgccctcaaggtctcgcccagtcagtcgcctaggagaccagatgtttactaatggccagacggtgaacttgcaggctgtcatgaaggatgtagttctgattcgaaaacttctggcattgatggcccaagaacagaagttgccagaggaagtggccacacccactacagatgaggaaaaagactctttgattgctattgaccgatcctttttgagtacacttccaggccagtccctcatagacaaactttacaacatttggattcgccttcagagccacgtcaatattgtgtttgatagcgagatggacaaactaatgatggacaagtacccaggcattaggcagatcctggagaagaaagaaggcctgttccgaaaacacatgatgggaaagcgagtggactacgctgcgcgctcagtcatctgcccagacatgtacatcaacaccaacgaaattggaattcccatggtgtttgccacaaaactgacctacccacagccagttaccccatggaatgttcaggaacttaggcaagcggtcatcaacggccctaatgtgcacccaggagcctccatggtcatcaatgaggacggcagccgcacagccctgagcgctgtggacatgacccagcgagaggccgtggccaagcagcttctgaccccagccacgggggcacctaagccccaggggacaaaaattgtgtgccggcatgtgaagaatggggacattctgctactgaaccgacagcccacactgcacagaccctccatccaggcccaccgtgcccgcatcctgcctgaagagaaagtgctgcggctccactatgccaactgcaaggcctataatgccgactttgatggagacgagatgaatgcccatttcccccagagtgagctgggccgggccgaggcctacgtcctggcctgcactgatcagcagtaccttgttcccaaggatggccaaccattggcgggactgatccaggatcacatggtttcaggggcaagcatgactactcggggttgctttttcacccgggagcactatatggagctggtgtaccgaggactcacggacaaagtggggcgcgtgaagctcctttctccttccatcctgaagccctttccgctgtggacaggaaaacaggttgtgtcaacgctgctcataaatataatcccagaggaccacatcccactgaacttatctggaaaggcgaaaatcactgggaaagcctgggtgaaggaaactcctcgatccgttcctggctttaaccctgactcgatgtgcgagtcccaggtgatcatcagggaaggggagctgctctgcggagtgctggacaaggcgcactatgggagctccgcctacggcctggtccactgctgctatgagatctatggaggcgagaccagcggcaaggttctaacctgcctggcccgcctcttcaccgcctacctgcagctctacagaggcttcaccttgggcgtggaagacattttggtgaagccaaaggcagatgtcaagaggcaacgtatcattgaagaatccacccactgcgggccccaggctgtcagggctgcattaaacctgccagaagccgcatcatatgatgaggtccgaggaaaatggcaggatgcccatctgggcaaggaccagagggattttaacatgattgatctgaagttcaaggaggaagtgaaccattacagcaatgagattaacaaggcatgcatgccttttggcctacacagacagttcccagagaacacgctgcagctgatggtgcagtcgggagccaaaggttcaactgtgaacacgatgcagatctcgtgcctgctgggccagattgaactggaaggtcggagcaccccgctgatggcgtctggcaagtcactgccctgctttgagccttatgagttcacccccagggctggtggctttgtcactggcaggttcctcaccggcatcaaacctcctgagttcttcttccactgcatggcaggacgagagggcctggtggacactgctgtgaaaaccagccgctcaggctatctccaaaggtgcatcatcaagcacctagaggggctggtcgtgcagtatgatctcacggtccgtgacagtgacggcagtgtggtgcagttcctgtatggggaggatggcctggacatccccaagacacagttcctgcagcccaagcagttccccttcctggccagcaactacgaggtgataatgaaatcacagcatctccatgaagttttatccagagcagatcccaaaaaagctctccaccacttcagagctatcaaaaaatggcaaagcaagcaccccaacaccctgctgagaagaggcgccttcttgagttattcccagaaaattcaggaagctgtgaaagccctgaaacttgagagtgaaaaccgcaatggccgcagccctgggactcaggagatgctgaggatgtggtatgagttggatgaggaaagccgaaggaaataccagaagaaggcggccgcttgtcctgaccccagtctgtctgtctggcgtcctgacatctactttgcatcagtgtcagaaacatttgaaacaaaggttgatgactacagtcaagagtgggcagctcaaacagagaagagttatgagaaatcagagctttctctcgacaggttgaggaccttgctgcagctagaagtggcagcgctcactgtgtgagccgggcgaggctgtgggcctgctggctgcccagagcatcggagagccctccacccagatgaccctcaacaccttccactttgcaggcagaggcgagatgaacgtcaccctgggcattccaaggttgcgggagattctcatggtggccagcgccaacatcaagacacccatgatgagcgtgcccgtgctcaacaccaagaaagccctgaagagagtgaaaagcctgaagaagcaactcaccagggtgtgcttgggggaggtgttgcagaaaattgacgtccaggagtccttctgtatggaagaaaaacagaacaaattccaggtgtaccagctgcggtttcagttcctgccacatgcatattaccagcaggagaagtgcctgagacccgaggacatcctgcgcttcatggaaacaagattctttaaacttctgatggaatccatcaaaaagaagaataataaagcatcagctttcaggaacgtaaacactcgaagagctacacagcgggatctggacaacgctggggagttggggaggagtcggggagagcaggagggtgatgaggaagaggaggggcacattgtggatgctgaagctgaggagggagacgccgatgcctctgatgccaaacgcaaggagaagcaggaggaggaggttgattatgagagtgaggaagaggaggagagggagggcgaggagaacgacgatgaagacatgcaggaggaacgaaatccccacagggaaggtgctcgaaagacccaagagcaagatgaagaggtgggcttaggcactgaggaggacccgtcccttcccgccctcctgacgcagccccggaaacccacccacagccaggagccccaggggcccgaggccatggagcgccgggtccaggctgtgcgtgagatccacccgttcatagatgactaccagtacgacaccgaggagagcctgtggtgccaggtgacagtgaagctccctctgatgaagatcaactttgacatgagctccctggtagtatctttggcccatggtgccgtcatctatgcgaccaagggcatcactcggtgcctcctgaatgaaacaaccaacaataagaacgagaaggagcttgtgctaaacacagaaggaatcaacctcccagagctattcaagtatgcagaggtcctggatctgcgccgcctctactccaacgacatccacgccatagccaacacgtatggcattgaggccgcgctgcgggtgatcgagaaggagatcaaggatgtgtttgccgtgtatggcatcgcggtcgaccctcgccatctctccctggttgctgattatatgtgcttcgagggtgtttacaagccactgaatcgctttgggatccggtcaaactcttccccgctacagcagatgacatttgaaaccagcttccagtttctgaagcaagccaccatgctgggatcccacgatgagctgaggtctccttctgcctgccttgtggtcgggaaggtcgtcaggggcgggacaggcctgttcgagctcaagcagcctctgagatagcagctaccccggcaccatctgcccagctccaaggacccttggtgagggcgtggcccagcctgccttctgcatgagaggaccaggagactggaatccagggcagttccaagtgacagtacagagcacagcagcgaccttgggcctgaaagcagtgggcctctgagctgggccagcttcacctggaaagtgacagagttgctcatccttgcccctccctgtctctggatttttatcaaggtttaccaagtcttctgagtccccctgagatggctggggcctcacctgtgctgcaggaggcctctgtggcataacccctaaggagaagtcctgattcacgattcactgagaagaccaaggggaagccatgctttgctgctggggaccccaggcacctccagagtagggaagcggggttcttttgctgtgagtggccagggacaacagacaagattcctgggggctcccgatgagcaggaacgtggagcctgctgcccaaggcctgctccttccggctgctccagcccctgggggcagagtccacaaagagtccccatcaagacttcttccctgagtcaagtacagcgtagcatagtcctccacccacccaacctctctgcctggccagggtcctggccctgccactgtgtggcgaggtgtccttctagaccacatcagccccaaggctgggagcagtcgctccagggccgcagcagttcactcccacacatagaacccaggtcactgctggggcgattgaacaggttgcctggcttttctctgctgtcagtttggtgtggaggcctatgttctgccccatacaccccacaggccctgcttatgggaaggaacacaggcctccagcccagaggactgtgccgccctgttcttggccgtccacgtttcctctccctctagcaccagcaatacatttccctggcatggacagaaaagacagagaggacttatacaaaggttttgtaaaaccagaggctagcttctatctttgtctactgttatttcagctcagggcgggtaattaacatcattggaactagctattaggaaagaaaaaaaacttggttttttttacaacaattttttcccttggtttgcagtttctgcatttggatttgagaacccagggcggggattttcttggcacagtcaggtcttgggtccctcttcctgtgctttcttgtctgaggccttagggggaagagctcagcctctgcagcctcctccacctctgcccctggcctgcctctgctgtgacctccttccagagctagctgctggccctgtggccaggagaagcagaggggagaagcctttatgcagaagctgtgctagccttggtctggggtggggaggctgctgctgtgaccttaggggtagggttggggatcaagggaggctttgtcaagggagagtgaccatgttgctccctacatccatgcaataggacccagcctgcacctcctaggcctacactggggaaagcctgacagaaatcagtacctcctaacggggtctgccaggttcaccaaggcatgggcacagaggaatatgacagttttgaggcaggcaggaagggcccagcctgcagggtaagacattcattctttgagttaaaggccatattcacttgatgatttctacacacactagaattgtgagagtgtccttgaaggagatcacaaagtaacctggtgactgtggcacagggtccgtggattccatctctcccaggcactgagggcgcagaggcgaaggagcaagccctgcatattggcagggctgtgaccatcgcacttagatcagacccccgacctgtgttgggatgtgagggag

SEQ ID NO: 74962 - DNA, 5127 bp, Homo sapiens; identical to SEQ ID NO: 61678

SEQ ID NO: 74963 - DNA, 1368 bp, Homo sapiens; identical to SEQ ID NO: 61679

SEQ ID NO: 74964 - DNA, 1553 bp, Homo sapiens; identical to SEQ ID NO: 61680

SEQ ID NO: 74965 - DNA, 1831 bp, Homo sapiens
ccatctcaaaattcttaattctatctgcaaagattcttttccaaataaagtaatatttataggttctgagggttagggcatgaacatatcttttgagggctaccatttgatccatagctgttcagcggtttacattctcggatttgacagtggcatgcttcacttgtgactgtgccattctggaatgaggttgaccagatggtgctgctggccacgtcaaactcatcctacaggctgtagcaagcaaggctcacacctccccatgtctgacacctgtgaatcacagctgggtctctggaaaaatgagtgagtgcaggaacaaaatcaaacaggagacctcatccaccactaggtctcagagaggacattgcagcccctgaaaagagagcatctctcttggaacttttgtactcagttgtattaacgcggcaaggaaaatggcacatttatgttggaaaatgtaattatttatggcacctgtgacaactgggcactttggaatcacaaagtttatggttgaagaccacttggggtgattatcctccaaaatgtttatttggcttcttgaagttctgcagaggttgaggcagctgtctcaaaactagaggacagagccctgtgggcaggtgggtgtgagaaactcaaacaccgcagtcttcacagacccacaagctattggcaggtgcaatgtgtttcttggggcagcagctatcctgagacaggatatcacagggtcacatcaaggaccccagtcatctcacaactcttagaccacagctgctgctgcagtttctggttgtaggtgacgtggagggacttggtctctttcttgttgtataggtaacggccaccaactccttccagctctggggtgactgctgcgtagatggaagtccacgctccttcatcgggggtcttgaaaagcaaccagccgagaagcttcttcgccagacgggtggcccagaacacgtgcttgtagaggtccgtgttgaccaccccggggtccaccacgttggcggtcacgtggcttccctcagccgccagcagccgctggaggtggtaggtgaacaggacaagggccagcttgctctgggcgtaggctgcgtggggtgagtagcaggcactgctctgaaggtcatccatgttcagctcagcgacgtaatgggtggcagaggagacggtgaccaccctcgcactgtggccaggggacccagactctttcagcgtatccaagagaaggttggtcagcaggaagtgccctaggtagttcaggccgaaatgttcttcgaatccatctctggttttcctctgagggaccatcatcaccccagcattgttgatcaggacatggagaggaatcttcttcatcttgaacttctgcacaaactgccggatggaagtcatggaagccaagtcacagtataaaaattccaaattttaggaggaaatgatggtgcacgcctgtagtcccagctcctcgagaggctgaggtgggaggatcgcttgagttccagaggcaaagccagcccgggcaacacagcaagactcacgtctctttgtcgttcaaggtttcttcttttattttgcttacaacttgtttggctttgctgtcattatttccagctatgataacatgcatgccaagtctcgccagatgcttcgctgtagaatagccaatgccatctgtccctcccgtcactatagcgacacggtcaggtcgtggggggaaaacctggggtgggtaggggtcgaggtccctgggacgcccgctcctcccctccggggcctggcgggggcgcgcggtcactggccgaccgcaggcggcaggcag

SEQ ID NO: 74966 - DNA, 774 bp, Homo sapiens; identical to SEQ ID NO: 61681

SEQ ID NO: 74967 - DNA, 1322 bp, Homo sapiens; identical to SEQ ID NO: 61682

SEQ ID NO: 74968 - DNA, 1038 bp, Homo sapiens; identical to SEQ ID NO: 61683

SEQ ID NO: 74969 - DNA, 1762 bp, Homo sapiens
tttttttttataaattcatgacactttttactatgccccattgcacgttctcatccatggatttgccttgccgttaagaattaattaaccatggccttgtggccctgggctgacccaggctgcgttttatcttgcacagctaaaagaggttctgatgggtggctcaacaccccaacccaactcctaataccatgtcatcaagtgttcacaattttccaaaatgaagttgaagtgccttgatctgtccactgccaccaccaaccagtgctggagttttcccatgtgggttttgctttttgtggtgttaactggcccttgctgctaagagcaagcaaggactgttctgcgtaagcgcctgccagcctggggacctcactcaagttccccaggggtattcaaagaccggcagcgggctcccattccagctcccgatggcacatggacaaccactccggtatgccctcttcccacgggcgcttcagcttcattgagcaagcgtgatgacctgtacgtgcccccagtgcagcccaagggggtggccctaagggccactggcaccccccaggggggttcacccttctcaggggggaagtcgtagcttctccacacagtaggcagcctggcttgcaaaggccctcattgatctcgaagatgtccacgtcactcactgtcagccctgctttttgcaaagctactgggatggcataggcaggtccaatgcccatgatgtcaggtgggaccccaaccactgcataagacctcaggaccccaaggatgggaaggcccaactcttctgccttggacctccgggccagcaggatggcagctgccccatcactcacctggctagagtttccagctgtggtagaaccatctttcttgaaggcaggcttcagtttggccaggccctccatggtggtgctggggcggataccctcatcctgggtcacagtgatgctcctcttggtgcccttgtcatcatggaccgtggtggtcacaggcacaatctcagcttggaaacagcccttgctctgggctcttgctgccttctgctgggaagccagggcaaaggtatcctgcttctcccgtgaaatgccaaaccgctcagccacattctcagaggttatccccataggaatcaggcaatctctggccttctccttctccatcaagcgcgaagtaatatttccagggttccctctgtcagccagggacatggactccaccccacaggccatgccaatgtcataagacccatttctgatgccacctgctatgctggccactgcctgtagccccgacgaacactgtctattgacagtggacaaaggcacagtctccgggatgtcactcagaaactgggcgattcgggccatgattgccccggccccaggctgcagcacatttccgacacagatgtcccccagctgttccggcctcagattcacgtccttgagaaccgcggtcatgactgccgagagaagctcgtcgggggtggtgtccttgaagccgccgcggcccgcccggcagatggccgtgcgccgcccgtgcaccaccaccacatccgcggccgaggcatgcggggcaccgctcaggcaaggcgcggcctgcggcatccagccggaatcggccggacccctcaggtggcccagcactacctgcagcctctgcattgcgcaggtcaaccctgcagaccagccaccagtccgggaactgaccgcggagttaacagacagccgtccgcacacgcgcagaaccacat

SEQ ID NO: 74970 - DNA, 1140 bp, Homo sapiens
gggaggaaagggaaggtattagacgccgcgcggggattggtttttgtgtgtaattatgggatagggttggtgagatggttttgggttgggagtggtgttggtggttgtttatatgttttggaggagtgggactccataagccctttctgtaatataagtatgctaaatgccacggaagccagatacatttattaaatctactcttagccaagcaataaagatgtgtacagagttcacaacctgcaacacttcaccagggaatgctaggtaaaggcaacttcagtttaactgagtactccatttcaagtgggtaatgtctgctggttggcagctatccagtttggaaaactgtggaagatgctgttgctacccagattgttctgttcaacaagtgggcctgaagcctgagcagtgtagccagctgtgtggggagcagaggttcactccattgcttctgcagcctcctcacctgactcctcctcctcctctagtaagcagcttcttgtcacagacttctggatagcttcccgctctccttcatcagtgcagttctgcaacaagatcaacagctgtctcctgttgtactgaattaggaacttctgacatgttcttattgtacctggcatatgagttactgtggtcaacagcttgtgaaaggtctcgaccttacagactttcagaggtagggggaaggtcttgttagcgggacagcagcaagacccacccaccagtttagactgaactgtgaacgtgtcaccaattgaaaatcagtagccataccacctcactcctacctcccacatgtaatgtgttgaaaaagcatgggtaacggtgtcctttgttctccaagtatgtgatgaagggaagagctgaccacacaagctgatagaattcttttctgcatcgaagtagcactattccagtataggcattgagatatcgaaccgcgaagccgatggagcaggcggctgcgccgaaagttccgtgcaccctggcgatcgtgtcccgtacgaggctgctcagaactcggtcatcgaggcttaggcggcagcgggggtcgtcagacaccagttcgcagagcaggtacctgtgcttgaaccgcaccatggctgcctccgcgctctccagtccgctcgtgcc

SEQ ID NO: 74971 - DNA, 2474 bp, Homo sapiens; identical to SEQ ID NO: 61685
  misc_feature (1)...(2474): n = a,t,c or g

SEQ ID NO: 74972 - DNA, 1938 bp, Homo sapiens; identical to SEQ ID NO: 61686

SEQ ID NO: 74973 - DNA, 2789 bp, Homo sapiens; identical to SEQ ID NO: 61687

SEQ ID NO: 74974 - DNA, 2966 bp, Homo sapiens
ttttttttttttatatagagattgtacatttatttattactgtccctatctattaaagtgactttctatgagccaaggtcttttactttttcttcttgcctttaggggcttcagggggtttcccctcagctacagccaactgtttctttagatccaagagtttcgccacctccgcagcaacctcgttcttgtctgccttttgtgctttcagttctcggacaatgtttccttgttttgtcacttcatccatcagcgcttgtatctgctgtggcttggctgttgtaacagtctctacaactgctggcttcggggacgtttttgcctggccccctccaaagcgctgccttaaactttcaatctggtcattttccaatttttggaacaagggactgactgtgccaatctggtgtcctgctggtaaggtacacaggaagtttgtcagcaggatactgcaggctggaggtgggagctgcagctgggcctggattgtggcactaaccgtgggcatgtaaggctgaagcatgacagagagcaaggcagctatattcactgccaagccagtcactgttcctgcccgttgcctgtcagcctcactgcctttaatccgcttcccagggctcattcacctggaatatattggttgccatgtcggagatatggtgaggatactgcgcaaggcatcccggatccgaaccttctcaagtagcttggtgatagtgctggagctccagggtgacattgggccagcaggcgctgatcatcaggggtgagcaccatctcaggcacatagccccccaaagaacttagacacaaacatcccaagctctgttgatgaagttgcccaggttgttaagcagctcaagaattattcttcagcagcaggtccgtccaggagaaagcactgtcgcttgccctcaggccgaatgtacagcaagatagaagcgcgagatgtcaggagggatccccgtgtcgtgggcccatgtcccgaaacactcccacaccgcggctcttagagaattttcccatcctcatagttcaggtactctgtagcaatgaggtggctgacacaaggtatagttatcctcagctcctagggctgagctaggaaagactaagctatggaaaggaacattgtctttggcccatgaactgatacaggtcgacttgctctgggttcgttccaccatctctcccactggtctgtgtagttggctgtgatggacagatagccaatagtggcatcaaaccagacatagaatacccttgtcttcaaaaccttcttaaggggtaccagggttcccccaatttgaggtctcgggtttattgccagcgtggctttgagggccattcccggaagccaaagaacggggtgataaactgggcattgggtgtccagtcactgccaggcaatgtcctccccaaccactcctccagtcgcttctccagcttaggcaggtccagaaacaggtgctggctcgactgcaccacagggcatgatcggcagactttacactgaggcttcttaagctcgacagcattgatgagcttgccacacttgtcacactggtcaccccgagcctcctcatagccacagaagggacacacgccctccacgaagcggtcagccaggaaagcgagcacagtgctcacatcgcagttgctccacagtatcttgcagcacaaaacctcgtttcagcaactgctggaaaatgtcctggggtgattttggtcttgctgtggagtggtggtgcgaccaaaaatatcaaacgaaatgttaaaccagcgggtagatgtcagcatggatgatgtggtacttgtcgcagatctcctggggggttagtccctcctcccagagccttggtctctgttgctgtaccatactcatctgtcccacacagatagagggtgttccactggcggaggcgagagtacctggcaaagacatcggcactgagcacacaaccaatgatgttcccaaggtgggggacattgttgacgtaagggagggcactggtgatgagcacattcctttctccagccacaggcaacactggattctgctggggccgcagcgggggcaaactttctaggcccttctcccaagcagtaacagccatagcaatctcctcctcagatagggtagccagctcctcctcctcaggctcaattggtgacagccctttcccttcagcggggctgggctggggctgcttttggaggtaaggcccggagagccaggacaccttgcttgtttcagtacaagtcttcttgcagcttcgctgacatggttccttgggtactcagtgtctggaaccagctgtgcagggcactcagctcctcagggaggtaggcgggatcttgcagtaatgggtatagggctccccacaaaacaatgtcggctagagattctgtctccccagccaggaaaggacagtttctgacgactcaagctgtggtcaatgtgagtcagggttctccgcactgaaccaagaacatcttccccctttcttgccttggaccacttaaatagtacagggcagcagacaaagttggctgcagctctgtcgcttcccattccagccactggttagtgaggtcatcttgctcccagccagataacaaaaaaaaaatatcggcagattgcactagtggagaagaggtagttgccgctatccagctgcaagacagggaccttaggccgggtcaggaacgggaccacacaatcttccgggcctacagtgctgatgagcacctctgctctgccccgggctctcccggcggcggccagcaccggcaagcaacccggaacgccatcactcacgaacagtctcatttcgccgtgaatccctcgctgatttataaagtgcctgcttttcctgtgggaattccagaatagatataatggtggtggccaggggctggatggagggggatagaaagggatagctccaaggaggctggggtgg

SEQ ID NO: 74975 - DNA, 842 bp, Homo sapiens; identical to SEQ ID NO: 61689

SEQ ID NO: 74976 - DNA, 808 bp, Homo sapiens; identical to SEQ ID NO: 61690

SEQ ID NO: 74977 - DNA, 704 bp, Homo sapiens; identical to SEQ ID NO: 61691

SEQ ID NO: 74978 - DNA, 898 bp, Homo sapiens
agtcgggcagcctcccagatctctgacaactttacaagctgcaggggagaccagcgataaccctgaaaccttcccatgtaacccccagggcgctggccagaccaagagcagctgccacatcaggctggtgccagcagtccctgcctgccacactgcccccccaccaggccactgaatgaggcagctgggagaggcaggaagaggggcttcaggctgaattcttgatttgacccttcttggcccttttgcttgggagacctggaactgaagggcatggaaccccccttggaccctgtgggcaggaaaactgctccccttgtccctgcctgggggtaggacagataaggctgctcgtcctgcggcggccccccagcccacctgcttcctatccgtttcctgcaggatggtgccccctgcatcccctcacccattgctcacggaaggaaaagcagacgtggccagcctgcatcctctgccctccctgagcctcctggcctggctggccacagctggcatggacgccatcagcaggctccgtgcaggcggacggggcagcccccacagccagggcaccctggccctcactcaccagcacccttttgttcttttcctagcaaaatatgcaaagtgtgaccagtgtggaaacccaaaggtgagtgggttccggctgcaagccaccaaggcttcagctttgggggtgggcagggtggtctctgcactgcttggggtggcaggtctggtgcccgcccagctgggtttgcaacgtggctcaaggtggcatggatgcctcaggacggccccttgcttccagccaagcccctgcccaggcctggaggggaagagagtctgggtgggttggggtgagggagaggcatctggcttgagagcagttcccagg

SEQ ID NO: 74979 - DNA, 1273 bp, Homo sapiens; identical to SEQ ID NO: 61693

SEQ ID NO: 74980 - DNA, 2966 bp, Homo sapiens
  misc_feature (1)...(2966): n = a,t,c or g
gaaaagaggacttattgttgtcatggcccatgagatgattggaactcaaattgttactgagaggggggtggctctgctggaaagtggaacggaaaaagtgctgctaattgatagccggccatttgtggaatacaatacatcccacattttggaagccattaatatcaactgctccaagcttatgaagcgaaggttgcaacaggacaaagtgttaattacagagctcatccagcattcagcgaaacataaggttgacattgattgcagtcagaaggttgtagtttacgatcaaagctcccaagatgttgcctctctctcttcagactgttttctcactgtacttctgggtaaactggagaagagcttcaactctgttcacctgcttgcaggtgggtttgctgagttctctcgttgtttccctggcctctgtgaaggaaaatccactctagtccctacctgcatttctcagccttgcttacctgttgccaacattgggccaacccgaattcttcccaatctttatcttggctgccagcgagatgtcctcaacaaggagctgatgcagcagaatgggattggttatgtgttaaatgccagcaatacctgtccaaagcctgactttatccccgagtctcatttcctgcgtgtgcctgtgaatgacagcttttgtgagaaaattttgccgtggttggacaaatcagtagatttcattgagaaagcaaaagcctccaatggatgtgttctagtgcactgtttagctgggatctcccgctccgccaccatcgctatcgcctacatcatgaagaggatggacatgtctttagatgaagcttacagatttgtgaaagaaaaaagacctactatatctccaaacttcaattttctgggccaactcctggactatgagaagaagattaagaaccagactggagcatcagggccaaagagcaaactcaagctgctgcacctggagaagccaaatgaacctgtccctgctgtctcagagggtggacagaaaagcgagacgcccctcagtccaccctgtgccgactctgctacctcagaggcagcaggacaaaggcccgtgcatcccgccagcgtgcccagcgtgcccagcgtgcagccgtcgctgttagaggacagcccgctggtacaggcgctcagtgggctgcacctgtccgcagacaggctggaagacagcaataagctcaagcgttccttctctctggatatcaaatcagtttcatattcagccagcatggcagcatccttacatggcttctcctcatcagaagatgctttggaatactacaaaccttccactactctggatgggaccaacaagctatgccagttctcccctgttcaggaactatcggagcagactcccgaaaccagtcctgataaggaggaagccagcatccccaagaagctgcagaccgccaggccttcagacagccagagcaagcgattgcattcggtcagaaccagcagcagtggcaccgcccagaggtcccttttatctccactgcatcgaagtgggagcgtggaggacaattaccacaccagcttccttttcggcctttccaccagccagcagcacctcacgaagtctgctggcctgggccttaagggctggcactcggatatcttggccccccagacctctaccccttccctgaccagcagctggtattttgccacagagtcctcacacttctactctgcctcagccatctacggaggcagtgccagttactctgcctacagctgcagccagctgcccacttgcggagaccaagtctattctgtgcgcaggcggcagaagccaagtgacagagctgactcgcggcggagctggcatgaagagagcccctttgaaaagcagtttaaacgcagaagctgccaaatggaatttggagagagcatcatgtcagagaacaggtcacgggaagagctggggaaagtgggcagtcagtctagcttttcgggcagcatggaaatcattgaggtctcctgagaagaaagacacttgtgacttctatagacaatttttttttcttgttcacaaaaaaattccctgtaaatctgaaatatatatatgtacatacatatatatttttggaaaatggagctatggtgtaaaagcaacaggtggatcaacccagttgttactctcttaacatctgcatttgagagatcagctaatacttctctcaacaaaaatggaagggcagatgctagaatcccccctagacggaggaaaaccattttattcagtgaattacacatcctcttgttcttaaaaaagcaagtgtctttggtgttggaggacaaaatcccctaccattttcacgttgtgctactaagagatctcaaatattagtctttgtccggacccttccatagtacaccttagcgctgagactgagccagcttgggggtcaggtaggtagaccctgttagggacagagcctagtggtaaatccaagagaaatgatcctatccaaagctgattcacaaacccacgctcacctgacagccgagggacacgagcatcactctgctggacggaccattaggggccttgccaaggtctaccttagagcaaacccagtacctcagacaggaaagtcggggctttgaccactaccatatctggtagcccattttctaggcattgtgaataggtaggtagctagtcacacttttcagaccaattcaaactgtctatgcacaaaattcccgtgggcctagatggagataatttttttttcttctcagctttatgaagagaagggaaactgtctaggattcagctgaaccaccaggaacctggcaacatcacgatttaagctaaggttgggaggctaacgagtctacctccctctttgtaaatcaaagaattgtttnaaatgggattgtcaatcctttaaataaagatgaacttggtttcaaaaaaaaaa

SEQ ID NO: 74981 - DNA, 2408 bp, Homo sapiens
  misc_feature (1)...(2408): n = a,t,c or g
ttttttttttttcatttagcaaagtttttattcaaaagcttctcagcaccatctagttatcagaaagaatggatatcaccttttcctgcccacccaatccccagttccacaggcagaagttaaacccatttggctagagttccccctaatgattatgactgagaccatgataagattttggttgttctcacccaactgtctctaagcctctactcaaacctgactcaagcagagatgtgcacaccccacagttcagaacaggaaggaatcatgtcagatctgatcaacctcccattcttgggctattagaggcacaagaaattaccttgaaaaaatggaattcagtgactgccatctaggaaagacagtgatactgtccagcagcatgcagttccgagagctcaactcttaggccaccctccctccactctactctaggaacaaggagcattaggtctgttttctctccatacacctcaatcgctcgtcctctcgtcttattaaaacacagacacagaaccaaactttttgacagttaaagacaaacaattacatctaattaaaatgctaagagatcctgagctgttagagatgaggagagtagatagtatgacctgatcttcccccctcttttttttcctttaacagtattctgtttcagcataaagcacactttctgaagaggttcctggtggagactggaaaatcttggacttgtgtcctgtggcaaacaacacaagtccccttgcataactttggcttcagtccctggatctgtcctttgcaagctacgtcaggttccatggaaggaaggaaagagctggagggcagtatcactcagccaaagctcccatggggtcccatgctggcaggacaaatgggttccctgctcctaacacagctagcacctcttccagggacatgcttcctgtcccaccaaccacttcgtagacatactcaagagacccaactcaatctgtcatgcacaggtaacctttggtggccatggtcttcaccccattgaaattctccaactctcccattttgtgaaaagcaccatccctgaatcatcccggctctgagcacagcagtgaaggtcatggtgtgggtcataacgtgactcaccaaaagtcacgcctctccgctttattcatgttcttcaaggagacaccaaacactaactcatggtcatagagattcatgtcactgagggcccagcttgctattgaaagtgttttccaacatcacagccaaaccacacagccgtctccatctttgatggaggcagcaaccatctttttcaggaagtcaatgggctggttgttgtaaaagagtttttctcccctccaaaccatattgccttaagtattcccactgtgtaaagtttgttgtacttgtgctggggcctagggtcattcactaaacaaatcttatcttccatattgaagagtggcttgacatgttncccctgtaaaactccaagggtgttcatggggccaattttctgataatttttatctttgtctcgatattcccaggtgaatgtctctggtggattacctcttcagatgcgccaccattcgcaagtatctcctccatcatgacgtcctgtgtggccgagatttctcctttcgttgctccactgtgtaccaggttccgcagtcgtatacagaattctctcatcttgtgattcagaatatcattcatccttctggttgcctctgttgtataagattcagggaagcatttcttagggataacaccatatttttcaacaatattaacaagcatatcccattggccaccatcatttgcagggttcataagcaaaaactgcaccagcctcccatcctcaggctcctttctctgggctgtgtccacaaaagcactcaagaagaaataacagcgttcaaccttgtcccaaaaaaacaggtaagattggctaaactcaaattcttcaatatttaactttttcatgaatggaagcctcataacattcagacaagaaaagatccagcatcgccctgagctcttctggttggtgattggcttgccctcctggggcacggcgtgctggaacacatgctgcgcgcgctgcaccgtggcccgcttcagacagatgtccagcaggtcgtgggtggtcccgacattctgggcaagtacgaactgggggtcggaattcagtttctgtatcagagcagctaccttctccgaattcagtcccgagctgctcatggcgcccacgctgcccggcggggtaacggtagcttccagggtccttgggcgagcgccgggattgcgctgcggctcgctgcctagggggcccgacctgtctctcgcacccggagcgccggaaaaaggaaaccggctcggcggcggcggcggcggcggcggcggggaggctgagg

SEQ ID NO: 74982 - DNA, 4369 bp, Homo sapiens; identical to SEQ ID NO: 61699
  misc_feature (1)...(4369): n = a,t,c or g

SEQ ID NO: 74983 - DNA, 1976 bp, Homo sapiens
cagcctgggcgcgtccatcgtcgagtaccttctcctctgcctccccctccctctgcttctatctctctccaattgccctccctggcctgcggccgcccggtcctccttcccagcccagtgcagccaggcacccgggttcggcttgctcaggtctctgtccgggactgggaagccacggagggccgggaaagtggcacactcctggagctcaagcttcctactctctcatcgctgaataactaccgggcaggactgggtggaacagacagcatatttaggtcattgatgggctgctgggtggatggagctggaaagtgatgggcactgctttctggggctgcccaggttccttccgagggctcgcttttcctgggcagagcgggaaagaggaggggcaggccggtcgcgaaacgcaaatagtcgagaatagcgatccggggagaagcaggtgtctgtggggcccaagagaagtaccatctcgttaaaaattcagattgaactatcttacaaatggctcccagaagatccactccctgtgggaacacagcagttgtggaagtgaagacaggactggacccagaataagggttcaaatatgtggggaaatctgacctctaaattcttataagtcagagagtgactgaacaacagcagtgagacatcgaagagttttaatatctgctgtaaaccttggcacagatcatttacttctctaagactgaatccaaaaagcacaatggaatactataataagctgagacagcatggtgaattccagacaagcctgagcattccctatagccagagaaggaggcccaacacctaacatagccttggatgcagaactgatagaacttggggaaagtgatgaagtagttgacctcacctgtgaatctctagcacctgtagtgattgacctaactcaccgtgactctgtagtgattattgaacaaaggaggaggccaagagcaaacacaaggccactccaagaccacactggcagttgtgtggtgaacaatgatgaggagggagtgaaaagggacagagatgtatgtataaccaacagtgcccaccataattccctgcaaaaaaattttttttgtcatatactacctggttatattcagtgtcaagtttgcatggatggatgctcagagattgaacttagtatacaacacatctactctatagaatgtggccacatctgtagtcagtgcttctgcacttcctttacacatactaacactgcccagtttgtttgaaaaaaatcagcctccatcagtatcactgcagttatatatgatgtatgccttattgctcaagacagatcctgtggctggatttttccatgtctttgtgcaggaactatgggttgttggcatccaatgctctgagcttaaaaatactgatttttaaaattgctatctgcagtatataagaaactctttgatttctcatatgctctgagactgctttttgtttcctttggttttatgcttcagctctggacttcagttgccagagtgtgccagatactggggtcgtccttaaagcaactttccctttcttatagtcatcaatttttagttggccacatgtagacattctggaccacataaataaagacaacaccctagagatggtgaagtaagttgtaaactaaaatcctaagccccctaattgactgaatggaacccctcttgaccaaagtgaccccagaaaaaccttaaaactgagttcctggccatgacgggatgggaggtcagacacgcttcattatatctccgtctcttttatggtttagacacagcaactgaccagcattaatgtcaaaataaagatcataaggctgacagaatagaccctttgtggcaataacaaattattcgtaagatctaaggtcatgccaggcaagtgttatgtcatgcactcctacactttaaaggaataaacctatgttcctaactgccacaaga

SEQ ID NO: 74984 - DNA, 717 bp, Homo sapiens; identical to SEQ ID NO: 61701
  misc_feature (1)...(717): n = a,t,c or g

SEQ ID NO: 74985 - DNA, 699 bp, Homo sapiens; identical to SEQ ID NO: 61702

SEQ ID NO: 74986 - DNA, 1967 bp, Homo sapiens; identical to SEQ ID NO: 61703

SEQ ID NO: 74987 - DNA, 1086 bp, Homo sapiens; identical to SEQ ID NO: 61704

SEQ ID NO: 74988 - DNA, 675 bp, Homo sapiens; identical to SEQ ID NO: 61705

SEQ ID NO: 74989 - DNA, 2000 bp, Homo sapiens
cgggctgggggaggggagcgtggggccgacagttttgggggtgaaaaggcaaaaggcgggtgaaaggctgcctcccgagactctccttgcttggaattctgcccactctgcggagttagcagtcacgacctccagcacaggatgtggtaccacagattgtcccacctacacagcaggcttcaggacttgctgaagggaggagtcatatatccggcccttccacagcccaacttcaaaagcttacttcctttagctgtccattggcaccatacagcctccaagtctctgacttgtgcttggcagcaacatgaagatcattttgagctgaaatatgctaataccgtgatgcgctttgattacgtctggcttcgagaccactgccgctcagcatcgtgctacaactctaagactcaccagcgcagcctggatactgccagtgtggatttatgtatcaagccaaagaccattcgtctggatgagaccacactctttttcacttggccagatggtcatgtgactaaatatgatttgaattggctggtgaaaaacagctatgaagggcagaaacaaaaagtcatccagcctagaatactatggaatgctgaaatctaccagcaagcccaagttccatcggtagattgccagagcttcttagaaaccaacgagggactgaagaagtttctgcaaaactttctgctctatggaattgcattcgtagaaaatgtccctcccactcaagagcacacagagaagttggcagaaaggatcagcttaatcagagaaaccatttatgggaggatgtggtatttcacttcagacttctccagaggtgacactgcgtacaccaagctagctctggatcggcacactgacactacctattttcaagagccctgtggcattcaagtgtttcattgtcttaaacatgaaggaactggtggcaggacactgctagtagatggattctatgcagcagaacaggtacttcaaaaggcacctgaggaatttgaactcctcagtaaaagtgccattgaagcatgaatatattgaagatgttggagaatgtcaccaaccacatgattgggattgggcccagtcttaaatatctacccatggaataaagagctgtatttgatcaggtacaacaactatgaccgggctgtcatcaataccgttccttatgatgtcgtccatcgctggtatacagcacaccggactctaacgatagagttgaggagacctgagaatgagttttgggtcaaactaaagcctggcagggtcctatttatagacaactggcgtgtcctacatggcagggaatgcttcactggctaccgccaactgtgtggctgctatttaacaagagatgatgtattaaacactgctcgcctcttggggcttcaggcttaaaattgacagcatctggattatgaatacacctggcaccctggctaccagaatttcatatgggcagaataatattgtgtcaaactctacttcagattgtctccttatcccatcccacaaaacagaatctgtccgtttctctagtaagggagacttgttggagaggcgggactctgagttatctaatgtcagacatctagtggggcagctctcttcctcatgttataacatggatccacttgttttatttaaaccttttaatataattttggtcagtctccttcagaaatataatctccatattgataggaaagcaataattgccatgaggtaacgatttttttcccaagtagatcagttagaaagaaatgcattctagaaataacaaaaatcctgataaagcaacaatttgcaaaatgtttggtcttaggacaccttaacactcttaaaagttattgaaggccccaaggagttcttgggtgtgggttctatctattgatactaactattttaggtattaagactgagaaataaataaagctcaagaagaacacagaagccctgtattgcggccgggcagaggataccagcag

SEQ ID NO: 74990 - DNA, 3775 bp, Homo sapiens
aaatgtgaattttatgaactaaataaatatttggaaaattagcgtgctttaaaagggcaattttggtttcattaatactgtatacttttactgctttaagatgttaagagagtaatcctgggaaaataaaacacatacaactttcaaaaaagacaggtggtgtatgccctaatatttaaattgctcattaaaggaagtggatacaagcattaagatgaatcatagcttcagtcaagaggctccacatatataggctgccccggctccctctcctaaatcatagacatcgtatgtagtaccaccttctaccaatttgattttagaattagtaactgacacaaagcattctaggacagacgccatactattatctcccacattgacatttattaataacatttctggcaaaaacaagtaacaagttcaataactgaattcacatcaacaggtttcattttgatccattagccaatttggaaaaaagccatattgatcaaagggattaaaattaaaaagcaccttttccttgctacatatagattctttaaactaaaactccaagcagggatcagatacaaaacccaactgcaggattgtttttattgactatgacatggacttgttgcttacatttttttaaagtcatcatttatacagttatttaaactctattgggcagaaaactgaaaatacaattgtgagaattatactccatagtaaatacctatgtacttaatactgaattcttgtgtcactgagaaccttaaccctactctaagacatcttgcgataacctgcaactatcaattttttggagacatttttggtatttcggtcaagtgctgaaggggttttactccaaaatctagggctagaattcagcttccaacactctcatacccaggtaacacaattatgaatattcagaaatcaatacctcttagatcatcaatgtttcagagctatgcctgataaatgacatttgaaaaataataatatagaaataattagctgaatttatactcctgaagccacttcatctttaggctttatatttacagtgttgtccaggaggaactaaagaaaaaagttacactaattatttgtcaagctctattccagatgtctgcttaagacttgcagtttacgcagaggtgaaccattatcctctaaaattacaccacactacttcttgtagaactaatagtaaaatacatcaacccaaatcttatgaaggcagcacatctttaggagtaactagtatataaaaagtatcaacatcagtggtttgaatataaaaatttatttttaagtcaaagtatgcaacaaataaacctacagaaaacattttcccatcacaatctgttgctttaccaaataatattttgaaaacacattccttcagtcattataaagttcttaaaatacaaaagaaattaaatctgtaagaaagtctagtagaccagatgctgttgtcaagacttgtatgttggtgtttttgctttcagtacatcccacgccatccacctccactcatgccgccttgcccatagtaacctccactgcctccaccaccacggccataaccacccaaaccatcaggagtaccatatcctccactgtaattgttccccattcccattcttccaactgatccatagcctccctgattatccattccatctcttccgtagcctcccattccagaacctcccatgccagagccgcctccaggagtagaattcaagaagagttcaatatatcgatgttgcatgttatttttatctttagacatggcagctactgcatcttcatgtgtcacaaaactctacatctggctttcttccttgtggctctggccatcagcttcccaatatcaatatgaacttcgtattggatttatgtggtgagaagaaattagcaatgtcattttcagttgcacgaaaaggcaaccctctcatatgtacgaaatgaccaccatgaaaacctgaacttgcatcaccagctccaccatagccatgtcctcccatacctcttccatctctcattctgtcatcaaagccatcattccccatagccgtaattattatagccaccatagtcatcaaaacctccataaccaccatcatatccatcacctcctcgtcgcattctgtcatacatacttccacgcccagctccataataaccccctcttcctcctattggtctatcatatggtcccggttcgtgtcccagcaatcttcttggtggatcataaaatcctttgatttcactcctgctacttctgaagatctcaatatacctatttaaaaatgttttaaggtacaggtttcagcataaatgtattagtgtaaattagatactgggcaaaatgcagtaagtttttctatatctagatacataacccaatttaaattgcctaaatacaccgtaagttaacagtttaaacctacaaacttaattaaatatttaagttttacaaagaaattagtcacggaaaacaattcataaagtatatttttactttgtctcttttagtacataataggtgttttaaaggaaataggtgattatacaaaagcatttatcaacaacatcctacagagaaatggaaacaatctaattttaatttaactattagcattaattccccacccaaatctgtagtttccaagttaaatttagataattatcaattcttttaaactaccccagaaaaatgttatggctacccccccatttaagcaatagtgacccacaacccccaaaaataaaaatttaacaccatcccaaactctccatccccacctgtgccctattctttccttgtgtttccccagagcattttctgctatctcctttgaagcaaactgcacgaaggcctcccctgtgcttctcccctggtagtccatcgtcaatgttatcccatttggcacgatttccaaccctttaacccaaggacaaataaccccatcaaggggaacagtgttaaaggctgaaacattcccatctgaatcaaatatttaaaacaagtctaaacaaaacaaaacaaaacaaaacaaaaaagcttagtttcccatcaccccataatacaaatgaaagattttttcaaatattactggattaaataaattttttgcgaccagtgtaaaaacactgtgtaattacacactctaaaagcccacctatattacatgaaaaaaggctacaaaatcaaatatatgctccatatactaattcacggttcatttcatcacaattctcaaatatgttactgcacattaattaggttttacatattctacacattctgtattgaatattaactggagcatattattttaatacattaaccaagactatcatagttaaacttaaaagttccaaaatcaaatgggttttacaaattaaaaacagtaaaacaatacaaatataaaattacaatactactaaactttgactaatactagaggtaccttgaaagaactgaactatttcctctttgctgcaaccaaatggtagtccacgaagtcgtactgtcccatcactagcgtcatttggaccattatgtttcataacccaatccatctcaataccgtttgatttaaatgccccttttacttcagataccctgtcaggcgatagttacgccgactctggtgctcgcggggtccagttcaaagaagggagaagtcgtttgcctcgtgtagcgctcgccacaacggttctcccaaccgtctccagcggtgacaaccgcttagggagcacgaaa

SEQ ID NO: 74991 - DNA, 595 bp, Homo sapiens; identical to SEQ ID NO: 61707

SEQ ID NO: 74992 - DNA, 2921 bp, Homo sapiens; identical to SEQ ID NO: 61709
  misc_feature (1)...(2921): n = a,t,c or g

SEQ ID NO: 74993 - DNA, 2119 bp, Homo sapiens; identical to SEQ ID NO: 61710

SEQ ID NO: 74994 - DNA, 1781 bp, Homo sapiens; identical to SEQ ID NO: 61711

SEQ ID NO: 74995 - DNA, 2876 bp, Homo sapiens; identical to SEQ ID NO: 61712

SEQ ID NO: 74996 - DNA, 802 bp, Homo sapiens; identical to SEQ ID NO: 61713

SEQ ID NO: 74997 - DNA, 2805 bp, Homo sapiens; identical to SEQ ID NO: 61714

SEQ ID NO: 74998 - DNA, 2765 bp, Homo sapiens; identical to SEQ ID NO: 61715

SEQ ID NO: 74999 - DNA, 1874 bp, Homo sapiens; identical to SEQ ID NO: 61716
  misc_feature (1)...(1874): n = a,t,c or g

SEQ ID NO: 75000 - DNA, 2838 bp, Homo sapiens
ttttttttttttgactgttcatggccatctttattcccagtgctggctatcccaaaatactgccaggccacagccaacccccacctttgccaatgtgactgggtcaccaccccatacaccaaagcagccttgagccctgccccaccccctgccctgcggaagccaagtccccagctataaaaccctgcccctcctggtggcccaggaccctcaaagatgcacacaggggccccagcgaggggcccctccgtcattagccttctcctccaggctgggctgccaagcagcctggagctgagtctgtcccttggacgctgggccacgtcaccttctcctccagaaggcttcacctatgggcccaggaagtcctccttccgatagcccttcgcccggaagtcacggtggagcttgttgtactgccacaggttggccaggaggctggatgctgcccgggaggacttctcactgtcggggctgtcccgcttcttcttgatgaagatgagctttcggagtccgtcaaaatacagcaggtctcgggcaagcgaatggggctggccaaccaacccaggttgttgaacacagctatgaatgttgaaccagcacctcggctgggggcgacttctcacccacgctgcctggcagcttctcgaatcaggtggctccaccaccttcgtggacatctcgtccttgttcctagcgttccgagacaggtttcggatgaggccagtcagtgagcgcagctggtggtggtcggcggtcctgacacggtctagcagggggttcagaatacgctcctgctccagggccaggcggcttagcccccccggcccccttgggttcgcctcccgtgatgttctgcagcgccccggcggccgcctccgtcgtgtgccggttgagctcgcagcgctgcagcagccggttgtacagccccacgatctgggggctccacagccactcgaggcccttggggtccttggacacctccgcgaaggtgagcgcatcggcggcgaggggcagctcgcgcagccgccggctctgcggcgtgaagcagcccacgacctctcccggcggcgcccccgccaggtccctgcggccgcgaccctccagccgctgcagcgcggacggcggcatctcgtcgtagaggcggtaggacaggttccgcaggacgcacaccgcgttctccacgctcttgtcctcgcatttgcccgcgtccagggcgtggttgatagaggtgaccagggcgtccaccagcccgtggcactcccgcatcttctggcgagtggcctgagaggctgagctgaggttcctggggaagccggtggcgttgtagaagatctccgcctccgaggcgttctgctggatgaggggggggacccccagcccccgacaagggggctcaaacaccaaggtcttgtgagctgcttccagcggtgtcttcttggccaggcggtccttcaggtggtcgctcggatgaaaggttccacaggatccctgtgacatttttgcgaagctcatcatcctgctcccgcagtgtccgcagcagctcgaagatcccgttctcctccaccagggccagcttgttgtcagcgttgtcgtagatgaggttgcgcatggcacctgtggcatggcgctgcacttcctggttggcgtggttgaagagcttcaccagcctaggcacggcctgaaggctgcgggcctgcttcttggcggctgcatcgctgtagcacttgtgctggatgtaggccgctcccagcacctgcaggttggggtctgaagccatgaggtacttgactgctgagggcaggtcaatgtcatcaaaaccgctgctgagtctctgcagggttcggtggctaccgtagctgttgaacccatgcacgtccggcaggtggcccgagtcagccaggctgaggctgaggctgcgcacagatggcgctcgagccactggctccaggacggcccccggcactgccccgcctaccccgcggctccggtggctgctctggaatcgctgcagggtccgcacggcaggggcacggatggtccggctcggggaaacctcagtggcctcgggccagtccagcccccctgcccggctggagctggagctggcctggcgctcgtacgcaaaggccctgtaggtggaggtggccgcaggctccagctgctcagacaccaggctgtagcggtcgtccaggcccccgggccccagccgcagcgagcgcagggagagtgtgtcatagtcggcccggctcccaaccccaccgcgctcatggaaggacacgggcctggtgggcatgggaggggtgggctgggcacccccgtacccagcggccccaaaggcgctgcccccgttgtgggctgaactcagcctccgactgcagctcagatccacggcggagcgggaggaccaggaggctgggctgtaggccggcttggcgatgggccggaagcccgaggtcttgtccccactcaggccctgagagcgagagctgaagccagcctgcagggtgtggtactgccccctggatgtgcctctggcagtctcggcctcaggctcgggctcagcggccccgttgtgccgcggctgctgtcccagctgcaagaggcgggcgcggacctgctcctggacgcgggctgcccgcagccgctcggcctccggcccctcggcgccccggcggtccagctgcaggtcagagggcagcgccagggagcacacgccggcctcaggctgcagggccgacagcaggaagttaccgtcctgcatggcggcaggtccaccgggcctgggcctggcggccgcctccaaacccaactatcttcacgtcctgtccggaattc

SEQ ID NO: 75001 - DNA, 873 bp, Homo sapiens; identical to SEQ ID NO: 61718

SEQ ID NO: 75002 - DNA, 1316 bp, Homo sapiens; identical to SEQ ID NO: 61719

SEQ ID NO: 75003 - DNA, 1913 bp, Homo sapiens; identical to SEQ ID NO: 61720

SEQ ID NO: 75004 - DNA, 864 bp, Homo sapiens; identical to SEQ ID NO: 61721

SEQ ID NO: 75005 - DNA, 978 bp, Homo sapiens; identical to SEQ ID NO: 61725

SEQ ID NO: 75006 - DNA, 783 bp, Homo sapiens; identical to SEQ ID NO: 61726

SEQ ID NO: 75007 - DNA, 1287 bp, Homo sapiens; identical to SEQ ID NO: 61727

SEQ ID NO: 75008 - DNA, 2977 bp, Homo sapiens; identical to SEQ ID NO: 61728

SEQ ID NO: 75009 - DNA, 1012 bp, Homo sapiens; identical to SEQ ID NO: 61729

SEQ ID NO: 75010 - DNA, 1832 bp, Homo sapiens; identical to SEQ ID NO: 61730

SEQ ID NO: 75011 - DNA, 1286 bp, Homo sapiens; identical to SEQ ID NO: 61731

SEQ ID NO: 75012 - DNA, 2073 bp, Homo sapiens; identical to SEQ ID NO: 61732

SEQ ID NO: 75013 - DNA, 873 bp, Homo sapiens; identical to SEQ ID NO: 61733

SEQ ID NO: 75014 - DNA, 1470 bp, Homo sapiens; identical to SEQ ID NO: 61734

SEQ ID NO: 75015 - DNA, 3595 bp, Homo sapiens; identical to SEQ ID NO: 61735

SEQ ID NO: 75016 - DNA, 1011 bp, Homo sapiens; identical to SEQ ID NO: 61736

SEQ ID NO: 75017 - DNA, 911 bp, Homo sapiens
  misc_feature (1)...(911): n = a,t,c or g
tttccggagcccgccccctccggggagnaggaggaggggcggcgggggaagggagggcgggtggaggggtcgggaggaacggggggcgggaaagatccgccgggccgccgacacggcggcacccgccgccgggttgaatcctccgggcggactgcgcggaccccacccgtttacctcttaacggtttcacgccctcttgaactctctcttcaaagttcttttcaactttcccttacggtacttgttgactatcggtctcgtgccggtatttagccttagatggagtttaccacccgctttgggctgcattcccaagcaacccgactccgggaagacccgggcccggcgcgccgggggccgctaccggcctcacaccgtccacgggctgggcctcgatcagaaggacttgggccccccacgagcggcgccggggagcgggtcttccgtacgccacatgtcccgcgccccgccgcggggcggggattcggcgctgggctcttccctgttcactcgccgttactgagggaatcctggttagtttcttttcctccgctgactaatatgcttaaattcagcgggtcgccacgtctgctcgtgccgaattcggcacgaactgtgatgcccttagatgtccggggctgcacgcgcgctacactgactggctcagcgtgtgcctaccctacgccggcaggcgcgggtaacccgttgaaccccattcgtgatggggatcggggattgcaattattccccatgaacgaggaattcccagtaagtgcgggtcataagcttgcgttgattaaggtgcatgacaccacacccggctaatttttgtatttttagtagagacagggtttcaccatgttggccaggatggtctagatctcttgacctcgtgatccgccttcctcggc

SEQ ID NO: 75018 - DNA, 1041 bp, Homo sapiens; identical to SEQ ID NO: 61738

SEQ ID NO: 75019 - DNA, 2257 bp, Homo sapiens; identical to SEQ ID NO: 61739

SEQ ID NO: 75020 - DNA, 1297 bp, Homo sapiens
cggacgcgtgggcaagccaggaaggccctggagaatccggtgtgccccctcctccggcagagcttgggcctgggctcacgaggaaggggctgcagttctccaaggattcccgcctgctcccagacccccgggagtcgtaggaacccgttcctggacgctgacgtcggctttcagggatccctcgccggacgccgcggagggacagagcctgggaagccgtcgccccgccccgtccccgcccccgcgcgcagtgggcccggggcgctgagacccgcgtagagcaaagcgcaaggtcccagcgccccttggatcctcggtggcagggtccgggcaagtgtcattgcgagggttcaggaagccccggcctgtgatcgtgagcggaaacccctcctggagtttccccaaagccatggacagccctagtcttcgtgagcttcaacagcctctgctggagggcacagaatgtgagacccctgcccagaagcctggcaggcatgagctggggtcccccttaagagagatagcctttgccgagtccctgaggggtttgcagttcctgtcaccgcctcttccctccgtgagcgctggcctgggggaaccaaggccccctgatgttgaggacatgtcatccagtgacagtgactcggactgggatggaggcagccgtctttcaccatttctaccccacgaccacctcggcttggctgtcttctccatgctgtgttgtttctggcccgttggcatcgctgccttctgtctagcccagaagcatccccagtgcctgacctatagtaggtgctacgtatctgcttttggaatacatgcatgaatgaatgaatgggtatgttgggtgggggagggaccaggggaagggtctgggactgaggggatgcctgggtcactgctgcccactgcctctacagaccaacaaggcttgggccaagggggacatccagggggcaggggccgcctcccgccgtgccttcctgctgggggtcctcgccgtcgggctgggcgtgtgcacgtatgcggctgccctggtgaccctggccgcctaccttgcctcccgagacccgccctagttgcccctacagccctcactgtgaaccctgaggccggcagcccagcaaatctgtgggcagagagtggagaatcttggtggatgaggctgcggcggcggcaggagcatctagaaacgggagcgagctggactggaacccttccccttcctggccaccgctcttcgggcggcagcaacctgagattaaacaccagacacccttgcagccaaaaaaaa

SEQ ID NO: 75021 - DNA, 2548 bp, Homo sapiens; identical to SEQ ID NO: 61742

SEQ ID NO: 75022 - DNA, 959 bp, Homo sapiens; identical to SEQ ID NO: 61743

SEQ ID NO: 75023 - DNA, 1424 bp, Homo sapiens; identical to SEQ ID NO: 61744

SEQ ID NO: 75024 - DNA, 2634 bp, Homo sapiens; identical to SEQ ID NO: 61745

SEQ ID NO: 75025 - DNA, 897 bp, Homo sapiens; identical to SEQ ID NO: 61746

SEQ ID NO: 75026 - DNA, 2352 bp, Homo sapiens; identical to SEQ ID NO: 61747

SEQ ID NO: 75027 - DNA, 1081 bp, Homo sapiens
cgctttcggcatggaggaaatttatgcgaagtttgtgtcccagaaaatcagcaaaacccgctggcgaccgctgcctccgggaagtttacagaccgcggagacgttcgctacaggatcttgggacaatgaggaaaattatatttcactgtggtctattggagattttggaaacttggactctgatggagggtttgaaggagaccatcagttattgtgtgatatcagacaccatggtgatgtaatggatttacagttttttgaccaggaaagaattgtcgctgcttcatcaacaggatgtgtaacagttttccttcaccatccaaataaccagactctgtcagtcaaccagcagtggactacagctcactaccacacaggccctggcagtccttcctatagcagtgcaccatgtacaggtgttgtgtgcaacaacccaaaaatcgttacagttggagaggatggtcgaataaatctcttcagagctgatcacaaggaagctgtaagaaccatagacaatgcagatagtagtacactccatgctgtaacctttcttcgaactcctgagattcttactgtaaattcaattggacagttgaaaatatgggatttcagacaacaaggaaatgagccttctcagattattgtcactgactggtgaccgagtgccactccactgtgttgatagacatcccaaccaacagcatgttgtagctactggtggccaagatggaatgttgagtatttgggatgttagacaaggtactatgcctgtatctctgctgaaggctcatgaagctgaaatgtgggaagttcactttcacccatccaacccagaacatctttttacctgctctgaagatggatccctctggcactgggatgcttccacagatgtacctgaaaagtcgtcactctttcaccaagaaaaattctggagcggagagcatgtgtggagcatgcatgcatgtccatgctataacttcatctacagagaaacaaacagtttcatctaaggattaactaagaggaagaagcagtacttttttgtctcatagcattagtaaccaagctaatgttcacc

SEQ ID NO: 75028 - DNA, 1898 bp, Homo sapiens; identical to SEQ ID NO: 61748

SEQ ID NO: 75029 - DNA, 704 bp, Homo sapiens; identical to SEQ ID NO: 61749

SEQ ID NO: 75030 - DNA, 2203 bp, Homo sapiens; identical to SEQ ID NO: 61750

SEQ ID NO: 75031 - DNA, 2547 bp, Homo sapiens; identical to SEQ ID NO: 61751

SEQ ID NO: 75032 - DNA, 847 bp, Homo sapiens; identical to SEQ ID NO: 61752

SEQ ID NO: 75033 - DNA, 1171 bp, Homo sapiens; identical to SEQ ID NO: 61753
  misc_feature (1)...(1171): n = a,t,c or g

SEQ ID NO: 75034 - DNA, 1468 bp, Homo sapiens
tcccgggtcgacgatttcgtgcgaaaagccgggactggacctagcggagttgtgcttgtcgccgaagcggggtgggcttgttcgttccgcgcagccgcagccagaaccgggtgacgcttatccccgctgtctttccagtccagggccgctgagagtgggggtggctgggagcagcgcagcctccggaggaggaggcggaggccgaggaccaggaatcaccttcaagcctatgtcgtgaggctttggcagaaattaagaaggaaatatctccattgttcattggcatggaaaaatgttcagtgggaggattagagttgactgaacagactcctgctttattagggaatatggccatggcaactagtctcatggacataggggattcatttggtcatccagcttgtcctttagtcagtagatctaggaactcaccagtggaagatgatgatgatgatgatgatgttgtgtttattgaatctatacaacctccttcaatttctgctccagcaatagctgatcaaagaaacttcatatttgcatcatcaaaaaatgaaaagcctcaaggaaattattctgtaattcctccttcttcaagagatttggcatctcagaaaggaaatataagtgagacaattgttattgatgatgaagaggacatagaaacaaatggaggagcagagaaaaagtcttcctgttttatcgaatggggacttcctggaactaaaaacaaaaccaacgatttggatttctccacttccagtctttcaagaagtaaggtaaatgcaggaatgggtaatagtggtatcactacagaattgactctgaaatacattattactaatgttacaaccttagaaacaggtataagctctgtgaatgctgggcaagatgtgaacataattattacatataaaacatcactatagaataccaacttgggagatgtcgctaaaggacttcagtcaagtaattttggtgttaatatacaaacgtacaccccatctttaactccacagaccaagactggagtaagaccttttaaccctggtagaatgaatgtggcaggagacttatttcagaatggagaatttgcaactcatcatagtcctgaagatgcatctacaaagaaggctaatgtcattcttccagtagaatcaagcaaatccttccaagaattttatagtacatcttgtttgtctccctgtgaaaacaactggaatcttaaaaaaggagtttttaataagtcaagatgtacaatttgtagtaaattagcagaggtctggatttttatacctaagttgttgtttaggctaacagtgataattttaacttttaagtgctattatgtactctttcatctacataatgcacgtgttctggatgtataacatgaagctgaaaggaagaataaggatatgttagaactatcttatgggatattttataaataaaattccatttgcatagc

SEQ ID NO: 75035 - DNA, 4397 bp, Homo sapiens; identical to SEQ ID NO: 61754
  misc_feature (1)...(4397): n = a,t,c or g

SEQ ID NO: 75036 - DNA, 1978 bp, Homo sapiens; identical to SEQ ID NO: 61755

SEQ ID NO: 75037 - DNA, 2000 bp, Homo sapiens; identical to SEQ ID NO: 61756
  misc_feature (1)...(2000): n = a,t,c or g

SEQ ID NO: 75038 - DNA, 1105 bp, Homo sapiens; identical to SEQ ID NO: 61757

SEQ ID NO: 75039 - DNA, 6215 bp, Homo sapiens; identical to SEQ ID NO: 61758

SEQ ID NO: 75040 - DNA, 1525 bp, Homo sapiens; identical to SEQ ID NO: 61759

SEQ ID NO: 75041 - DNA, 2234 bp, Homo sapiens; identical to SEQ ID NO: 61761

SEQ ID NO: 75042 - DNA, 1596 bp, Homo sapiens; identical to SEQ ID NO: 61762

SEQ ID NO: 75043 - DNA, 599 bp, Homo sapiens; identical to SEQ ID NO: 61763

SEQ ID NO: 75044 - DNA, 3318 bp, Homo sapiens; identical to SEQ ID NO: 61765

SEQ ID NO: 75045 - DNA, 861 bp, Homo sapiens; identical to SEQ ID NO: 61766

SEQ ID NO: 75046 - DNA, 1345 bp, Homo sapiens; identical to SEQ ID NO: 61767

SEQ ID NO: 75047 - DNA, 1346 bp, Homo sapiens; identical to SEQ ID NO: 61768

SEQ ID NO: 75048 - DNA, 1632 bp, Homo sapiens; identical to SEQ ID NO: 61769
  misc_feature (1)...(1632): n = a,t,c or g

SEQ ID NO: 75049 - DNA, 1771 bp, Homo sapiens; identical to SEQ ID NO: 61770

SEQ ID NO: 75050 - DNA, 979 bp, Homo sapiens; identical to SEQ ID NO: 61771

SEQ ID NO: 75051 - DNA, 1682 bp, Homo sapiens; identical to SEQ ID NO: 61773

SEQ ID NO: 75052 - DNA, 1188 bp, Homo sapiens
aggacggggcccctccatacctggccctttcccgtgatgttaaggtggcacggccctgaaaatatatggggtagttatcccacccccgcgggcagagattcaggaggggggattgtaagagacgccctcctctgtacgctcgatataaagagaagtcccctcccatccctcccatgtccctttatgatatattgagacagctcagtaaatattttctaaaattatttaccccctgggggcagagcctgagcagggaggatgataagggatgccggcctctgtatgattgaaataaagagaaataaccaactctagcagctgtgagtcattctgaaagatgtagagaatacagggactagaagcgcttatattctcccaccaaatttgcatacatgacaaaaaacaggcaaaaggcagagagacccaaagacgggatttattgggggcccaagtcatcacctggaaagtcaagaaagcctttgaagtattcgcggggatcttcatgatgagcaggaacagggctcatcatggcaaggactgtgaataaagtcaaaaaactgaactctgttgacctgggcgcaccccactgcaggtaacggaaaagttccccctgttcccacagggcaatgccaattacctcggcccacttcgtaagggtgcacagaacgaaacaaaatctgtccaaaagctgggaacccaaggaaacttttgggttttaaatccatccatccagcaacctcaactgtcttcctcgatcttccctttccactcatagatggatgtaatctgagggatgaggttgacgcaggctgctaggcgcttctccaccacggccctggcgatctccttggcgaccttctcgttggggcaagtaacaaaggctgcagagaccgagcccggaacgtagccagagccggaatccgaggccggcgagggctgggtcggagggcttccagaggccatggtcagcaagactcggggtagcaacaaaaggcgggaggccacaggcagcagcgccggcatccaaacaaaagacaggagcagagaggccactccgccgagcaggaccgcgggagcccgccccccactcatgcggcctacgctggtacaggagagttgatctcaaaggccacacgtcacacggagaaacaaccccaggaagagcggcctcttcttacctgggtggca

SEQ ID NO: 75053 - DNA, 2167 bp, Homo sapiens; identical to SEQ ID NO: 61774

SEQ ID NO: 75054 - DNA, 1295 bp, Homo sapiens; identical to SEQ ID NO: 61775

SEQ ID NO: 75055 - DNA, 5694 bp, Homo sapiens
ggtctacgaagaccaagtgggcaagtttgattggagacagcaatatgttgggaaggtcaagtttgcctccttggaattttcccctggatccaagaagttggttgtagccacagagaagaatgtgattgcagcattaaattcccgaactggggagatcttgtggcgccatgttgacaagggcacggcagaaggggctgtggatgcccatgctgctgcacggacaggatgtgatcactgtgtccaatggaggccgaatcatgcgttcctggggagactaacatcgggggcctgaactgggagataaccctgggacagtggcagtttccagggcacttgggctcggttggcctgcaggagtctgtaaggtacatccgcagtcctgaagaagactacacttgccctccatcacctctccagtgggcacctcaagtgggtggaacatcttcccagaaagttgacagcttccattaccagatggtgtaatcttaacggctctggggtggtgtgggcccctcggagttgttcccttcagcccatgtgaacattgtcaagtttaatgtggaagatggagagattgttcagcaggttagggtttcaactccgtggctgcagcacctgtctggagcctgtggtgtggtggatgaggctgtcctggtgtgtcctgacccgagctcacgttccctccaaactttggctctggagacggaatgggagttgagacagatcccactgcagtctctcgacttagaatttggaagtggattccaaccccgggtcctgcctacccagcccaacccagtggacgcttcccgggcccagttcttcctgcacttgtccccaagccactatgctctgctgcagtaccattatggaacgctgagtttgcttaaaaacttcccacagactgccctagtgagctttgccaccactggggagaagacggtggctgcagtcatggcctgtcggaatgaagtgcagaaaagtagcagttctgaagatgggtcaatggggagcttttcggagaagtctagttcaaaggactctctggcttgcttcaatcagacctacaccattaacctatacctcgtggagacaggtcggcggctgctggacaccacgataacatttagcctggaacagagcggcactcggcctgagcggctgtatatccaggtgttcttgaagaaggatgactcagtgggctaccgggctttggtgcagacagaggatcatctgctacttttcctgcagcagttggcagggaaggtggtgctgtggagccgtgaggagtccctggcagaagtggtgtgcctagagatggtggacctccccctgactggggcacaggccgagctggaaggagaatttggcaaaaaggcagcaattcaagatggcttgctggggatgttcctgaaacgcctctcgtctcagcttatcctgctgcaagcatggacttcccacctctggaaaatgttttatgatgctcggaagccccggagtcagattaagaatgagatcaacattgacaccctggccagagatgaattcaacctccagaagatgatggtgatggtaacagcctcaggcaagctttttggcattgagagcagctctggcaccatcctgtggaaacagtatctacccaatgtcaagccagactcctcctttaaactgatggtccagagaactactgctcatttcccccatcccccacagtgcaccctgctggtgaaggacaaggagtcgggaatgagttctctgtatgtcttcaatcccatttttgggaagtggagtcaggtagctcccccagtgctgaagcgccccatcttgcagtccttgcttctcccagtcatggatcaagactacgccaaggtgttgctgttgatagatgatgaatacaaggtcacagcttttccagccactcggaatgtcttgcgacagctacatgagcttgccccttccatcttcttctatttggtggatgcagagcagggacggctgtgtggatatcggcttcgaaaggatctcaccactgagctgagttgggagctgaccattcccccagaagtacagcggatcgtcaaggtgaaggggaaacgcagcagtgagcacgttcattcccagggccgtgtgatgggggaccgcagtgtgctctacaagagcctgaaccccaacctgctggccgtggtgacagagagcacagacgcgcaccatgagcgcacctttattggcatcttcctcattgatggcgtcactgggcgtatcattcactcctctgtgcagaagaaagccaaaggccctgtccatatcgtgcattcagagaactgggtggtgtaccagtactggaacaccaaggctcggcgcaacgagtttaccgtactggagctctatgagggcactgagcaatacaacgccaccgccttcagctccctggaccgcccccagctgccccaggtcctccagcagtcctatatcttcccgtcctccatcagtgccatggaggccaccatcaccgaacggggcatcaccagccgacacctgctgattggactaccttctggagcaattctttcccttcctaaggctttgctggatccccgccgccccgagatcccaacagaacaaagcagagaggagaacttaatcccgtattctccagatgtacagatacacgcagagcgattcatcaactataaccagacagtttctcgaatgcgaggtatctacacagctccctcgggtctggagtccacttgtttggttgtggcctatggtttggacatttaccaaactcgagtctacccatccaagcagtttgacgttctgaaggatgactatgactacgtgttaatcagcagcgtcctctttggcctggtttttgccaccatgatcactaagagactggcacaggtgaagctcctgaatcgggcctggcgataaagaacaaagactgtgcctaaaagtggagagccaggggagtgtgggtcagataagcagctacagctgcagtttggtggattggtggagtatgtgtgtgtgtcagtgctcagctaagaactgtagggaagatggatgaccttcacgcagaactcctttttgggatatacatgaatgcagaaaggatccttacatgggagagaagacagaactctctcaagctgacactctcagagattcctgatgggcctttctctttgaagtccaaagggcgtctgcattgcttcctttctttgcccatccatgaatgttctgttttgttttgttttttttaataagaattccggctgatttttgtgaggcctgtttaaattgactttactttgccttttgtgtttctcaattttatctagaaatctttctgactttttccatctcttgcttcaaagtaagaggggaactctccttgccgactccaccttataggtacatttggtgttttgcactgggaagaaataggatccatccttagctgaggcttgaggactgatccagcctctcatggcttccctccaaagtaacttagggttgagggatctatatgtgatgtcaaaacttactttaaacctctagtttcgtgctgtcatttattaggctgggccaccaaatctttgtttcaatttatcagaagccaagtgcatactagcgtcttgtttgttgcccattgcctatacttttcacctgagatgtgtgagttggggccttttaaaaactactgaattgtctgagccttgaagacatttccagggagaagagataatctctcatttcacccacaggctggtctaatcataacctagttaaagatgtccttgtttaagaaccccattatttatttttagtttttaatataaattaacatgtgggtcattatatttctccttaaatgaggaaattttaaattttattgatctaacctttgaagctttaaaaaaggagaaagagggtaggggtgggaaactggcatactgtgtgtatagcactgccgattggctaggccactgtgtctctgctacaaattaaagaaatcctaaaagttttccttggtcatagagttggggaatgacagaatttttctttgttgtgaaatgtatgtacagagtagaccattctctaggccctgtgggtggaaagaggtacactcgaatgtttgcataaagcaagtgacaaatgacactgtttaagtcctcttttgtgtcttagaagatcattttgaggctattttcacattagaggggataaaagcagtgaagacatggagtaagtgtattttattttagtaaggaaaggtcagtttaatcatatatgggttggttaggttatctaaaaatttgtcatctttctatggtcatatgctgatggtagattatggcagagaaggaagaggaaatgacaaccattttattaattgtcagtttgatattgagtgactgaatgtctaagaatctccagaaaaaaacaggcatctatcatcctgacccaaggcatattttaacataacctgggagaagagagttaagtacaagttaaaaaaaattctgccctagttttgagaaagcctggctggaattctgactgtcttacatacatatgtgcaaggttagcctgcaagattctagtttttatttaccagtgtgccagaatctgaaacaagctactgggagggaaggtatttgtcctttagtaaaattccctgtatttcagctgtaatcaaagttacctcaaagcaggtgctttttttttttttgagaccctggctcaaaaacaaaaacaaaaactagtttgttttagtattcattaattacgtatatgagcactggtagtctagtgtttgttcttgtatacagtgttttcttaaatgagatgatgctatttaattctgttacttgttttttcaactaatggatcttttaaagttttttatttaaattttttgtgggtacatattaggtacatatacttatggggtacatgagatgtttttataaaggctcagctaatgtatcttgaatatcatgtattcataaagatgactgaaatagtttctggaacaaagtctgatagaaaaaatactcaattcctaatttaagtgttagagactttaatgtaagctatctaatctgaactagtttcattatttgtgtgtgggtacatgttatgtgctccgtaaggcatctttcaatttgaaaatttcataattgtaatttcactgcctttataaattgctttttttttggaggcagggtctctgtcacccaggctggagagcagtggcacagtcatagctcactgcagcctcgaacacctgggctgaagtgatcctccctccttagcctcccaaagtgccgggattacaggcatgagctactgcacctggcccataaattgtcatacttttaaagagcctattacacaaagtatcatcagaatcatcccaagactcatttcctgattcctaattatttaaaattttgcttttaggcgaggcatggtggctcgggcctataatcccagcactttgggaggccagggcaggcggatcatttggggtcgggagtttaggaccagcctggccaacatggtgaaacctgaagccccatctctaccaaaaaaataaaggaatttagccgggtgtggtggtgcatgcctgtagtcccggctacttgggaggctgaggcaggagaatcgaacccagga

SEQ ID NO: 75056 - DNA, 2014 bp, Homo sapiens
ttttttttttttactgttttatccaaatttattctcagggaaaaagaaagtagtggctctacgcaactttttcattcaccaaccacctttccatgcatcagaacctatgctgtgattgttagctgaacttcaatagtttccacctacttaagagagatgcctcaaacaaattaactttattttcagacaacaggtccaagaagacttcacagctcaatcatgacgaacatgtggctgtttcctcacagccaggaaccctcggtattagaagaaaactccaaccccccacaccatcatctagcctcttttctcactgtgaagaactgatgagacagaattcctgagaagggaacatttaggtaatctgggatagaagggcatggaaggactggacaaaactaaggcctccccatggaaggaagggaaaagaatattacaaaacagactaaccagaaaaaccaagaccccatcaagtatccttcagggataaaacaagaggccactcctagatgcctcctgattaaaaggttgtcccatgccctacagaggcggaggataaatcctaagaaacagaaatgtataaccagccccaatgcttcccatacttctgcattaggtcagtgtgaacatggctttgctcccaatggtcagacctgacatgggtccttctgaagatggtgggtcaggtatatcccagccaccctcaccagagaatacatctatgacaaacccaaattcctaatcctgaagtactttgagccactctacattgtggccactcaataatagaataaatttgtgaaaaagctgcatgttttaatttaggaaatgagtagaagttcacaagcaacccagaataggtgccagcagtttgctccagtgggccacaccacagcagcagctcaggctctgcagaatcactgtgtccagtgcttcctgagatgttctttcagctgaggaatggaaggcagcagctgctggcactcatgacaacgaaggggcagcttcaagagctcaggcatcccatctcggacagttactctaccagcctcttgtaccatctcgatcacagcttgtgattctaggaagtattctgtattgaaagaattccaatgttttttgtttttaaggcaaggagaatcaaaatcctggctgatcacatgaagatgtacatggctcatactcggaatggcgtggtagcccaatcggaagcggagtttgctggacccagcaaaatctacaatcaccttttcccccacagtgtgcatatgcttaaggagttcaaggtgttcccctggccacagccttcagactggaaatggaggtccacggtaagaccagccaatggtaacgggcctttgggtatttatcctttatcaccaccacctgctcatctttgtaaacctgcattttggggtcctgcatagaaatcttcaagccttgactccagtggcccagggattcctttttgataggtgcatcttttcccttctttaggggcacagagcattggccagagttgctcccaggttccagccctgtcccagcctcagcttcctgagcagcatccctttctatagaatcactgttgcctgatctctttctcttcctgtgtgtttccaggccagggttctttgcctcttcctcaaactctacaatatatggataaagttcattcaccatgtggagaacctggccaggctgcagcttcacctcttggtccttcccaattacgactgagtcaatgctggtgggattgactcctacctgctttaccttgacatatcccttgttacactctgctttcaactgtacttgctgtcgagaacatttcttatcagtgatcttggtctctgggccacgcccaatcacaactgcttccaaatgtggaagtctgattcgctggtgccggctgtcctgtctcaccaaccagcacacccgcatcatcactctccagaagtcggagacggacaaattcaccctcgtgccaagcatggcggaatgcatctaacag

SEQ ID NO: 75057 - DNA, 542 bp, Homo sapiens; identical to SEQ ID NO: 61778

SEQ ID NO: 75058 - DNA, 1224 bp, Homo sapiens; identical to SEQ ID NO: 61780

SEQ ID NO: 75059 - DNA, 8182 bp, Homo sapiens; identical to SEQ ID NO: 61781

SEQ ID NO: 75060 - DNA, 5332 bp, Homo sapiens; identical to SEQ ID NO: 61782

SEQ ID NO: 75061 - DNA, 1679 bp, Homo sapiens; identical to SEQ ID NO: 61783

SEQ ID NO: 75062 - DNA, 1442 bp, Homo sapiens; identical to SEQ ID NO: 61784

SEQ ID NO: 75063 - DNA, 2151 bp, Homo sapiens
  misc_feature (1)...(2151): n = a,t,c or g
gcccgcggtagtaaacctggatcctttaaaacggcccccccttttttttttttttaatggcaaatagatttaatgcagagtgtcaacttcaattgattgatagtggctgcctagagtgctgtgttgagtaggtttctgaggatgcaccctggcttgaagagaaagactggcaggattaacaatatctaaaatctcacttgtaggagaaaccacaggcaccagagctgccactggtgctggcaccagctccaccaaggccagcgaagagcccaaatgtgagagtggcggtcaggctggcaccagcactgaagccaccactggtgctggcactggcactggcactgttattggtactggtactggcaccagtgctggcactgccactctcttgggctttggctttagcttctgctcccgcctggatccgggctttggcccagggtccgatatcagcttcgtcccagttgcagggcccggcagcattctccgagccgagcccaatgcccattcgagctttaatctcggccctaagccttggcttccaaggtgagcctcagcttgcagccttcaaaatccgcttccattcgccccttnctttcccggggggggactgagctgcccattccctttggatccttccttttgtacccttgcaggcaaacttgaaggactttcatctttgctggtcctcatagtaagagcgcaggcccccagaagaactcatattcaaggggaattgctatgggggactctggcatagtcccaggtacttctgcttcacaaacctcatcagtgatgagcttccttcacgtcccccaagagttgaatgatgtatccccaggcgcagccccaaacttggcgcagcacctcccagatgacagcctcacttggaccgatttccattcattgaagatgatgctaagaagcaccatgagcagacccagcttgggtgagtccttagtcgttcccagtatgcctgcatcagtgggctctaaggtgctgagaagaatgtacaagtggtcattcttatcaatttccttcaattgaatcccaaataccttcttccaaggaatagcctgctcgttcaaatgatttcggggtacacatcagtgtattctttgatgatgtccttcagcatgttccgagcgcttgatgggaatcttcgtctggtctttagccaaaaggtacttcaccaaattcatttgccctcccttgcaaaagggccacatccccaagntggtggtgcttcaggctcttgggatgaactggaacttggcaactctaacggcgaagcccctttgcctacgggctttaaggtgatctccaaggggagagcaaaggctctccgggcccaaagcaagccaaccgagtccttgatgccctgcgggcccaaaaggctatgggaccccttgaagccctgcgggccattgaggccattagagcctttgagacccttcggccacctgtggttccagaagcctgactctgatcactgctgccatcctcttccccatccagatgcttcacctttcgggctttcttggctttgaccttgggccgagtatcctgattctcctgagactgggcagctgcactctcaggctcaggttcatctgctggggcctgagagggtgcagcctcagtctcctgagcctttgtattgaccttcgtatcagccacatggctgacctttttggtctcagtggcaggcattgtcacagcctgcgggtcagcattctgtttcttggtgtcagctgctagactcttgttttcagctgccagaacctgggtatcagtcagctgagtagtagatgaggcctgggtggcaggtgcctcccgagcctctggggtctttgagacctctgtggcctttgagaccccagaggcttttgagaccttcacatcctctgagacctccagtgcctttgaggccttcggtgtctctgggacctccacattctgggtcactgtcaacagagtctgcatcatcgagctactgtccttttctgaagcttcagcctggaagcgagttagacctgcaccactctcgcttgtgtcagacatgtctcaatttggcctggcaagagctgagcctcgtcctcctacaattcccgagtgcgtccactcactccaagcccctccgaagctcgg

SEQ ID NO: 75064 - DNA, 1790 bp, Homo sapiens
gataagcttgatatcgacttcgtgttcctgggtttccttggcgctgcggccgccgctccctctgcaactgtatgaggaggaggaggaggaggatgtgaagatggcggagctgcagatgctgctggaagaggaaatcccgggggggcgccgggccctcttcgacagatacacaaatctggaacgggtggccgattactgcgagaacaactacatacagtcagcagataagcagagagccctagaagaaaccaaagcctacaccacccaatccttagcaagtgttgcctatctgataaacaccttggacaacaatgtcctgcagatgctggatatccaggcatcccagctacgaaggatggaatcttcaatcaatcatatttcacaaacagttgatattcataaagagaaagttgcaagaagagaaattggtattttgactaccaataaaaacacttcaaggacacataagattattgctccagccaaccttgaacgaccagttcgttatattagaaaacctattgactatacaattctagatgatattggacatggagtaaaggtgagtacccagaacatgaagatgggtgggctgccgcgtacaacacctccaactcagaagccccctagtccccctatgtcagggaaagggacacttgggcggcactccccctatcgcacactggagccagtgcgtcctccagtggtaccaaatgattacgtacctagcccaacccgtaatatggctccctcgcagcagagccctgtgaggacagcttctgtgaatcaaagaaatcgaacttacagcagcagtgggagtagtggagggagccacccaagtagtcggagcagcagtcgagagaacagtggaagtggtagtgtgggggttcctattgctgttcctactccatctcctcccagtgtctttccaggtcatcctgtacagttctacagcatgaataggcctgcctctcgccatactcccccaacaatagggggctcgttgccctatagacgccctccttccattacttcacaaacaagccttcagaatcagatgaatggaggacctttttatagccagaatccagtatctcttgctcctcctcctccctccatcctacaggtaactcctcagttacctttaatgggatttgtggccagagtccaagaaaatatttcagatacaccacctccaccgccacctgtggaagaaccagtctttgatgagtctcccccacctcctcctcctccagaagattacgaagaggaggaagctgctgtggttgagtatagtgatccttatgctgaagaggacccaccgtgggctccacgttcttacttggaaaaggttgtggcaatttatgactatacaaaagacaaggaagatgagctgtcctttcaggaagaagccattatttatgtcatcaagaagaatgacgatggttggtattgaggggagtttatgaattggagtgacttgggtttttttcccgggaattacgttgagtctattcatgcattattctgagtaaagctcagcagggctgtgcttgcctcacaggaatagtcaggtcttcccagattatctgaaggccctggggattccactccagtaaagtagaatgaaggatacaaatgataaaaattacactttttttttgggttattccccagtattaaaaacaaagcaagctgagtctgaacaaatggatctttctgccatcatttgtacaatgctgagctgtctggattgaaataaaatgaccatttttatgtatgtcaaaggt

SEQ ID NO: 75065 - DNA, 2533 bp, Homo sapiens
ggaattcccgatcgggagccatgagcgtggacaaagctgagctatgcgggtctctgctcacctggttacagacgttccacgttccgtctccctgtgccagccctcaggacctgagcagcggccttgccgtagcctatgtgctgaaccagatgtgagtggagctgaaggggaggatcccaaaagtgtcccccagtctgctcatcccaccttctcgcccccagagacccctcctggttcaacgaggcatggctccagggcatctcggaagatccaggtcccaactggaagctgaaggtcagcaatctgaagatggtcttacggagcctagtagagtactcccaggatgtcctggcgcatcctgtgtcagaagagcatctcccagatgtgagcctcattggagagttctcagacccggcagagctcggcaagctgcttcagctggtgctgggctgtgccatcagttgcgagaaaaagcaggaccacatccagagaatcatgacgctggaagaatcggttcagcatgtggtgatggaagccatccaagagctcatgaccaaagacactcctgactccctgtcaccagagacgtatggcaactttgacagccagtcccgcaggtactatttcctaagtgaggaggctgaggagggggacgaattacagcagcgctgtctggatctggagcggcagctgatgctcctgtcagaggagaagcagagcctggcgcaagagaatgcagggctgcgggagcggatgggccggcctgaaggcgagggtaccccaggtctcactgccaagaagctgctgctgctgcaatcccagctggagcagttgcaggaggagaacttcaggctggagagtggcagggaggatgagcgcctgcgctgtgccgagctggagagggaggttgcggagctgcagcaccggaaccaggcgctgactagcctggcccaggaggcacaggccctgaaggatgagatggatgaactacggcagtcttcggagcgtgctgggcagctggaggccacgctgaccagttgccggcgccgcttgggcgagctgagggagctgcggcggcaggtgcggcagctggaggaacgcaacgccggccacgccgagcgcacgcgacaactggaggatgagctacgccgagcgggctccctgcgcgcccagctggaggcgcagcggcggcaggtgcaggaactgcagggccagctgcaggaggaggccatgaaggccgagaaatggctatttgaatgccgcaacctggaggaaaagtatgagtcggtgacaaaggagaaggagcggctgttggcggagcgggactccttgcgggaggccaatgaggagctgcgctgcgcccagctgcagccgcgggggttgacccaggccgatccctcactggatcccacctccacacccgtggataacttagccgcagagatcctgcctgcggagctcagggagacgctcctgcggcttcagctggagaacaagcggctgtgcaggcaggaggcggccgaccgggagcggcaggaggagctgcagcgccagctggaggatgccaaccgcgcgcgccacgggttggagacgcagcaccggctgaaccagcagcagctatccgagctgcgggcccaggtggaggacctgcagaaagccctgcaggagcaggggggcaagactgaagattccattttgctgaaaaggaagctggaggaacatttgcagaagcttcatgaggcagatctggagttgcagaggaagcgggagtacattgaggagctggagccacccactgacagcagcacagcccggcggatcgaggagctgcagcataacttgcagaagaaggacgcggacttgcgggccatggaggagcgataccgccgctacgtggacaaggcccgcatggtcatgcagaccatggaacccaagcagcggccagctgcgggggcacctccagaactccattccctgaggacacagctccgagaacgggatgtccgcatccgacacctggagatggactttgagaaaagccgaagtcagcgggagcaggaagaaaagctgctcatcagtgcctggtataatatgggcatggccttgcagcagcgagctggggaggagcgggcgcctgcccatgcccagtcattcctggcacagcagcggctggcaaccaattctcgccgtggacccttgggacgcctggcatctctgaaccttcgccccactgacaagcactgacagacctcacaatcaagccagcctgggctccacccaccctggcttcctccagctcacatggcgcccagcactgggcttcagccaggtgctcgagagctttgaggccatgatctctgctcttccctctcccagattggtggggagggagggcgggaggtagatataggcctgttctttttagcaatgtgattcttgttgttgattctctctctggagttcatgtgctgcctcaggagactctgattttatatttgagaaaaataaaggcgttcaatctgcaaaaaaaaaa

SEQ ID NO: 75066 - DNA, 1610 bp, Homo sapiens; identical to SEQ ID NO: 61787

SEQ ID NO: 75067 - DNA, 1485 bp, Homo sapiens; identical to SEQ ID NO: 61788

SEQ ID NO: 75068 - DNA, 1910 bp, Homo sapiens
cggccgcgtagcccgcgcgcggagcgtaccctgctgcggccgttggccgttagcgcggcttcggcggttgtcttggagaagcaagatggcggcgacggcggccgcagtggtggccgaggaggacacggagctgcgggacctgctggtgcagacgctggagaacagcggggtcctgaaccgcatcaaggctgaactccgagcagctgtgtttttagcactagaggagcaagaaaaagtagagaacaaaactcctttagttaatgagagcctgaaaaagtttttaaataccaaagacggtcgtttagtggctagtcttgttgcagaatttcttcagttttttaaccttgactttactttggctgtttttcaacctgaaactagcacatattttaacttcttttctagctgcaaggtctcgaaggtcgagagaatttagcccgagatttaggtataattgaagcagaaggtactgtgggtggacccttattattagaagtgatcaggcgctgtcaacagaaagaaaaagggccaaccactggggaaggtgcacttgatctatctgatgtacattctccaccaaagtcaccagagggaaaaacaagtgcacagacaacaccaagtaagataccaaggtataaaggacaaggtaagaagaagacaagcgggcagaaggctggtgacaagaaggccaatgatgaggccaatcagagtgatacaagtgtctccttgtcagaacccaagagcaaaagcagccttcacttactgtcccatgaaacaaaaattgtatcttttctaagcaacagaactttagatggcaaagacaaagctggcctttgtccagatgaagatgatatggaaggagattctttctttgatgatcccattcctaagccagagaaaacttacggtttgaggaaggaacctaggaagcaagcaggaagtctggcctcgctctcggatgcaccccccttaaaaagtggactcagctccctggcgggagccccttctttaaaagactctgagagtaaaaggggaaatacagttttgaaagatctgaaattgatcagtgataaaattggatcacttggattaggaactggagaagatgatgactatgttgatgattttaatagtaccagccatcgctcagagaaaagtgagataagtattggtgaagagatagaagaagacctttctgtggaaatagatgacatcaataccagtgataagcttgatgacctcacacaagatctgactgtatcccagctcagtgatgttgcggattatctggaagatgttgcatagacacgaagaaggaagtattctaattaacaaggacagaggactgaccggttccatttttttttttttccaaacaatcactcagctggaagggcggctctctattggggccttgcatttcaaaaaccctgcagattttttttaaaagaaattttcattttactaaacaaaatacttcctatttgagcccatggggggaaaatttaatattcttaatttaactgtacatttctttatggaaatggattatctacactcagtttcattacagggaaggaacccatgaaaacatcagtgttaagagcatgatgaaaggtgtcaataaagccgtaggatcgcgcaaccctttgtgtgtgtggctgctggtacgtgtgatctttgaaaaccttggctttagccctctggaatcagagcttacccaccatagtatattttgatattaggtggttctacacatagttggcaaaatgacttggtaaatttgtaatgctgaagtatattagtataagttaaatttgatgtgtcaactttattttgtatttccttccatttggaaggtttgttagaccattaaggttatattaaagtactcttgtgtgtgctaaaaa

SEQ ID NO: 75069 - DNA, 1238 bp, Homo sapiens; identical to SEQ ID NO: 61791

SEQ ID NO: 75070 - DNA, 1869 bp, Homo sapiens; identical to SEQ ID NO: 61792

SEQ ID NO: 75071 - DNA, 1604 bp, Homo sapiens
  misc_feature (1)...(1604): n = a,t,c or g
tttttttttttttgtgtttttttgttttttttttttttnttcgtggtattgcaaaataaatttatttgaagataaactgtcttataaaaggtcagaggcaatttgagatcccagattcagcttgtctcataaaaagattcaacttcaagtagcacaatttcttgtctgcttttaatcctgaacattcttgaagcacgaaacagccaactgtttacacaacacatctgtgacatctgactctggcaccagtggcgccgcagctttcagctctgaggccccacgggctgcagccctcagctttgggagggcccagatcaggccactgtgacctctggctttgccagcaacaacaggtcccagcatcccagcccttccctcccctggcacctcccaaaagcacaagaatgcaaaccgagactggcccaccactgaggcaggggtggactcccgcttgagtgtgccaacagggcgggtggactgtcctggtgacttcctggtgggcctggccaaccaagaggccaagtggcctcaccaggccttacctggctgcctggcagcccggagaggaaggaggaaggacgctcacggtgcgacagctctggccacgctggcgggagctacgtgatgatcctggcgatggcttgcagggaggggaagtcgtcgtcccgggcagcatgcagcgcctggtggctgctggcatcgccatgcgcgagcacctgctggcaggtggggcacacacggcagtccaggcccgcctgctgggtggtggcctgccacgcgctcttcttgttcttcttggacttggtgctcagaggcttctcgcggttgcagaagtccgtgtgtgcagacaggagctcctgctgcttggccgtgtcgggcagcaggaccagcagctcattaaagaccttctggaaattctcccccagcaggtcccggcaactcttgtaatactgggctgcggagatcaggccctgtctgaactcccctgagtggctcttgaactcgctgaagcgggcctcgtcgctctgcaggaagtccctgatggactggatgagctgaaggttcctctcccggaagttctcggggactaggtaggcccgtggggcaggcagcagcctgggtgcttttgtggtggtggtggtggcggggctggggacacaggccgggtgggggctaggcagaaggccagagaagccagggggcggcttgctgattgggggcaccaggcccggcgggggtgggggaggcgtgcccttcaggagcaccacagcgctgaagcctggggacggcggcatccggggtgggcaggggccgccgagcgctgggaagtcctcctgtggcgtggggcaggggaaggaccccaggggccttgggagcccagggggttccttgggggcactccgagcaggggccgggccctccgtgtgtccattaacgacgacggcaactggcccctcggctctgctggcaggagcttccggggcctgcaaagcccctgggggacaggtacgcggccgggggctgtggcaatgtggtgcctgaattatccgagccctctttcttcttcttcccaactttagcggacgcgtgggtcgaccagggaa

SEQ ID NO: 75072 - DNA, 650 bp, Homo sapiens; identical to SEQ ID NO: 61794

SEQ ID NO: 75073 - DNA, 1361 bp, Homo sapiens; identical to SEQ ID NO: 61795

SEQ ID NO: 75074 - DNA, 1962 bp, Homo sapiens; identical to SEQ ID NO: 61796

SEQ ID NO: 75075 - DNA, 913 bp, Homo sapiens; identical to SEQ ID NO: 61797

SEQ ID NO: 75076 - DNA, 2452 bp, Homo sapiens; identical to SEQ ID NO: 61798
  misc_feature (1)...(2452): n = a,t,c or g

SEQ ID NO: 75077 - DNA, 544 bp, Homo sapiens; identical to SEQ ID NO: 61799

SEQ ID NO: 75078 - DNA, 2978 bp, Homo sapiens; identical to SEQ ID NO: 61800

SEQ ID NO: 75079 - DNA, 609 bp, Homo sapiens; identical to SEQ ID NO: 61801

SEQ ID NO: 75080 - DNA, 3068 bp, Homo sapiens; identical to SEQ ID NO: 61802

SEQ ID NO: 75081 - DNA, 3043 bp, Homo sapiens; identical to SEQ ID NO: 61803
  misc_feature (1)...(3043): n = a,t,c or g

SEQ ID NO: 75082 - DNA, 6097 bp, Homo sapiens; identical to SEQ ID NO: 61804

SEQ ID NO: 75083 - DNA, 1708 bp, Homo sapiens; identical to SEQ ID NO: 61805

SEQ ID NO: 75084 - DNA, 740 bp, Homo sapiens; identical to SEQ ID NO: 61806

SEQ ID NO: 75085 - DNA, 1408 bp, Homo sapiens
tcgattacgccaagcttggcacgagggggctaatgaagcctagaccccagctggattggaagcaaaggcctttccttcactgggaaaggtgctgctgctacccatctcattattctaagagtgattgagaatagaggggctgaagggaaacgaaagtaggagaatgttggccagagctagtagagaaagaacgtaatattgagaaagcagacatcagtgctaggtgaggtgctttctttaaagagctgtgtgtatagactggggaggagtctgtctggggacaggaatgctgattcctttttttccctgggcagaatcctaatgtacctggctagctggtggtgagtaggggctttggggccaacttggtgggctccccaaggaaacccctttgaaaccaatggatgcattcacgggctcgggtctcaagaggaagtttgatgatgtggatgtgggctcatcagtttccaactcagatgatgagatctccagcagtgatagtgctgacagctgcgacagcctcaatcctcctaccactgccagcttcacacccacatccatcctgaagcggcagaagcagctgcggaggaagaatgtacgctttgaccaggtgactgtatactactttgcccggcgccaaggttttaccagtgtgcccagccagggtggtagctctctgggcatggcccagcgccataactctgtacggagctatacactctgtgagtttgcccaggaacaggaggtgaaccatcgagagattctgcgtgagcacctgaaggaagagaaactccatgccaagaaaatgaagctgaccaagaatgggacagtggagtcggtggaggctgatggcctgacgctggatgatgtgtcagatgaagatattgatgtggaaaatgtggaggtggatgattacttcttcctgcagcctctgcccaccaaacggcgacgggccctgctgagggcttctggggtccaccgtattgatgctgaagagaagcaagaacttcgagccatccgcctgtcacgggaagaatgtggttgtgactgccgactgtattgtgacccagaagcgtgtgcctgcagccaggctgggattaaatgccaggtggatcgcatgtcctttccatgtggctgctcccgggatggctgtgggaacatggcaggacgcattgaatttaatccaatccgggtccggactcattacctccacaccattatgaagctggagctggagagcaagcggcaggtgagccgcccagcagccccagatgaggagccctccccgactgccagttgcagcctgacaggagcacagggctctgagacccaggacttccaggagttcattgctgagaatgagacagcagtgatgcacctgcagagtgcagaggaactggagcggctc

SEQ ID NO: 75086 - DNA, 1818 bp, Homo sapiens
gtggaatcggctgtggggcacctggaatcgaggggccaggagtgattggctgagccattaaatcatagtcatttccagatgatcctgcagcaacataggaataagagcttcaagcagttcccatcctgttagtctgcgtgtgtggtagctgaactcaagatgatgtggggctaagaaaaataattgtccatgtgcaaagatgtgggcaagaatggcctctgcagattttcctgaacttctgctaacttgcacggctttatcacagcatttttaaagctttccctcaaaaatcctgatctgcatgatctcagctactttattgacaaaaaggcagtgaacataacctcacttaattctggtgtagggtgtatgtgctaatcgttctaattcttgattacctagtttatagataactgctggtcttaattgcagagtacagagaactgaaccagctcctgatattgtagttagcagtcttcctggcttctcactctgccttatatttccatgtgggtttacttctctcataactactttcaaggtatttttcttccaagctgaaataaaactggggccacatattttcagtcatttcttccctgttgaattgaagcaaatcagattttctgtggggaccctcaaatgcaactgaagaaatagattgttgcattcattcctccccaccccccatttgtaggcagtaaacaaagtatgactgacagattgaacacctgcaaaactgctagcgtaatctcagcacatacgcagctaggaagtttgtcataaaatcaacttagaaatgagatgaggctgttcagtttgtcttaaaaaaatcagattaggtaaaagctgtcctaccaaagagtctagcaaaacaatatagtatttttttgcagaggcatgaaaaattaagatgctttagagtacttgaaagttgtgtagtcattttatttgcaaaatgaggtgactgtggcaaattatagaacacagagtattattacttttgccaggtttttctgacttgatttctgtaatttccagaaacccagacttctcatttccacacctagagatggaaacaggcaagtaactgacatgtctatttccttgggagcatgtgagaacatagcagtagggaccaaaagtctcagcacacttacctccgattatgccttaaagagttgattgtgaagaaccagtaactttgtcccaaatgcttctttggctgtttcatgcaggacttaattattgcttttaaaaattcacaatgaaaagacgattctgctgtatttgttaaacgttgacatttggttctagggccttgagtatgtgccacgtgcttgtgaaatgctatgattcacatgtaacatttaaacattaatttaaaaagggaaccttggagaattcttttgttcactagttccttttttctctacatttttaatttattaaacttgctgtgaaaacactttgattttctaagaggaaggtactttaagttccagaatgaacatgtagctgcactatgccagaaattaatgagggaagactttcttcctaagtgcttatgttttaacttatgttagtgaaaccactacaaggtgtttcaggcgctgataacatgcttcacacctgcccttggaggtcacagtactaatttacttcaaatttagttatgacagtgtcactgtatcctagttatgtttacagcacaaataaataatgactgtcatacatccagaggagaccgaacctgcccagctgatgtactgttttatggaataaagtcacttgatcagaaggaattgaaaaaaaaaa

SEQ ID NO: 75087 - DNA, 1087 bp, Homo sapiens; identical to SEQ ID NO: 61737
  misc_feature (1)...(1087): n = a,t,c or g

SEQ ID NO: 75088 - DNA, 1113 bp, Homo sapiens; identical to SEQ ID NO: 61809
  misc_feature (1)...(1113): n = a,t,c or g

SEQ ID NO: 75089 - DNA, 876 bp, Homo sapiens; identical to SEQ ID NO: 61810

SEQ ID NO: 75090 - DNA, 3270 bp, Homo sapiens
ttttttttttttggttcattggaaaaggattttatttcaccataaaaatgcaaactggaataaacaccatctttcctaacgcgaacgttacagctatttttaggtatttctgagcttcacttggagaagcaaacgattataaaacaagtttgcagcctgaaatctgtttgaaacattccaagtaaaaataatttagcaaaacagcttcttaaaaaaaccacacacactaacctttactagaaaccaaagcttttaaccaatcttttttatgcttaattccttgacgttgtaaaaagtgaatgtttttgaaggagcatcagaccattttgtaccactccccacataccgacaccttagaaagaacggcccgtttgagttttgatcttaaaggacttgtaccttcctcatccgtgactcaatgtcagcacgacgattcggcatcccacccaaactgcacttcctgatcagttaacattacaaacgggggggaaagaatcaccagggcaacgctttcttttcagtgccagtgtgactatggtggcccgtgcacctcctaggccgtgcacgcagggaggtcgccaagcagacacagaaatccccatgtgggggaatgcagcagctctgccatcctcacgactgtcggtctgtgcaattttcctgactgagagaggaccggccgcattaaagctatcggatcaagttttaaaggactacgtgtttgaaactgaagtgccaagtacgctgcggtgagtggagaaagatggatctctaaagcatggtgtcttccttcctgccggcgggctccgtggacattcgtggctgcagaagggtcttggctttgcaggggtggacggagagcggccaaggagcggccaggaggctcgagcaggtcctggtctttcccggacaggccgtggggaggccgtgcccgtcattacctgttccaggtactgcggtgcctgctcggggaccgggagcgcgaccgctcgcttcggcggcggtggcggctgtgcttcctgctggcgctgcccctccgctcccggctccgctccctccggtgcctgtctttgctgtgggacctccgggaccgggtgtggtccgggctcgtgctgcgccggcgggggctgtcatccttgtaggcgtgcttcttgtggggccgccgctccttgcgtgacttcctgtcctcccttgctgactggcccgccctggcccgggcttcctctccccgcttgtcccggttcagcaagccccgttctccggtggcccggccccgcgcccttgctgggctcccggttgcacttgtcctgttctgaccggttgtcctttctggagacattctgctcgcaggcagggatgcccttgggctgttggttgttgtcaggaatgcaggagaggacgccgcccgggcacctcttctctggagagccatcctcggggaccacacgacaggagctctgaacctccttgcatggggcctcctcggccacgctcccgttcacgcttttgggagcgccgtcggcctctgggtgggccgggctctccttgggggcaccggccgggggctggcccccgagggggtgcagcgtggtggcgctcacacagccggacgacacggtctgcaggatgtccaggacgggctgcagcaggtcggcgtgtgccacgcccagctcgtcgtgtgtgtggctgtcgtccggcttcttgctcagcaggatgctcagcagccgctcgcgcagctcccgctctttccgctgcaggcccagcgcgcgctccttctcctcctcctcgctccgcagctcggcctcctgcagccgccgccgctcctcctgctgctggagcctcagcttctcctccttctgctcctgttcccgtagcttcacagccatgaggtaaggactgggctgccacatgtctcaagcctcttgtcatgctcccttccgggggacttatcacaacttggctctgctgagcagctcggcgatgagccggatggactgcaggttcctctgggccagcagcagcttgcgctcctccagcttgatcttctcctgcagctgcttctgctcctccgcctgcagcttctccagcttcttctgattccggcgcagctcacggtccctctgcttctgctccctcttgcgaagcttctcttctcttttcctctctcgctccagctcttccagctccttttgtttcctttcctccgctcgctgcctctcctccgcttccttctctctgcgcttttgttcttctctttgctgctccagttcctgaagcttctgcctctccagctgccgcttcttaattgaggcatcactcaggtgtttggtcgaatcaaaagaaaccttgatgttgcaggccacggccttgccgtcctcgcccttgtacatgagtttcatcccgcgcagggcgctcatggcctggatgaagcccatgtactcacggtactgcacataggcctcgaagttcaagtgccccccgaaactgaaggtgtggaagttgcggcccgtcatctcctcccggtaggggtccagcatggggatgtccacattccggatctccccgaacttctcaaacaccttgaccaggacgtcctcgctgggcttctcggagcccgactccttcagggcgaaccacttgcagggcagcccctccaggtggatggtgtccggccgctcccccggcagggtctcgttcatgtccttggcgtcgcggaagaaggagtcccagtcgtggcgggtggggaagtcgatcttgaactcggccgcgcgcaccttcaggatgtcggagaagccgctgagcttgatggtcttgccgtccaggcaggccagaaaagacttgaccaggctcttgttctccacctccccctcgaagcggatgaagtccatggtgctcttggaaatacgcagcgtggagaactggtggttctgcaccatgcccttcagcctctccatcacctcccagttggagatggacttccccggctgcttcagctgcgggagtgccacgctgatggtcatcttggtgatgggcttcaggtacaagccgtaagcagggcagagctccacggcctcagacgtgtcgtgcacgatggtagccgctgccatagcctccgggaccttgggcctgcgcggggctccgcctgcgtcccaggccgccgccgccgctggcccaagctcccgccgtccctcgacgatccccggacaggcgcggcctcaccgccgggagccgccaccgtcccccggaggcgcctccgacgccgccaccgccgtc

SEQ ID NO: 75091 - DNA, 2599 bp, Homo sapiens; identical to SEQ ID NO: 61812

SEQ ID NO: 75092 - DNA, 767 bp, Homo sapiens
ggtggtgctgctgctatgagctgcaccatcgagaagatcctgacagacgccaagacgctgctggagaggctacgggagcacgatgcggccgccgagtcgctggtggatcagtcggcggcgctgcaccggcgggtagcagctatgcgggaggcggggacagcgcttccggaccagtatcaagaggatgcatccgatatgaaggacatgtccaaatacaaacctcacattctgctgtcccaagagaacacacagattagagacttgcaacaggaaaacagagagctatggatttccttggaggaacaccaggatgctttggaacttatcatgagcaaatatcggaaacagatgttacagttaatggttgctaaaaaagcggtggatgctgaaccagtcctgaaagctcaccagtctcactctgcagaaattgagagtcagattgacagaatctgtgaaatgggagaagtgatgaggaaagcagttcaggtggatgatgaccagttttgtaagattcaggaaaaattagcccaattagagcttgaaaataaggaacttcgagaattattgtccatcagcagtgagtctcttcaagccagaaaggaaaactcaatggacactgcttcccaagccatcaaataactgaactctgaatgatggctggagattgtctatcaaggaaggaagttactgtcttcccattcaagtactgtccattaagtgtcttgcctcagatttgatttaatcttaattaaaggtatcaggtggca

SEQ ID NO: 75093 - DNA, 495 bp, Homo sapiens; identical to SEQ ID NO: 61814

SEQ ID NO: 75094 - DNA, 1059 bp, Homo sapiens; identical to SEQ ID NO: 61815

SEQ ID NO: 75095 - DNA, 2055 bp, Homo sapiens; identical to SEQ ID NO: 61816

SEQ ID NO: 75096 - DNA, 6655 bp, Homo sapiens
ataaccatttattagtcgaaagtgtttttaagcacagtcagggtgtaaacagtgcagcattcctgctcccctccgtgggagcagcgtctccttttcaattcatgtgactacagaaggcacttggtgaactgtgcgtgtctgaggtgtggaaaccaggagacgctgctcccacagtcagggtgtaaacagtgcagcattcctgctcccctccgtgggagcagcgtctccttttcaattcatgtgactacagaaggcacttggtgaactgtgcgtgtctgaggtgtggaaaccaggagagggggaaagaattctcaaaggcctgacgtgagaagttggaaaggtttgcaggttagggaatgaattgggagtgggggccggcggcacccatttcggtgactttctccccatttcatgtaaacagaattgccagggaccggttaccgtggatatgtttttctaaaaactcagtgtctgcacaatccattgatagaactggaggatgtgtctgtgtttcctgttgggtttttctcatctcttacatcatacaaacttcaatttttaccttgaatacaggggtagtaggggtggtggtggtggtggtggttgagacagggtctctgttgcccaggctggagtgcaatgatgcaattatagctcattgcagcctcgaagtcctgggctggagcgttcttcctggctcagcctccctagtagctgggaccacaggtgtgtaccaccacgcccagcttatttttaaattcttgtatagatgaggttttactacgttgcccaggctggagggtggtggtttttatattccttgtgtgaggggtgtctgtgatatttggaatttgagaatggatttagacaatgctaagtacagtctgctgggttttgctttgttctgggttgttgttgggttttttttgtttgtttgttttggtttttggttttcttgccgtggtgcaaaactgtagaaagttgcttattcactggccttggttccattgaagtctgcgtctcgagtgtccgtttcctcctcagaaccatctgcattttcaataactctacgtcctccagaccttctagaaggaacgaaagaggtctcgtttcctcgcctgagcttgctcttgagtgcgttcacctcgcggcccatggcctcgttgctctccgtggcctcatccagctcccgctgcagcttcctgcggttggcgttgatgcgctgggactcctcctctgcctcctccagctgcctcttgagctgcttgaccctggcattgcctttctctgcctgctccttgtactgctcggccatcttgcgctcgtcctccacctgcagcaagatttccttcagcttcttgtctttctgcttcagcgacttggtggccgcctgtttctctctggcctcctgctcgacctgctcctctagctgtgcaatcttggcctccagcgccgcgatggtggatttgaacttggacttgacggccccctccatctcgtggagcttgctccggagctccttgttctgccgctcgagctgctgccgggcactctcattcttctgggccgtgctgcgctctgtggccagctcgttgctgagctgctcggcctgctgtgtggctttgcggacccggtcgctcatggcctccatgttgccctgctcctcctccagctcctcctccagctgggcgatccgggcctccaggcggcgcttctcgtcctggagtgcgttccttcccgacaggctactggcccagctcctctgccagttcctccttcttcgaggtccgctttgtttgcgaccctcttcagcggcggcgaggtccttcttgtagctgcatgaggtcgtgcttccaagctcttggctttcttctcattctctttgggctgtggcaaaagatctcatctctggaggcacggggcatcttccagctctctttgaaagtccttcatctgagcctgcagtttgcgtagctgcttgatggctttccctcccctccctttgatggcagagtcggcctaaagatccaaggttcttacagggtcccatcccagctttatttttgctgcagctgccagggcacgttgctttcgctcgtcttccagttccgtctcatactcgtgaagctgtctctgcagatgccctcctgctcgtcctcattctgctcggttcgggcttggagataccctttcgaaactggcccttgaaggcgcctgcatgttgacttccagccgcagtttgggcgtccctccgtgggcttgcaagctcggtccttccaagctcttccaactggcgtcttcatctcctccaatctggggtctcccagggcccggcttggacttctcccagatcatgggacagttcttgcccaacgtcaatccttggaagctgacccaggtcttcccatttctggctttgagcattttgttggtccgctcgagttcctctttggcttccaaggcctcttcaagggcccgagcccagggacagggccttggtttccttctccctggcttctgcctcaactctgtccctctcatccgcgtatttggaagagatgtttttctcctcggctaacaactgatcaaatttcctctgcttcttttccaggttggacaccagttgccgctggttgtccaaatcaacaaccaggtcgtccagctcctgctgaagcctgttcttggtcttttccagtttatcatacgcggccgccttctcctcgtactgctgggtgaggttctcgatctccttctggaacctcttcttcccctcttccagagcttccacggtgctggcaaagtcctgcagcttcttcttcgagtcggagagctggatgttgagagtggagatgtggcgctccaggttctgcttggcctccatctcctcgtccagctggtcttgcaggctgttccgctcctcctccagctaggcgcagcgtacgtagacacgttgagcttctgccgggattcttcttgaagcagctcctgggtgtcctggtagctgggaactgagggacgccacgtccttggccagcttaatggccttcccctcggcctcgttaagcatcccctgtgacgctctcaacttcattctgcaggcttgtggactttgtcattgagctccgcccgggcccgctccccatcgctgcacttggactgcagctcctgcacctgcgcctgcagcttcttcattctatgttccacctcctgcttgggcctggcccaggacccgcagctccccggccagggtctgtgttctctttctccagcgtctgcttattcttgtctaggttcgccttggccctcttttgactgctcaagctgctctgtgaggctctgcaccgcctgtgcgtgtttctgcctcatctcctggacctgagcctcatgggaccgcgtctcttcattcagggcccctcttcagcaccgtcacctcctgctccctcttggccctgagctcctgctgagtggctgtgctgtccagtgtgtcttccagctctgtctttagggcctccagctcctcgccgaggtctcgcttctgcttttcagccttgttcctggcggcccgctctgagtccaggtcctcctggaggtctgagatgtggccctccagctcccggatcttcttcagggcattgttcttctgagcgatttcatcgtcaagcctggccagggccgcctgcagctcctcctccttcttggccagctgcatcttgagctctgcgatctgcgcctggaggtcagcgatctgctcgtggaagtcgctggcatcaccctccagcttccgtttcagcttctccagctcctgtcggctcttctcttccttctttagccgcacttccagttctgaaatcatagattcatgcttgtttttcagcttggtaagattcttggccttttcttcctcttctgcaagatttgtcgttaagtcactaatcctctcctcaaggagttttcgttcttttgatagtttattgttctgatcatccatgaccaggatctcatcctccagtttcttgatcttggcctcagccgtgaccttctcaagttgcagcttctgcctggcagcttcctcctcctccagctgttcttcaaggtccagcatctgctgggccatcttcttcctttcagcctgtagctgctggcccctgtcttcctcctcctccaggcgggcctccatctcatgcagtatctcctccagctcctgcttcttggccgccagccgcacccgcatctcctcagcctctgcatacagctctgtctctgcctgcagctgttcctgtagcaggttcttctcctcggtcagctgcgagtgcttctgttccagctccttaagctcattctctgccttctgctgccgctccttggtcttctgcagttcatcctccttggcctgcatctcctactcctgccgtgtcacctgcagcagtggctacactttggtgaaaagcctgcaccactgccagttccgcagcttgatgtatgcggcgcagttcctctgaatcaccttcatggcggtcagctgctgctgcctcttggcaaaagcctttctggccaagtagccacgacacatcgcctggaaggccatgatgacatcggtgatcttcaaatctcgctcctcctctaggtgggccaggacgccagttcggaagaagattttgctctgccctatcctgtataagttggggtcaagttccagggctttgatcatgagaatgcaggcctgcttcccgtccatgaagcctttggggatggcattcgccgccaggatctcgtaccgttggcggaactcctggaagacgatccggttggggaagccctgccggcagatgcgaatgccttccagcaccccattgcaccgcagctgctccagcaccaggaacgcatccagcttgccggacctcttctcgtggttggggatgatgcagcgcacgaagttgggcgtggtgttgcgtagcgtggtcatcagcttgcccagctgctccttgtacagctgccccactgtgcggaacatgcccttcttggtcttggaggcgctgggcagcgagctctccgtcatcttggccatctggtccaggcccacgatgcggtccacgtccttccacaggtcggccacaaacttgtcggaggaggcattgagcagggaagtcacgttgtcattcagcgggtccatattcttggtcagccaggcactcgcattatagtctaccttcccagcataatggatgatggagaactcagtcttgtccttgagctgcttgggcttctggaacttggggtggctgccctgctccgtgcacagcttctccacgaaagacttgtccgtggctttggggaaccagcattcctcgtccagcagggccagcacacctggagggttgttcggtcgctcgatgagctcgatgcagggctgtaggtccagcccaaagtcgatgaagttccactcgatgccctcgcgctggtactcctcctgctccaaggatgaacatggtgtggttgaagagctgctgcagcttctcgttggtgtagttgatgcacagctgctcgaaggagttcacctcaaagatctcaaatccagctatatccaggatccccaggaaggaagccccttgccgatgggtcttgtccagggctttgttcacgcgggtgagtatccagcggaaaaggcgctcatatgttgccttggccaaagcctctacagcaaagtcagcctgttcttttgtctgagctttctgtaccacatctcgcccaaccttgatacgaggagtgaggatggatctggtgaaatctgtcacattaattcccatgaggtggcaaactttctgagcagctgtgttatctggcatggacgcctggtctgtgtttctttccttcttgaagacgatatttccaagctgcaggaccgatgataccaccttcaatatggatagctgctcctcctcgctgaaacccatgattgccatggcctccacggtttcctggaacatctcatcatcctgggctgctgggatgggcacaaagccattggagaggaaggtgtagttgttgaagccctccaaaagcaagtcacttctcatcttctccttggctccagcaatcatgtagtaaaagatgtggaatgtcctctcgtctctggcttggcgaattgcccgtgatttttctagcagataggtctcaatgttggctcccacgatgtaacccgtgacgtcgaagttgatgcggatgaatttgccgaatcgtgaggagttgtcgttcttcactgttttggcgttgccgaaagcctccagaatcgggtttgcttgtagaagctgcttttccagctctcccgtgatacttgtgtctttcttgcccttgtgggaggaggccaccacggccaggtactgaatgaccttcttggtgttttcggttttcccggctccagactcgcctgtgcatagaatggactggtcctcccgatcttgaagcatgctccggtaggccgtgtctgcgatggcgtagatgtgaggcggcatctcgtgcctcttcttgcccttgtacatgtcgacgatcttctccgagtagatgggcaggtgtttataggggttgaccaccacgcagaagaggccagagtacgtatatattagccctgagaagtaccgctccctcaggttgtgtagca

SEQ ID NO: 75097 - DNA, 2462 bp, Homo sapiens; identical to SEQ ID NO: 61818

SEQ ID NO: 75098 - DNA, 4652 bp, Homo sapiens; identical to SEQ ID NO: 60527

SEQ ID NO: 75099 - DNA, 3156 bp, Homo sapiens
tttcgtggtggcggcgtccggagggtgctggtttgttctcggtgaacggcgcgcggggtctctcctgagtgcgagctacgggaccttcgccatgccggggatggtactcttcggccggcgctgggccatcgccagcgacgacttggtcttcccagggttcttcgagctggtcgtgcgagtgctgtggtggattggcattctgacgttgtatctcatgcacagaggaaagctggactgtgctggtggagccttgctcagcagttacttgatcgtcctcatgattctcctggcagttgtcatatgtactgtgtcagccatcatgtgtgtcagcatgagaggaacgatttgtaaccctggaccgcggaagtctatgtctaagctgctttacatccgcctggcgctgttttttccagagatggtctgggcctctctgggggctgcctgggtggcagatggtgttcagtgcgacaggacagttgtaaacggcatcatcgcaaccgtcgtggtcagttggatcatcatcgctgccacagtggtttccattatcattgtctttgaccctcttggggggaaaatggctccatattcctctgccggccccagccacctggatagtcatgattcaagccagttacttaatggcctcaagacagcagctacaagcgtgtgggaaaccagaatcaagctcttgtgctgttgcattgggaaagacgaccatactcgggttgctttttcgagtacggcagagcttttctcaacctacttttcagacacagatctggtgcccagcgacattgcggcgggcctcgccctgcttcatcagcaacaggacaatatcaggaacaaccaagagcctgcccaggtggtctgccatgccccagggagctcccaggaagctgatctggatgcagaattaaaaaactgccatcattacatgcagtttgcagcagcggcctatgggtggcccctctacatctacagaaaccccctcacggggctgtgcaggattggtggtgactgctgcagaagcaagaacccacagactatgacttggtcggaggcgatcagcttcaactgtcacttcggctcccatcctgcacacccacagggctgcagtacagggacttcatccacgtcagcttccatggacaaggtttacggagctgccgtttttagtggctctggatcacaggaaagagtctgttgtggtcgctgtgagggggaccatgtctctgcaggatgtccttacggacctgtcagcggagagtgaggtgctagacgtggagtgtgaggtgcaggaccgcctggcacacaagggtatttctcaagctgccagatacgtttaccaacgactcatcaacgacgggattttgagccaagccttcagcattgctcctgagtaccggctggtcatagtgggccacagcctcgggggaggggcggccgccctgctggccaccatggtcagagccgcctacccgcaggtcaggtgctacgccttctccccaccccgggggctgtggagcaaagctctgcaggaatattctcagagcttcatcgtgtcactcgtcctggggaaggatgtgattcccaggctcagtgtgaccaacttggaagatctgaagagaagaatcttgcgagtggtcgcgcactgcaataaacccaagtacaagatcttgctgcacggtttgtggtacgaactgtttggaggaaaccccaacaacttgcccacggagctggacgggggcgaccaggaagtcctgacacagcctcttctgggggagcagagcctactgacgcgctggtccccggcctacagcttctccagcgactccccactggactcttctcccaagtacccccctctctaccctcccggcaggatcatccacctgcaggaggagggcgcctcggggcggtttggctgctgctctgctgctcactatagcgccaagtggtcacacgaagcggaattcagcaaaatactcataggtccgaagatgctcaccgaccacatgccagacatcctgatgcgggccttggacagcgtggtctccgacagagcggcctgcgtctcctgtccagcacaaggggtctccagtgtggacgtggcctgaccagggccactggaaactgtcccaggaacgatggactcacgcttttgtccttaaactgacttaccatccgaggagttcccatgacgccaaaacagcgaatgtccatcaacaggaatcggatgggaacagaattccatggtctcaatgacttaagtttatgggaagtcattgtggccataatggtagcagaagtagcgagcacgctcaggtgataggacgactcctgagacccagcgaccgtggagacagcctcgggaagccctggcccgtggatggatcccttggctgtctgaggactgctccagaagtgcgggaatccagggcccacccagaagaccgtgaacagttccttagcctcccacccccaaggcagctcttttcatccaactcagtttacaggcgtggtttgtttttcaaactgggcttcctggatgtacaaatggaactgtggtgagggtgcgggctggggttttctcctgggcgtcaccaagggcagccctgggctctggctggggatgaagacgaaacccgatcgggaaagtaagtggagcccccggccccgccgagccacagccccccaactgcctattcccactgcccagttgtttgtccacatcaggagttgctgattgaattcttgctactcttctggctctggggtcggccagtggattcaggagttgaaacaataaagcgcgcgtcacgatagtgcttgtgtgtacagctgcgtgctctcttattggggatttccaggtagcgctactatactgggtggttgtagagcaatgatgtttccacgttttttttaaaccctggggttctggctacagatggaagattgcccaagcactgatttcaccccctctcccaccggaagcccaacagaatgacaggagggagatttctccaaaaaagcagagacccacaggatgggaaaagacactccaacaacagtcagaggacgcacagtacagaaccttaagggggaaggaaagacatgaactgaccccagcttacaagaccctgggcagctgtgaag

SEQ ID NO: 75100 - DNA, 3143 bp, Homo sapiens; identical to SEQ ID NO: 60529

SEQ ID NO: 75101 - DNA, 1622 bp, Homo sapiens
ttttttttttttctggttttcctttttatttaatcaaaggacctggtgaataaacataaatacagcacaattacttcaggatcattcttcatattgtatacacacaaacccatgaacataatctgaaagaaacctgtaagacaagcaatgaaatggcatacagctttttccttcccctcgctcaaaaaaaaagtttaaacacacaaacttacaatctcatcaggcacacactcctcttgtgacaaatgattccagaccataaatagtgggtgccaaagaaacttatatgcttaacatatgaataacctttgttaatgaaaaaacaggaggcagcccataatggattaagatacattcagttactggataactaggttgtgccctaaagggcattttatccaaaaggagaaatcgtggctggcagagaaaagcgatatataccttacacaatgagaaaataaactggcaagattaatggcatgcatgtttaatactgggaaaatcacagccctccaaaatttctgcacggtttgttataaaagccctctgcactcaactaaaattaaaatgatcttaaaaggataatacttgtaaagtttaagtctcctcagccacagaaattgcaatggaaataaatgttcagagtccattttcaaaacaaaaccaaaacgaaaaatctattcttccgatgacatgcaagatacactgctctacattcccaatgactaggaaaaaaaaaacctcaagtcaatttttagtttgcagatgctcaagaattttgtattccagtagttgttggtgaaaagatccaaaagatttgaactcctgctggaatacaaaattcttgagcatctgctttgtaattgtaagagcaattgtgtacatctgagtaacggtgtacaccacagtaaacatttccacaccggcattcaaacccagtaagtcccactttcttcctgcacatgaaacagcgattctttttttgtttcggtttttcaagagacttgctttgctcttcagatggctgctgtgctgtgtctgatactgaagcctgcacatcttctgtttcaggtactgctttgtccacagatgtactgtccaattgagaagatgctacagattctgataaaagtgactgatttgatacagggctgggctgcatagatgaagatgtagagtctaatgctgactgggcttctggcacactgccatctgtgcattgaacaggtgggcttattctaccattactactattctgtctttgaagatgttctttatagcatactgaacacatgccatttgtacgagggtttccataaaatccacagccagtggaacaaagcataggcacttggctgtgattagtttcttgagccatgttcctcagttgcacacccaagttccccttctggtaagcagctaagtcagtgtcttttgatctggcggcgggtctctccgcctgacacgctgcgcgccgccgccggtagccgccggtgaatgggtacaggtaatgccgccgaacccctgcttgcctccgtccgccaccgccggcccctccgtccgctgtttattaaacttttctgtttggttgttcggcctatgacgcgaccgcgctcgtgccg

SEQ ID NO: 75102 - DNA, 1081 bp, Homo sapiens; identical to SEQ ID NO: 60532
  misc_feature (1)...(1081): n = a,t,c or g

SEQ ID NO: 75103 - DNA, 1630 bp, Homo sapiens; identical to SEQ ID NO: 60533

SEQ ID NO: 75104 - DNA, 369 bp, Homo sapiens; identical to SEQ ID NO: 60534

SEQ ID NO: 75105 - DNA, 3340 bp, Homo sapiens; identical to SEQ ID NO: 60535

SEQ ID NO: 75106 - DNA, 1310 bp, Homo sapiens; identical to SEQ ID NO: 60536

SEQ ID NO: 75107 - DNA, 428 bp, Homo sapiens; identical to SEQ ID NO: 60537

SEQ ID NO: 75108 - DNA, 376 bp, Homo sapiens; identical to SEQ ID NO: 60538

SEQ ID NO: 75109 - DNA, 2372 bp, Homo sapiens; identical to SEQ ID NO: 60539

SEQ ID NO: 75110 - DNA, 2667 bp, Homo sapiens; identical to SEQ ID NO: 60540

SEQ ID NO: 75111 - DNA, 1989 bp, Homo sapiens
ccttttttttttttttaacatcaaatttggtttatttcaagtttgtaacaaaatatattctaggcaacttttcagacattgttttatagcatcataaaccccataccactgctgtcattccaaaagctgccaggacactggaagttatcaagtggtccagcccaggaatacaggtagaattcacatgataggtgataagaaagcaatgtctgtgggccactctgatccctctttttaccttggtaggtaaggtatgatcttaagactatatgtactgagtcctattagtcagtgaaaaagattaaagtgacaagttatgtgctttgttcctatagctttgaagttcatccacctcaccagcaattggaaggtctcaggtcttgcaggctctacccatgtgtaatcctggggcaggtgtgaatcttgatttttttaagagattactcaagggagagaacaacagaaacggaagccatgagtactgccccaattctagattaggttagaggttagaataaattaactaatggggagtggtagtgggtagcagtcagacccaggagacagatttgtgtggtttcctgatctcagcaaggtctaaggaaaaaagcctccccgcccccccaccttaaatagtggcatcaagtcatgaaggccagtgaaacgtggttagtctcgtaaaatgacttccagttcttccaggtccttctggatagccaaatcctccttcgtgacatctggcagctccagggccaacttcatccaccatctagcttcagagtttttccctagttctctgtagcacttggaaatatatacccttcctgctttggaaaatcctggctgtagttcttcagcctttaggaagctctggagggcatcttccacagtggcactgagagggctttcaagcaaggctgtagcagtttttttttctagccagctcaggtgagagacctgatagcaccacctgccaagaagaaagtgagccatggggttttctggctggagagcaatggctttgtccacatgctccttgaagctaaagccactctggatgcgcctctggatgctctcatgctcagccagctgaccacaaagcaccgcataccacaggtgacaagtcagcactcttcatcccccttctccagagcagcctctgcttcttcttttccatctagggcatatgacttcttctcgctcacctcctcagtgagctcacacatgtcactgtaggctcgggccaggcgccagagaaagtcctgccggcttccatacaccagcttgttgttgagcagcagctggaagccctcccgcttgccttgctcatcacccctgtgcagctcgtcggcctgctgcaggaggggcagcacatcctccaagcctgaggaacctccagcctccagggcactggaggcacctgaagctgcctcttcctccaagtcaagagaatcctttctccccatcttcacagtctcacagctcacttcatcttccccgtcctcactttctttgtcagagtcccgctcattgtcagactccgcattggctgttgtgtaacccccttcactctcagcatctgtgaacgtggctcccgaggaggccgtgaagtagacagagctggagccagtggagtcactcctctcccggacaaacggaaaccttcgccgccgagccactctctggttctcttccatgtggcatctggaaagcaggccccatcccgaagggtaccattaggtcccatccagcttgtctttctgctcaccatggggtgcctcttactactgctcctcattaaagggctaaaagcagagaaaatcctaagtctctaaccctcaggagggcaagcagggcagcttcctgggcccagcccgcacagacagactaggttaggcaaacagagcgcttcagctgctacaacagatcaaccatgagagtccagaagcagcaaggagcatgtgcaaggcgaggtaccaaatgtacagc

SEQ ID NO: 75112 - DNA, 3133 bp, Homo sapiens
ttttttttttttgccaagatccaaagaaaaaattttatttacaatagagaattttatttgaaacatgcatttcttgtttttttaaaaacaaatcagcaaatgcagatcaagtttacactccttaaggccaagagtccccctatgcacgctgtacatgttccatattaaatcccaaaagctgactcacccctggggaacttgtgttacaaaggggcaaggcccaaggtcagcaatggtgtcttttatttggaggaatcagacaatctccctggatacaggaactctgagggtcaacttgctatgaattatactagggggaaatgcaaacccaataggccaggaaattctggataggtctcccttaggtacctggcatacaatcaaatcaattttatttaggaaagggaaatacagtaggtgcatacgaaaaagtgaaaacagaacctggtccatggaactggaggaacagcagtgtgccgacggtcatattgcacgcaacagttaagtccaaaacattcggttcagagttagcttttccccattttggcaatcagttcgtcacaaatcttggtgagttcttctatttctttattcttctgctccagcgtcctttccagggcgtccaactcggcagctgctcctttccgcaaggctggcctggtgggcggcttgctcctgctgggccttgcctcgaacctgagcaatcttcagcattggccctgtccagtttctcctccagcgtgcaccttcagggcctggtacctctgctcctccttcttcacccgggacaggtactcctgcgcacatctcttcaacacctcttcattcttgcggaagccttctaggacctccttcatcttctcatatcttctgaagaggtcggccagagactttctccacggagttcaggtcggccaggggcttgctccttctccagaaccagctgctgcaccgtctggtggggagactgacttctctctctgttcgtcctctatcatctgagcgatggtcttctcatactcggccactattttcctcatttccatcacttcccgcctgctttcttcatatttatctttccattctgagacctctctctccttggttatgatctctgctctggcgatctggagggcagagtccaggtcgggctgctggaacagaaggcctgcaggtttctccacctcagcggtcccgatgcgggagtacaaggctgttttggagatggagacgtctgttgggtgagcagcctctctctggagtttctgagcgaatagtggggggttcttttctgctaagtcgggctccagatagtcaagtgcaccacagagagagacggggtgagctagcctgctgaggagggcgtcagcagaggcaaaggagccctcgggagctgtaatttcaatcgcttctgaaggggtgcccaagcccatggcctccagctccttctgggaggatttctctggcacctgcaagtgtgactcttggttaggggccagtcctcgtgggacaggatgctggtttttcgcagcagtgttcacaagggcttcagtctcttcaaaacttgaccctgaacacggcgtcggggactctgacatgcggacgggagatgacttgacagggctctcctgagaagtgtcaaacataaggtacaaggcctgcttcttcggggcatcgtcgtcctgaggtaaggaggagccaattttctccatatattcaatttcataggagtttctgtaatccaactcctcagtgggtgaactgaatttggtctcgtttacaaaggtggacaggtccgagggctgcgggtagtcctgtttgtcagcctctaggtccactgtcatgcacgtccacttctggttggtgaccgccagcttttcctcatctgtggcgtggaccaccgcagagatcactggtggtgtttctggtgtagcagctggggtggggtcctgggaaggtggatcagagagaggagaccgttttggcgactttttcaccctaaatgtgtcagtctttaggggcgtcttcttcttcttggcgggcttgtttagcccatccccgtccactccattggcttccatagcactggctgggatctcaaaggaggctggggatttagaaggtgagctgggggtcttagaggatgtcttaaaggggtcaacggactcatcacaggtgtctgggtcaaagttgtatgattgttggggcagtttgggagactcctgcatttttgaggtggaagaaaaagggttaaaattggggtcatcccacttgtcaatatcaaaggtgtaagtacctttagcaatggggatgtcattgggttcagcaggggatctgggaggtgaggcaggagtgttgtcaagtttctcgggtgtctttttcatctttggcctcctcaggggcattttggcaactggctttttgcctatctttttggtaggaggggggttttcctgctggttgtcccaactactcttgtcctcagaatagtcaaactccagccttacggagtgccctttggctggagagtcctcttgccccccgctatccgatggggttacctcccctgcctccggggccgtggtaagaggcagcgttttcctcccgacagggggtgagttctgcactctgccacctccagaagccggggggacaaccccttctacactctctgagtccagagggcaggcagctttgggccccgcagcgggctcaaggggcgtctcctccaataaggctgggctaggaccttccgtcttggcagattccgttttcgtctcagatgctagattctccccactggggacaaggctctcttcatctggctcctgttgcgtctccttcactgggggggtctctgtgggtttcttggtggtctgtttcttttttaaggaaggcggcctcggttttttagttcgcttaagggtactagaagcactgctggaacccgtgctatatgcatctggggcaagggccacggcctcgggattgcctgaggaagaagccccatcaaagtcactggcttgcaggctgagcgaccgggacagtgtagacttagagatggggacggaatccgtggacttcctccgtgtgttcaataagccctcctgattcttagcgtctgaggcacgaa

SEQ ID NO: 75113 - DNA, 350 bp, Homo sapiens; identical to SEQ ID NO: 60542

SEQ ID NO: 75114 - DNA, 1098 bp, Homo sapiens; identical to SEQ ID NO: 60543

SEQ ID NO: 75115 - DNA, 1344 bp, Homo sapiens; identical to SEQ ID NO: 60544

SEQ ID NO: 75116 - DNA, 2075 bp, Homo sapiens; identical to SEQ ID NO: 60545
  misc_feature (1)...(2075): n = a,t,c or g

SEQ ID NO: 75117 - DNA, 6309 bp, Homo sapiens; identical to SEQ ID NO: 60546

SEQ ID NO: 75118 - DNA, 3888 bp, Homo sapiens
ttttttttttttaattttcacattttatttccaactattgcagtaacaagatgccggtagtattctgcactgaaagtggcaaccttttaaagtaaacaaggttgcaaattttagtattccaacaatattttgacctatggagattttgataggaaagaattattacaatcagttttataatactacagacttatgtttcctcccatatctaggaataaaaatatccaccctcccctcaatgattaatcatgtacacatctttactctttacaagcactatccttccaagttgtactatgaggggaaatccctcctcactcctgggtttttctacagtatacagaaatagcagtcactttagcagtaatgtacaatactattcaatctttagttgaaaaataaagaagtgggattgccctatttatgtcctgatagtaaaaagacacacaccattgaaacataaaacgagtcaacaaacttctatttttattgacaggagtccaaaatgaatacaaaaaaaagcttcctttgcatgttatacttactttccttaaaaagctcctgatagagtcaagtagactgaaaactacggatgtagttcagcttttagagtgaaccttttttaaaaaaggtttaataacataagccaccagtatcagaaaacatacagtcccactatcacttttagagctagaacttatcaaaagaattagatccctgcattgatctgctaagatagaggtttagaaattggtttaagccattaaaagccatttttataatctgtctgataactctggggcaattaaggaaaagggaaattccaaaacgtaggccctctattatcctgtgggaatgtgagtagaatgccaactttatgaccaagaataagtaaaattaaaagtttaaaatctatgcagtggagtctgttgtatcactgcaaaatggtccacaacagagcttatccaggggattatccacttgagcgatgttacttaaaccttggggcgatgttaccttaaaccatatttgtggtgtttgctaaaaactaaggctgaacaaggaaaagtcgctccatttacagactgtgtttccctgcatctttacttttactgggaccatagactgatcagataatacatagcccaacacttctggacagttataataacaaaggatttattatcatttgcagatgaaataaatgtaccatcccctacttgaaaggtttcaataagccttaacatttttcaggttgtaccaaggcaccgccactgcctagttatattatgcacccatttctagagtaaaaaaactacacctccctcaacatcagttctgtactgtttctgggtttatgatacacttccaaaacagcaaaaaattgcaaatatgtgcaaacactgtggtccattcaggagtactgcttagtcatcatcttcttcttcctcctcttcttcctcaaagctatcttcaaagccctcactgtcctcctggtcttcatccccctctattgctgtatcccactgtgggtgattttctggcacaggcttagcctcatgaacttccaacttcaatggtttaatctgatccaaacccatataggagtctgatctcagaaacacagtatactgataatttccaggcttgcctggtgcaggaaacttcagctctacctcctctgtatctttcagcgtacacacatgatatggcatggatattaatgtctgctccttcctatctgcaatgtaaagccaccaccattcttgtttttcctcaggaaagtaaaggctatacacaggatgtgttatttttgatttggtttccaatagagctctctcttttcgctgtatgctttgttgtaattcttgccactctgcttcatcatctttgttttgtttttcatcttgctctctatcagagtctctgtcactaccatcatctttctcactttgggaatctctattggtttcttcttcttcagaatcactgcccttatctgaaacttcttcttcatcttcctttactgcagcttcattcccaacgactccatttgcctgcttttgtttctgttgctttgactgtggtaatagcccaggggtaggttttttttttaaaggtttctttttttttgatttagcagttttcttgggtcctttactcttctgttgccatcctccttttgtcctgttcttgttagtttcaccctgcccatcttctgctggctgttcctctgcagcacagatggactgctccttttcaaatacttcagccattgtttgccttgtcaacttaaccaacactgtaactaaggatcctactgtgatgttgttgctatcttcatcatctaacacctgtgattttatatccatggtcacatatggaaaactcccaaggacagccataacctcttcatatttttcatcttcaaggaagtgcagtagagtgtgacgatctgattcttttaaactcaccaaatcctggatagttttaattttatacttcttatgattagaaacccgtctaagattgtcctcttcaatatgaggggagcctgcagaagggggagactttaaattgctgaagtccctgaacgggccatctgagaaaggttcaatgcaggttttctagggatgccaaagttggagcacgaaactccctttcttcacggttccgggccattactaattagttggcagattacattaaccatttcttgaagtagggcaggacactttttttagcatgaattgctgatcttcttcaagggtctcaggaattttcattctagcaagatgagacagtaaaagaactctggccttcaggctatatgggcaggtaagtggaggctcattcttctttaaattaatgctgccaatttctctgattagctgtggtattagaatattatctcgttggtctgcttgtggcatctttattatactgaggatcaaattcagaagctccagccaaaaccatgataagacgtttcatatccatatttcgggttttataaacaaagtatgtataaatctgtgttgtgcgtattagaatctggtctccactatagcgtattgagcgataccaccaagagcccacaacaactggaaggataaccataaatgccaatccatatacaagtaaaaccagaattgaatttttctggtcaactatccaagctggcagggcaattccaaagcttgtggcttgaggcccatctggatttccaaattcttcccaatttttcccgggactcttcatccgttaaaggcagcataagcctttgctatcctcatgaacataacctcatcacctcctttatctggatgatatttaagtgacagcaaacgatattgttttttaatttctgctactgtggctccaggatccaaatttaatacttcataaggattgtattcttggtattctcggtctgttttggaaactttatatgcaaggaataagaacaatgcccatcctgcaagcagaactattttctttactgtaggaataatatttggctggggttttaataaccgtaaacgataccacatacaccttccatatacttttctgatattctttaatcgaatttgctcggcattctgatctcggggccagaggtagtatgtcgccgggatcacgatgagccccacgaaggaggtgaggaagtagaagaaggtgttcccactgtcatcgtactggaactgctgcccggccatggcaccccctcctccgcctcgctcttctcaccgccgccgccacgaccacgctctgcactcccgctcccaacgccccagcccgagtggcgtagcttggacactgccgccgccgcctctcctccccgcccccacgccactctcacggacacgccgcacgaaatcgtcg

SEQ ID NO: 75119 - DNA, 2373 bp, Homo sapiens; identical to SEQ ID NO: 60548

SEQ ID NO: 75120 - DNA, 851 bp, Homo sapiens; identical to SEQ ID NO: 60549

SEQ ID NO: 75121 - DNA, 5225 bp, Homo sapiens; identical to SEQ ID NO: 60550

SEQ ID NO: 75122 - DNA, 5514 bp, Homo sapiens; identical to SEQ ID NO: 60551

SEQ ID NO: 75123 - DNA, 3117 bp, Homo sapiens; identical to SEQ ID NO: 60552

SEQ ID NO: 75124 - DNA, 4360 bp, Homo sapiens; identical to SEQ ID NO: 60553

SEQ ID NO: 75125 - DNA, 7741 bp, Homo sapiens
ccgagcagcagtgctaaaggagcccggcggaggcagcggtgggtttgggactgaggcgctggatctgtggtcgcggctggggacgtgcgcccgcgccaccatcttcggctgaagaggcaattgcttttggatcgttccatttacaatggcgcagagaactggactcgaggatccagagaggtatctctttgtggacagggctgtcatctacaaccctgccactcaagctgattggacagctaaaaagctagtgtggattccatcagaacgccatggttttgaggcagctagtatcaaagaagaacggggagatgaagttatggtggagttggcagagaatggaaagaaagcaatggtcaacaaagatgatattcagaagatgaacccacctaagttttccaaggtggaggatatggcagaattgacatgcttgaatgaagcttccgttttacataatctgaaggatcgctactattcaggactaatctatacttattctggactcttctgtgtagttataaacccttacaagaatcttccaatttactctgagaatattattgaaatgtacagagggaagaagcgtcatgagatgcctccacacatctatgctatatctgaatctgcttacagatgcatgcttcaagatcgtgaggaccagtcaattctttgcacgggtgagtcaggtgctgggaagacagaaaatacaaagaaagttattcagtaccttgcccatgttgcttcttcacataaaggaagaaaggaccataatattcctggggaaccttgaacggcagcttttgcaagcaaatccaattctggagtcatttggaaatgcgaggactgttcaaaatgataactcatctcgttttggcaaatttattcggatcaactttgatgtaactggctatatcgttggggccaacattgaaacataccttctggaaaagtctcgtgctgttcgtcaagcaaaagatgaacgtacttttcatatcttttaccagttgttatctgggagcaggagaacacctaaagtctgatttgcttcttgaagggtttaataactacaggtttctctccaatggctatattcctattccgggacagccaagacaaaggtaatttccggggggaccctggggaggcaatgcacataatgggcttctcccatgaagagattctgtcaatgcttaaagtagtatcttcagtgctacagtttggaaatatttctttcaaaaaggagagaaatactgatcaagcttccatgccagaaaatacagttgcgcagaagctctgccatcttcttgggatgaatgtgatggagtttactcgggccatcctgactccccggatcaaggtcggccgagactatgtgcaaaaagcccagaccaaagaacaggcagattttgcagtagaagcattggcaaaagctacctatgagcggctctttcgctggctcgttcatcgcatcaataaagctctggataggaccaaacgtcagggagcatctttcattggaatcctggatattgctggatttgaaatttttgagctgaactcctttgaacaactttgcatcaactacaccaatgagaagctgcagcagctgttcaaccacaccatgtttatcctagaacaagaggaataccagcgcgaaggcatcgagtggaacttcatcgatttcgggctggatctgcagccatgcatcgacctaatagagagacctgcgaaccctcctggtgtactggcccttttggatgaagaatgctggttccctaaagccacagataaaacctttgttgaaaaactggttcaagagcaaggttcccactccaagtttcagaaacctcgacaattaaaagacaaagctgatttttgcattatacattatgcagggaaggtggactataaggcagatgagtggctgatgaagaatatggaccccctgaatgacaacgtggccacccttttgcaccagtcatcagacagatttgtggcagagctttggaaagatgtggaccgtatcgtgggtctggatcaagtcactggtatgactgagacagcttttggctccgcatataaaaccaagaagggcatgtttcgtaccgttgggcaactctacaaagaatctctcaccaagctgatggcaactctccgaaacaccaaccctaactttgttcgttgtatcattccaaatcacgagaagagggctggaaaattggatccacacctagtcctagatcagcttcgctgtaatggtgtcctggaagggatccgaatctgtcgccagggcttccctaaccgaatagttttccaggaattcagacagagatatgagatcctaactccaaatgctattcctaaaggttttatggatggtaaacaggcctgtgaacgaatgatccgggctttagaattggacccaaacttgtacagaattggacagagcaagatatttttcagagctggagttctggcacacttagaggaagaaagagatttaaaaatcaccgatatcattatcttcttccaggccgtttgcagaggttacctggccagaaaggcctttgccaagaagcagcagcaactaagtgccttaaaggtcttgcagcggaactgtgccgcgtacctgaaattacggcactggcagtggtggcgagtcttcacaaaggtgaagccgcttctacaagtgactcgccaggaggaagaacttcaggccaaagatgaagagctgttgaaggtgaaggagaagcagacaaaggtggaaggagagctggaggagatggagcggaagcaccagcagcttttagaagagaagaatatccttgcagaacaactacaagcagagactgagctctttgctgaagcagaagagatgagggcaagacttgctgctaaaaagcaggaattagaagagattctacatgacttggagtctagggttgaagaagaagaagaaagaaaccaaatcctccaaaatgaaaagaaaaaaatgcaagcacatattcaggacctggaagaacagctagacgaggaggaaggggctcggcaaaagctgcagctggaaaaggtgacagcagaggccaagatcaagaagatggaagaggagattctgcttctcgaggaccaaaattccaagttcatcaaagaaaagaaactcatggaagatcgcattgctgagtgttcctctcagctggctgaagaggaagaaaaggcgaaaaacttggccaaaatcaggaataagcaagaagtgatgatctcagatttagaagaacgcttaaagaaggaagaaaagactcgtcaggaactggaaaaggccaaaagaaaactcgacggggagacgaccgacctgcaggaccagatcgcagagctgcaggcgcagattgatgagctcaagctgcagctggccaagaaggaggaggagctgcagggcgcactggccagaggtgatgatgaaacactccataagaacaatgcccttaaagttgtgcgagagctacaagcccaaattgctgaacttcaggaagactttgaatccgagaaggcttcacggaacaaggccgaaaagcagaaaagggacttgagtgaggaactggaagctctgaaaacagagctggaggacacgctggacaccacggcagcccagcaggaactacgtacaaaacgtgaacaagaagtggcagagctgaagaaagctcttgaggaggaaactaagaaccatgaagctcaaatccaggacatgagacaaagacacgcaacagccctggaggagctctcagagcagctggaacaggccaagcggttcaaagcaaatctagagaagaacaagcagggcctggagacagataacaaggagctggcgtgtgaggtgaaggtcctgcagcaggtcaaggctgagtctgagcacaagaggaagaagctcgacgcgcaggtccaggagctccatgccaaggtctctgaaggcgacaggctcagggtggagctggcggagaaagcaagtaagctgcagaatgagctagataatgtctccacccttctggaagaagcagagaagaagggtattaaatttgctaaggatgcagctagtcttgagtctcaactacaggatacacaggagcttcttcaggaggagacacgccagaaactaaacctgagcagtcggatccggcagctggaagaggagaagaacagtcttcaggagcagcaggaggaggaggaggaggccaggaagaacctggagaagcaagtgctggccctgcagtcccagttggctgataccaagaagaaagtagatgacgacctgggaacaattgaaagtctggaagaagccaagaagaagcttctgaaggacgcggaggccctgagccagcgcctggaggagaaggcactggcgtatgacaaactggagaagaccaagaaccgcctgcagcaggagctggacgacctcacggtggacctggaccaccagcgccaggtcgcctccaacttggagaagaagcaagaagaagtttgaccagctgttagcagaagagaagagcatctctgctcgctatgccgaagagcgggaccgggccgaagccgaggccagagagaaagaaaccaaagccctgtcactggcccgggccctcgaggaagccctggaggccaaggaggagtttgagaggcagaacaagcagctccgagcagacatggaagacctcatgagctccaaagatgatgtgggaaaaaacgttcacgaacttgaaaaatccaaacgggccctagagcagcaggtcggaggaaatgaggacccagctggaggagctggaagacgaactccaggccacggaagatgccaagcttcgtctggaggtcaacatgcaggccatgaaggcgcagttcgagagagacctgcaaaccagggatgagcagaatgaagagaagaagcggctgctgatcaaacaggtgcgggagctcgaggcggagctggaggatgagaggaaacagcgggcgcttgctgtagcttcaaagaaaaagatggagatagacctgaaggacctcgaagcccaaatcgaggctgcgaacaaagctcgggatgaggtgattaagcagctccgcaagctccaggctcagatgaaggattaccaacgtgaattagaagaagctcgtgcatccagagatgagatttttgctcaatccaaagagagtgaaaagaaattgaagagtctggaagcagaaatccttcaattgcaggaggaacttgcctcatctgagcgagcccgccgacacgccgagcaggagagagatgagctggcggacgagatcaccaacagcgcctctggcaagtccgcgctgctggatgagaagcggcgtctggaagctcggatcgcacagctggaggaggagctggaagaggagcagagcaacatggagctgctcaacgaccgcttccgcaagaccactctacaggtggacacactgaacgccgagctagcagccgagcgcagcgccgcccagaagagtgacaatgcacgccagcaactggagcggcagaacaaggagctgaaggccaagctgcaggaactcgagggtgctgtcaagtctaagttcaaggccaccatctcagccctggaggccaagattgggcagctggaggagcagcttgagcaggaagccaaggaacgagcagccgccaacaaattagtccgtcgcactgagaagaagctgaaagaaatcttcatgcaggttgaggatgagcgtcgacacgcggaccagtataaagagcagatggagaaggccaacgctcggatgaagcagcttaaacgccagctggaggaagcagaagaagaagcgacgcgtgccaacgcatctcggcgtaaactccagcgggaactggatgatgccaccgaggccaacgagggcctgagccgcgaggtcagcaccctgaagaaccggctgaggcggggtggccccatcagcttctcttccagccgatctggccggcgccagctgcaccttgaaggagcttccctggagctctccgacgatgacacagaaagtaagaccagtgatgtcaacgagacgcagccaccccagtcagagtaaagttgcaggaagccagaggaggcaatacagtgggacagttaggaatgcacccggggcctcctgcagatttcggaaattggcaagctacgggattccttcctgaaagatcaactgtgtcttaaggctctccagcctatgcatactgtatcctgcttcaaacttaggtacaattgctcccctttttatatacagacacacacaggacacatatattaaacagattgtttcatcattgcatctattttccatatagtcatcaagagaccattttataaaacatggtaagaccctttttaaaacaaactccaggcccttggttgcgggtcgctgggttattggggcagcgccgtggtcgtcactcagtcgctctgcatgctctctgtcatacagacaggtaacctagttctgtgttcacgtggcccccgacgactcagccacatcaagtctcctagaccactgtggactctaaactgcacttgtctctctcatttccttcaaataatgatcaatgctatttcagtgagcaaactgtgaaaggggctttggaaagagtaggaggggtgggctggatcggaagcaacacccatttggggttaccatgtccatcccccaaggggggccctgcccctcgagtcgatggtgtcccgcatctactcatgtgaactggccttggcgagggctggtctgtgcatagaagggatagtggccacactgcagctgaggccccaggtggcagccatggatcatgtagacttccagatggtctcccgaaccgcctggctctgccggcgccctcctcacgtcaggagcaagcagccgtggacccctaagccgagctggtggaaggcccctccccgtcgccagccgggccctcatgctgaccttgcaaattcagccgctgctttgagcccaaaatgggaatattggttttgtgtccgaggcttgttccaagtttgtcaatgaggtttatggagcctccagaacagatgccatcttcctgaatgttgacatgccagtgggtgtgactccttcatttttccttctcccttccctttgggacagtgttacagttgaacacttagcatcctgttttttggttggtagttaagccaaaccgaacattacgggaaaagtgcccctagaacaccaacagtaccctaagaacaatgttgaaataataatccattccggcccctcctataaccaatttaaatggtattccaagttttggacctggtggcctccatatccatggacccctctcctagtcaaaagtggtaattacagcacattcagtgcacaatggaatcaggtgttaattcctaaatcccttgatccctctgcaatgtgccttgaaaaccacaaacccttttggggtaaaaagctttaaccatcctattagggaagaatttgtccctgtgggtttgggaatccttggattttcccccytttatgaactgtacctggctgttgacccaccagacacctgaccgcaaatatcttttcttgtattcccatatttctagacaatggatttttgtaagacaataaatttattcattatagatatttgcgcctgctctgtttacttgaagaaaaaaagcacccgtggagaataaagagacctcaataaacaagaataatcatgtgaacgtgg

SEQ ID NO: 75126 - DNA, 1812 bp, Homo sapiens; identical to SEQ ID NO: 60555

SEQ ID NO: 75127 - DNA, 2631 bp, Homo sapiens; identical to SEQ ID NO: 60556

SEQ ID NO: 75128 - DNA, 2036 bp, Homo sapiens; identical to SEQ ID NO: 60557

SEQ ID NO: 75129 - DNA, 3053 bp, Homo sapiens; identical to SEQ ID NO: 60558

SEQ ID NO: 75130 - DNA, 1998 bp, Homo sapiens; identical to SEQ ID NO: 60559

SEQ ID NO: 75131 - DNA, 7238 bp, Homo sapiens
  misc_feature (1)...(7238): n = a,t,c or g
ggcacgagaaagctcaagatggcggacaaaacgccaggcggatctcagaaggccagttcaaagacgagatcatcagatgttcattcatctggatcttcagatgcacatatggatgcatctggaccctcagatagtgatatgccaagtcggacacgacctaagagcccaagaaaacataattataggaatgaaagtgcccgtgaaagcctttgtgattctcctcatcagaatctctcaagacctcttctggaaaacaaacttaaagcattcagtattggaaaaatgagtacagctaagcgaactttaagtaaaaaggaacaggaagaattaaagaaaaaggaggatgaaaaggcagctgctgagatttatgaggagtttcttgctgcttttgaaggaagtgatggtaataaagtgaaaacatttgtgcgagggggtgttgttaatgcagctaaagaagaacatgaaacagatgaaaaaagaggtaaaatctataagccatcttcaagatttgcagatcaaaaaaatcctccaaatcagtcttccaatgaaagaccaccatctcttcttgtgatagaaaccaaaaaacctccacttaaaaaaggagagaaagaaaagaaaaaaagcaatttggaactcttcaaagaagaattaaagcaaattcaagaggaacgtgatgagagacataaaacaaaaggcagattaagtcgatttgaacctcctcagtcagattctgatggtcagcgtcgttctatggacgcgccttcaagaagaaatagatcatctggtgttcttgatgattacgcacctggctcacatgatgtaggagatccaagcactacttaatttttaccttggaaacatttaatccacagatgganttgaagaaatgctgttgccaagaatttggaagatttggaccgttagccagtgtgaaaatcatgtggcctagaactgatgaagaaagagccagagagagaaattgcggctttgtggcctttatgaatagaagagatgctgaaagagctttaaaaaatttgaatggaaaaatgattatgtcttttgaaatgaagttaggttggggtaaagctgtacctattcctccacatccaatatacattccgccttctatgatggaacatacgcttcccccacctccatccggactgccttttaatgcgcagcctagagagcggttaaaaaaccctaatgctcctatgttaccgccacctaaaaacaaagaggattttgagaagactctgtcgcaagccatagtcaaagtggttatcccaacagaaaggaatttgctcgccctgatacatcgaatgatagagtttgttgtacgtgaagggccaatgtttgaagctatgattatgaacagagaaatcaacaatcctatgttcaggttcttatttgaaaaccagacaccagcccatgtttactataggtggaagctttattctattctgcagggagattctccaactaaatggcggacggaagattttcgtatgttcaaaaatggatctttttggaggccaccaccattaaatccgtacttgcatggaatgtcagaagagcaagaaacagaagcttttgtagaggaacctagtaaaaagggagcacttaaggaagaacagagggataaattggaagaaatcttgcggggattaactccaaggaaaaatgatattggagatgcaatggttttctgtcttaataatgctgaagctgctgaagaaatagtggattgcattactgagtcgttgtccatcttaaagacaccccttcctaaaaagattgccagattatatttggtttctgatgttttgtacaactcttcagccaaagttgctaatgcttcatattatagaaaattttttgaaacaaagttatgtcagatattttcagacctcaatgccacctatcgtacaattcaaggccatttacaatctgaaaactttaagcaacgggtaatgacttgcttcagagcatgggaagattgggcaatttatccagaaccatttttgatcaaactacaaaatattttcttaggacttgtaaatattattgaagaaaaggaaacagaggatgttccagatgaccttgatggtgcccccatcgaggaagagcttgatggtgcacctctggaagatgtagatggaattcctattgatgctactcccatcgatgatcttgatggagtccctataaaaagtcttgatgatgatcttgatggagtgcctttggatgcaactgaagactcaaaaaagaatgagcctatatttaaagttgccccatcaaaatgggaagctgtggatgaatctgaattggaagcacaggctgttacaacttctaaatgggaattatttgaccagcatgaagaatcagaagaagaagaaaatcaaaatcaagaagaagaaagtgaagatgaagaagatactcaaagttccaaatctgaagaacatcatttgtactctaatccaatcaaagaagaaatgactgagtctaagttctctaagtactctgaaatgagtgaggaaaaacgagccaaacttcgtgaaattgagctcaaagttatgaagtttcaggatgaattggaatctgggaaaagacctaaaaaaccaggccagagttttcaggagcaagtagaacactacagagataaacttcttcaacgagagaaagagaaagagttagaaagagaacgagaaagagacaagaaagataaagaaaaattggaatctcgctccaaagacaagaaggaaaaagatgagtgtactccgacaaggaaggaaaggaagaggcgacacagtacatcccccagcccatctcgcagtagcagtggtagacgagtgaaatccccatcaccaaaatcggagcgatcagagcgttcagaaagatctcataaagagagctcacggtccaggtcatctcacaaagattctcctagagatgttagcaaaaaagccaaaagatcaccatctggttcaaggacacctaaaaggtctaggcgatcacggtctagatctcctaaaaaatcaggaaagaagtccagatcccagtccagatctccacacaggtctcataaaaagtccaaaggaaaaacaaacactggccgtaaattttttaagaaggctgtcacttattggaaatgcgatttgtttttgtgccctgaacggtctgttttttaaaaaaacaaaaaaaatcaaatgaaagagcattccctggggttttttgtttgtttgtgtatgcatgtgtaaactcatgagcaactgcatctgtagatctgtcattggtttatattgtgtaaattactttcattgtggctatttctcaagatgaaatttttattgttctaatggatttcgatcagaaatggtgtataatggatctgctgacagtgagtagtattttgttttaggatgttgtgacttagcaaaaataatacagatgtcttccccccttttgtagctttgacaatttgaattagatttcaaataaaatctgaacagaaaactataatgttgtttttttgccccaccggtgatattaagtcccttaaagtcctactgagtttcacactactgttgtgcttcttatacctgatgcactttataagccccagtgttcaagtagcttaagttttatatttactaagatgactatccaaattaagggacctgagactcctatttggtggtttgctaaccatttgcttttgataagtttctcttgggtaatactaatacccagatatcaaagactaggtagatatggcatggcgttttgttagtggaatgcctggctaaaacatttttttcacagaagcaatatgatttccatacatccaacccatgttctgagcaactacttacttttagggggaaattaaatatcttttcatttcctcttctattatgaaagaagtttatttgtaaaacaaattttctaacaaggtttggccatagaattctcttgtatgattgttgaccttttataatcttctgtaggctatctttcaaacactggcatcagaatattttttataagtttgtgtttaaacagcttagttggtccccccccccactcccaagagacttgggtttagttatagctttaagtaaaatttaaaaataaaatgtttttcaggaaacttcgtatctaatggtttgtaaattcaaggtgcaaaaagttgatttaaaccatttgcagagttgaactctattatgaaaataaatttgctacggtatgaggaagaaataaaacttgtgtaatgttggtcataatactgctataaatataataaagggttatgtagaattgaactgacactattatttgtgaatcttgatttcagttttttatgtaggcacttcatacactggtttgatgggttttttttttcctccctaaaagagaaagtagaaaactattctaacaatggattattttgatttagcttgctttttaaaaaaatcttttcaacttgttttacttaatcttgcctagtcacaaaataagatgtgcacccatggtttggagagttcctatattagctgagcagtgagatacactatttccaaacggtgcacacctacagtagctttggaaatgagccaatcactgttttacttaatggttcttatcagcatgcaaatattgcttgaaagttatttccttattcactgttttgttagtccattttgttaggaaacattaattcctaaaaatttgttcagaataattaaaagtgaacatttggtgctgatactcaaaaacctacaaatgtagccatttaaaaagtaacatgtttttctcccctgctcattgcctgggagaatggaattttatataactacctttctttgcaaaaataacggtcgtgtcgagttggtggtgattttggcattccatcttgcactggtttctagtataggcttataaataattggtcaggtaataatctttccagtcaagttgcaagggatgcttatttctcttcaaaaaaagacatcctgcgggattgagtagaaaattttaggtcagttttgggtgcttatttgtaatatttttcctactacattggagtttagcagttctttttttctggatccagatacaagtgtcatggtttatcttacagtgggtgaaactgactttcttttggttgggtgggtgaggatttcttaggcctgatagaatatatattctgtgaagtttgttaatgtacatattagattgtattggattttttttttttgaattgcaaatggtattattagataggttatttccagttttacttcatgacaaattacctagagtaaacctacttaatactcccatggattctatgaaagtttaatgggatcagaaattggtgacttataagggggaagatattctaccatatttttataatagcttattattcatgtttcttgtctgaaggacactcaagttacagagcaaaatttctataggttgactagaatgttcataagcatggtcttccagttgcaggaaagatcatgttctatctgtggacacttactgtcctctaccacagctacgtgccagagttgttttccacagttcttataaagggcatgacttaggctctttaccctccaacttaatgtttatacacagggattgtttactaggttaatgacatttaactcccctctcttctgtaggtgagagaaaataagtaagtcttgatctgtttcttaccaaagagagacagacctatgatggaaaatgatcacgtctctgaattttttctttaacgttatagttccttattacagatagtaagcatatgggaatttctgagctataacatgttgagaagttagaaattaaaactaacacaacaaaaggcgctgaatcaaaagatctttgcttttatttggctcagaatgtttttggcttttctgctaaagatggcagaaattactctacacagacctgatttttctttattgcagaccattcttgtgggcttaccctgagacttttatcccaattagtgaatcttggagggaatacttgcttatttatgacttaggtatttccccccaaactttaatattcttgagcacttgaaaatacttttgagaaattttaactgtgattaaatttaggtttattagaaatattctgtacacatttgcctccatggtggcgtaagttctgaaaaattatatgaccgtgacaatagtttatcatcatcattattgttattcaaaataagggtaaataaatctctgtattgccaaagtgacttaaactgttctgatgaccacacagtgtgatttctttagcagagaaagttggttttaaaaataaatagtaccacttttctaagactgtacagtttacaaataaggtttttttctttgttgttttcctcttctattaagttttagtgaaaagcctaattacagaaaattgtgcagatactagtgaagatactagtataagtttaaaggaacatgtgactgtaaaatctcacatttacaaagtgcttgatctcttcatatttcacacgcatgttttagaatagattttagggagtgtttaattcattatccttttgacttaaaatttttgttaccaacttcctaggacttagataatatataaataagtacaaatcccaggggaagtgttgtgatgctagactaaaaggtgggaatgtgctgctgttccgtgagccttgttccattgttgaaaatttgatgcctcagtgtttattcagtaccacctcatggagcttcaatgtaaatggattatatgtataattggtaatttgtatagttttgtagattgtagattaaatgcactcatcatgtcacatgtgattgtgcttggagtatttggtggttttattcttttactttcaacggggttcttgtctgttacatctctggtgatttgaaatatcaggaaagacagtttgtcagaaatgagaataatatagttgaaatcagttgggctaaaatattctacagcaagacaatttcttttgggtgaactgattctataatttacttacttttaaatgtaaggattagatttattgttgagctgctttccagatcagactgtcactttatagtttttctatctcacagattctatagttgcaaacaaagcgttgtgaaatttcccttttgttgtttttgacttttaattaatacacagtacattgttttcatagcaaacttaaa

SEQ ID NO: 75132 - DNA, 2036 bp, Homo sapiens
  misc_feature (1)...(2036): n = a,t,c or g
taggctatacacctaattagaaagacaaaccacaacacccctccccaaacacctagtgccatgccagttaactcttccatttcataaactcaatggatagacaggaagggaacaaagagaggaggaaaagcagaacatagaagtaaaacagcaaatgaaggcatctgggacacattttagggaagagagcaaatgaggggggaagacaccaattaactgacattggatagtaggcagttagaacttatctttccgtttacctagcaagttacatcagtgctttatattaaacttgacaaacctactagtttgtccctttcactcttaaatataccatgaggtggttggggagggagaagcaaataaagcagcatgcagggagacgcaaggaagaagtggccaaggagaagaaatggtggcaggaatagttttaaatatcaaggccacttaaaacaagactcagcaaaccaaagctatcacttctgcattaccctttgtcctcaattaactactttgaaaattacagccaagcaaaccacaaacattttaatggtttatgtttggatgatatgtctcctgcacatgcttccaccagaacaaaaaaggaaaaccaaagaagttcctttccacataaggcacaggacaaaattaatcccatttacatattcaaggcgaaaatgagtgttttcctggcttttgtttgtttcttttgctatcacatgtctatagattatagggactcaagcacattatccatgacagaaaattccactgttgtacaaaataaaattgttaattctaactttattcttatacaatttgcagaatagatttgaaatgattgctataggttttaatgttgataagaactgggacctataatacaactgaaatgccagttgagctgagccaagtacattttaaaaatgaaagtcacagacatcgatttttcctatacattttttttgtttgaagaaaatttatgataaagtccagcaagcagtcacagatggaaaggaccaaataaaatagggtgggcttgggatagttaaggatgaggaaacaaaaatatctgtttaggagttaaaaaatgggacagagtgggtttattttggcagcaagaagagaaaaccggggtagtgggatggcaactggatggaacaggagaatggctcagcagcattttgctccttccagcctggtcacngcctcctccactggctgatatctacattttcactgttggggctcctttaacagggggtctttccgaaggatatccttccagctaacgttgaggaacgcccttttccgatgtttaatatttgcttttgcactagtctcaaaaaacctaataccatgctccctttgcaatctgttctccttttcctttaggtacaacctcttttgtcgtccaatatcacacttagtgttcctagcaaccattctttccaccatcattcattggcatgctcatcctatgtttctaaagccatttgcctgatgttttcaaaaccttttaaccattgggtgatgtcatataactagcatgatacccattgcgcctctgtagtaggaggttgtgatggtgtgaaatcgctcctgggcctgctgtatcccatatctgtagcttgatcttctttccttgtaattcaactgttttgatcttgaagtctattcctatggtggaaataaaggtagtattgaaggcatcatccgaaaaacgaaaaaggacgcaggtcttccccactccggaatccccgatcaggagcagcttgaaaagcaggtcgtacgtcttcttcgccattgggaggagcggctcgggctctcgccgccggcggccccaagggatcggtccctctcactacggccaactcctcactcgggcgttctcaggccggaggaccggggaagcgtgggaaaaaggctcgagacggcgcgggcgacctacgaacagctttgaggaagccccgacagtggcggcgtccagtgcctccgagggcggccggggggaggggattaatttaattaaggat

SEQ ID NO: 75133 - DNA, 1773 bp, Homo sapiens; identical to SEQ ID NO: 60561

SEQ ID NO: 75134 - DNA, 3934 bp, Homo sapiens
ttttttttttttggcaatataacatgtctattttattttaaaaaacaaaacccaaaccacctgaccccttccccaggaggctcttgacgaaactctagggaagggcctggctccagccaagcaggggacagtcagaagatgtcaacatggatgccaggctggtgggctccgcccttctccaagccccccatccaccccctttgctcctcggtgctacaggcactgccgggttgaggggacaggcagggcaggactgtgggcatgcagagcctcctggcagccagggagggctgcccgcccccctgcatctggcgaggcaggcagctgtgtgcgcagtgatggagctaggaggaggaaacatgcgcagacaccccgtgttcccgcttccccacgtggccaggagagtgttcaaacacgaacaaggatggctgggcactcagggccccagcccccaacccaggagaggaagaggggggtcccgccctcctggttcttttgttcgtccttagatggatggtgttctcggtgccactcggcagaaattctgcagactgaggcggaggcccgggaggagggcgtgcatccgcagagcccacagggctcggaccctctgcccccagcgacctccattcgctacctgtcgggcaggatgcccaggggtgccgggcacctgatctggatccctggagtggagggaccctgtcttaagccacactcggtggttctgccgcccagggcaggggtggactgtaggctcccgacagcatgacaacagccgtgacagtgtgcctgccggctggcgtgccttcctttcctgcccaccagggacgccaaccagctctgcctcagcaccaggggtctcgggaggctcggccgcggcagagactgtcgctccgctgccaggcgctgtggatgaggctcaaggcatcctcgaatttcttcttgttggaggcttcctggatcgccgtgtgggggaggtccacctgatagatggttttccacccagagttcagtgcagacagcaatcggtccagttcagaagtgcagctcaggtagatgacccagggcgggaggagctgctggctgtcctgggagaactccaagacgcagtactccttgcccggctcggtggagacggcgctgatgtcgcccagcttggctgtgcccaaagagcggaagaagctggtctggcaatcctcatggcacgtaaagaggcggtcatccgtgaggaccaggcagcagggtatgcaggggctgggagctacgccctgggggatgacccctttggacacagcctggcagagatgctgcatccactcggccatctcggcctcgctctcggcacttagctccaggcagggcggatcggagagaatgacctggaaggcgtggggccgatccgtggtgttggctctccggcagccaccgcactgctccccccccatgttcaccgagagcagagggatgacgtcggtgcggtccgggtactggtagaggatcccgttgctgagcaccacgaagcacgtcttccagtgttccttgcccaggtaggaggtgcccgccttgtagtgcagcatgccttctttggtgatggtgccctcggggggtgagcagtggcagggcgtggggcccagggactcgtctgtggggtcctcccagtgcacaaggccgtagaagcgcacggtgacagcagatgcctcacacttcgattcttgggccacaaatttggccagtgccagcttctccatggtggcatccgtcaggatgctggggtagggaggttctcgacagcctttgatcatggctgacttcaaagaagccaaaaagaactcagccagcgccacatcagccgtgtccagcagaaactgcttcctgcggttggtgcacaccagcttcaccgtctgctggtcaaggccaaccgacacatagtcaagttcattgtaagaaacggcctcttccaccaggtatggcttctctgtggcccctttccggagcaggtagacatagcagtctgtgagcagcacgtacagcagctgcaggttgccctccatgtgcccggtgctcatccggatcattttgaacagctgctcttcgttttctcggaacacgtggatcatgagcaggagcaggtgattgttgtctactctgaactccgaggaatggaccatctccgaagggctcccctgtccctcatccaccccagaatcctcagcgctactcagacacgggctgggctggtctcgcttgagctggcagagaacctcctgggtcccaggctctggctcagacacaggcccctccctgaccagggacagctgggcctccagctcctgagcctccctcgtggtatcctctaggggccgaggcgtctgtccctctcctcctcctccctcttcttcttggccagcagcctcagggctactaggaacatgcagcggttggccaagccctgcagggtcatggtggccgccacctgatgtaacagtgcttggactctcgacggtaaagcggtagaagtccattggggctgaaagcccctcactaaagtcgcaaagcggcggcctctccggggcatccccgggagagccggtccgaaaggactggtctgggggctcagcacgggagcaccaggtgctggggtccagctgcccgttgagctggtcgataaccttgctcaggggctgccccaagcgctccatggaggtgtccttcatctcagggatcagcaggcccggctcggagcgctcgctgctctccgtggtgctgctcggcccctctccctcctcctggggggaggcaagcatagtgtctggcgagtcccgcccaaggcttgggctgccgttgcggctgtcaccgtccccctgcttggcacatttcttctggctgcaggcggggtggagtggacttgcctcctcatctgatctgctctttttcttcttgccaattttcttcttcttggtgaccctgatgacctcgagctccgtgcaggcatccggcgggtccagggcctgggcctcctccttctcctgagaggtggtgtgcacgggggtggtgtcagaggaggacacagtctctgccggctcctcgttgaaggggttctggcgctgggtggggctcctggtggaggccttgctgctggtcaggtcggaggctgtggagcggggaccactgaccgtgtctgtgaggtctccatcttcccagtctgtgctggggtacagacggcactgcttggaaacacatctccaaaatcataatcctcactagatggggcaatcgcacttgtcatcccactccaggttggtggaggtgacggagttgaaagagttgagggacagactgtctgagccgtggaccgagctgggaaaggcgtcttcaaagtccagcaggtactgaggtttgtagtagttcggcatgtagggggccaggtctaggtaaggggcatccagatccagctcgaaacgaatgaactctagccccgacaccaaggtccagaagagcgtcaggtgatcgtggctgcagaccagggcattcttgacgtagtacttatgcagcaggcccaggttctcctggaacaaccgcaggtagctctccaaggagttctcgttgagggccaggtacagccaggcacggctgcgccccaggttggtggccacgtgctgcagcacctcgatctgcttgatggcctctctccgagtaaaatgcaccacgagcacccagtagccagaggagaggtcttgcagtccgtacagcagggcgtggtccaggtgctcacacagacgctgtaggaccttgtcatggttccggatggcagggatctcatcctcacatgcagcaaaatagctctgcaacttcttcaccgacagcgagatgttctccaggatccggtccttcacctcccccggctccatggcgctgccaccgtcgccgcacgaaa

SEQ ID NO: 75135 - DNA, 407 bp, Homo sapiens; identical to SEQ ID NO: 60563

SEQ ID NO: 75136 - DNA, 6355 bp, Homo sapiens
  misc_feature (1)...(6355): n = a,t,c or g
attcggcacagggaggccatcaggggctgggacagttcggttattgacactccaagaattaggaagcagacatgaccttttagtgccacaaaagatgaattggctgaattatctgaagctgaaagtgaaggagatgaaaagcccaaactccggagaccctgtgaccgttccaatggctatggaagaactgaatgctttaaagttgagaaaaacctgctagtttatgggtggggccgatggagagagattctatctcatggccgtttcaaaaggcagctaaatgaacacgatgtagagataatttgccgagctctcttagcatattgccttgttcactaccgaggagatgagaagattaaaggtttcatatgggatctcattactccaactgaagatggacagacacgagagctacagaatcatctaggcctatcagctcctgtacccaggggtcgaaaagggaagaaagtaaaaactcaaacaagctcatttgatatacaaaaagcagaatggcttcgaaaatataatcccgagcagctccttcaagatgaaggctacaaaaaacatataaaacaccactgtaataaggttttgcttcgtgtgagaatgctgtattatctaaagcaagaagttattggaaatgagtgtcagaaagtatttgatggagttgatgcaagtgacattgatgtttgggtaccagaaccagaccactcagaagttcctgctgagtggtgggattttgatgctgataagtcactccttattggagtttttaaacatggatatgaaaaatataacactattcgagcagacccagcattatgcttcttggaaagagtgggaaaacctgatgagaaagcagttgctgctgaacagagagcgaatgattatatggatggggatgtggaagatccagaatacaaacctgccccagccatctttaaagatgatatagaggatgatgtttcctcaccaggagatcttgttatagcagatggagatggtcaactgatggagggtgataaagtatattggcctactcaatcagctttaaccacacgtttgaggcgtctcatcactgcataccagcgtactaataaaaacagacaaattcaacagatacaaccgactttctcggtgcctaccagtgtaatgcagcctatttatgaggaagccactcttaatcctaaaatggcagccaagatagaaagacagcaaagatggacaagaagagaagaagctgacttttatagggttgtatctacatttggagtggtttttgaccctgacagaggccaatttgattggacaaaatttagagctatggctaggctacataagaaaactgatgatatgtttggaaaaatatttgtacgcattcatgtccatgtgtcggagggtttgtccgtcttccttccaaaagaagaattggtggatccaaatatttttatccagcccatcacagaagaacggtgcttctaggactttggtatcgcattgaacttctaaggaaagtacggggnacaggcccttcgacatccacagttgtttgaacgcttgaagctttgccatccaaatcgcagatttaccagtctggtgggaatgtggccctcatgatagggatttgcttattggtgctgccaaacacggggtgagccgaacagactatcacattcttcgtgatcctgaactctcatttatggcagctcagaggaactacagtcaaagtaagatggctcattcaaggacttctaccccacttctacagcaatatcaagtagcactttctgcttctcctcttacctctctacctaggctcctagatgctaaaggtattattctagaggagatgaaagttaaaagtgaaaaccttaaagaggagcctcagtcttctgaagaagaatctatgtcttctgtggaaaccaggacactgataaaatctgagcctgtaagtccaaagaatggtgttttaccacaggctactggagaccagaaatctggtggaaaatgtgaaacagacagacgcatggttgcagccagaacagaacccctaactccaaacccagcttctaagaaaccaagagtccacaaaaggggatcagaatctagttctgattctgactcagattctgagagatcatcttgttcttccagatcatcttcttcctcatcatcctcttcttgctcccactctcgatcaggctctagttcttcttcatcttcatcttgttcttcagcatcttcttcatcctcttcctccacctcttcctcctcctcctcctcttcatcttcatcagaagaaagtgacagtgatgaagaagaagcccaaaaacgagaaagtactactcacatgaaagcctatgatgaagaaagcgtcgcgtcactgagcactacccaggatgagactcaggatagttttcagatgaacaatgggacaccagagtctgcttatatcttacaaggtggatatatgctggcagcctcgtattggccaaaggatcgtgtgatgatcaataggttggacagtatttgtcaaacagttctgaaaggaaagtggccttcagctagaagaagttatgatgctaacacagtggcttctttctataccacaaaactgctggacagccctggagcagctacagaatacagcgagcccagtgtacccactcccccaggtgccggtgttaaagaagaacatgatcagtcaacacagatgtcaaaggaaggtggtttgaagttgacatttcagaagcaagggcttgctcagaaaagaccatttgatggtgaagacggtgctctggggcagcagcagtacctcactcggcttcgagagcttcaaagtgcatcagagaccagcctcgtcaatttcccaaaatccataccagtatcaggtacttccattcaaccaacccttggtgccaatggtgtgatattagacaaccagcctatagtcaaaaaaaggcgaggaaggaggaagaatgtagaaggtgttgacatcttcttttttaacagaaataaaccacctaatcatgtttctttaggcttaacctcctcacagatttccacagggataaatccagcactatcctatactcaacctcaaggaattcctgatacagaaagtccagttccagttattaatcttaaagatggaacgagacttgcaggagatgatgcaccaaagagaaaggatttggaaaaatggcttaaggagcacccgggttatgtggaagatttgggagcttttattcctagaatgcagcttcatgagggaagacccaaacaaaaaagacaccgttgcagaaaccccaataaactagatgtgaatagtctcactggagaagaacgtgttcaactgattaacagaagaaatgctagaaaggttggaggtgcatttgctccccctttgaaagatttatgtagattcctaaaagaaaattcagaatatggagtagctcctgaatggggagatgttgttaagcaatctggatttcttccagaaagcatgtatgaacgtattctcactggtcccgttgtgagagaggaagtaagcaggcgggggagacggcctaaaagtggaattgcaaaggccacagcagcagcagctgctgcatctgccaccagtgtttcaggcaatcctttgttagccaatggactacttccaggtgtggatctcacaactcttcaggccttacaacaaaacctacaaaacttgcagtcactgcaagtaactgctgggttgatgggaatgcctaccggccttccttctggaggagaagctaaaaacatggctgctatgttccccatgctgctgtcaggaatggctggattaccaaatctgttgggcatgggaggactcctgacaaagcctacggaatctgggacagaagacaaaaagggaagggactctaaggagtcagaaggaaaaacagaaaggacagagagcctaagttcagagaatggtggagaaaactctgtgtcaagttctccttccacatcctctactgctgcattaaatacagctgcagctgccaacccattagctcttaacccactattactatctaatatactttatccagggatgcttctcactccagggccttaatcttcatattccaactttgtcccagtccaatacttttgatgtacaaaacaaaaacagtgacttaggctcgtctaagtctgtagaagtaaaagaagaagattccagaattaaagatcaggaagacaaaggaggaactgaaccaagtcctctcaatgaaaacagcacagatgagggttcagagaaagctgatgcttcatctggatctgatagtacatcgtcgtcatctgaggattcagattctagtaatgaagactgattcccagactctgcacttaaaatatgaactgattttggattttttctttaataattaattgtaaataccccagtgttgagtgcatcaataacttactggaccgaacattttcagttaatttggtttaggagtgcaaactgctttcagagactttttgcatgtaatatttcttaagattcataagtttctgaactcgtatgtactatcaaatacataaaggtgtaaaattacaacaaaaggcattataattttgttgggggttaattttatgaaaattatgctcaataagagttgtatatttaatatatttgcagtgaacacagaatactttatgcatattactgatttaatttgaatatagttttacagcctccttgacacctataatttacagatcaaaactcagcaataatttgggcagctaatgaatgtcatgaaagctgtagaatctacatcaccatccattgctttaattacatgaaaatgctctagtgttgtgatgcactgctgatgtttccaattcaggtacaagtatgttttaaagaagaaataagtttcccaatcagccaatttaactggctacctgttacctcagctgagttagtttaggaagtttacattcgtttctaattctatacttgttttcaggggttttttttaaacacatcctatatatcatgtcaatctggcaagaaatatgacttgctttttgctgagcttaattcagatatcagtaaaattaagtcataaaataatcatgtgtcatgtgactttggcaccctatagacatacttagttttaacttttcaaagtttggcctcctattaaaaataatcatgcctcacatgagtaatgtctgtttccagggttcagaaaaggcaaactcatgaaatgccactgaaaagaactttcaacacagcatacttcatgtaaaagaaattgtttgtttgctttctttgtgtagatttctatttgtgttttatgtcatggaaatattccagaattaacagataatagtggtaaagtaatatgcagatagtctaaattcattttgagtttctaggtgtaagcagactaaatgttgcccagaatcagtgttgggttatcagtttatattaaatatactgagttgcccgttttgaaaatgcactttgaataatctcaaaaagatgtacaagttatacctgtaaaccacaaaagtgaagcctgaggcttctgttcaatttcatagactcctttaccatgtaaaatttgtctgatatttgatttgtgatacaatttctcctgctaaagctgctattattctgacaaggtagaggtccaggttcacctttatatatatttaaaacaattagtactgaattggacataaaaatattgacattctaaggagagatatatgttagcatttttctggtactcaaataagttagtagtaaagtctgcaagggcataaatttagggggaaaaagtgtcccagttctctcctacagaaaaaatactttcagtatgttttgataaaactgttgctttgtcatgagttagtcaattgtatcaggttttccaagacctttaccagtaaattatgtttctgtatgtaaaataaccccttattagagagacagtgttatatgtatttacaaaattatataagttccattgggattgtattgattttgtattttcccaaaatagtactttgaattgatagtcctttatgcaatgtcttagcaatagtctctataatgcccatccaggagaagtgggtagtaattcttcatcatgaaaatgatatattacatatttagtatcttccctttgcagtattgcacttttgtttaactagaatacacctatgagatagccaaagtttcaaacacagttatcttagtttaccggtggagtatttcaacaccaaccacatttcccttcctccctctaattctacccacatgatctttattccttcctttcgccaattaaaaaaaaaa

SEQ ID NO: 75137 - DNA, 5539 bp, Homo sapiens; identical to SEQ ID NO: 60565

SEQ ID NO: 75138 - DNA, 1123 bp, Homo sapiens; identical to SEQ ID NO: 60566

SEQ ID NO: 75139 - DNA, 2213 bp, Homo sapiens; identical to SEQ ID NO: 60567

SEQ ID NO: 75140 - DNA, 1943 bp, Homo sapiens; identical to SEQ ID NO: 60568

SEQ ID NO: 75141 - DNA, 1917 bp, Homo sapiens; identical to SEQ ID NO: 60570
  misc_feature (1)...(1917): n = a,t,c or g

SEQ ID NO: 75142 - DNA, 1980 bp, Homo sapiens; identical to SEQ ID NO: 60571

SEQ ID NO: 75143 - DNA, 1404 bp, Homo sapiens; identical to SEQ ID NO: 60572

SEQ ID NO: 75144 - DNA, 3864 bp, Homo sapiens; identical to SEQ ID NO: 60573

SEQ ID NO: 75145 - DNA, 2165 bp, Homo sapiens
acggggctgtacgagctggtgtggcgggtgctgcacgcgctgctctgtctgcaccgcacgctcacctcctggctccgcgttcggttcggcacctggaactggatctggcggcgctgctgccgcgccgctctgccgcggtcctagcgccgctcggcttcacgctccgcaagcccccggcagtcggcaggaaccgccgtcaccaccggcacccgcgcggggggtacgtgcctggcagccgcacaccaccggatgcgctggcgcgcggacggtcgttccttggagaagctgcctgtgcatatgggcctggtgatcaccgaggtggagcaggaacccagcttctcggacatcgcgagcctcgtggtgtggtgtatggccgtgggcatctcctacattagcgtctacgaccaccaaggtattttcaaaagaaataattccagattgatggatgaaattttaaaacaacagcaagaacttctgggcctagattgttcaaaatactcaccagaatttgcaaatagtaatgacaaagatgatcaagttttaaattgccatttggcagtgaaggtgctgtctccggaagatggaaaagcagatattgtaagagctgctcaggacttttgccagttagtagcccagaagcaaaagagacccacagatttggatgtagatacgttagccagtttacttagttcaaatggttgtcctgatcctgatttagtattgaagttcggtcctgtggacagcacattaggctttcttccctggcacatcagattgactgagattgtctctttgccttcccacctaaacatcagttatgaggactttttctctgcccttcgtcaatatgcagcctgtgaacagcgtctgggaaagtagtggtcattggttgcataatttgatctgaggcttatggaggaaaggacccaagtgactctgatgtttacaaagcacctatgaaaccctgtacacacctatgaaaccctgtacacacctagttcataatcctcataatttatcaacaaacacaaagaagtgtcttacttgaaagtgagtgtgtgtgtgtgcgtgtgtgcgtgcacacatgtgcacgtttgtatgtgtggaaataaacataaatggggacgtgttggagaaggaaatacatagacctacaactttgagcatatagcagtgatgttttaggaactgaaatgtcacacttaataaagtcttcagcccagctacttccctatttttgtggggagaagagggcctgattagaactgttctggttgtgtttggcgggaggggaataatttttgttcagtccttcttagtgaccaaactttaatttttaagaataatatattgacttactgaactgaagcattctgagttgaaaggagctccagaggagtggagttctgtgttgctcacatgttaaaatcttgctcaccttcagagcagagggaatacctatcttcagatatccgtccattttcatctcttaattgtagtcaaaagtatgacttgagagtgttgctctggtattctgggttctgaagtctggtattctggtattctgggttcaaaagtatgacttgagagtgttgctctggtattctgagagttgctctgtattctgggttctgaagattatttgaaaaataactcctactacattgaaatgcagacttaaaaatttaaacattggattaggcagtcaaaaaaaccaagcaagcataaaaggtcaataagttgtaatcttgatagtaaaggtggaaaacttattataaatggaaagaaagttttatttccttttttgtttgatgggcagtatgccatattatacccaaagttcttttaaaaaatatttccatcaaccatttttatttaaaataaacatttgagggaagttaccaaggcagcttttttcctcaaaagtaacctgttcctctttggaatagcacattttaggggcatggttaatacctgagatttttactcagtaaatcctgatggttactgtgtgtaaaatatctttaagtaggattgaaggcctctgtgggggaataaaatattaccaaagtctataaaaataaattttacatgttctcttttatgacagagagcagcactggttctgttatttttaaaatgaataattgatttcttgataggtg

SEQ ID NO: 75146 - DNA, 6685 bp, Homo sapiens; identical to SEQ ID NO: 60575

SEQ ID NO: 75147 - DNA, 7028 bp, Homo sapiens; identical to SEQ ID NO: 60576

SEQ ID NO: 75148 - DNA, 236 bp, Homo sapiens; identical to SEQ ID NO: 60577

SEQ ID NO: 75149 - DNA, 3801 bp, Homo sapiens; identical to SEQ ID NO: 60579

SEQ ID NO: 75150 - DNA, 368 bp, Homo sapiens; identical to SEQ ID NO: 60580

SEQ ID NO: 75151 - DNA, 8605 bp, Homo sapiens
gctgcacctcccaggggacagtccccacatgattacaaaagccaggtgccctcatcacccgttacccctgacctgtccacttgttttgaataaaccttcattctccaagcagatccccaaacttccttgtccttgttacacgtctacctcacaacctcacaattcaacaacaggtaaatacctggattcactgatttctttactgtccttctctgagggttgggaaggtgggggctagaaaaggctcataatttttaaactcttgggaattaaacttgggaatttctattcctacagtgttttctctgggatttttagctcactgatcgccctagaatagtgtgaactctccagataggtcctgctgtgataggccaggggagtaggctgtgcagtgacggcttagggtaataagtaatggttggaggacaccagcataggagcagagtttagaacttaagaggacaagaaagctgctcagtggctggcgtatagctgtgaaggtaaccaaacaccaaagagggagtctgtcatttttataaggctggaagcgaatgttccttttctaccttaacatacagtttagggggttgcaccaagacaaagtttccaggctggagggtaatacatatccagcgcgagtgaagtccccactccaacatataccctttttgggtgggtaaacacctctttgcatgtggacagaaaatgtttatacttaaacagacatattttgcatatttttatctggagacttcttctagttttatactcttcccacatctatgccaatgccaccattctaaaacttacactccttttctacccctggtcttttccttgtccttccctacaacttggtagaggtccattttgtcttacttcacactttttttttttttaaataaaacacaaaagtctacgtcttggtgtcttatccgtgagtgggaagtggtaagctggtgatggtcccatatttgctatgacaggaacacagaggtggcagcttaggaagctggggccacatctcacaaggcaggacctggatgcactgaatcccccctttgctccagcaactcagccagacatttaggcaggagcactaatgaccctttccatcccacacagagggtatggaacaggagcccctgttgttcccttgcctgtggtctcttaagccagtcatacctatcccaacgccgtctccccctcaggtgtgtagaagggaagatgaataccacagagtcttttgaatctctatcaaatgtggtttttttattcaacaactgacaagcacttttctacagctgcacttgtggaacatcacatggcaaaaacaggagttttttcgctagactttttttttctttttaaccttattaaaaatgagattggtcctaaaaatatagaaagaaataaatttaaattcacaaaaaactgtacattatcaaaaagtcactaaaacaccacatttggttatataaaaagtcccttttgctgtaaaaggaacacagaaacttgttggtgttgatggtgtggtttcttcctgtcaaccagactgatgggagggaagcaaaagggcagggggtgggttgtctttttattttaaacctgctttccctaccaaatactcttgtcatgaagagaaaatccacctagctcaagggggcagtgaagatgaggaaagaaaagcaagaaatggcccctttgatcatgccctatccctaccacccccaaccccgctccagcccccacttcttcaaactgaggctaggaccccaccccgccatatgagtgcctggtccctagggaaagagatggagctgggagaggaacacaaagcaggaaccatggagatttcactcccccatccacctcacaatttcactcccccatccacctcacaatgaaattaatctagcacatcttataccaggggaaaattgccagggggaaaaagcagagcccccaactttaacagtttcaactgtctaacacaaagtttgttacagcgcagttatttagataaaatataaatatttatgcataatataaagtcaattcaaatattcttcaatccaccttttaaaagcaaaaaaaaaatctcaaataaaattaaaagttttgaggtttatctgacagaaaaggcgactttagaaataggctatgagggagaaggggcataaaggaataaaggggctgccccaggacctacactgcccctacccccttcagtggctcttcagtgctgccagaatacaaggaatgctccacctcacctggcacccccaccccccaatggaacatttcttggatgcctcagctctctgcttgggccagccagcagccacctccccagtgcaagtacccgtaatctctgaagggaggggctctgctgagcaggaaaagcagggggccaagtgcccatggctatagctgggagtcagcagctttcctctcgtgttgggggcttaacttggacatagtcacatgtagggcagtgatggacccagaacccctcctccctactctcctgtgctccagggtctctgctgctggggaaggggtcctggggtatgaagtaaatgaagaaaagcccaactaaatgggattaggaaatgatccagttctaccactctcccgtagaagcttaagattcaaagctaccgagaagagagggagttcctgctgaaagattgcacagtctgaagaggctggaacaaaaatgaccaggagagagacacagccttgtctccagagaaattgttcctgtggtttcccaaagacaaaaaagtgatggttttaaacaatgggaaaaatgggaatgaaaacaggtacttggggaaactgaatggatcctatcaaacaatacagggtcacaagcacgcacacacacacacacacacacacacacacacagcgcgcgctctgaggctgacacacacacacacacacacagcgcgctctgaggccgacacacacacacacacacacacacacacacacacacacagcgctctctctgaggccggccccattgctacctggcctccatcttagggtgcacccaaactcagcaatagttgtccctgaggagttcccaagagggtttgggaaggaggtggggaatgttgctgtataggcccatgaagccttcctgccctctcccgagctacgtgagtttcagaaaaggctggaaactcagcatgtgaggagcatccaacatcatacaggggatagctatcggcaggaagatggggacagaagacagggacctctgaacatttttttttcctttgaagggaaaagatttgggagaagagaaaaggagggaggaacccgtacacgatagttttacattattggatgagagaaaatctgaaaactggggggtgggaggtgggaaaagaaagacagcgagaagcagggaagggactgaacatggaagcagcatgtccagggcccggtgtccggcgcgacacacttgggagttaagtccactttactggccgtcactgcgggtccgcacacagtacagagtgtttcttggtttcacacattcactagaactattgctattgttaaataaccccagaatgctggggcacgtacaggggaggagaggaagcagggaggaggaagtagggacgactttccccctccccatttttaattagcaaataaaacagaaaagaaaaattatttttttctttctttttttggcttttagtccagaaggacctcatctctgcacctcttacttgaggagcaagaggagggaagggagaaagggatgtaggaataagaggatgtggggcactgccaagggcaaggtcaaaaatcagggttgtatctgacttgagtctggacccagggcagcatcagcaggtgaaaatggcaggtttttgtttggaaggtgggggggagatgccacaaggtgactccccacctcccttgcctcacagattggccctgttttccctgataaaactcctcccagcggctcttcgaagaagcggcgcatgatgtgcccagccttgcctacttcagagtcatcctcgttgaaagtctggcagttgtcaaataccaggagggcatcagccgcaaactcctctgagctggtgtaccctcccctgagcagccgctcccgcatggtggaaaaatccataggatttttgatgatgcgccggtacccactcaccaaacgtgggttcacaggctctaggaaaggccaggctgcatcatgggactccatctccatcaggataatctcgcaaaatgtgagatcactgtggtggttccgcatagagagtcgccgccgcttggagggggagagcccttcttccgagtaccgaggccctgctgctgggctttctcggcccctcaacagtacccggcgtcggcggccatcaccctctgagaagttcagcgaataaccacttttccgcttctggccacgctttgggaaaccaggcttctgagtgaattctccctccacctgctgagccaaacagacagtacagaaccaatctccttctgggacagcctccatcttgggacgatggcagtaaatgtggcagccacggtcacacccatcacaaagcagaagaaactcatcattgtcacccttccggcagactagacatgtcactttgttgacagacttctcccaggcaatggacctctccagctggcccaggcacaagcacacctgggctgcgctccggcaccgctcgagggtctggcgccagacacgaatgcgaggggtgatctcatatgatatctctgtagtggtgccctcaggggcaccattaggtgtgctaagcagggccttctccagcacaacctcatgagttggccagaggggctcccgcaggtaccgccgttctacattctgttccagggcagccagccgcatcacagccaggtccaaagggttggtagttttacgctgaggtgccagtccctccctgccccgacctcgccaggtgatatcctcctgggagtcggagaggtgctcacagtaggccaagtcttcacgggtagagtctgggctaggacatgtccagccccgaatctgcagatcagacatgataacccgctgctccagctcctctacccattgaagcactgctaggtctgtctcgtatgtcttctctttgggggaccagctcataatcccttcttgaaaggcaggtagttgcctgggctcaaagatggggtcagctgagggccgcaggcagacttcctgcaagaagtccctgtgcttgttaaggtgtttgtgaagtgccttctcccggatacctcgggggtgtagggccttgagcatggcatccaacatctcaggatctcgtatccaccaccagcctgagcacatctcaggtgggacaggctgggctgtcagctgggttaggtaacgctgttccatctgtttgaagaacttactgggaggtctccctctccgtttgggctgtcccagccctgtgggactctgtggcatttctccagggtctcctgctcgcctcttaggggccaacccagccaagggcgtggaagagaactgcactggagaacaagggttggcagcactaggtctattcattggcttggaggaggcaagctgctgaggggagggagtgggttggtcctcagaaactgcagggggcggtgtgggggcagcattgcagggcatctgggctgagatgttaaaccagagtgcttgaggatcagggctggattctgcctcatcaggctctggctcctccgggggttgtgatggagctgggtctagttttcccggactgctatcaggtgtgaggactgagctgctcaacagggagctatggctctgagtctggctcagccaagacaggaaggctgactggctgaggtcatgctggctctgacccagtgacaaaggggagccttcttgctccaggaaccccttatgggactgaagctgaagctgaagctgaggctggggctgggcaggagcatgaagctgagcctcaggctgaagctgggcctggggctgttctgaatcctgacccctgacaggggacttaagatgcctaggttgcatagacccgggcttagtttttcgaggtcggcctcgggcccgggcaggagaactggcagtggtgttggagccagctaactccatcttcatagagaagagggcagggttgagtgacgcatgggctgccacttttaaggagtcagtttccttctttatcacctcctcaggaactaagttcccctctgttccttctacaaagataccagccaaatacggcaatacccagtagcgacgtctgtagcggtcctgacccagggagaccgcccgaagcatctgggatgagtgaagcagctttttgcgaaagaaaagctgacgcttgctgagtttttctatctggcgctctagctctgggatgctagatgctgtggcatcaacctctccatctcttcgacccctgcggccagggacagctgctatagactcctcttcttcctcttcttccatgccactggtcacctccatgatccgagaactgcgcctccgtcccaggcattcctctggcccttccatctctacttcagaccgcccagttcgcttggccagaacagttttcagcctccggagccggccttcaacaatccacttgtttttcctgtagctggacatactctccagagtcttgtcaatctcattgatgatgagggtggagccattgagctcatgcacaaggaaggccaggacagcagccttctgctggggtggctgggcctgaaaaggctgggtgcgcaggcggtcacagagggctggctctactccatatgccataaggaagcagcgcaggatctctgacacattgtctcttgtcagtgggatctcagacaccttctcccccaagatctttagggactgacagtaggagggaaagccaggatcatggagtgcagccttcagcagcctgaccagcaggtcttgcacctcacccaagctgtcaccttgacacaggagtccctcctgcaggacccccaggctaggcacatctttggcaggatcaaagcccagcaccttgccaaagctatgcaggaactccacaatggtcaagcagtctgagaaggctccactgggcaatgtcagaccagggactcgtgagaagtcaggcaggggctggtggtcagtcagacacatatcctctgtcggcttcttcatttcctccaagatcatctgctgcctctgccgttcctccaagcgcctctgtgtggccagggtcttatctgctttacaggctggcttggctttggtcacctcctccttttccttcatttttaccttctccttcttttccctcttgactttttccttcagtttttcctgctttgtctttcctttttctttctcagccttggatttcttcttagcttccttctgctttaagctcttggtctcttgtttccgcttatttctggcctgcccttggatagtagtctgacactctccccgttgaaccttctgcctcatcttcttcttgcttttagcaatctttgctttatcctcctcattcaatgtttcttgggcctccagtttctttagggggcggttgtctgtcttgttcaatagctcagtgattttgaccttaggtggccgacctcgaccccgtttcaccttggggacttccttagtcctagccttctcagtgtttcgaggtcgaccccgtttgccagtaattgcctgaatcctcgacgggatctcctctgctgagagctgcacccactgcaagccctctggcgtgtctctttcttcaaagaaatctccaacaggcatacggggactgaagctgaagtgctctcggcggacactgtgtaccacgttgcggctcaggtacttgatcacttctggaaattgcttcatcctcttcccacaggggccataataccaggtctccccctgccatcggtggctgcccttcttgatgcgcacctctctccgccacccatgttggaggggaagacgaacttcttctggggtagcaatacgtctcctcatgacatcaccactaccagaagcagtgagtccttctccagtgatctcttccacgtcagcagtggtttctagaaagctgctgacatccttatttgctggggaggctgttggaaaggcagctgctggggaagttacgggagaggcttttggggatgtcactgaagccgtcaacgggacttctaaggagactgctgggaggactgctgaggaagctggagagaccactgagaagactgctggagagacaactgtagaagctgcgggacaaacttctggagagatttctggggaggctgctggagaaaccactagggagactgctggggaggttgttggcgagactgctggtgaggttgctggatgtagctgaatagtggatgactgatcaggagctggctgggtcagggatggtgggaagtctgaagattgagtttccatttcttcctgttcagcgtcactaccattattcaggtcaaagctgttatcttgcaggacagactcccctaggacaggtggagaggtgggactggcaaagatagaggttgatgtttg

SEQ ID NO: 75152 - DNA, 2632 bp, Homo sapiens; identical to SEQ ID NO: 60582

SEQ ID NO: 75153 - DNA, 2018 bp, Homo sapiens
cgttcgtgcgtcctagttccagtacagcgtggagggtttaggcagcgtgttctgattctttgcgggacggcgagcgcatttgtgctttgcccgccgcggcctaggaggccttttgaggccgcgtagtcggtgtttttgaactgactctacagcttctggcaggccgtgcggcgccctgacccggcctcaccatgttggtgctgtttgaaacgtctgtgggttacgccatctttaaggttctaaatgagaagaaacttcaagaggttgatagtttatggaaagaatttgaaactccagagaaagcaaacaaaatagtaaagctaaaacattttgagaaatttcaggatacagcagaagcattagcagcattcacagctctgatggagggcaaaatcaataagcagctgaaaaaagttctgaagaaaatagtaaaagaagcccatgaaccgctggcagtagctgatgctaaactaggaggggtcataaaggaaaagctgaatctcagttgtatccatagtcctgttgttaatgaacttatgagaggaattccgttcacaaatggatggattaatccctggggtagaaccaccgtgaaatggcagctatgtgtcttggattggctcacagccttgtctcgatatagattgaagtttagcgctgataaagtagacacaatgattgttcaggccaatttccttgttagatgacttggataaagaactaaacaactacattatgcgatgtagagaatggtatggctggcatttccctgaattaggaaaaattatttcagataatttaacatactgcaagtgtttacagaaagttggcgataggaagaactatgcctctgccaagctttctgagttgctgccagaagaagttgaagcagaagtgaaagcagctgcagagatatcaatgggaacagaggtttcagaagaagatatttgcaatattctgcatctttgcacccaggtgattgaaatctctgaatatcgaacccagctctatgaatatctacaaaatcgaatgatggccattgcacccaatgttacagtcatggttggggaattagttggagcacggcttattgctcatgcaggttctcttttaaatttggccaagcatgcagcttctaccgttcagattcttggagctgaaaaggcacttttcagagccctcaaatctagacgggatacccctaagtatggtctcatttatcatgcttcactcgtgggccagacaagtcccaaacacaaaggaaagatttctcgaatgctggcagccaaaaccgttttggctatccgttatgatgcttttggtgaggattcaagttctgcaatgggagttgagaacagagccaaattagaggccaggttgagaactttggaagacagagggataagaaaaataagtggaacaggaaaagcattagcaaaaacagaaaaatatgaacacaaaagtgaagtgaagacttacgatccttctggtgactccacacttccaacctgttctaaaaaacgcaaaatagaacaggtagataaagaggatgaaattactgaaaagaaagccaaaaaagccaagattaaagttaaagttgaagaagaggaagaagaaaaagtggcagaagaagaagaaacatctgtgaagaagaagaagaaaaggggtaaaaagaaacacattaaggaagaaccactttctgaggaagaaccatgtaccagcacagcaattgctagtccagagaaaaagaagaaaaagaaaaaaaagagagagaacgaggattaacagaaaggaattacgattatatcacccggacacacatcatgcttaagattcaactgggagcataccagggatgctctctaacgtaatcaagggaaggttcagtaagacaaagtgatttatcatctataacttcaaacctatttgtcttgacatcaactctgttaaccttatgtcatcatttcttagagtctttgatatacaaataaaattttctttgtattttaaaaaaaaaa

SEQ ID NO: 75154 - DNA, 4509 bp, Homo sapiens
gtcttgaagtgccactctatattttatttcccagttaaccatgtctacattttctaagatcagtatattgttttctttgttatcatcattaggctccataatataattttacatcatatattattaaacatttatgactacaagaaattcttgaagctacttctacatgtgatcatatcaaagtataaattttgctaacaagacacgctgtgtaccaccttacagatttatagtttatgcggcagagttagaaatctgtgacaagtcctaacacttgtcacatctcaatgtggttttccttaaaaaaagcagccaatatccatgtaaacagtacattgtgagatgtaaaatttgattgatagctcctaaatatcatcccaaatatacacaaattaaaagattattctaaatgctttttcatcttacatatccaagaaactcataaagataacattataaaaggcaacatttgttaaaaggccactgtggttaactttatgtcactggagtcaatactgcagccactgtcaatttcctggatggttgaggttagaagttgattctttcaaggcaaacatcaagtaattcgatttgtctagatgactgaacagagagaattcttagccactcctttcaaatggattgttcaggtcaagttactttaatgccaggtcagtcagggaatcagagaccttggtgttgacctgtgcagaaagactcgcttgtgtaacgttgagatagatgtcatactgctggtccaggccaaggtagcagtcactcatgaaatataatgtgtagatataccttccaggtatttcaggggtataaaaagaaagggaagcaacatgatgatttcgaatatatcctactcttttcaaagcaataagttctctcttatccacttctcctaatatcaaaaaccatccttcgtcttttgatttgggaaatcgaggagtaactgcacagctctctggctttcccttgtggaacccaaagtggactctctgcaagctcacttgaagcacatactcttggtcagcatgcaatttgatccatttgttgtcatctcgtttgtctgcagtcagagttgagacagagagttcattatgtccttcaactaagtcatcccacgagcctttaacacttatgccaacatttatctctggcaagtgagataagaaattccatgcctgtttcgtttttgcagcatgtagctcactttctaccatggagctaaatacatggtctttccctccacaggcatggatcagttcaggaaggcactcgatggaggtccgacccctagcatgtgggcccttcataatcggcttccatttcttgaaaaggtgaagatgatggttttctatgtttggtagtgtaagaagagaagagtcctttaaccaccgaccctggatcaccatctgaatcaggttggtgatattcaggacagtcaccagccagccctggtttgcagccacgtccagcattgcctgacatactctgagagcttggtccaagactgttttggtatcagtgtcataatctgggcagggtagcatggctcggctgagatgtgcctgtagcaggagatgtgctttggtgtgagggctgtcaaatgaatgaggatttgattcaatgggaagacattttgccagttcactattcatatgatcttcattgtgtctcactggcaaatctgtatattcttctgcatcacttagaattgaaagcagttcttcagtactgcattcaggcttcaagcggtccttgaacattttaactgtttgatgcttcaaatagtaataggaggcaattcggccataagttagaggttcaatgctgcgattatcctctccaatttcaatacagtaggaaagttccaattcaatcagggacttctcaatcagatgggacagaaacttgttcacagaatcatggctcacatcacccaaattgtaatagctgggattcatgataagacgtcggaaaaagtaagtccaggtgatataatccaatgcatcttgcttagatgtaattgtaccaccagcaatctctgcatttaagtggtcagagagcactcctaataaacttgattctactgggaaaggttcataaagaaattttttataaaagtctttctttatgtcatgaactagaattacagctttgccttggtcatcgaactgcggcctcccagcacgccccatcatctggaggacatctgtaatggggaaatccacataacgtcttgtttttccatcatagtattctgttcccttaataattactaaatgagctggaaagtttacaccccaggctaatgtgcttgtagcaataagaacctgaactttacagtttacaaatagttcctctactgtttttcggtccctctcatgtagtccagcatgatgcattcctatcccgaaagcaagggtcagcttgaggttggaatctcttactgttgcaatgatgttctccatctctctttcatccatgtttaaccactgctttggatcttcttcagtagccaggaaggcgatcaattccaaagcagtaagacgagtttgacgtcttgatgagacaaatatcaaaacaggtttggctggagaatggcttctaattgcctgaaatgcaggcttgttcatactagccatacgaggacagtaatgttgacctggaaagccttgaatgtgaacttccagtggaactgggcgtactgatggtcggaagttaaacaagcccatctgcttaatattgagccaatcagcaaggtctctggcattagctaatgcagtagatagtccaactattctaacaggcttttctgtgtgtgatgagataaaatttgttcgagatacaatgacctctagaacagggcctctttcctccccaagcagatggatctcatctatgatgagaatagtgacttgctgaacatagttcctattttgccagcttctgctgactccatcccacttctctggcgtagtgacgataaggtcagccttggcaatggatttcatatcaggagtcacatcccctgttagttcaataacttttttaccaagtttttcttctattctaactttccaatcatccattctttcacgtactagggcttttaggggtgcaatatataccgcctttgaagtagggtatttgttgaagactctgaaaatggctaattcagctgcaacagtctttcccgatccagtaggtgctccaagtaggacattacaatccgtgtgatacaatgtatgaaatatttgtgtctgtacagggttaaagtggctgaagttgtacagggcttcatatgctttacatcccaaagctgtgattggtaaaggctgaagatccagtaattctgtatgaggaggatgtctctctggtagaattagatgttgaaagttgataatacatactgcctcagcacccaaccatctatcagacactgctcggatgtagtattgggaaggcaaaggctcaaaaatagggattgtaaataccagtagttgggcttctttactaatgacttgtttttttagagctagaaaatactctgaatgataaatatgatcatttgtaggatcttctacccaaatccaccaaggttctcctactgtcccatgtacctgatcattccaagtgaaatcagcatagatgctgagtgtcactcggaggacagtccttgtgataggctgaatgaatgcttccatcataacagaaggaatctgatgaacacattgtttgaccttcagtccaatattcacatgatgtaaaatgtgacctatttcatctttcctcatgtctttcagcttatccacagtaagctttttttcttctaatcttgttagcatgtgtggtggtaggattgaaaattgtctcaaagggctagcccaaccccaaagcctcttgtcaatggctttactaagattcaggagcctgtaggtcatggtaggccaacgtttcctcagagcaatttcaaaaagagcacggacaattctagctgcattctgtgcaacatatgcagaatctgatataagggagaaactgtccatttctcctcggttgatataagtttgaagtaagatgtttattttcccataactattctctacacctccaggagtggagagttcacaaaaattgcttaataaggtatctaactcctctatttcctcttctctgaccttaatttgatcaaattcttcagctttggagactatggcaaagatatcaccttctgttttgtgagcatcaaagagttcattaaaggtctcaatggtgttgtatttaatatagtaatggctggcagttctacccaaatcagttgaggaaaaatatccagttcgctcctcaaaacgaatcatctgagcttttgtctagttttcgtccaaccttcaatgaccaaactgttctcgatgctttctttaatggtgggtcaatctgataagccttgtgactgatgccatatgctaatggatttgctctcattcgcacataaagata

SEQ ID NO: 75155 - DNA, 3783 bp, Homo sapiens; identical to SEQ ID NO: 60585

SEQ ID NO: 75156 - DNA, 2799 bp, Homo sapiens; identical to SEQ ID NO: 60586

SEQ ID NO: 75157 - DNA, 2465 bp, Homo sapiens; identical to SEQ ID NO: 60587

SEQ ID NO: 75158 - DNA, 1484 bp, Homo sapiens; identical to SEQ ID NO: 60588

SEQ ID NO: 75159 - DNA, 2821 bp, Homo sapiens
  misc_feature (1)...(2821): n = a,t,c or g
ccagggggcaacaggagcagcagctcttcttgcaggaggtgcatttgcactttttgcacttgcaggagccggcgcaggcgcaggagccaccagcctcgcaggagcagttggggtccattgcaagccgaggtgagactggagttcccaagcgagaagagaagaggcagtggaacacgtggagggcgtggagggagcacaggggtggccagcgtagggtccagcacgtggggtggtaccccaggcctgggtcagacagggacatggcaggggacacaggacagaggggtccccagctgccacctcacccaccgcaattcatttagtagcaggcacaggggcagctccggcacggctttctcaggcctatgccggagcctcgagggctggagagcgggaagacaggcagtgctcggggagttgcagcaggacatcaccaggagggcgaagcggccacgggaggggggccccgggacattgcgcagcaaggaggctgcaggggctcggcctgcgggcgccggtcccacgaggcactgcggcccagggtctggtgcggagagggcccacagtggacttggtgacgctgtatgccctcaccgctcagcccctggggctggcttggcagacagtacagcatccaggggagtcaagggcatggggcgagaccagactaggcgaggcgggcggggcggagtgaatgagccctcttcttctttttcatcccggtcacttttggttacaggacgtggcagctggttggacgaggggagctggtgggcagggtttgatcccagggcctgggcaacggaggtgtagctggcagcagcgggcaggtgaggaccccatctgccgggcaggtgagtcccttccctccccaggcctcgcttccccagccttctgaaagaaggaggtttaggggatcgagggctggcggggagaagcagacaccctcccagcagaggggcaggatgggggcaggagagttagcaaaggtgacatcttctcggggggagccgagactgcgcaaggctggggggttatgggcccgttccaggcagaaagagcaagagggcagggagggagcacaggggtggccagcgtagggtccagcacgtggggtggtaccccaggcctgggtcagacagggacatggcaggggacacaggacagaggggtccccagctgccacctcacccaccgcaattcatttagtagcaggcacaggggcagctccggcacggctttctcaggcctatgccggagcctcgagggctggagagcgggaagacaggcagtgctcggggagttgcagcaggacgtcaccaggagggcgaagcggccacgggaggggggccccgggacattgcgcagcaaggaggctgcaggggctcggcctgcgggcgccggtcccacgaggcactgcggcccagggtctggtgcggagagggcccacagtggacttggtgacgctgtatgccctcaccgctcagcccctggggctggcttggcagacagtacagcatccaggggagtcaagggcatggggcgagaccagactaggcgaggcgggcggggcggagtgaatgagctctcaggagggaggatggtgcaggcaggggtgaggagcgcagcgggcggcgagcgggaggcactggcctccagagcccgtggccaaggcgggcctcgcgggcggcgacggagccgggatcggtgcctcagcgttcgggctggagacgaggccaggtctccagctggggtggacgtgcccaccagctgccgaaggccaagacgccaggtccggtggacgtgacaagcaggacatgacatggtccggtgtgacggcgaggacagaggaggcgcgtccggccttcctgaacaccttaggctggtggggctgcggcaagaagcgggtctgtttctttacttcctccacggagtcggcacactatggctgccctctgggctcccagaacccacaacatgaaaggtgaggggcttcctgccacacttggggtggggggcacgcgagaggagctgagtgggacctcactccttccccatccacagaaatggtgctacccagctcaagcctgggcctttgaatccggacacaaaaccctctagcttggaaatgaatatgctgcactttacaaccactgcactacctgactcaggaatcggctctggaaggtgaagctagaggaaccagacctcatcagcccaacatcaaagacaccatcggaacagcagcgcccgcagcacccaccccgcaccggcgactccatcttcatggccaccccctgcggcggacggttgaccaccagccaccacatcatcccagagctgagctcctccagcgggatgacgccgtccccaccacctccctcttcttctttttcatccttctgtctctttgtttctggagctgagctttcctgtctttccttttttctgagagattcaaagcctccacgactctgtttcccccgtcccttctgaatttaatttgcactaagtcatttgcactggttggagttgtggagacggccttgagtctcagtacgagtgtggcgtgagtgtggaggccacctttgggcaaagtggctgtggcaggggcccgggcggcccttccatctggggccgggtgaatggggcgccggctgtgtgccgaggcctcaccctgccctcgcctagtctggaagctccgaccgacatcacggagcagccttcaagcattccattacgccccatctcgctctgtgcccctccccancagggcttcagcaggagccctggactcatcatcaataaacactgttacagc

SEQ ID NO: 75160 - DNA, 4829 bp, Homo sapiens; identical to SEQ ID NO: 60590

SEQ ID NO: 75161 - DNA, 1801 bp, Homo sapiens
ttttttttttttaaaccacaaatgggggatttatttctgactctcagcccgtctctcacgaagacagagcctattgaccaaaaacttcaggatctgcatctgagcagatcccaggaaggggaagtcaaagggcccaggtcagaggcccaagttcagacttcagcagcagactagggtcagactttaccaaagtcagaactcgaggttcatgtaagtccttagatcccgctcccaagccctgtctttcttcctccctccttctctcctccctccagctcagtgtggccacccgagggggggatctccctcccagccacagctcgggtatcccaagctgggaaatgtgtcactcggggctggggtgctgatctgtagcctagtccttcctggtccctcttgaggacagtggggatgggattggcacggccctcaccccggggtcccagccccattcctggctcccagccccccctcagcagcagtttgaagcccgggctggagatgggcaccccaagtggaaggttgggaggctgaggaccctgcgacagtgacagcaggtgagcagtggatgtgcggtggttggaatcttggaagtgggtgtcacagttctcgcagtactggagggagggagtaggagaccggttttccgggctccttgtctctccatggctctccctgaccatgcgggctacctcagggaagccagcttcttcagcgagctgagccgcatccctgccactcagctcacagacccccacccaggcagccccacggcccaggagatagctcacagctgccccctggcccgctcgagcagcacacatcagtggggtccaccagaaggcatcccgggcgttgatattccccccagctcctcctgcctcatgcggttccagcagtctcctaagttctggcaggtccccctcctgggctgccctcagtatccggtgagtcatcttatcctcagcctcaagggatctcccttgtccatgtcttcctgatgctccttctgccactgcttctgctgctggtgccttcattattcttcttttctttctctttctttctctggcaggttcagtctgagatctctgggagtcaggagcgctgctctcatccccaatcagggcctcatagaaagctcgggctgcagccccatccagggtggactctggcttctcgggctgtggctgctgctgcccatccttccagaggtcgctggggtcagtggctggggtgaaggtgatgagcaagggccgggacatggcttttgggagaactgagaaaatgataccaggcaagggaaggatgagacaagtaagccaagctcgtggtgaccctgtagcaaccacagcctcagagaccagtaggaaaaaaaaatcagcctggccctttaagtcttccgcgatcccatttcggagtttcctcttcccaaacaaaaatagatgggtcactccctagaagatctcggggagagtctcctatacgtgttgctgtgtagcttccgtaccgcaaaatggcgccattctctcccctcatgaggcaggagcccggaggaaacagtatgcccgtcaagggtctctggcgggactgattcgcactaggggcccaacaggcaataaggacccagcggattggccgaggataggccagtcccctgggcagcagcgccgcgccgggactagaggggaacgtgaggagagctgcggaaagagatccagcctggctccctcctttccccgccctaagtcagcctcttcacccagtgagcacaaaactgtattgcccagactcccgggcc

SEQ ID NO: 75162 - DNA, 2461 bp, Homo sapiens
agatacgtattgagttgtgtagctcaggaatactgtgttcccaactaaataccttccacaaaagtgctattaaaagaagctgtacctctgaagataaagtgggccagtctgaagctctatctagagtccttcaagtagctaagaaaatgaagttgatttctaatggaggagattctgctgtagaaatggatcggagaaatgtgtctgaatttaagagtattaaaaaaacatcattaataaaaaactgtgattctaaaagccagaagtataattgtttagtcatggtgctatctccatgccatgtgaaggaaataaacataaaattcggaccaaattctggctctaaagtgcctttagcaacagttacagtaattgatcaatcagaaactaagaagaaggtttttctgtggaggactgcagcattttgggcatttacagtgtttcttggagatataattttactcacagatgttgttattcatgaggaccaatggattggcgagacagtactacaatcaacatttagcagtcagttattaaatcttggggagttattcatctattcagcctgaagaatattcccagtgtagtttgtggaagttgtacttcaagacttactggccatatgtgtcccccaaaacattcctacctcagagatcttccctccgagggcagccctcagagggtgaacagtatagactttgtaggaattgggagcaccttcaacctgatgtgttagtccacgcagtactaagagttgttgatttcctatactgacagaggcagtatacagttatagaggacagaagcagaaaaaagttatgttaacagtggaacaggcccaagatcaacattatgcgcttgtattatggggtcctggagcagcctgggtaccctcaacttcaaaggaaaaaaggttatatttgggaatttaaatatctttttgttcagtgcaattacacactagaaaacctagaattgcatacaacgccttggtcatcctgtgagtgcttgtttgatgatgatataagggcaattacatttaaagcaaaatttcaaaaaagtgcaccctcctttgtgaagatatcagacttagcaacccacctagaggataagtgttcaggagtggttctgattaaagcccagatttcagagctggcatttcctattacagcatctcagaagatagcgctaaatgctcacagttctctgaagagtattttttcttctcttcccaacatcgtatatactggctgtgcaaaatgtggattggaactagaaacagatgagaacaggatctacaaacaatgttttagctgcttgccatttactatgaagaaaatatattataggccagcgttaatgactgccattgatggaagacatgatgtttgtatccgtgtagaatcaaagctgatagagaagattcttctcaacatttctgcagactgcctcaacagagtgatagttccttcctcagagatcacctatgggatggtcgtggcagacctgttccactccttgttggcagtcagcgcagaaccttgtgtattaaagattcagagcctttttgtgttagatgaaaacagctatccattacaacaagatttctccctcctggatttttatcctgacattgtaaagcatggagccaatgcccgtctctgaggccagaggaagaaattgcaggcatttcaaggaagaagtactgaaatgatttgtcttttgaaataaatgaatgacagggcttttgctttggattttttatgaaatatattttacaaagagaattgcactagatatataaattaaaacttttttctaagaaaatcctgtgaggtttaaaaagattgtttttgtcttttggtttcttcctttctcctggagaaatgatctaccagtcaaggcaatatgtagcagatccctgggaattaaaggtttgcccatttgttcactgtatttagtccctgctacattccaggcattgtactaagtatggggaaccacagagaagacattccctcagaaactgctgcagtgctttcgcttatccctacctaaaaaaccgtcaatgtgaaatcatttccttgattataactataatgataatggattagtttatataaacctatgtttagacaagttcaagacaagcgtgtctttctataaaaagtattgaaaatgaaggaaatgagatcatgtttcaatttattaaagcagggaagagcattctgtggttagttcgtgtctaggatttgagtgccttactgaatgcatttaccagcaaacatgtagcaatctgttctctcattgtgattgtggaagaagctcatgtaaaatgatagtcattaatgaggaagtatggcgtggtacttattctgtaagttcagagtatgctgagtgttaatagattatcatattgcctgaaaataaattcatgatgacatgaacaaaaaaaaaa

SEQ ID NO: 75163 - DNA, 2083 bp, Homo sapiens; identical to SEQ ID NO: 60592

SEQ ID NO: 75164 - DNA, 766 bp, Homo sapiens
ttttttttttttaataaaaccataacaaatctttcattaaagatctactgagaccttggctgaaatcatctattattgttgctagttagcctctcttctatagttgggtaatgtgtgtcttgccactgtgtttgccagctctcccaagtgaaaagaacactttttataaaaaaattaattgctccaagttttcaggcccaggggaggctctcccattctcctccttcaataagtcccgtccaggtaagaggtgatcttgtggataaattcatcatacttcactttgccattgggttcgatatctgccttccctgaagagatcatcccacttccttgtgggtgagcttctcccccagactcgtgagttttgaccgcaggtcggacgccatgacgtaacctttcttctccttgtccaccatcaacatggctagaagaatttctttctttgggtcttcttgttttatttgcatgtgcataatggtcagaaaagtggagaaatccagctctccatttccgtctatcccgtgggtctgcaggtgccgctgcacctcccctggcgtcgggctggcccccaggcacctcatggccaccatgaggtcggtggcttttatcttccccctctgctgcttgtcatacagggagaagcattccttgtactcattaatttggtcttgggaaagaaacttggccattctggggcctcagctgctacccgtgggcttgctgctcccagaaccgcgttcagttccctttcctccctcgtgcc

SEQ ID NO: 75165 - DNA, 412 bp, Homo sapiens; identical to SEQ ID NO: 60594
  misc_feature (1)...(412): n = a,t,c or g

SEQ ID NO: 75166 - DNA, 3577 bp, Homo sapiens; identical to SEQ ID NO: 60595

SEQ ID NO: 75167 - DNA, 2626 bp, Homo sapiens
gccgtgggatcccggataggaggaggaggggacccataggacgcgttaacatggacctggaaaacaaagtgaagaagatgggcttaggtcacgagcaaggatttggagccccttgtttaaaatgcaaagaaaaatgtgaaggattcgaactgcacttctggagaaaaatatgtcgtaactgcaagtgtggccaagaagagcatgatgtcctcttgagcaatgaagaggatcgaaaagtgggaaaactttttgaagacaccaagtataccactctgattgcaaaactaaagtcagatggaattcccatgtataaacgcaatgttatgatattgacgaatccagttgctgccaagaagaatgtctccatcaatacagttacctatgagtgggctcctcctgtccagaatcaagcattggccaggcagtacatgcagatgctacccaaggaaaagcagccagtagcaggctcagagggggcacagtaccggaagaagcagctggcaaagcagctccctgcacatgaccaggacccttcaaagtgccatgagttgtctcccagagaggtgaaggagatggagcagtttgtgaagaaatataagagcgaagctctgggagtaggagatgtcaaacttccctgtgagatggatgcccaaggccccaaacaaatgaacattcctggaggggatagaagcaccccagcagcagtgggggccatggaggacaaatctgctgagcacaaaagaactcaatattcctgctattgctgcaaactgagtatgaaagaaggtgacccagccatctatgccgaaagggctggctatgataaactgtggcacccagcttgttttgtctgcagcacctgccatgaactcctggttgacatgatttatttttggaagaatgagaagctatactgtggcagacattactgtgacagcgagaaaccccgatgtgctggctgtgacgagctgatattcagcaatgagtatacccaggcagaaaaccagaattggcacctgaaacacttctgctgctttgactgtgatagcattctagctggggagatatacgtgatggtcaatgacaagcccgtgtgcaagccctgctatgtgaagaatcacgctgtggtgtgtcaaggatgccacaatgccatcgacccagaagtgcagcgcgtgacctataacaatttcagctggcatgcatccacagagtgctttctgtgctcttgctgcagcaaatgcctcattgggcagaagttcatgccagtagaagggatggttttctgttcagtggaatgtaagaagaggatgtcttaggaggagggcacccagaagtatcgagccatagctatccaaagtggtctgcatttctactgtaaaatgcaatttgaaaaaaataaaacgcaaaaaaagaaactgtaaaggaaaccaagagattttgtttaatttttttggccattttttcttcatcaattttttttcggtctcaacttttaaacttggtttaagcatttgatttgtaaaacagtaaataattgtatctttccatagcttttcaaatgtgaaatcatttttggaagcttggatctcattaaacttcatgtctctattccatttgggccacacacttaaaagttagtgtactgaatggaaagatgagcattcctagttctacacttcttttttccccctcatgtgtaaaatgaaaagaaaactaaatttgccctaataccaaggcgctacgtttattgcctcgtcttattcactgacctttgtaatgatacacagtgaattctttttgacaaagagaaatgcagtgtagtatgcagagctgctgttttaatgcctatgcatttactctttcctgatttaggcagaggtggcattttctttattgcatttctctatttttttaatgtaccctaccttcagtattctctttgtaagttggtgacttgcatctgtggccttgaatattttattatcacatgtggcataacagtatccacactttttagttctttattttttttttttattttggagcaattctcctgcctcagcctccccaaatagctgggataacaggtgcatgccaccacacccagctaatttttgtatttttagtagagacaggttttcaccatgttagccaggctggtctcaaactcctgacctcagatgatccgcctgccttggcctcccaaagtgctgggattacaggtgtgggagccaccatgcctgacccacacactttttacttgtatagatgatttttggcttggacataaaagccaagccacccatttgcttttaatccaaagaacatgtatagtttttgtacccagagactatgatttatattgattgcacttgcctgccatgatttagataagattttttttgcatggtttttattctttcctaatggatcctgttttataatacttccaagcctgtccatggatatatcaaatgtcttcacttgtatattttcatggctaggtatttctaatgtttattcttccctgtgtacttctacacatagctatgcactatgaaaattaaatggaatgaatgatatgtatattactcaaaataaagtttctttcactttaaaaaaaaaa

SEQ ID NO: 75168 - DNA, 6375 bp, Homo sapiens
  misc_feature (1)...(6375): n = a,t,c or g
ttttttttttttgaaaattaagaaaaccttttttatatattttaccaaggaaaataacaaaatgttttgacaagtaccacgatgtgaaaaaaagcaccggttgaccatggagtacaactgtgaaatgcaaggcatgtgaaattcaagcattcagagaaaagccacactgagagcttgttagaccatgaatctggttatactatggggtcaaataatgaccctaggtatacaggtttctctttccctcgttaaaacagaaaaaaatttaaaagatgctctccaataatagaattataatgtgatttaaatattttttaattactcatctacacaaatgacctttgatcaagctcaggcaaaatataagttgcaataatatctacacgtaatgtgaaggttttaaaaaaataatacaaagttcattcacagtgcacaagtgaaaaccaaggtaagtttcaaatatctcaacaacatatagccatgatcattcaaaaggtaaggcatattttaaaggcacatttccatactgctagggctataacataggaccagcttagagaactgagagaaaaaccattacttttggaaattcccncccncccccccctcttttattggaaagcaaaaataccagatttctttcctcagatacatacatctagaataaataaatacaaaattattaactaaagattttatcttttaaacctatactctgactctcatcctatggtcaaattcccacattgtgaggctgggaagcaccactctctgccatggttccctacttatttttatatcattcatttgcatttggaggctgaataatttgcagaaagaagtctgcggaaaaaactgtagaaaatgggaatacaaagagggcaatatcataaactactagaaaggttgactgttccacccgcaactatagcacagtgggttaaacggggaagctgcaagggccgcttatttcgtgctgtgcactgcctaggtacactgatttttaaaattgaagtcctagccaaattaagtttggatatcatctatttacagttgttcagtcttccatacagagctttgtccactccactctttgcaaattctgacataaaaacaaatgattctgtggctagttcgaatttaacttctgtatatttagtatctttttgtttaaattagaatcatttctgacttttgaactacagacacaagacacagggtttactcctgaagacctgaaattttaattttcctttccaataaacatctgccagttggataaataccctagctttccaaggaaaaataaagcatgcttaggatgagatcagcctaaaaagaagaaaaaaaaaaccccatgaaagaagcccacattactgtggggcattggagagggcagtcaggactctcatgtgggacttttagtaatattaattgttatcatctattcacatacgttacaatactgatctcctcaaagaaatgaagatctccctccatctctttttaaaacttatacaaagggatgtgataacagtagtgactaatattagccttttccttgggagaaatctgtggaaatacagctgaaggtctttctttctatagttgacagaagtaaataaatatggtcctgttttattctttagaaatagatgtgtagttgtaattgttatgctttacaactgcaaaaatattcattaacatgcattaacctgtaagcactggttagaggggtgtacccagtaaggtcatctcctaatctgtgtatagaacataatagagctctcctccctttctattcactcctgtccctagacctaaaagaaataaaaaaagttcctgactatgcatctaccagcgcatctgtgctgcttaaggctggacctacttttcttatcaaacagtataaaacaaacatacattgaattcctggtttcggaagtattttttcatatcctcaaccgagcataccaagtgttacatcttgagggatcacaacgaagcatgcattgatgtaaaacaataaaatggggagtagcaatggggctgttaccaaaaagcaactccaagaaaataagatttagcaaactgtaaaatcaaaaacatcacacaatggacacttttattaacaaagtaaaggcttagtgaaaaggcagcaaatgagatagacattttaagtaaagaaagcatttctttgcttgaatgtcctttagccaattaaaaaatatttatttaaaacacatgaaaatgttgtgaaggtagtattgtaattaaattgcaataaattgaactaaatttttctttattcagctgccagggggatggtcaacattactttaattgttgaaataatttctatttaaaatagtcttatgaaagaaagcctttttctgatacctagttgaaatgtttgataatattctaaatgaaattagtcaattgattatccttaatcttcctcatcctgtgtcataatccggtggctctgtcaacaggagaaaaaccactattaacagaaagcctaacgtaagtatacaacatctaaaataaatcaatttcaaatggatatagagagtgagaaaacagcaactgaatcaaataggtaagctggtactgacttggcttccaaggcaaatttcttcgctggctatgaagggttgaaatttctttcactgaacgttacaatccaaattaacctgttttaggggttcttctgttacccatttttctttcatgtggtgaatataaactgaattatcatggtcaaatagtttctgggaatagaatactacagacacatacaatgatttagcaggctactgtgattttatatacaattgataactttaaacaattgctatataagttttatttcaaaacacctagcattgtatttctggaaaagaaactgaacattgagcaacctcagttaatccattaaacgagtgccaccacaaataagacaacaaacagagaacaagtttcttatcttcaaggactgaacctaatggccataccaattatattattccgatttgtcactttagtacaacaaaataggatgttaatccattaccactgttcttccattcgagaggcagctgatggttaaagcgcccgtaacatacatcgattatttttatcccatgactttattgtatgtttagaaaggtggaacagcagaagaaaaagaggctggacaaaagacgttgatgtttttgttcttcagatgtatgcagagctgattatgagtacgattttaatttatttctcctgatgaagagcttcaatgaaagcatcaagtttttcttgaatttctctaactttcttgaggtcttccgccagttgaacgcgtttaccagtaagcaatttaatcttcttctcaccatcttcagcaaaatcttccaatacctctttaacatttttctctaatcgcctaacttcagtatttgtaagttgttgccttaaagtatttgcggtgatagcaagcatgcgctgtatacgccaaaacaagaccacatcattgcattccaactcagaatctacaaaatgcctttggtagtaataaaaacctcttcgacaaaggttacaatggtttagagctgtttttaaaaaatgtcttctataaacttgatgccaagtatccttaatcaagcttggatctacttctactcctcgggattcaaggttcttccggactgtggttatttcatcacttgcaagataagctgggtgctcctcattacatttcaacatcttctccaattcattcttggtttcattgtgaacacactgttcttgggtccgattcttccaggtataaccacctctttttccaggtctggacccaccatgttttcaattgcattttcagtatccttgagacgagcctgcagagcctcttccataaaataaatagctgcatcccattgctgtttatcagatatggatcggtcttccaaagcattgtgttgaataaccctcaagctgtcctccgcaaagtcattccacttgtgtcgtttaatactttcttccttaacggcctctttaagtttatcaaatatgtcatcatgctctttccctttcggttctgtcataaagcgggaaaattcttcttgtagggtctcccaagcaacctctactgctttattaggaagttgtttatcagtccactgtttaagcttgatatccactgtggtgttaaaagttcctgaattcatggtctgcgcagctggaaggtagatgttttcaatcacatgagttgatactctttcccacaaagattgttgaaggatttcctcccaatgttttggtgtaacctggctcagactgataacttcatcaaggatttcatttttagctttttcaaatagttcattccggtcaagttcccgcaggcgaggatagttattcttccattcagtttcaaggttaaaacgtgttgctttgaaactatcagcctgttgttcaacagactctcgtaccattttccaaaagcagtctgatactgcaaggcttaaatttcttgtagtcacttggtgtgcctttagcatgcttgtctttaggagctttgaattctgaaaaaactcttcttcatattctcttatagcttcaatgctttcagagctgttcccttttcctgttacaacagcaaaataacctaaagctttcattgggaagagctttccttcaattatctgctgaatcctgcttggactggctacatttttctctgccaggtctactttggtcaaaacgaatatggttctccttccatgagggtccatttgactgaccaagtctgtaacaatactgcgttcagcatccacagatccatcttgaatacacagtatgatggcattaggatcctgcatgtaagctttgctgatactgaaaatagtttcctttgtgtcaggagccatgcctgatgtcacagtattaatcacacctggtaagtcaacaagcaccatcctctgtagtccagggccttttacatttaaggatatggtctcagggctaacggtacagccttctttcacatttttcctcattcgaagttctatttcatgtcttaatgctgcaagatcttcttctttggtaagatcaaactcccgagaactatctttaaatagggccacatggtgaggaccttcactcagagtcaccttaactggagaacgtgtcatcatctccccagatcctcttgggaatattcgagcttgggcaatcatttccaacacactagtctttccagcactctgatctccaaccacaacaacccgtggcagatgatcttgcgtattataactggcatcataatcagagagaacatcaagaacttcagaatacatgtcaatcaaagatttccttaagctttctatgaatggaatgcctttgtcatctttctgcaatactaattttctcaattctttgttctccttttctaatcgttccaagattctctgatacttcaactgagtgtgcagaagttcttcctgaagttggtcaattttctctttgtctgacacctttctaaaatgcttgtcactttcagatccacgatctgttgctctaaacgccgtttcttccggagaacctgaggtaaaaaagtccttcaataagctaaggctttcaacaatcttgtcaaagtctggtgctaactttacaaggtcttctgaactaggaagggcttttctaattttctcaaaatcgatatactcatcaatttcccacacaatgtcaggcacaatccatttatattcactaaggtccggtatcatatctttccactgatcaaaagtctttttggctgtgtagccacccccaacagccgatcctagtatgagatagcgaagttttaagagtctcgtagctaatcttgctggccaaaaattcctgcgaggctggtagccatatttaattggagagaatttcagtttacgtaaaggaaggtttgtcagagaagagaactgctgaaaggatgtccttaattggggtcgttgaagctttaaggtaggatgatgtgaatgataaatgcttcgtgaaaccagatgtagtttttgtagtggtaaacttccttttattccagagctgtgtttcactaaagactggcagacctcacaggccacagcggcccgacgtagtcgccacatcccgccggcggggaggtcacgcaggcgccgagacggccacgcgggcagcccccgtgtgagccccagcccggctcccggtccaggaatgacccaggaagtggccctcagcagcaagggcacagagccgcggccgagacgaaatcgtcgacccgggaattccagannnnngctcttcgaaagacntcagtntcganggnatcagtcccgctnnggtccgact

SEQ ID NO: 75169 - DNA, 1891 bp, Homo sapiens; identical to SEQ ID NO: 60597

SEQ ID NO: 75170 - DNA, 4323 bp, Homo sapiens; identical to SEQ ID NO: 60598

SEQ ID NO: 75171 - DNA, 1164 bp, Homo sapiens; identical to SEQ ID NO: 60599

SEQ ID NO: 75172 - DNA, 5175 bp, Homo sapiens; identical to SEQ ID NO: 60600

SEQ ID NO: 75173 - DNA, 6584 bp, Homo sapiens; identical to SEQ ID NO: 60601
  misc_feature (1)...(6584): n = a,t,c or g

SEQ ID NO: 75174 - DNA, 6421 bp, Homo sapiens; identical to SEQ ID NO: 60602

SEQ ID NO: 75175 - DNA, 1114 bp, Homo sapiens; identical to SEQ ID NO: 60603

SEQ ID NO: 75176 - DNA, 3364 bp, Homo sapiens; identical to SEQ ID NO: 60604

SEQ ID NO: 75177 - DNA, 3494 bp, Homo sapiens
cggtgctgccgccgttgccgggagccgcggagacaagtcattacgttttcatttctcacaactgggctgagcacaactgaaccatgggggaacacagtccagacaacaacatcatctactttgaggcagaggaagatgagctgacccccgatgataaaatgctcaggtttgtggataaaaacggactggtgccttcctcatctggaactgtttatgataggaccactgttcttattgagcaggaccctggcactttggaggatgaagatgacgacggacagtgcggagaacacttgccttttctagtagggggtgaagagggctttcacctgatagatcatgaagcaatgtcccagggttatgtgcagcacattatctcaccagatcagattcatttgacaataaaccctggttccacacccatgccaagaaatattgaaggtgcaaccctcactctgcagtcggaatgtccggaaacaaaacgtaaagaagtaaagcggtaccaatgtacctttgagggctgtccccgcacctacagcacagcaggcaacctgcgaacccaccagaagactcaccgaggagagtacacctttgtctgtaatcaggagggctgtggcaaagccttccttacctctcacagcctcaggatccacgtgcgagtgcacacgaaggagaagccatttgagtgtgacgtgcagggctgtgagaaggcattcaacacactgtacaggctgaaagcacatcagaggcttcacacagggaaaacgtttaactgtgaatctgaaggctgcagcaaatacttcaccacactcagtgatctgaggaagcacattcgaactcatacaggggaaaagccatttcggtgcgatcacgatggctgtggaaaagcatttgcagcaagccaccaccttaaaactcacgttcgtacacatactggtgaaagacccttcttctgccccagtaatggctgtgagaaaacattcagcactcaatacagtctcaaaagtcacatgaaaggtcatgataacaaaggacactcatacaatgcacttccacaacacaatggatcagaggatacaaatcactcactttgtctaagtgacttgagccttctgtccacagattctgaattgcgagaaaattccagtacgacccagggccaggacctcagcacaatttcaccagcaatcatctttgaatcaatgttccagaattcagatgatacggcaattcaggaagatcctcaacagacagcttccttgactgaaagttttaatggtgatgcagagtcagtcagtgatgttccgccatccacaggaaattcagcatctttatctcttccacttgtactgcaacctggcctctccgagccaccccagcctctactacctgcctcagctccgtctgctcctccgcctgctccctccctaggacctggctcccagcaagctgcatttggcaacccccctgctctcttacaacctccagaagtgcctgttccccacagcacacagtttgctgctaatcatcaagagtttcttccgcacccccaggcaccgcagcccattgtaccaggactttctgttgttgctggggcttctgcatcagcagcggcagtggcatcagctgtggcagcaccagccccaccacaaagtactactgagcccctgccagccatggtccagactctgcccctgggtgccaactctgtcctaactaataatcccacaataaccatcaccccaactcccaacacagctatcctgcagtccagcctagtcatgggagaacagaacttacaatggatattaaatggtgccaccagttctccacaaaaccaagaacaaattcagcaagcatctaaagttgagaaggtgttttttaccactgcagtaccagtagccagtagcccagggagctctgtccagcagattggcctcagtgttcctgtgatcatcatcaaacaagaagaggcatgtcagtgtcagtgtgcatgccgggactctgcaaaggagcgggcatccagcaggagaaagggctgctcctccccaccccctccagagccgagcccccaggctcctgatgggcccagcctgcagctcccagcgcagactttctcttcagcccctggttcccgggtcatcatcctctaccttgccctcctcctgtgagcaaagccgacaagcagagactccttcagaccctcagacagaaacattaagtgccatggatgtgtcagagtttctatccctccagagcctggacaccccgtccaatctgattcccattgaagcactactgcagggggaggaggagatgggcctcaccagcagcttctccaagtgaagggcccatgtgtgctcacctctgggaaaagcgggtgagcaggaggcatgaggtacaatgcctgccatcatgggtcagaaatttgaaggatgaagaaatctactgtttgaaatcctcacctttcagacgtattttctttattcacatcccaggagcatccattttaaggaactattctttggaaaaaaccgaaaaacataaaaaacaacaaaaaaagctaagttataagtgaactgtttggctgcactgtatgtcacttttgcttgttgtcatgtgaacttggaaactaaggttactcgtgtgcataaaaattctaaatgaaagggtgtggtttccatcaatctgatgctgcccatcgcttgcactggggtctttgtggatcgggcaggagttttcagtgtgttgggtgttgctccttcctatgtgtcttttgaatctgaggctgacatttgcttggaaggccagacccttgctccatcagagagggcagtggcaaaggccagtgaggcagctgtgagttggacagggttccaggtggagatggtgttgtcatttgtgcttactgttggtggtgctcagggtggataacacgggtcgttctggcagcccgcttcagcacaaataggcagcttaaggcctggctcacaaggctgtggggttaaatctggctctgcagaggccctaggccagcttgttgaactgctgtctggttgaatgaacgtgtgtgcaaagcaaggctcttagcaaacatgatcactgtccttgccttcctggttctttctctcggttggttgccagggcttgcagatcgcagtgaattttccttggggaacatcgctgttttgtcctagagtgaacttgtggcttatggccagtgctgtttggtggtctgccttctttttaatggtattttcttcctcagagcagaagggctgcattttgcttatcagaagaaggtgcagatttaagggaattcatatgaggtggcatgtaattggcaggccaggtgtcctggttccaggttccagccaggctttgggttgccccctccatctctgcccccctctggattttgcatacagcctcatacagtgcaaacaaggatgtgacttgctcagcttagtcatgtgatttatttaaaaaaaaaa

SEQ ID NO: 75178 - DNA, 4407 bp, Homo sapiens; identical to SEQ ID NO: 60605

SEQ ID NO: 75179 - DNA, 1734 bp, Homo sapiens; identical to SEQ ID NO: 60607

SEQ ID NO: 75180 - DNA, 884 bp, Homo sapiens; identical to SEQ ID NO: 60608

SEQ ID NO: 75181 - DNA, 2054 bp, Homo sapiens; identical to SEQ ID NO: 60609
  misc_feature (1)...(2054): n = a,t,c or g

SEQ ID NO: 75182 - DNA, 2604 bp, Homo sapiens; identical to SEQ ID NO: 60610

SEQ ID NO: 75183 - DNA, 4446 bp, Homo sapiens
cgaccggctggagttacgggccgacgacttcgttggcgttcctggctcctcgggattttccttttcctcctaagctgctgattcatccccaggctgttgtcaggctcagctgtggggctgggagcatgggctctcaggctgctgctgagtggaggaactgggcctcctgggaggggtcctccagcctctctggatgctccatggggtgcttcaaggatgaccgcatcgtcttctggacttggatgttctccacctacttcatggagaaatgggctccccggcaggacgacatgcttttctatgtgcgccggaagctggcgtactccggcagcgaaagcggtgcagacgggaggaaggcagctgagcctgaggtggaggtggaggtgtaccggcgggactccaagaagctgccaggcctgggagaccctgacatcgactgggaggagagcgtctgcctgaatctcatcctgcagaagctggactacatggtgacctgtgcggtgtgcacacgtgctgacggcggggacattcacatccataagaagaaatctcagcaagtgttcgcgtcccccagtaaacaccccatggacagcaagggggaggagtccaagatcagctaccccaacatcttcttcatgattgacagcttccgaggaaggtgttcagcgacatgaccgtagggaaaggagagatggtctgtgtggagctggtggctagtgacaaaaccaacacgttccagggggtcatctttcagggctccatccgctacgaggcgctcaagaaggtgtatgacaaccgggtgagcgtggccgcccgcatggcacagaaagatgtcgtttggcttctccaagtacagcaacatggagttttgttcgccatgaagggcccccagggcaagggccacgccgagatggcggtcagccgagtgtctacaggtgacacatccccctgtgggactgaagaggactccagcccagcttcgcccatgcacgagcgggtgacctccttcagcacaccccccaccccagaacggaacaaccgtcctgccttcttctccccatccctcaagaggaaggtgccgcggaaccggatcgctgagatgaagaagtcgcactcggccaacgacagcgaggagttcttccgggaggacgacggtggagccgatctgcacaatgcaaccaacctgcggtctcggtccctgtcgggcacaggacggtccctggtcgggtcctggctgaagctgaacagagcagatggaaacttccttctctatgcacacttaacctacgtcacgttgccgctgcatcggattttaacagacatcctggaagttcggcagaagcccatcctgatgacctagccgcgtgcggagcctgcgcagagccccggccgggcccagccctcggagtgctgccaagtgcctacctgtccaccgccaccggggtctgcgatggcacgccagtgctggagccgcagccaggcgaggccactcgactcccggggccggggccgactccacgaacaccagcccaaactgaagtgcctcttccctcccctgctggcgctgctccgccctgtgccccccgcccatcgccccccacccatctctggagagccctctgcacccaaagaggactagagatgccgagcggccatgagagagagcggaaggagcagctgatgcccagagcggggccagagcggcgggtctatgttcacgtccccccagcagcaggcggaaccacccagccagggcactcagtgcattggactgtccacatgttcttgaggaaagccggtggaagattctggaatgccgtgcggatgaacttcagcgcccgagtcagtcccagctcatcctccccagtttaccactttgttctaataggagatgggaacacgagaagtttgatggctttgccctgggctgggaatacctcacccacgcccagttccagaaaggcctccagctgagcagacggccccgatcccgccagaacggccttttgcttccagccaaagaacaccgccaacacgcacacctccaacctgggacatcccacgctgggcctcgcacggaggaacctgcagaatttggattctgagggtagtcgggaggcctcggtagccaggcagaacaggatatctgccaaagggtgtctgatgtggggtggggctggcatcctcccaggaaggttctaggtgggaccccgtcttctgggggcgggggtgtcttttcatcttccctggtttcctagaactcacttcctttgacggcgtgtgttggtcccatctctcagaccagctcactgaggcagaggagttgctcagaggctcacatgggcacccccattggttcgtgtgagcagctgcccagccccaggcctgccctcggcctggtccagcatgaaggcgtttccatctgcaaggatgcacggtaccctccccgagagcaggcctgtcccctacccaactgggaataaactggaagctgggtctctttgttgctatgtttttttgtttgaagttcccaggaatatttgaggggttccggtgatgtgtttagggatcttctctgtgggggaaaaggaagaggagggtcttgttctcccatctgtttattctttgggctctgggaacaggggactactttggggctttctccagacttttgtatgttgttattaaaagcgagctattgcatttcattctgcctcagtttgcccacctgtgaaatggggctgataccacctacctcactgaagtcccagggttcaagtgtgtggctgggtcagggcgtggtcacccgtcattctgcataggtcgggttggatgttagactcctgggatgccctcctcccccctcgccctttgtaataacctaatctgagaccgtgcttggtggggggatgtgaactttctctctcccccagcagtgtctgctcaggcctgacagctcagctctgcacgatttcatgttcctaaacccatgtcttagggcagcacagagccaggtcatgtcatgccccaaagtgtggggacagagcctcagggagccccgagcatggtccagccccatttgagtgctctccggggatgccaaatgctgcttccaagtttgagtccatgtggctaaaatacacccatttcttcaggaactcttcccctggttgttctggggatcttgggagaaacacagccctgacagctcgtccgtgggaagatgaggcagtccaggttgtgaggagcacagcggcccgccctctgttctcagaggtgaggggcgggagaaggttgtctcctctggggccagcatttggccaagctcggaggcttggccagcactgctggatggctcagagcaagctgggctccccgtctgtaagatggcaaaaatgctgcccccctcacagggtgaccatgaggaccagtcacagtgatgtgtgaaagggctcgctggtcacagaaacgtgtacaaatcatgctattttagagatcagccctcaatttgtaaggcatgtgaacagggcacgcggtgggctggtggtttcatagccgacacacagcgcctaccatgtgcagctgcctgtccgaccccatcttacagacgagaaaaccagcacacaggcaccaaggaactgtccggaactaacagcaggggccggcgatgggagtcaaacccaggcacgcggcctggcctgcatgctgagccacatggtgctgtccggacagatggacagacactcggtggagtctgcctttctcaggccctaaatccctctccaaagggtacttgcgatgccggatttaaaacttgctcagagccacttagccacttgagaaccagacagtaaggtgttactcccaggtttgtttttccaaagtaacagatgacatgtggaataaagtaatagagtaacaagtggcagggccagaaccagggtccccaaagtcctggtgttggcacatttgtacttcttgtaagaccatctttaatttttctgggaacacacctgccttttgtgtaatgcggggaagactaatgcatggtgacacctagttttcctcaacaggacacttgatcccaaaacccctttaagaccttaggtttcctcagcggaaaactgtactttaatcccaaaccccctttaagacatattggggctgggcgcagtggctgcacgcctgtaatcccagcactttgggaggctgagatgggtggatcacctgagatcaggagttcaagaccagcctgactaacatgctgaaaccccatgtctactaaagatagaaaaattagccggacatggtggcaggcacctgtaatcccagctactcggaaggctgaggaaggagaatcacttgaacctagtaggcagaggttgcagtgagccgagatcacgccattgcattctagcctgggcaacgagagcgaaactctgtctc

SEQ ID NO: 75184 - DNA, 3941 bp, Homo sapiens; identical to SEQ ID NO: 60612

SEQ ID NO: 75185 - DNA, 3670 bp, Homo sapiens; identical to SEQ ID NO: 60613

SEQ ID NO: 75186 - DNA, 2933 bp, Homo sapiens; identical to SEQ ID NO: 60614

SEQ ID NO: 75187 - DNA, 3490 bp, Homo sapiens; identical to SEQ ID NO: 60615

SEQ ID NO: 75188 - DNA, 1761 bp, Homo sapiens; identical to SEQ ID NO: 60616
  misc_feature (1)...(1761): n = a,t,c or g

SEQ ID NO: 75189 - DNA, 1273 bp, Homo sapiens
ccaaagccaagatggcaggtacgtccttttagaatttaaggttagtgaagccatctatttccccgaccccccttcagtgaaaatggtctttcgcatctggctcttctttttggaggcgtgcttgccagcagtcaaaatggctccattccggaatagatttaataggaagtgaagctgtgacggcgaggcgttgcccggcctatctttgctaggcgttctcagaattagttctttctgcccacactagacatggcgcttgccagcgtgttggagagaccgctaccggtgaaccagcgcgggtttttcggacttgggggtcgtgcagatctgctggatctaggtccagggagtctcagtgatggtctgagcctggccgcgccaggctggggtgtcccagaagagccaggaatcgaaatgcttcatggaacaaccaccctggccttcaagttccgccatggagtcatagttgcagctgactccagggctacagcgggtgcttacattgcctcccagacggtgaagaaggtgatagagatcaacccatacctgctaggcaccatggctgggggcgcagcggattgcagcttctgggaacggctgttggctcggcaatgtcgaatctatgagcttcgaaataaggaacgcatctctgtagcagctgcctccaaactgcttgccaacatggtgtatcagtacaaaggcatggggctgtccatgggcaccatgatctgtggctgggataagagaggccctggcctctaactacgtggacagtgaagggaaccggatttcaggggccaccttctctgtaggttctggctctgtgtatgcatatggggtcatggatcggggctattcctatgacctggaagtggagcaggcctatgatctggcccgtcgagccatctaccaagccacctacagagatgcctactcaggaggtgcagtcaacctctaccacgtgcgggaggatggctggatccgagtctccagtgacaatgtggctgatctacatgagaagtatagtggctctaccccctgaaagagggtggatgcagctgcttgtgtttcttggggtgactgtcattggtaatacggacacagtgacccatcctccatcctatttatagtggaagggccttcaattgtatcagtacttttttttaagctctggcacattgacctctatgtgttaccagtcattaatgagctgctgcagaggtgactatttgttttactttcttggatgttaacattacactactcactactc

SEQ ID NO: 75190 - DNA, 5210 bp, Homo sapiens; identical to SEQ ID NO: 60617

SEQ ID NO: 75191 - DNA, 668 bp, Homo sapiens; identical to SEQ ID NO: 60618

SEQ ID NO: 75192 - DNA, 6730 bp, Homo sapiens; identical to SEQ ID NO: 60619

SEQ ID NO: 75193 - DNA, 1240 bp, Homo sapiens; identical to SEQ ID NO: 60620

SEQ ID NO: 75194 - DNA, 7431 bp, Homo sapiens
gcggtgcctctgagagccgccgccacctcgtccctcagttcccggcagacagccgcccgggccggcgtccctcaccgccaccagggccggagtgacgagtgagaggggcggccgggacgcgacccccgggccaggagaagcggaggcccgacggcggcggccctccgaggtacggcttcttgggggcggcgaggacctcgacgcccttcgccgacaccgcggctggtcccgctcgcccgccccttcctgatcctgccgctgccctccacgcctccaatcccccacctccaccccctctcctttctctcttctcttccttcctctcctcctcctcccctccagccgctgggagccgcgggtcggacgagccgccgcctccttctctgcgtccatgtatgaggggaagaagacgaagaacatgttcctgacccgggctctggagaagatattggccgacaaggaagtgaagaaggcgcatcactcccagctgcgcaaagcttgcgaggtggcgttagaggaaataaaagcggaaactgaaaaacagagtcctcctcatggagaagcaaaagctggatcaagcacccttccaccagtgaaatcaaagacaaattttattgaagcagacaagtacttcttgccttttgagttggcatgccagtccaaatgtcctcgcatagttagtacatctctagattgcttacagaaacttattgcttatgggcacttgactggcaatgctccagatagtacaacaccaggcaaaaaattaattgatagaattattgaaccaatatgtggctgctttcagggccctcagacagatgaaggagttcagctgcagataataaaggctttacttactgcagtaacatcacaacacatagaaattcatgaagggactgtactgcaagctgtgagaacatgttacaatatctacttagcaagcaaaaatctcatcaatcagacaacagccaaagctactctcactcagatgctaaatgttatctttgcacgcatggaaaaccaagcattacaggaagcaaaacaaatggaaaaagaaaggcatcggcagcatcatcatctgttaccgtctccagtaagccatcacgagcctgaatcacctcaacttagatatttgccacctcagactgttgatcatatatcccaagaacacgaaggggaccttgacctccatacaaatgatgtagataaaagtcttcaggatgacacagagcctgaaaatggatctgatatttccagtgcagaaaatgaacagactgaagctgatcaggcaactgcagctgaaacattatctaaaaatgaagtgttatatgacggagaaaaccatgattgtgaggaaaagccacaagacattgtacagaacattgtagaagaaatggtgaacattgttgttggagatatgggagaagggactactataaatgcaagtgcagatggcaacattggaactatagaggatggtagtgacagtgaaaatattcaagcaaatggaattccaggaacaccaatttctgttgcatatacaccatccttacctgatgatagattgtcagtctcttccaatgatactcaggaatctggaaattcttcaggaccttcacctggtgctaagttttcccacattttacaaaaggatgcctttctagtattcaggtcattgtgtaaactgtcaatgaaaccactgtcagatggaccaccagatccaaagtctcatgaactacgatccaagattctttcattgcagttacttctatccattctgcagaatgcaggacctattttcaggacaaatgagatgtttattaatgctattaagcagtatctttgtgttgcactctcaaaaaatggagtctcatctgttccagaggtttttgagctttctctttctatatttcttactttgttgtcaaatttcaagacacatctgaagatgcaaattgaggtgttctttaaagaaattttcttatacattttggaaacttctaccagctcatttgatcacaaatggatggttattcagacactgacgaggatttgtgcagatgctcagagtgtagtggatatttatgtaaactatgactgtgacttaaatgcagccaatatatttgaaagactagtaaatgatctatcaaaaattgctcaaggaaggggcagtcaagaacttggtatgagtaatgttcaggaattgagcctgaggaaaaaaggtttagaatgcttagtgtcgattttgaagtgtatggttgaatggagtaaggatcagtatgtgaatcccaactcccagacaactcttggtcaggaaaaaccctcagagcaagagatgagtgaaatcaaacaccctgagacaataaacagatacggaagtttaaattccctggagtcaacatcatcatcaggaataggcagctacagtacacagatgtctggcactgataatccagaacaatttgaggtcctaaagcaacaaaaaaaaataatagaacaagggatagatttatttaataagaaaccaaagagaggaatacagtacctccaagaacaagggatgcttggcaccacacctgaagatattgcccaattcttacatcaagaggaaagattagactctactcaagtgggtgaggttcccggggggataatggataaatttaaccaaagaagtcatgtatgcatatgtggaccaacatgacttttcaggaaaagacttcgtttcagcccttcgtatgtttctagaaggatttcgtcttccaggggaagctcagaaaatcgatcgattaatggaaaaatttgctgcaagatacctagaatgcaaccaaggacaaactctctttgctagtgcggatacagcttatgttttggcttattcaattatcatgttgaccacagaccttcacagtccacaggtgaaaaataaaatgacaaaggaacaatacattaagatgaatagaggtatcaatgacagtaaagaccttcctgaagagtatctatcagccatctataatgaaatagctgggaaaaagatatcaatgaaagaaacaaaagaactaacaatccctacaaaatcaagtaaacagaatgtagccagtgaaaaacaaagaagacttctgtataacttagaaatggagcagatggccaagacagctaaagcactcatggaggccgtgagccatgttcaggcaccctttacaagtgcaacacatttggagcatgtgaggcccatgtttaagttggcttggacgccttttctggctgcattcagtgtgggtctacaagattgtgatgatactgaagtagcctctctttgcctggaaggtataagatgtgcaatcagaattgcatgcattttcagcattcagctggagagagatgcatatgtccaggcactagcaagatttaccttactcacagtgagttccggtattactgaaatgaaacagaagaacattgacacaataaaaacacttatcacagtggctcatacagatggaaattatttaggaaattcatggcatgagattctgaagtgcatcagtcagttggagctggcacagcttataggaactggagtgaaacctcgatacatttctggaacagtgcgaggcagagaaggatctcttactggaacaaaagatcaggctcctgatgaatttgtgggtttagggctagttggaggaaatgtggactggaaacagatagcaagtattcaggaatccattggagaaaccagttctcagagtgttgttgttgctgtagatagaatattcacaggatctacaaggctagatggaaatgccattgtggattttgtccgttggctctgtgctgtgtctatggatgaattactttccacgacacacccaagaatgtttagtctacaaaaaatagtagaaatatcatattacaacatgggaagaataagattacagtggtctcgaatttgggaagttattggagatcattttaataaggttgggtgtaatcctaatgaagatgtagctatttttgcagtagactccttgaggcagttgtcaatgaagttcttagagaaaggggagcttgctaacttcagattccagaaggatttcttaagaccttttgaacatataatgaaacggaacaggtctccaacaattcgagatatggttgtacggtgtatagcacagatggttaattctcaagctgctaacattcgatctggatggaagaacattttctctgtatttcatctagctgcatctgatcaagatgaaagcatagtggaacttgcattccaaacaaccgggcacattgtcacccttgtatttgaaaaacactttccagcgaccattgattctttccaggatgcagtgaagtgtttgtctgaatttgcgtgcaatgcagctttcccagacacaagtatggaagcaattcgacttattcgccattgtgcaaaatatgtgtctgatagacctcaggctttcaaggaatacacaagcgatgatatgaacgtagcacctgaagacagggtgtgggtgagaggatggttcccaattctctttgagttatcctgtatcatcaatagatgcaaattagatgtaagaaccaggggtttaacagtaatgtttgaaataatgaaaacatatggccacacttatgagaaacactggtggcaggatttatttagaattgttttcagaatctttgacaatatgaaattgccagaacaacagacagagaaagctgaatggatgacaacaacttgcaatcatgcactttatgcaatctgtgatgtattcactcagtatttagaagtactcagtgatgtacttttggatgacatttttgctcagctctactggtgtgtgcagcaagacaatgagcagttagcgcgatctggtacaaactgtttagagaatgttgttattctgaatggtgaaaaatttaccctagaaatctgggataaaacttgcaactgcacactggatatcttcaaaaccacaatcccacatgcgctgttgacctggcgacccaattctggagaaactgcccccccacctccatctcctgtaagtgaaaagccattggatacaatatcacagaagtctgtagatattcatgattctattcaaccaaggtctgtggataacagaccacaagcaccactggtttctgcgtctgctgttaatgaagaagtcagcaaaattaaatctacagcaaaatttccagaacaaaaattgtttgctgccctgttgattaaatgtgttgtgcagctggaactcatccagactatcgacaacattgtcttcttcccagccacaagtaagaaagaagatgcagaaaacttagctgcagcacagagagatgcggtggactttgatgttcgcgttgatactcaagaccaaggaatgtaccgctttttaacatcacaacaactttttaagctactggactgcttattagagtcacatagatttgcaaaagcgtttaattccaacaacgaacagaggactgccctgtggaaagcaggattcaaaggcaaatccaagcccaaccttctgaagcaggagaccagcagcctggcctgtgggctgcgcattctcttccggatgtacatggatgagagccgcgttagtgcctgggaggaggtccagcagaggcttttgaatgtctgcagtgaagcactaagttacttcctcactctaacatcagaaagtcatcgagaagcctggactaacttactgcttttgtttctaactaaagttctaaagataagtgataataggtttaaagctcatgcatcattctactaccctctcttatgtgaaattatgcaatttgacttgattcctgaacttcgtgctgttcttagaagattttttctgcgaatcggagtagtttttcagatatcacaaccacctgaacaggaacttggaataaacaagcaatgatgggaacttaatatttttgttggcatttacatccctctgctctttaaaaggacgctggagctgaggtttcctacctgaaaaatgatttctctggattgcagtgtctgagttactggtaaagatgcttagaagtcttactcaaacttgcaacactccagtcccttttagtgctggtggattttgtgtgttatattggcctcatgttgagcagaaagcctgtttaaacagtgtcagctcatgctcacgggtccttccctgtcttccacggcaggaaaagccccacgtttttggcaggtgtggaagtgaaacttacccaaagaactatagatgtaaagattgaacttctacaagaagtacaactcaggagagctgtattttgaaggataaaatgtttataattggggagtggggagagaagaagaaattattgttcatggtaaaagatatttagcaactatggtattcttattctgaagatttttgcacactcaggctatctgagatactggtaatcatcctgtgaaaaatgtacagagatgcaggtctgtaatataaaaatcttaaaacattatatagttcttcctgcactgttttctttattttcttattcatttgctaaatacccataatattttgtcaaatgcactaaacatttgggtggaactttcttttttattttatagggatttttagttttgccctttttggtaggtggtgattttgaggctgtaacatgcccagaagctgttgtggccgacacttcaacaatagggaaaaaaaggtagaaaatatccctactgacagtaactacctgtcacatatttctcttaggacttttaaagatgagccattaaaatagaatgatcctttatggaccaaaacttgaatcactgcaaaatgaatccagattgctgtcattttcttttcttttgggtggtggggcttgatgtagattttactctatgtacagaatttaacgttgaatatattaaaataacaaatctggcatggtttgcggaggttagatttactggaaatgtattcatactgtgaattgtgcctctgatggttaaaagacaagattgtcaagcattccgtattaacagtgggatgtagaaaattttttcagatgggacaaaatgtatatggtacagatgtaaagttttctatgtaaaaaattctgtacaactttctgtacaatattgattcccatctggcatattctaatcaggttataggtcaataaagtttttgaattatttcatcagtgcaatcaaaacctgtataacccacccccatgtttcattgattctggtctattaaggctgaacaactatggaaaagacattttcagccagaactacaaattcaatattgtttggttctggtattttctttccagcttctagcattagatcctccttacactgtacttaccataggatacttatttttaaggcaatttttaaaatttttatttatcttg

SEQ ID NO: 75195 - DNA, 1704 bp, Homo sapiens
tttttttttatacaaaaaaatttttatgggagtacagtttcaaatttagagcttccacgcttacaaatgtgattggatatttaggatacataatttattcttaaaatacacaacttatatacagatattaaaaactcagtctccaaaatgctcaataaagatgtctgggtgacacttatagaattgacctagcaaattttttcttctctttggcagaaagttttgaatcctcatcaagagtttttagtaaattcaacagctcatctttggttgtcttctctgtattgttggaatagtcacgttgatcaattctctggcaataaatatatcctgcatctctatttggatctcttccgttctgtatggccataaggcttaaccacttacaattttatgtgagagttccaggaatcttaaaaacatctttctgatgatccatttaaaaagagtaccagaagatctgttttgcctttggataaatttttattgtcaacaatagcttttgagaatatccttttcacaaccattcggttgtcactttctttctgtaatttaaactcagaaggatttgctgcaacagccatgaaatacagtagtcttctaaattcttctctattttggaaatctaaaagctttagaaggagctgggtagcttctaaagctatttccgtcttcccattcactaagagttctgcaattccattatgaacgtcagataagtgatttaacagaggttccctactactgtaatatctgccaatggcatcaaacagaagttctttcactaagtctgttcggtctggttgctcaggaaagcttctgcttatttccaccaccatttggtctggaaggtattctgaacagtcaattgctgccgagagccactcatcttcctgagagtcactataagccttgagaatccctcgatccagatagttactgctgttgaccatggtggactgcctcttaggttgaggaattttaggtacagcctcttgctgtttcagtaaggagtcaagaagtggaaggtctacaagttgtagtagacgcccaattgtttcttcttgccacacttcattaataacttgtggagacaaggttgcagagatatttacatgaggggagttggcaggctttaaactcagattttcccacaggtcctctaaactggctgatctgatatcggatgacttaaataatgcatctgcatacctggcaggtgaatatagtttgttctctttgcctaactgactgtcttggttaggtattgtggtgaatctataaaggctgcaactactatcttcaaatgtaggttttttgtcttttccaaagactttggttggaactgcttcaaatactttgtagtccataagcgcttgacacactctcaccactttggctcgaggaatatctacatcaccaaaatacttattctgaattaggtgagaaaaaatgacatccacagcttctgaaccaacaaagcagtcattatgtcgttttaaacggtgccttcgttttttcacttccacttgtgtttgaagagtgtttatgatgctgctccatacatacgtggctccaaatggcttctgagctacactgaaacccggaggcctgtgcgcggggctgtggagagccgagaggttcagcgcagcagccttctcctgcacggtggccatggcccttgctccccggacgccaactcct

SEQ ID NO: 75196 - DNA, 2485 bp, Homo sapiens; identical to SEQ ID NO: 60623

SEQ ID NO: 75197 - DNA, 1513 bp, Homo sapiens; identical to SEQ ID NO: 60624

SEQ ID NO: 75198 - DNA, 3196 bp, Homo sapiens; identical to SEQ ID NO: 60625

SEQ ID NO: 75199 - DNA, 9754 bp, Homo sapiens; identical to SEQ ID NO: 60626

SEQ ID NO: 75200 - DNA, 1381 bp, Homo sapiens
ttttttttttttgaaggtataaaacagctaatgttttacttaactattctgaaagtaactgacaggtaataaaaatgtgggttttattagtccactacagtcacaatacaatcgtcatagatttccccttctgtattcatcccaccaaacaccaaacagagcagtgtagcagtctggctttcctcatgtgagtcaccactgtggctcattactttgtcagctgaatcctctttctcagcttcatggttcagagtgagagagttgggaatcttctttctcagaagcacacgtcactggcccatgggaatgataccacatgggaatgggtcccaatcgtcccaggggggtaggaaggagtatccaaatttaaggcaagggtcccaatgctgctcttctgtgtgatactgggtacattgtgtcccaggtgctcctgcaggagtcattccaccaaaggatgtacacatgtttttcccatggccacagctggagtggggaagcacagcctgctggaggcagccccagtgggatttagcttctgccatttcatgtcacttatatcaatgcagtggaggtcatcatagaatctgtcccccgccaagcctccgtggatgaagagctttgtccctgctgccaccatcacatgaccatgccggggagatggaggatttccaagtgtctctggctgtgaccaggtcagagtgtttgcgtcaaacacatgcagcttcgtgtcctgcacgggctgggcacctctctctccgcccccaaagacatatagctggtttccaatggctgccgatgatgtgtggaatgttcttggggatggtggggggctggtcacttctggcgtggtccacgtcctggtttcaggattcaggacttgtagacaatttcgatttcctgattggttggcacctccaaatacccagatacggtcaggtgtgcaggagggaatgaagctagcatgttcataccggggcaagaggcccttgcaggtatctaagtcccactggtgttttcccagatccatggtgtgcacgtctgagaagcttctgtttggatttgctcccccaacaatgaagaccttccctctcttggcattaccaactgggggtaaatatgaacagctgtggccaactcgagcacaggggctgtctccagggacagtcaaggtgtaccatgttgctttcctgggcttgtctccaggttccaagactggcagttgcttcatggtgtcctgcggcctaggccactgacagctgtccccaaagtccagagctcagttaggctggcttcacgtgggcgggacctcccgcagcagccgccgctaccagcccagcaaatctcatccccacgtggcagttctgcggcgacttaggccagt

SEQ ID NO: 75201 - DNA, 2006 bp, Homo sapiens; identical to SEQ ID NO: 60628

SEQ ID NO: 75202 - DNA, 3145 bp, Homo sapiens; identical to SEQ ID NO: 60629

SEQ ID NO: 75203 - DNA, 3042 bp, Homo sapiens; identical to SEQ ID NO: 60630

SEQ ID NO: 75204 - DNA, 6302 bp, Homo sapiens; identical to SEQ ID NO: 60596
  misc_feature (1)...(6302): n = a,t,c or g

SEQ ID NO: 75205 - DNA, 6309 bp, Homo sapiens; identical to SEQ ID NO: 60546

SEQ ID NO: 75206 - DNA, 2852 bp, Homo sapiens; identical to SEQ ID NO: 60636

SEQ ID NO: 75207 - DNA, 3468 bp, Homo sapiens; identical to SEQ ID NO: 60637

SEQ ID NO: 75208 - DNA, 1082 bp, Homo sapiens; identical to SEQ ID NO: 60638

SEQ ID NO: 75209 - DNA, 2949 bp, Homo sapiens; identical to SEQ ID NO: 60639

SEQ ID NO: 75210 - DNA, 3156 bp, Homo sapiens
gcgcggcggttgggccgttggctgttcggccctgggatccgccgccactccgcgatcagaccgctctgtgccgcgagccgccgtgagcactcggattcaagccggcgccaacgagtccgggggcatcgcccgcagcggccaagctcatggccggctgagcgggacgccgcctccgcctcagccaccgccgccgccggcgcctcctcctcctcagccggcggcggcccgggcccagcaaccatggctgaagactactgggacgggcgcctgcggcgaacaggaggagaaggaggtcgcgcggcctcatcccgggccgccgccccaggcgccgccgcgccggccccgcggctctgaggttgctcgcgcgcccccgccgatcgccatggatcggatgaagaagatcaaacggcagctgtcaatgacactccgaggtggccgaggcatagacaagaccaatggtgcccctgagcagataggcctggatgagagtggtggtggtggcggcagtgaccctggagaggcccccacacgtgctgctcctggggaacttcgttctgcacggggcccactcagctctgcaccagagattgtgcacgaggacttgaagatggggtctgatggggagagtgaccaggcttcagccacgtcctcggatgaggtgcagtctccagtgagagtgcgtatgcgcaaccatcccccacgcaagatctccactgaggacatcaacaagcgcctatcactaccagctgacatccggctgcctgagggctacctggagaagctgaccctcaatagccccatctttgacaagcccctcagccgccgcctccgtcgtgtcagcctatctgagattggctttgggaaactggagacctacattaagctggacaaactgggcgagggtacctatgccaccgtctacaaaggcaaaagcaagctcacagacaaccttgtggcactcaaggagatcagactggaacatgaagagggggcaccctgcaccgccatccgggaagtgtccctgctcaaggacctcaaacacgccaacatcgttacgctacatgacattatccacacggagaagtccctcacccttgtctttgagtacctggacaaggacctgaagcagtacctggatgactgtgggaacatcatcaacatgcacaacgtgaaactgttcctgttccagctgctccgtggcctggcctactgccaccggcagaaggtgctacaccgagacctcaagccccagaacctgctcatcaacgagaggggagagctcaagctggctgactttggcctggcccgagccaagtcaatcccaacaaagacatactccaatgaggtggtgacactgtggtaccggccccctgacatcctgcttgggtccacggactactccactcagattgacatgtggggtgtgggctgcatcttctatgagatggccacaggccgtcccctctttccgggctccacggtggaggaacagctacacttcatcttccgtatcttaggaaccccaactgaggagacgtggccaggcatcctgtccaacgaggagttcaagacatacaactaccccaagtaccgagccgaggcccttttgagccacgcaccccgacttgatagcgacggggccgacctcctcaccaagctgttgcagtttgagggtcgaaatcggatctccgcagaggatgccatgaaacatccattcttcctcagtctgggggagcggatccacaaacttcctgacactacttccatatttgcactaaaggagattcagctacaaaaggaggccagccttcggtcttcgtcgatgcctgactcagccatctgctctgctttcccccacaggcaggccagctttccgcgtggtggacaccgagttctaagccacagaccgaggccccagcaggcagcggctggagggatgccacacccctcacagggcagcccccaactacatcttccctgcttactctctgcctacctgcctgagccatgttcacctgcccacttgtcccctgctgcctgcccaaacaccccaccattggcctgtcaacccacccattggcctgtctgctgggtgctaacaaagctctcatcactccttcacttggtctgtctgtctctgtcttggtagttgccggtggacagcatggccgtgccagcctcccacactgaggccaggtctaccccccatcataccagcccccaggaccactaccccacggccagccaggggtccagagctagcccaggctggggatctcgactcagacaagatggtgacaatgccttgagtctgaggcatcctctgcctgctttcctgcctgccccacctgcctcatattgtgtgggcctttttttgtttgtttcattcattgttttttttttttaaataatttaaaaggaaatttttgttttttttaaaggcaatatttttgtatacagactggctgggcccccccccctgcggggggccctcccacagtattttgggcaaggaacccctgctcccaccctttcagagacggggacacagcccctatttggaaccctgatcatcacaagaacctgggaattggctatgggaaagcatgccacagccactcgccttcctacccccgcccgccatccccaagttgcaagggggatctggggactaccaagagactctgggaaatggacaaggtggggggccccactctttctctactgcagtaccgtagctggggcctcccttccttctcagggtctcccccagccccagtcccctttgctccccatccccaactcggttgcttgtttggggttaggggccccttgccaaggaactgaccaagcttcagcgaggagccaataatgtgcatatgtgcacaagcagggttgggggaggggggtgtgaggggttgtgccccaggtgttgccccctatctcctggggagggtgaggcagggcagggacagtctccagggtcagtccctggatgggtggttacctccccttcctccaccctaagccctggggccctgaaatggggtgggagggcaggggtgggagccctcctagtgggtttggggggttgggttcctgaatgcaccataatcgctgtatgaaatattaaaaagtctaaagtgaaaaaaaaaa

SEQ ID NO: 75211 - DNA, 5470 bp, Homo sapiens
  misc_feature (1)...(5470): n = a,t,c or g
tttcgtgggctgtaggcgccaaggccatgtccgactcgtgggtcccgaactccgcctcgggccaggacccagggggccgccggagggcctgggccgagctgctggcgggaagggtcaagagggaaaaatataatcctgaaagggcacagaaattaaaggaatcagctgtgcgcctcctgcgaagccatcaggacctgaatgcccttttgcttgaggtagaaggtccactgtgtaaaaaattgtctctcagcaaagtgattgactgtgacagttctgaggcctatgctaatcattctagttcatttataggctctgctttgcaggatcaagcctcaaggctgggggttcccgtgggtattctctcagccgggatggttgcctctagcgtgggacagatctgcacggctccagcggagaccagtcaccctgtgctgctgactgtggagcagagaaagaagctgtcttccctgttagagtttgctcagtatttattggcacacagtatgttctcccgtctttccttctgtcaagaattatggaaaatacagagttctttgttgcttgaagcggtgtggcatcttcacgtacaaggcattgtgagcctgcaagagctgctggaaagccatcccgacatgcatgctgtgggatcgtggctcttcaggaatctgtgctgcctttgtgaacagatggaagcatcctgccagcatgctgacgtcgccagggccatgctttctgattttgttcaaatgtttgttttgaggggatttcagaaaaactcagatctgagaagaactgtggagcctgaaaaaatgccgcaggtcgcggttgatgtactgcagagaatgctgatttttgcacttgacgctttggctgctggagtacaggaggagtcctccactcacaagatcgtgaggtgctggttcggagtgttcagtggacacacgcttggcagtgtaatttccacagatcctctgaagaggttcttcagtcataccctgactcagatactcactcacagccctgtgctgaaagcatctgatgctgttcagatgcagagagagtggagctttgcgcggacacaccctctgctcacctcactgtaccgcaggctctttgtgatgctgagtgcagaggagttggttggccatttgcaagaagttctggaaacgcaggaggttcactggcagagagtgctctcctttgtgtctgccctggttgtctgctttccagaagcgcagcagctgcttgaagactgggtggcgcgtttgatggcccaggcattcgagagctgccagctggacagcatggtcactgcgttcctggttgtgcgccaggcagcactggagggcccctctgcgttcctgtcatatgcagactggttcaaggcctcctttgggagcacacgaggctaccatggctgcagcaagaaggccctggtcttcctgtttacgttcttgtcagaactcgtgccttttgagtctccccggtacctgcaggtgcacattctccacccacccctggttcccggcaagtaccgctccctcctcacagactacatctcattggccaagacacggctggccgacctcaaggtttctatagaaaacatgggactctacgaggatttgtcatcagctggggacattactgagccccacagccaagctcttcaggatgttgaaaaggccatcatggtgtttgagcatacggggaacatcccagtcaccgtcatggaggccagcatattcaggaggccttactacgtgtcccacttcctccccgccctgctcacacctcgagtgctccccaaagtccctgactcccgtgtggcgtttatagagtctctgaagagagcagataaaatccccccatctctgtactccacctactgccaggcctgctctgctgctgaagagaagccagaagatgcagccctgggagtgagggcagaacccaactctgctgaggagcccctgggacagctcacagctgcactgggagagctgagagcctccatgacagaccccagccagcgtgatgttatatcggcacaggtggcagtgatttctgaaagactgagggctgtcctgggccacaatgaggatgacagcagcgttgagatatcaaagattcagctcagcatcaacacgccgagactggagccacgggaacacatggctgtggacctcctgctgacgtctttctgtcagaacctgatggctgcctccagtgtcgctcccccggagaggcagggtccctgggctgccctcttcgtgaggaccatgtgtggacgtgtgctccctgcagtgctcacccggctctgccagctgctccgtcaccagggcccgagcctgagtgccccacatgtgctggggttggctgccctggccgtgcacctgggtgagtccaggtctgcgctcccagaggtggatgtgggtcctcctgcacctggtgctggccttcctgtccctgcgctctttgacagcctcctgacctgtaggacgagggattccttgttcttctgcctgaaattttgtacagcagcaatttcttactctctctgcaagttttcttcccagtcacgagatactttgtgcagctgcttatctccaggccttattaaaaagtttcagttcctcatgttcagattgttctcagaggcccgacagcctctttctgaggaggacgtagccagcctttcctggagacccttgcaccttccttctgcagactggcagagagctgccctctctctctggacacacagaaccttccgagaggtgttgaaagaggaagatgttcacttaacttaccaagactggttacacctggagctggaaattcaacctgaagctgatgctctttcagatactgaacggcaggacttccaccagtgggcgatccatgagcactttctccctgagtcctcggcttcagggggctgtgacggagacctgcaggctgcgtgtaccattcttgtcaacgcactgatggatttccaccaaagctcaaggagttatgaccactcagaaaattctgatttggtctttggtggccgcacaggaaatgaggatattatttccagattgcaggagatggtagctgacctggagctgcagcaagacctcatagtgcctctcggccacaccccttcccaggagcacttcctctttgagattttccgcagacggctccaggctctgacaagcgggtggagcgtggctgccagccttcagagacagagggagctgctaatgtacaaacggatcctcctccgcctgccttcgtctgtcctctgcggcagcagcttccaggcagaacagcccatcactgccagatgcgagcagttcttccacttggtcaactctgagatgagaaacttctgctcccacggaggtgccctgacacaggacatcactgcccacttcttcaggggcctcctgaacgcctgtctgcggagcagagacccctccctgatggtcgacttcatactggccaagtgccagacgaaatgccccttaattttgacctctgctctggtgtggtggccgagcctggagcctgtgctgctctgccggtggaggagacactgccagagcccgctgccccgggaactgcagaagctacaagaaggccggcagtttgccagcgatttcctctcccctgaggctgcctccccagcacccaacccggactggctctcagctgctgcactgcactttgcgattcaacaagtcagggaagaaaacatcaggaagcagctaaagaagctggactgcgagagagaggagctattggttttccttttcttcttctccttgatgggcctgctgtcgtcacatctgacctcaaatagcaccacagacctgccaaaggctttccacgtttgtgcagcaatcctcgagtgtttagagaagaggaagatatcctggctggcactctttcagttgacagagagtgacctcaggctggggcggctcctcctccgtgtggccccggatcagcacaccaggctgctgcctttcgctttttacagtcttctctcctacttccatgaagacgcggccatcagggaagaggccttcctgcatgttgctgtggacatgtacttgaagctggtccagctcttcgtggctggggatacaagcacagtttcacctccagctggcaggagcctggagctcaagggtcagggcaaccccgtggaactgataacaaaagctcgtctttttctgctgcagttaatacctcggtgcccgaaaaagagcttctcacacgtggcagagctgctggctgatcgtggggactgcgacccagaggtgagcgccgccctccagatgcagacagcaggctgcccctgacgctgtactgtcccaggagcctcatctcttctgacgggacctgccactgcacaccagcccagctcccgtgtaaataattatattcccagcataacatggaagctctttgttgcactaaaaagtggattacaaatctcctcgactgctttagtggggaaaggaatcaattatttatgaactgtccggccccgagtcactcagcgtttgcgggaaaataaaccactggtcccagagcagaggaaggctacttgagccggacaccaagcccgcctccagcaccaagggcgggcagcaccctccgaccctcccatgcgggtgcacacgaagggtgaggctgacacagccactgcggagtccaggctgctagaggtgctcatcctcactgccgtcctcaggtgggttcgggcttcaccgcctggccctctgtggtcacagaggggctcggtggcccaggtggtggttccgcctccaggggcagggccttgtcctgggtctgtgtcagcgggtgcaccatggacatgtgtacattgaggttgtgggccttctcaaaccgccggccacactggtcacaggcaaagtccagctcagtctcagccttgtgtttggtcatgtggtacttgagggatgcccgctgcctgcactggaacccacagacctcacacctgggggacagaggcagataaaaaggtgcgagggccacagccctggggggggtcctgactcacacttactgcaaaggcttggctcccgaatgtcgcatttggtggacgagaaggtgcttccgctgcttgaaggtttgtccacattcgtcacagatatagttccgcacctctgagaggggagagtccagtgagtccaggcccctgatgctccaacctcccggggggacgacgatgacaatgtgaaaccatcacagctgggaagacatttctgcacatggttcaccatgcagtgggcccaagcaaggggcctatgagggcctcgtttattaagatctttaaactgctttatacactgtcacgtggcttcatcagctgtgtgcatttcaggatggtttttaaagaaacctcagaaagctatttccttaaccacaaaananaaaaaaaaaa

SEQ ID NO: 75212 - DNA, 3773 bp, Homo sapiens
tagaaattgccatttggcctgctagaaaggaaaagtgaaaggatgatattctgcaattctgactaatgaaatttatttataaacattaagtaatgctgatgttctagtaatattctctgcacacttattctttaagaaacttttgcctgaaaacagacactgagaatttttatatgatttatttaataataaaccaattaaagatacaaaaatgtttagaggattccaaaatttaaatttttgtttaaatacaaattcactctgtaatatgaaaacatagcattagacctctaaacataatgatttttttcatctacaaaaatttctgttatactagaaaatttgcagaagacatttttttcttgtgacattaaatgtacattatttacagttgaaaaagtaatctaaaaacatttcatttcagaaagttggatatatatgttatctttgtatgcaaccccccccaagtccgcccccagtaaaaaatgatccaaaatataaagcaattatgcttttataactgactactcagccagattagcccaaggctcaagttgctttcttggcccttaagaaagagtcttgactctctcaaaatagcagtattctgtttagcacttagcaacacaagtttactaatggaccgcaaagcacagtggcctaaagagttagtaaacaaattatttaggaagaatttatggcagatcttacccataacagatgaataaattttgttgggtcacttatttctctgcaacattttagctattcttacattaggaaataacctgataatgatttaattgacataacttgaaaatataggtattagaattaaaaaaattagaactagaagagaaagtggtgatcatctagtctaatccaatacatctcttccttttatgagaggaactaaagcccaaagaggtcaagattacatagctagttagtgggagtgccattcttaggctgatgcttttatactatcctgcttctgaaacagggtcagccataccaccagcacctccaatttttcatgttattctacatattcatagttctatattatatagtgcagtcaactaaagtcaatctaagtgacaccataattttaacaaagcataaaataggttttttgcatttgaaagagtcaagacttaacttacacaagtggaatgaaaatagttcctatataaatttcctgttgccttctatttaagttctgtatttacaaaagaatcagaaaatctaatacaatgtaaaattagaaaagaaactttaaaaatgcttatgatatagcaactgaaataaaaatctcaaaagaatgtcttcatagtgtaaaatgcctgttccttcacgattgaattctgaaacatttagataacaaagagaaacagttgagttttcctccctcatctaacaaagtcaaaattaactctatttttaacaattacaaaattagaaacctccttagaatttatcttagaatcagtcagtctgcatataattgaaaatgttcaattaacaaacaattattcataagctttggtatattaactaaaaagagttgggttccagcagttcgttttgtttcatagctacctgagaagtaaatccattggaactggacactaccatcacataaggctgtggctgctgctccgttttctcagtgttctctttcaaatgatcttcagattcctttttctctacttcctgtgtaagagtttttgtttcttgagttttgataactgaagtgattacagtgccaggtgggtgagcaaccagctgtgaacttccgaggagaaaaagggtcaccacaggtgcagtagccactgaaggatggagaggaagcccacactgacggttccattgcaaatggtctgaacattgctagtaaggacctgctgaaaccctggcagggcccaagacaattgaaggaggagagcccgccttttgtgactgcagcatgacattttctttcagtactgtcatgggctgtgatgatggaatggcttgtaaaataaacttctgagatccagtacctgctgatggatctgtgctggctataactgttgtgagtggcactgtttggagtgttactgtatgcaaactgctgattcctaggagacacaaccactggaacttgggttggagcctgtatagtccctaatactctgaacggaagaatttaatgtttcatcctgcatggtactggttctagctgcttctccctctgggacagcctgtactggctgtactacatgaacagtccggaagagctgggtaggatatggagactgcgtgggctgcactgtcctcaaaacttctgatggttgtgcaacttccacaggatctttgggttttgcagctttagaattccctggttttagaactgtagtggctcctccttttacccctggacttgaagatactctcgaccggctggtttgattcctatttgaagtggctgatgaagatagcgatggatctgaagactctatgctggaacttggatcctcatcatttatatatataagatcttttggcatttctttaaactgatacaccaagcgctgaccttccacttttgccagaatacccctttggtaatagtacctgagtgctcttcccatgggctcataattcatatcagggtttgtttttgtgcttccgccacaacctggacactggtttagaatccaccaatttaaaaatgcctttctctcgctgggtccacttgatgtatttaggacaagtagccttgtcctggagcagtgccagtaaaaactcccaaagataaattgtgtttccctttccatctttgtttttcttcttcacagatatatttggcgtagtggctggggaatctggtcgtggtggtttagtttttcttccttttttcctcttaggctgttctggtgatgaggctcccggtgagtctgcatatttttcttgcacctgctgtgtttccatcacttcaggaatcccatctaatgtgacggacacatgggtgactggggcaacaaccatgtcatcttcaggtgaactaaatatattattatttattcgtttttcatccagcatagggccaggggaatccatattgaggagtgcctcagcagcctcaatagtttcaattgtttcatccccgtcatgacaagaagcttcaactgtaagggtgatgtcatcatcatcatcgtctatgatttcttcttcagcaacatccagtgaactctcagtaatcatgtcattgggctcttccacacaggctagaccggcataactattgagaatatcagcaccaggaacatgttccacaattacggcaggaaaaatagctggatcaccaagctgtcgttcatcctccatgacgttactagcaaattcaaatactaggtcgttctgttggacaacagcagccataataaagcattccccttagatccacatgagaaaaattccaagaagattcacgtatcaggcagcaaaatccagtgactgatttgggtaaaaaaccctcagctctgtctgtggagtaattgtatacccaagttttctttagggaaggtgcttcagttttcctggttcattgatattctagtcaaattgagacaatttttctgaaatttttcttctctcaagcttcttggccttcaagtattctttctctatcgtcttttgagcttgaaaataaaaagcaatccgacaagttttagctgttaaaatggctcctgtagattggggaagtggtgtctgtgcttcagacgaaa

SEQ ID NO: 75213 - DNA, 802 bp, Homo sapiens
cgacaagcaagaagagcgacacgcccagcatgttggcgaagatggcgagctgcacgtccgtgatcatcctgaccagtccggctcggctcccgcgtccgcgtctactgcgagaatgaagactattctcagcaatcagactgtcgacattccagaaaatgtcgacattactctgaagggacgcacagttatcgtgaagggccccagaggaaccctgcggagggacttcaatcacatcaatgtagaactcagccttcttggaaagaaaaaaaagaggctccgggttgacaaatggtggggtaacagaaaggaactggctaccgttcggactatttgtagtcatgtacagaacatgatcaagggtgttacactgggcttccgttacaagatgaggtctgtgtatgctcacttccccatcaacgttgttatccaggagaatgggtctcttgttgaaatccgaaatttcttgggtgaaaaatatatccgcagggttcggatgagaccaggtgttgcttgttcagtatctcaagcccagaaagatgaattaatccttgaaggaaatgacattgagcttgtttccaaatttcagcgggctttgattcagcaaagccacaacagttaaaaacaaagggtatcaggaaattttttggatgggtatcaatgtctctgaaaaaggaactgttcagcaggctgatgaataaggtctaagagttacctggctacagaaagaagatgccagatgagagttaagacctacttgtgatatttaaatgatgcaataaaagacctattgatttggaccttc

SEQ ID NO: 75214 - DNA, 4241 bp, Homo sapiens; identical to SEQ ID NO: 60644

SEQ ID NO: 75215 - DNA, 3845 bp, Homo sapiens
cggacggcaagcggcgggagattttcaaaatgggagcccagaggcaccgcccaggcctcggaaggtgtcagggagaactttccgtggtttcagcgtcgtcgcctggagcggcggtttagagagccgagcctgatgggcgccaaggccggctggctgcttggagcgctgcctcgaagggactgcgtgaaggaagctaatccggagaacccaggccagagcctggaaatatggcgacctgcatcggggagaagatcgaggattttaaagttggaaatctgcttggtaaaggatcatttgctggtgtctacagagctgagtccattcacactggtttggaagttgcaatcaaaatgatagataagaaagccatgtacaaagcaggaatggtacagagagtccaaaatgaggtgaaaatacattgccaattgaaacatccttctatcttggagctttataactattttgaagatagcaattatgtgtatctggtattagaaatgtgccataatggagaaatgaacaggtatctaaagaatagagtgaaacccttctcagaaaatgaagctcgacacttcatgcaccagatcatcacagggatgttgtatcttcattctcatggtatactacaccgggacctcacactttctaacctcctactgactcgtaatatgaacatcaagattgctgattttgggctggcaactcaactgaaaatgccacatgaaaagcactatacattatgtggaactcctaactacatttcaccagaaattgccactcgaagtgcacatggccttgaatctgatgtttggtccctgggctgtatgttttatacattacttatcgggagaccacccttcgacactgacacagtcaagaacacattaaataaagtagtattggcagattatgaaatgccaacttttttgtcaatagaggccaaggaccttattcaccagttacttcgtagaaatccagcagatcgtttaagtctgtcttcagtattggaccatccttttatgtcccgaaattcttcaacaaaaagtaaagatttaggaactgtggaagactcaattgatagtgggcatgccacaatttctactgcaattacagcttcttccagtaccagtataagtggtagtttatttgacaaaagaagacttttgattggtcagccactcccaaataaaatgactgtatttccaaagaataaaagttcaactgatttttcttcttcaggagatggaaacagtttttatactcagtggggaaatcaagaaaccagtaatagtggaaggggaagagtaattcaagatgcagaagaaaggccacattctcgataccttcgtagagcttattcctctgatagatctggcacttctaatagtcagtctcaagcaaaaacatatacaatggaacgatgtcactcagcagaaatgctttcagtgtccaaaagatcaggaggaggtgaaaatgaagagaggtactcacccacagacaacaatgccaacatttttaacttctttaaagaaaagacatccagtagttctggatcttttgaaagacctgataacaatcaagcactctccaatcatctttgtccaggaaaaactccttttccatttgcagacccgacacctcagactgaaaccgtacaacagtggtttgggaatctgcaaataaatgctcatttaagaaaaactactgaatatgacagcatcagcccaaaccgggacttccagggccatccagatttgcagaaggacacatcaaaaaatgcctggactgatacaaaagtcaaaaagaactctgatgcttctgataatgcacattctgtaaaacagcaaaataccatgaaatatatgactgcacttcacagtaaacctgagataatccaacaagaatgtgtttttggctcagatcctctttctgaacagagcaagactaggggtatggagccaccatggggttatcagaatcgtacattaagaagcattacatctccgttggttgctcacaggttaaaaccaatcagacagaaaaccaaaaaggctgtggtgagcatacttgattcagaggaggtgtgtgtggagcttgtaaaggagtatgcatctcaagaatatgtgaaagaagttcttcagatatctagtgatggaaatacgatcactatttattatccaaatggtgggtagaggttttcctcttgctggatagaccaccctcacctacttgacaacatcagtagggtacagcttttgacaatttaccagaaaaatactggcgaaaatatcaatatgcttccaggtttgtacagcttgtaagatctaaatctcccaaaatcacttattttacaagatatgctaaatgcattttgatggagaattctcctggtgctgattttgaggtttggttttatgatggggtaaaaatacacaaaacagaagatttcattcaggtgattgaaaagacagggaagtcttacactttaaaaagtgaaagtgaagttaatagcttgaaagaggagataaaaatgtatatggaccatgctaatgagggtcatcgtatttgtttagcactggaatccataatttcagaagaggaaaggaaaactaggagtgctccctttttcccaataatcataggaagaaaacctggtagtactagttcacctaaggccttatcacctcctccttctgtggattcaaattacccaacgagagatagagcatctttcaacagaatggtcatgcatagtgctgcttctccaacacaggcaccaatccttaatccctctatggttacaaatgaaggacttggtcttacaactacagcttctggaacagacatctcttctaatagtctaaaagattgtcttcctaaatcagcacaacttttgaaatctgtttttgtgaaaaatgttggttgggctacacaagttaactagtggagctgtgtgggttcagtttaatgatgggtcccagttggttgtgcaggcaggagtgtcttctatcagttatacctcaccaaatggtcaaaacaactagggtatggagaaaatgaaaaattaccagactacatcaaacagaaattacagtgtctgtcttccatccttttgatgttttctaatccgactcctaattttcattgattaaaactcctttcagacatataagtttaataaataacttttttgttgactttcaagtaaagtgattttttttaattttaacataaagtcttcagaaagcctttctatggaaaggaattttaacctataatgtaaagggatgtattctgaggggaacaaggcaggaatggaaacttgaggtcacttactaaatatagtggatataaaatagaacacccgaccttgccccctagacccataaccccccgaaccttacctatgttcatatatttgtattgaacaattcttttaaaagcaaaaatgtaaatgatgtgtagtttatttgtgcttttattgttttccctgcgtctcagacatgttgagaatcatggacaaaacctgctggaattttggaatttttgaagatgtaaataatgtgtatttatgttataagtaacatatgtaaacatgtatatttgttttatatttatttttgtaacaccagtgtctgatgaaacatttttgcaaatgcattttataaaaaaataaatatagtgataagttacattatcttttgattcatttaattaaatacttatttttaaataacttaccagtaaactcactttttaaattttgttgcctgttgaggagccaattaaattttaaatattaattttgcaaatgttaaatacattgtttctctattatctgaaaa

SEQ ID NO: 75216 - DNA, 2846 bp, Homo sapiens
aataggaatcctttctcaaggaatgagttgtgacctgtttactgtctctttagaagaaaaactccactggaaaccattcaccatgtgtgattgtcttctgttatcatttgtcttacaggcggctattgcagacggctaatttatgcttaacttaggaagagataaggcaagagctagatttttttcatgtgatcttttccaagcttcaacttaacttaactacatttctctgtatgatgatgtctcttacttctacaggttccttgagcaccaaagatgattcattacttctgtataggtgacagctgcttataaaagcatcttagcagataagcctattaaaattgtgcttttgtaacaatgttgtggttgctagaataaataccattaacaaatgccttttgagtatgcttgatagtgcttttgttttggattcactttttatgctttaaccttcatttgcctctagaaacccaaaacacaataaagtacagaataagaccttagtaataacattcagaattttcttaaattgcatgtctgagtgttctaaaaatttttcaacatttccctttcacaagtgacttattcccccagttaagttattcacggtttcaccccacagcgtgaggggcagatagaaaaaaaaaaaaaggaaacatcactaccgaattgaaagtagggtataatactaagttcacaggaaatcaagaaaaaatgacatacctgaaatctctcttttggtaaaatctatttcaggtgcataccacccctttcccggaaaagaacagataacctcttggttattttaatggggcaggatcagaagaggaggtgtgggatgctaactcatgttagatcacacaagcataataaataccaagctatgcttgataaaatgaacgtaaggcaaaagtgttacagtctctgattttaatgagtcaatctcaaggcaaagctataaccttttccatgtgaaccttaaaacggaaatcctacgtgtttggctcagctaccatagacatgtcttgccccagagttccagtgtatttttcacctttagtttcttggctcctctccgcctctacaccagcctcatatccacacgggatgctctctgctgagtattgtcttgagttagttctccctctcatgttctggctgatgctactcatggtcatagtatcacctgagggggaaggagtatgctatgaaggtgaaaaatgctaccatagcattttgtttgtttataaaatgtcaggccctggttccatttttcccccctcttatatctaaattttgaaaccactggcctctaacagtctgtagtaggcttaagttcaaggtgccatttgcttctctggtgcctgtttgtgagccaaatagaggaagagtatgctagagagagcgctgaccaggaagatcacatcaaaccaacggtgatagaagttgaactgcagttctccaaggacttcagtgattatggtgcggtattctaaaggcatactcattcggatcagcagcacagaggagacaaagtacatgccctgtaagtcaaatgaattaatccagaagtgactcattatctgtgctaatagcaggacaatgacattggaggacttactgctagagatggcataaaagaacttggtaagagtgatcagcaatcctctgatggatgtgacgatgattattccaacaagaatgaaggaaatgtgttgggaccaaaacttcacatcaaattggattcccagataattcacagtgatctcaatgcctcttgtgacaggatccgttttcccaactcgatcaaaaacaatattgatggtagccatgaaaattttccaaacacagtaaatagagaaaaagtaaccaagaaaattaaaatttttccccttgaaggttttggagtattctattctctccttggtagcatatagatcagctgtttccagaaaaagctgcctgcttaattcttccaaagcatccacttcctgttgaataagagtaagattttcacttcctgatgctgaagtggtaacactttttatcattccccagaaacctgatggtttgttatgcacttcccccttctggaacattgttctccgtgccattgccatccttttctttttgcttatgatcatatccatggtttgcagcagtcgccgttccagggctagaatatccgtgtcagtcacattcctgaggaagtaagacatgtaagtgtatgggcagttgacagcaccaaatccagaaagaagagccatgagagtcactccaatcacaccaacccggctgatgagctgttctatggataagatcccatgttttgggctgagaatgggaaagggatctcctagtttccagaagaaatacataaaggtcagccataagagacaggaaaaaagcagtcgttgtttattgcagtagtcggatattgctcacaataaaataggccaattgtaaaaaaggcaccattggaaaaccaggatcagcagaattacacacaggttcattttccagtgaaaataacgggagctgctattcaatactcctaagatttcaaagatgatgagctcaaacatggtgcaagaaaatgcaaacgtcacggagaagatcacctgtacaacatactgacgtatctcatagtctttaaacaattggcgcatgaagaaaagccacccaaatccaaaaaatagtatctgggaggtaatcatgatgctggagtcgatgaggaaactcatggcgaagtgtaaggaaggctcctgcctccacttcccactccccgaggccacagcacgctcgacaggccccctcacacggtctgccttctcccaggtgct

SEQ ID NO: 75217 - DNA, 1875 bp, Homo sapiens
  misc_feature (1)...(1875): n = a,t,c or g
cggccgccgcccccgcctgggccgcgctccccctctcccgctccctccctccctgctccaactcctcctccttctccatgcctctgttcctcctgctcttacttgtcctgctcctgctgctcgaggacgctggagcccagcaaggtgatggatgtggacacactgtactaggccctgagagtggaacccttacatccataaactacccacagacctatcccaacagcactgtttgtgaatgggagatccgtgtaaagatgggagagagagttcgcatcaaatttggtgactttgacattgaagattctgattcttgtcactttaattacttgagaatttataatggaattggagtcagcagaactgaaataggcaaatactgtggtctggggttgcaaatgaaccattcaattgaatcaaaaggcaatgaaatcacattgctgttcatgagtggaatccatgtttctggacgcggatttttggcctcatactctgttatagataaacaagtttttctagatctaattacttgtttggacactgcatccaattttttggaacctgagttcagtaagtactgccccagctggttgtctgcttccttttgctgagatatctggaacaattcccacatgggatatagagattcctcgccattgtgccatggcctggtgtgccatgccaggagtagtgtccaaacacgttgggcggcccaaatcagtgttgtaattagtaaaggtattccctattatgaaagttctttggctaacaacgtcacatctgtggtgggacacttatctacaagtctttttacatttaagacaagtggatgttatggaacactggggatggagtctggtgtgatcgcggatcctcaaataacagcatcatctgtgctggagtggactgaccacacagggcaagagaacagttggaaacccaaaaaagccaggctgaaaaaacctggaccgccttgggctgcttttgccactgatgaataccagtggttacaaatagatttgaataaggaaaagaaaataacaggcattataaccactggatccaccatggtggagcacaattactatgtgtctgcctacagaatcctgtacagtgatgatgggcagaaatggactgtgtacagagagcctggtgtggagcaagataagatatttcaaggaaacaaagattatcaccaggatgtgcgtaataactttttgccaccaattattgcacgttttattagagtgaatcctacccaatggcagcagaaaattgccatgaaaatggagctgctcggatgtcagtttattcctaaaggtcgtccctcccaaaaccttaccaacctccacctcctcggaacagcaatgacctcaaaaacactacagcccctccaaaaaatttagccaaaggtcgtgccccaaaatttacgcaacgcactacaacctcgcagtagcaatgaatttcctgcacagacagaacaaacaactgccagtcctgatatcagaaatactaccgtaactccaaatgtaaccaaagatgtagcgctggctgcagttcttgtccctgtgctggtcatggtcctcactactctcattctcatattagtgtgtgcttggcactggagaaacagaaagaaaaaaactgaaggcacctatgacttaccttactgggaccgggcaagttggtggaaaggaatgaagcagtttcttcctgcaaaagcagtgtaccatgaggaaaccccagttcgctatagcagcagcgaagttaatcacctgagtccaatataagtcaccacagtgctgcaggctgactctgcagagtatgctcaaccactggtaggaggaattgttggtacacttcatcanagattac

SEQ ID NO: 75218 - DNA, 1734 bp, Homo sapiens; identical to SEQ ID NO: 60607

SEQ ID NO: 75219 - DNA, 4344 bp, Homo sapiens; identical to SEQ ID NO: 60650

SEQ ID NO: 75220 - DNA, 2209 bp, Homo sapiens; identical to SEQ ID NO: 60651
  misc_feature (1)...(2209): n = a,t,c or g

SEQ ID NO: 75221 - DNA, 2002 bp, Homo sapiens
tttttttttttttttttgctagtttatatgaaagaccatttttaatatgaaaagagaaaaacaatttgaaggccccacaatttgttgtgtaacaacataatttcaagtaaagtgaatgtgattaaaacatcttgatttcacaaagccattcagaggaggcttcgacaaacgcaaagcgtacccaaaccctggagggtcacatcccggctgctacaaacctcggcggggcggcccccgtcttgcggctcgggacagcgcagactatgcaggggccgcaggggaccacgcagattggcacgcccgttccccatccccgcagcgcgtctgcaccggagactctgcggggattgtagccggagggcgggccgggctccgaggcgctgctcaggcattggggtttgtcctcatgagctccacgtcggcgtgcaccatctccctcaccagctcatcgaaagcgacccggggcttccagttcagcttctgtttcgctttggtgcagtcgccctgcagaaagtcctcggcggcagcgtgcgaccctctttctaacgcggccgtggatgtttcttcccgggccgcagccaagcgcggttcttcctgggcggtggctttgggcttttcgtacccacagtcaagtcagttcacgtcgcctcccgcacacacgcgttcataaaacgaaactggagtttcacgaagcaattcttaggcttagcgtccaggaacgctgtagacggtctattctattctacccctattctactcggttcgattctgttcctaagaaaatgccgatctcgacccacttgtacttccacgagcggagctgcagccagcagctctgcaggaccccgcactgcccgccaccgtcccctctggcagtgccttcctcctcccgctttccccaactgctccactcgaggaaaccggaggacaggttcagctcactgaaaggggtcccaacagaggtgaagatccaagaaatgacgaagctgggccacgagctgatgctgtgtgcgccagatgaccaggagctcctcaagggctgtgcctgcgcccagaagcagctacacttcatggaccagttgctcgataccatccggagcctgaccattgggtgctccagttgctcgagcctgatggagcacttcgaggacaccaagggtcaagaacgaggccttgctgggggagctcttctctaagcccccaacctgcagatgctcctgaatccagagtgcgacccgtgggcccctggacatgcagcccctcctcaacaagcagagtgatgactggcagtgggccagtgcctctgccaagtccgaggaggaggagaagctggcggacgttgccaggcagctgcaggagagtgctgccaagttgcacgcgcttagaacggagtactttgcacagcatgagcaaggggccgctgcgggcagcacgaccatcagcaccctagaccagaagctgcgtctggtcacttccgacttccaccagctaatcttggcttttctccaagtctacgacgacgaagctgggcgagtgctgccaagcgcccaggccctgacctcccaccccgtgcggcccccatcaatcccaggccacgcaccaagaatcttgacttcctacagccaactgctgcaagtggtcatgacagttgctgacacctctgcgaaggccgtggagaccgtgaagaagcagcaaggccgagcagatctgctggggtggcagcagctccgtcatgagtctagctaccaagatgaatgaactaatggagaaatagaaagtcttcagtgcatggcctacgccaaagcacaggatggggcgggcaggaagccctctcccaagatcgagttggccgaggatggatgattgtggcagcagaagccgttgcagccccacgttgttctctaggcagggacctttggcccctttggggagggggggaccagacggggcgggtttggacttgggacacaaagaaagccttggtttttaagcaaaaaaaaaa

SEQ ID NO: 75222 - DNA, 3060 bp, Homo sapiens; identical to SEQ ID NO: 60653

SEQ ID NO: 75223 - DNA, 2262 bp, Homo sapiens
atggtaacgtggctttacagatttttacccacttcaaatatggccgccaagctccgttctcttttaccgcctgatctacggctacaattctggcttcatgcccgcctccaaaagtgcttcctctcgaggggttgtggttcttactgcgcaggcgcaaaagcaagtcctcttccgggcaaaatggcgatgggactaatgtgcggacgccgggagcttctgcgcttgctacagtccgggcgtcgggtccacagcgtcgcagggccctcgcaatggcttgggaaaccgctgaccacacggctcctattcccagcagccccgtgctgctgtcgcccacactacctcttccttgcggcttccggcccccgcagcctcagtacctctgctatctcttttgcagaagtccaggttcaggcccctcctgttgttgctgcaactccctcacccacagcagtacctgaggtggcttctggagagactgcagatgtagtccaaactgctgcagagcagagcttcgctgaactggggctggggtcatacaccccagtgggactgatccagaatttactggaatttatgcatgttgatctgggcctaccttggtggggggccattgctgcatgtacagtctttgcccgctgcctgatttttcctctcatcgtgacgggccagcgagaggcagccaggatccacaatcacttgccagagatccagaagttttccagtcgaatcagagaggccaagttagcaggagaccatattgagtattacaaggcttcctcggagatggcactttaccagaaaaaacatggtattaaactctataaacctctcattctccctgtgactcaggccccaatcttcatctccttcttcattgctttgagagagatggccaaccttcctgtgcccagcctgcagacaggtggcctctggtggttccaggatctcacggtatccgatcccatctacatattaccactggcagtcactgctacaatgtgggctgttcttgagctaggtgctgagacaggtgtgcaaagttctgaccttcagtggatgagaaatgtcatcagaatgatgcccctgataaccttgcccataaccatgcatttccccacggcagtgtttatgtactggctctcctccaatttgttttccctggtccaagtatcctgtctccggattccagcagtacgcactgtacttaaaatcccccagcgtgttgtacatgacctggacaaattacctccacgggaaggcttcctagagagcttcaaaaaaggctggaaaaatgctgaaatgacgcgtcagctgcgagagcgtgaacaacgcatgcggaatcagttggagctagcagccaggggtcctttacgacagacctttacccacaaccctctcctacaacctggaaaggataaccctcccaatatccctagcagccagcagcagcagcagcaaaccaaagtcaaagtatccctggcacgacacacttggctgacttatgttctgtgcgcattctggcaggaattctgtctcttcagagactcatcctcaaaacaagacttgacactgtgtccttgccccagtcctaggaactgtggcacacagagatgttcattttaaaaacggatttcatgaaacactcttgtacttatgtttataagagagcactgggtagccaagtgatcttcccattcacagagttagtaaacctctgtactacatgctgcttcctgatacttattgaacagggaaatgagtgtgcacttcagaaaactgaagaatacccagcattttgggaggccgaggtgggtggatcacctgagatcaggagtttgagaccagcctggccaacatggggaaacgccatctctgctgttttacaaaaatagccacacgtggtggtgcacacctgtagtcccagctactcgggaggctgaggcaggagaattgcttgaatccgagaggcggaggttgcagtgagccaagatcgcaccaccgcactccagcctgggcaatagagggagactgtctcaaaaaaaaaagaaaacctgaagaatagagtgagtcatgattgcttttgctggcccatggccttggaaaatataatgttttaacctggcattaagggtttaaacttccacccaggcgcagtggctcacgccagtaatcccagcacttttgggaggccaaggcgggcggatcacgaagtcagcagatcgagaccatcctggccaacatggtgaaaccccgtctctacta

SEQ ID NO: 75224 - DNA, 2952 bp, Homo sapiens; identical to SEQ ID NO: 60654

SEQ ID NO: 75225 - DNA, 1343 bp, Homo sapiens; identical to SEQ ID NO: 60655

SEQ ID NO: 75226 - DNA, 3730 bp, Homo sapiens; identical to SEQ ID NO: 60656

SEQ ID NO: 75227 - DNA, 4082 bp, Homo sapiens; identical to SEQ ID NO: 60657

SEQ ID NO: 75228 - DNA, 4700 bp, Homo sapiens
tttttttttttttaagtcagaaacaggaaacgtttatttaaatagtgtagtcttaatttctttaatataaaacccccccaaatctgatgaaaacaaagttttatataccatataaacaagatttgtcagatttgaaagtgaaagttaaagtaatttacagttagcttttaaccctctcgggacatttagatacatcctcgataatccatcttgtaattagtgtgtgtcaattttacaatacactgggggaaaactcaggctattgtatttaacgggtacagtttcatttatcaaagtgtttcccattaattcccattattaggtggacagctaaccaagtgaccccatcaaaatgaagtgaatgacattagactgtggccagagtgaaccacatctgggattggctttctataattcacccagtttgcggggaagtaaacattctttggatttgttcataatatactgaagttacctataacactggtgcagtaacacagctagttcctctgtattggttatgggtaagaacgggattttggtaatataaagttaacaggaaaaaaatgcttcacacattatgtggtggaaacttatctccacaaaaagaccattaaaataaaaaggatagagggaaaaataaaccatgcagaagagacggcttcccccatcttccaacctgtttcccatgggctcactcattgcccatacatcacttgccacactatcaagtgactcctttctgctttggtgacagaaggttcaagtggaagatcctctccaagaagttctgattctccaccttcatcacccattcggaagtcgatgtagccctctcctccactgatgacaagcatagacttcaagggcgtctgactaccaggctcctgtgcagatggcccctgcctttgtcacccgtcagatccgtgccactactgctactttgtgggctgatgacttgacctgggactgccacaaagaatttcacagcatcccggtgcccatggaagcaaagctgtgcatgtgccattgaacaatagggtataaatgtccctggagtcactttatcactgttttcatcaccatatacacggattacacttccaggacgatttcctggtacacctgaggttttatttgccctcagccccagtaaacgtccctggtggaggattacggtttctgtcaatgggatggagataatgacaccatttcctgtccccacccacaaacgattacaagacaccataagagctgtaattctcacaaaagagaagcccagttttccagtacctaacattttgcttacataaggctcaatgtccacatcctgtagatgttgataagtgtgtgcatgatagagacggagcgtagaatccaagcgaatggagacccacacgccatcccccacccacgcaagctgtcgcacttggctctccttcctgggatgtgcatcaaaagatttctctattttcatggcctttggctgcaccacatagattttgttcctatagccacaccagactttgtcatgtaccacagtcatgcaacggatggaatgatgaggccgtccaaggtctaagaggtgatagtttgacaaatcccactgcccatccactcctctgtgaaagattgcaagggtgccgtcagccagggctactaacacgattcccttcacgtgtacaatactgagaatcgaatctttaagtttaatggaatggagacatttcctccactgggctacagatgaatggacatacaaacagccattttgagctccaagccacatagttggtaaaagactactcattttctgggcttcttctctcaccaagtcttgttcatttggcagtactgatatttgatctttatatgcatctgagtcattgctcgactgatacactggggagaggtcttctgggatctgaacttcccaaaggatctgtaaagacatgctctgtgtagacgccagtttgggagatgtccaactgtgtcttcagctgaccccgcattcccttctgtagcttcagttgctttcttctgctgttggaacattttcatcaacctcactattttctgcttccatttctggtggtttatccatcactggagaagcaccatttgtactaggggaagtggcagctcccgtcacaccttctgcagaacaaccaaccactgtgatgcctcctaacaggctgtctgtctctgctgagctgttgcttgtcatacttccacataaagatgctttgtctacctgaccagattctgaaagatcttctcctgcagggtagtctgtttctcgtgcacctggcacacttgcaatgcacagaacatgagagttgcaaacagtgaaactgtctaggatgttgccaggttgaacagcatcaataataagaacttttgtagccgaatgagtgctggtacagatccaaactagactggataattcttcttgattttttaactccttctgctgttccttaagttcctgatctaacttatctaaactactctgagaggcacttcgctgtttactgccttctgtatccaaaccagcaacatccttgtaaaatacacttgctccaacaacagaaccaccatctctggtcttcccaccagataaattgactccaacagcacaccacagcttcattgatgtatcttttttatccagaggtctgagatagacaggcacaggtaaatttttcatcttattttcaccttgaccattggttacctgtttgtacttctgaggcagactccagccaaaagcctgcactctaccgtcttccttctgaacatgtgcttttacctgacgatactgctctctcttttgttctctgcgtgaggctaaactagcttcagtttcttcactaaggaaatcaaaggctttggacttatccccagggagctgagataaggtgctgcttcttttcttgacggacggagtaacatgagacgtgggtgcattgtacttcagattaacaggtggttcaggcttcttagtcgtgttacttgaggagctgaaaagtcggctaaaaaactgccaaatgcttgacctttttttttcctgcatggctggattttctcgtgatgcccgaatcatctctgtccatcgaacagcttcctgaagctccatcaatctctctttatactggtttcgctccatgagaacacgggccatttctactctagtaaaccgtttcctctgggctgtgggaatatcactatcatcgtcatcttttgctttttgccttgcatcttcagcttctgcccgagctttcctaagctcttcctccaattctctgttcttttcctctagtttcagtttggcttgcttcacagcctccaattccccttgcagcacatctttctcacaggtcagttcatccacttttgctatcaaatcattcttcactatgttcaaagcatttttggtttccaacagttgtgtattttctaatataagattctcaacttcccgacccattcctagtaaatctgctccttcatccacatctcctattaggcctgagccagctgaagacagttcttcaaagagagattctgtattgcgatcaaaagctttgttctctatgcctttggtgggagtgcttgaacctttatatccactgagatctttgtccatatccagctcaggagtagattcgatgattgcttgaacttctgacttttcttcattttcagcagagccagtagatacatttctagtttcctgggctacctgtacttcaatgtgtttgcttatctctgatttatttggcgcatctgtaaccttcacaaatccttcgttttcttcctttaagggagtatcagtaggaattgttgccacatctgaattagctgttgatgctggagtggtagctttagatccgccttggctaacatcagaaagctcatccttcaggctggtatgagaacgtggttgacttaattcctgaaatttccattgctcagatccaggggtctctcctcctttctgagcatcaggtgtaagcaatccatctccagcaggtaatgggaaaattcctaatgatatagggcgttcttttctaattctactatgagctgtggattctagttgatcactccctgagagctgatgaagttttgttctttctaaatgttccatataattatggatcatctcagtgtgtctttgatgtaatgcattatattccttcttcagttctgcttctctttcttcaagtatgctaatctggtcagcatagtttttcgctttcagctcaagttgtcttgtttgagattctaaagattccactcgggtctgtaagtcctttttttcctgttcttgagagtcttcaaattcaatgaatttctcctcagcgtgcttgcgcagcgccttctctcgctcgtactgggtgatgagctgctcgttgtcgtcccgcagcagctccagctccacctggtgctcctggtcctgcgcgaacaccgagtccaggttctccagcacagccaccaccagcgggatcagctctttgaccacctcctcgtcatagcgcacgataagccgctcgaactcgcggtagatggagccggccaggccggacacccgctccgacatcacggccccggagccgccgggctcctcctgatacaccacaccgtcctccagctccatggttggcaagcggacgggcgggcggcccggggcgtcg

SEQ ID NO: 75229 - DNA, 1926 bp, Homo sapiens; identical to SEQ ID NO: 60659

SEQ ID NO: 75230 - DNA, 1620 bp, Homo sapiens
ttttttttttttacaaaaccaaaaaaccaaaaatattttattgctgagtcatcctggggttccataaaggaccccaagccttgcttggagtctatagctttgctaggactcccatgacatcaggatagagattgaggcacggggtcctttgggttccgattaaggaactatctactctgattctgttgatcttattagtccctccaggtcacctctacttcatctgtccgatacctctgtgtaaccccagaatcactgagtggggtcctgtgtccagcccgaaacatctcccagccagcctgggctatcatcgctccattgtcaatacagaatctctcatctgtagcaaaaagccgggctccacgttcctggcacattgttgccatcatctcctgtagcctcacattacaccccactcctcccacaatgagggcctcctgggagccacaatgtgccatggctcggctctgtgatctctaccagcattgcaaacacagtttcctgcagggagaaacgcagatcctcaggagtacactcgcctgtggccagcatccgatgggctacatcctcaatgaaagacaggatccctgagaatgagacgtccatcccctttacagtgtatggcagctcaactagcttcttgcctcgctttgccatctgttcaatgttgtatcctggacttgggtcgttagaaatcttcagcactcgagcaaaacgatccagacaattacccactgcaatatcgatggtttccccaaagatacggtaacgatgttccgagtatgcaatcacctgcgtatttcctccactcacatacaacacggttgggctggtggctccagtgatgaggcggcccatctcaatgtggcctatacagtggttcacacccaccaatggcttattccacagctgggccacagtacgggccacaacagccacagaaaccagtggggcacccatgccagggcccttggtgtatgcaatgcagtcgatatcctgggaggttaatccagactctgttagtgcctcctgcagcaggtctaggataacagctcggtgatgcctggctgtatcacctggaaggaatcctgtgccaggaggcgtgacgtaagtccgccgcgggttcgccagcaccttgccatcccgcaccacgcccacgccaatcttattggcgctgccttcaaaacccagcaccgccggcatggcggaggctgggagaaaacgccgacaggactcctggcaatgtcaggagctgtggaggtcctcactagtccgcgctgggccgcagctttccggagcgcagaggaagctggccagcctgcagatagcactgggaaagacaccgcggaactcccgcgagcggagacccgccaaggcccctccagggacctgtcttcctaactgccagggacgccgagccaactctgtgccttacattcgtatccgttttcctatctctttcccgtggtccagcccagccttctccactgtttttttccctcttgcacagagttagaatcttaagtcagtgtcacacaatgtgctgtgcatctggcacaacgataaacagcccgagggagggttgacgagatcgtcgtcccggaaattccgggagtgcac

SEQ ID NO: 75231 - DNA, 4224 bp, Homo sapiens; identical to SEQ ID NO: 60660

SEQ ID NO: 75232 - DNA, 1471 bp, Homo sapiens; identical to SEQ ID NO: 60662

SEQ ID NO: 75233 - DNA, 1535 bp, Homo sapiens
ttttttcaattttgaagaatgtatttaccatctggttccctatggccctcaaccattttcacatgcttatctcaagtcagattccaaagtatgcggagggcagctgctaatgacatatttgttagttttaattttattctgcagacattatgcagttctataatataaaatgaatacaatactaaaatctatttcctttatttacatggtgtaacatttccaataacaaacatttctaatcatgaaagatggtgttaaagcagaaatattgtcatgattgagtcaatgggagaacataaaatatgctgtatttcataatttttccgtaagaaaatgtctagtttgtttaaatgcaacaaatactgtattagattcactttataagccatacactccttcttgtctttcttttgaacacattctggaaggcagctgtgaagaacggagtagcgagtccacgccattcaacatccatcagaaacctgcttgcttgattattttaatcatcttgggatcgattatcttcaatgataatagttcttctaggataagattcaatttctacaaatatatatcgaaaatcatattcaccacttcctgggttctctttcacttgcgcatacaccgttccttgcttccctggctcagagccctcaatgtagaatttcacacacgtgtgtttcagcccatcttttacatattcagtgaacctgacatgctgccggcgaccccgccttgtcacctccccatagcctttaacagactcaccaaagacaccgatcacctcaggatgtgatctgcatttttctaaggctctcccatatatcttgctaggactggatgaagaaaaaagttctttgaaaatcgtgtaaaacaagccacctgtaatgctgattccaaaaagcaccactattaaataggtaaaatctcttccggcttctttcactttttgtgatgttgggacggcggttccccctctctgactcctgtgcacagacacttgtttgctgctatcctcctttgcttttcgggggctcggtccctgcgtccagatggttttctgggtgactccaagaatacatctaggtcgcagcgttttcttttgatattgaagcccacatctcaaactgggctcagtcttcaagcacgctttgttaagcacgatgtatggcaaaagcaatcgctttgccgaggacctgtgcagcttctccgtatactgtacggctcgtagaaaagtacaaatcatgttcacggaaaatcgttccgcttagggacgatgctaactacaattaggaaagctttagggttcactacacatgcggccggacacgtactcaagcctatacgtttacattacatggggtgttaggcaaaaacgtcagtttccgcagcgtaaatgaaaacgaaaagtctccagggagaacctgatgtctaccttcccttctgtcttctttccattttaattaacaggctctgatcaccttctgggctgacattcacagtgtccccgccatgccttcgcaaagtcacctggg

SEQ ID NO: 75234 - DNA, 1132 bp, Homo sapiens; identical to SEQ ID NO: 60666

SEQ ID NO: 75235 - DNA, 7008 bp, Homo sapiens; identical to SEQ ID NO: 60667

SEQ ID NO: 75236 - DNA, 2448 bp, Homo sapiens; identical to SEQ ID NO: 60668

SEQ ID NO: 75237 - DNA, 2495 bp, Homo sapiens; identical to SEQ ID NO: 60669

SEQ ID NO: 75238 - DNA, 3499 bp, Homo sapiens; identical to SEQ ID NO: 60670

SEQ ID NO: 75239 - DNA, 4286 bp, Homo sapiens; identical to SEQ ID NO: 60671

SEQ ID NO: 75240 - DNA, 3912 bp, Homo sapiens; identical to SEQ ID NO: 60673

SEQ ID NO: 75241 - DNA, 3071 bp, Homo sapiens
tttttcacttagaaatgtttatctttatttcggaataacctataggaccatatccagataaaggtcctatcagtacttctcatgagttatcactcagttttgcatctagaggacccaccagtcaaagcagtaaaactaaatctccttatacaatactgaagtcttcagaaaagcagtgctaaatgggtgatgaaacctgacttaaccacttccctgtatggcaagatgacttattttgcattcctaaaacttctactttgattctcaatatatccgttttttttttctttttttcaaaagcattattttggtgaaaatcccaatatatgagtttaaaaaaaaatcattaacatcattaacagtactttaaatcaattactccttttgcctgcaacagggtccagcaaagccttaccacctcaagcaaacccactatacctatctatgctcaagaagtagtttggctactgaagacatgctggtctcttccaagtctttcctcaggatccacacatcagacattcatctctattctccaaagagcacaccatggctgctgtgttcctctccttctcttcttcctcttttgataccttttctttatcttttagcttctccttatttagagtgaactggattggattagctgctggtctcgtccttaaataatacatcccagtcttcaaaccctgcttccagccgtagaagtgcatactagtgagtttgccatagttaggctcagcaatgtggatgttcaaagattggctttgatcaatgaaagcacctctctcagctgccatcttgagaacagttttctgagagatttcccacacagttttataaagttgcttcaggtcatcaggaatttctggtatgctctgaatagagccattgcatgcaataatctggtttttcatctcttcatgccataggccccgctcggtaagatctttcaataagtgaggatttacaatctgaaattctcctgacaagactctgcgagtatagatgttgctggtgtaaggttcaatggactcattattccccaggatctgagcagtggaagctgtaggcatcgggggcaataagtaaactgtttcttataccatactttgcaatcttctccttgagaaccttccagtcccataggtctgtaggagtaacattccacatatcatactgaagaattcctttgctaactggagagccctcataggtttcgtatgggccctgctccttggcaaggtcacagctggcttccagagcaccataataaatagtttcaaagatctgcttattcagtaactgggcttctgcactctcaaaagggtatctcatcaggataaaagcatctgccagaccttgtaccccaattccaatggggcgatggcgtttatttgataggcatgcctctggtacaggatagtagtttatatcaataattttattcaagtttcggacaacgactttagtgacttcagccaacttcttaaagtcgtatgtgtgttctgatgtgacatacatattcagggccagggaagccaaattacaaacagcaacctcatctttgctggtgtactccactatttctgtgcacaggttgctgcatttgatggttcccaggttctgctggttgctctttcgattacaggaatctttgtagagcatatacggggtgcctgtttccgtctgagactcaatgatggcataccaaagctgctgagcttttacaactttgcggacacgaccttgtttctcataacttgcatatagtttctcaaattcctctccccaaacctcatccagaccaggacactcatttggacacatcaaagaccagtcctgattagtctccactcgtttcatgaagagatccggaatccaaagagcaaagaaaagatctctggccacgctgctcttcctttcctgtgttcttctttaaatcaaggaattcaaagatgtctaaatgccaaggctccaggtaaatagcaaatgccccaggacgcttgttcccaccttgatccacatatctagctgtgttgttatatactctcagcatcggtacaaggccattggaattgccattagtcccagcaatgtagctgccagtagcccgaatacaactcacagcaacaccaattcctccagcagacttagaaatcaatgcacattgctttagagtgtcataaatgccttcaatgctgtcatctttcatactcagaagaaaacagctagaaagttgtgggcggttggtaccagcattgaagagagtgggcgaagcatgagtaaaccacctctcagaaagaagattatatgtttcaattgctgcatcaatgtcttctttgtggatcccaacagatactctcatcaacatatgttgtggtctttcagccacttttccattgatcttcaacaaataagaccgctctagcgtcttaaagccgaagtaattgtaagagaaatctcggtcatagataatagcagaattcaggcgatctttattggccagaacaatatccaatgttgacttggccaccatgggagagtgtttgccattatgtggatttatgtagttatagaggtcttccatcacatcactgaacactttctttgtttctttgtgcaagttagagacagcgatcctggctgccaggatagcatagtcagggtgcttagtagtcaaggttgcagctgtttcagcagccaaagtatctagttccactgtggtgaccccactgtacaagccttggattactttcatggtgatctgagcaggatcaacaaaatccatattgagtccataacaaagcttctggattcgagatgtaattttgtcaaacatgactcgttcttggcggccatctcgcttgatcacatgcatcgcagctagtggctgaggctctgaaggatccaagactggactgcggctctaaagcgccggcgggatcgagaaggtgacagagtgggaagggttaggttccaggcgctgctcaggggaaagaactggagttggagccagacagcactttcttcagagcagaggcgcaacaatccaaatccccttcgcgcgc

SEQ ID NO: 75242 - DNA, 3691 bp, Homo sapiens
gtcgactacaaggtggctacgagttttccagatttaggagacttcagaaaggtggggcagatagaatggagatggcaaagatctctttgggcatatatgggcctggcgaagtaatggaataatttctaattttcggagaagccctcatgccgggatggcagaagatgagcctgatgctaagagccccaagactgggggaagggcccccccaggtggtgctgaggctggggaacctaccacccttcttcagaggctccgaggtaccatttccaaggccgtgcagaacaaagtagaggggatcctgcaagatgtacagaaattttctgacaatgacaagctgtatctctaccttcagctcccctcaggacccaccactggagacaaaagctcagagccaagtacactgagcaatgaggagtacatgtatgcctataggtggatccgcaaccacctggaagagcacactgacacctgtctgccaaagcaaagtgtttatgatgcctatcggaagtactgtgagagtcttgcctgttgccgcccactcagcacagccaactttggcaagatcatcagagagatcttccctgacatcaaagctcgaaggcttggtggccggggccagtccaaatattgctacagtggcataaggaggaagaccttggtgtctatgccacccctgcctggacttgacctaaagggttctgagagtccagaaatgggcccagaagtaaccccagcacctcgagatgaactggtggaggcagcgtgtgccctgacctgtgactgggcagagcggatcctgaaacggtccttcagttccatcgttgaggtcgcccgcttcctgctacagcagcatctcatctctgcccgatctgcacatgcccatgtgcttaaggccatggggcttgctgaagaggacgaacatgcacctcgggaacggtcatctaaaccaaagaatggtttagagaacccagagggtggagcccacaagaagccagagagactggcccagcctcctaaggatctggaagcccgaactggggccggtcctctcgcacgtggagagcggaagaagagtgtagttgagagctcggccccaggagccaataacctgcaggttaatgccctagtggctcggctgcctctgctccttccccgggcccctcgctcactaattccgccaatcccagtctctccacctattctggcccccaggctttcttcaggtgccctgaaagtggctacactgcctctgtctagtagggccggggcacccccagcagctgtgcccatcattaacatgatcttaccaactgttcctgctttgcctggacctggacctgggcctgggcgagctccacctgggggactcactcagccccggggcacagagaacagagaggtaggcataggtggtgaccaaggaccacatgacaagggtgtcaagaggacagctgaagtacctgtgagtgaggccagtgggcaggctccaccagctaaagcagcaaagcaggatatagaggatacagcaagtgatgccaaaaggaaacgggggcgccctctaaaaaagtcaggtggaagtggggaaaggaattctacccctctcaagtcagcagctgccatggaatctgcccagtcctcaaggttaccatgggagacatggggctcaggaggggaaggcaactcagctggaggggcagagaggccagggccaatgggagaggctgaaaagggggcagtacttgcccaggggtcagggagatggtactgtttccaaaggaggaaggggccccggttcccagcataccaaagaagcagaagataaaattcccttggtcccctcaaaagtgagtgtcatcaagggcagcagaagccaaaaggaggcttttcctttggcaaagggagaggtagacactgcaccacagggtaataaagacttaaaggagcatgtgcttcaaagttccttatcccaggagcataaagacccaaaagcaacacccccatgatacaggtctgtggggaagagtgtttatatccctacgttaactttgcctagtagaggcccttctttgcacttgcttctcatttggctattcttttcctaaggaagtccattctcctctgtacagacagctgagtcacccagtctacttagtacctggttgctgcctctgaccttttcagcttgataccctgggctttagtgtaaccaataaatctgtagtgaccttacctgtattccctgtgctatcctgtgggaaggtaggaatgggctaagtatgatgaatgtataggttagggatcttttggttttaaatcacagaaaacctaattcaaactggcttaaaataaaaaggatttattggttcatgtaactagaaagtccataggtagtgctggctccaggtgaagacttgacccagtagttcagtatgtctctaaataccggactgacttttttctcactgttgcatcttctgtaggaccatttaagtctgggccacttaatggctgccagcattcctaagattacacttttccccatttatgtccaatcagaaaaagaaggcatctttgtaccagaaatctcagcaaaagccctaatattcacactgattaggcctgggtcacatgtccaccctgaccaatcactgtggccaggaggatgatacatgctaatttgcttattctatatcatggacaacacctttggggaaaagggtgggggtcagcctccccaaaatcacatggattccccaagtggaaactaggagcagggagttgcttgggtggccgctaacaccaggctactcttattttagcttgctaagttgagatcagctagacctgctttcttttctcctcagtcttgcatttccctcaatacaagctgcagcctctttcctcgtttctagtctcagaaggaaggagagggaagccattctcctctagggactcttcagtctcatttagatgatagtccctttttttctacctccatattagagatggagctccttccttttcctgtttcttaatttttgtcttctcattcctgcttccctctcaccctattgccagttccaccaactagagtgaaagacttcctagccatttcattaaatctattctgtatccaccaggtggcagcatcttgtcatacgtgtcaggacttaggactgcggggtttaggttagatgtcacggaaaaagctagttctgtggtcaggcggcaccaatgagaaaggaatgcagaccctccagatgtatccttgggaaaagcagtaaaccaactaatatttattgaagacctactttgtcctctacatagggtagcttctgtcagggaatcttggttcttcccaagaaacactgattttctttcagggagacttcatgtgttcatttatttccaccacagcagattttaagaaattataatatgtaatatttgatatctataaagagtatatctaacgtgaataaattatgaagcatactaatgagtacctatgacccataacacatatacattaaaacattttaaataccaaaaaaaaaaaaagggggggcccttttaagggaaccaattttaactcccgggggtgggaaaggaaaaattttttttatggggccccaaaaataaattcctgggcccgtttttaaacaccccggggagggaaaaaccctgg

SEQ ID NO: 75243 - DNA, 4511 bp, Homo sapiens
  misc_feature (1)...(4511): n = a,t,c or g
atatacattaagagtagatttttttgtttaatttcacaaaactattttgcagagttcacttgtatcatctctanccttatagtaaaaattttaagatttaactcggctttctcaggttatttccctctacccctatgaactgctgagttttagttccttttctggccttcagttttcactatctgtaaagctgaaggactgtattatattacctccagtatcttttctggtactaatttttaaaatacctgatcagaatgaagccatcatagtgtaaggcagcatatttgtctataaggagactttccaaagacagtacccatccaatgcaaataataaatttgaagctaatcatctgttgtgctttaaaatgagcaaattcacatgtctttattgccctttgaaagttggttaatctcaaaaactaccttttttttaaatatcctttgcaaggtcaattgtaacagttgtccatccttcctcttccctttgaaataaacacaaatagaatatatcttacagctgcaagaaaacctgagtcctttccaaaacaaaggtgactgaagtaaattatctctaaaacttattccatagacttcatttattaataagcatattgtgaaaatctacatttgttttagatttcatgtttacagagcttttcacaattgtattaggatctttcacaactactctctgggtttaatgaacagtaaagaatctggctcatgtgaccctctattcatagctcccctttggctcctgtgaaggagctgatagttccctggagtaaataaatcaaaacaagatatccttgggagatttttagctgttaatctactcctggaccccatcctgggaactgagggaaaactcctagagagatatacaaatctttgaacaaaatatttacatgaaaagtggccagttttcttccttggagtagcaatctgtaaaaataagtgctgctgtttaaaaagtagcatgccctacaccataccaatgtattagtgagaatttggcgattctcaccaaacaacaatgaagtttcacatttggtactggatggagcttgggttagatctgccttttaaggcaaagtcaactctttcaacttaattctttttcaagggagtaatgtactgtctacacttggcttaaactaacttctattatggactactttcaatgtacatgtaaatgttcatgcatcagaagccaatttcttttaacagtacatagaaaaggtatattttggggtgctaatgaacacttcaaattaagtaatgatattggtaaggatcaaactgcactattagtcttgttaataccacactggcacacacactgcatatatatgtattttcctaagataaaactcttctcagaatttcattactttttattatacaccaactagtttatattgtagttctttacaaagaaaatgctaagaaaaattataatcacatgttatatggttttaaaataataattccagatttctttacatataagatggaatggtccagcagctatatccactgtcacagactttagttccgttcaatgatatggcacatcctgcaaaattaactagtcacacacaaaaaatgtctcaaatacagtaaaaatgtacacacaaaggtaatttacaatgacaaggaatgtaatttttcttggctgtgcttcagaaatttagggtcagtagccttaatcaaggcacaaagcaggaaaaggtgagcacagctgtctctaggagtgggcaaggtatgtacaatcactgatgaggtatgcatgcacgcaaaggatttaaaactgctcagtctcactacaaaaattgaactgagttaaaaggaaatgctgtggcttccccctactatctggctctggattgagtccacagtcttacttcatcaaatagaaaataaaactgacaaggatctccaaaagtaaatcactatttgtgtaaatgaaacaaaatgcttcattaatcccagttcttggttgtgcctcctggactagaagcattttgtagacaaaagagtgtttcacaaaattgaaatgtaattcaggtgaaggacaaaacattttccacagacacttaaaattccaaactttcaaatggcccttacagctgaaccgttgtatgttacagtagtgagggttctgggtatcctttagcagcaaatgccggtttaaagggcacggggtctcttcgggttgatttgcttgctggcttgttcctcctcttgtagagctgcacggaaagatttcactttatcccgcagttcagttaaaatgtctattttttgctcaagaatagcttcaagttgtgtagcatatgaatcgacatcataatctacttcttcagtcatctctaagagggccttttcatcttctaaccaccgaatagattcctggaacactgccctgtgatcttctacaacttgttcttccatttctaccatttgtgaaacagcttcgtggaaagtaaacaactgtggagagacttcttcttcattttgttcacaaagaagttttagatcatctctctgaggggaactccccacaccccactgtgtctctaagtcatcaaatctggtttggtggatggtgcattattggacgaacatcaccagcagcagttggatctacagtcaattctttgaccctatttgcatatcttaatgtattaagagtattttcacaggatgccattcctggagagattgtggcaatcatgcaggtacgagagttttcacctatgaaagaatctcttaacacctgagtgagtttacttgcacggaaaggagtatgaggtttatttctacctaaggctctgatgcactccttgagtgctaaaaggcttttattaatttcagcaccttcaagcctagtttgcctgtccgcactggaagtatcagctcctctttcatttccagccaaatcaatgagagaaaatttgccatgtagttttcctttccttctaagaataatctgaaacactgcatggctccgagatgaatgtgcatttgcagatgtttgaccggatgttctgcaactgttgcctatgtcaatgagtttcagtacatcttcaacacatttgacctcccgttcctgtaatcccaccacttgaacctgctgttttccatcttctagaactcttaattttgttttcctgtttagcaagtcaaacacctttccactataaatttcaaagaaggttgcatatacttgaagttctagcttcttatagtttggcttctttagcattaaaaagacatctcgagctgctaatgcataaattcctttagaacaatcttggttctttcctgaaaagtcaccacccatagtatgagtttttccacttccagtctgcccataagcaaagcatgtagccattcccctttcaaatatagtttccactagtggtctagcagtaaacctgtaaaccatttcattaggagctgagtcatcaaaggcataatcaaaacgaaatgtttggttttctaggtaccttgttaaatctactttttgttttggttcatgtaccatcacaacatctttactaggaattgtgattacatcaagatctttcatttgagtttcttttttattgagtggtcgttttcttacacacacacatatcctatgttcatcaataggatctgctgttgttaatggtctataatccaaacttcctctaaagtctctgatcatacacataatttcataatttgggtttgtagcatcaacgtcctgggctcttttttctctaagttcttgctgttgcaatctccttttctctcgtttttcttgcagtttttctacttctttcacacaattagattttctacgtgaagggggtccaaattccttttttgcagcttgaactggagatatatctgaaaacactaccattctgttgtgcagaggaaaactgttcaggaaattgactgggccgtgcacgtgctgaaccaaccactctattatctctttgaaggagggtcattcttaatagaagcttacagtccgtcgattctttacaattttgtttactttggctgaggatgctggaggtggaggtgtttcttggacttggttcaatttctccatcaggaacaaaggtccagggttaagtgaaaagatgctctccaggtcaatctcctttgccttttgtatctccattttctatccattcaacagttacactttcattatcttcatttaaagatgttaccattgcttgatgtattcggccggatgtggtgtgcatctgtagtcccagctacttgggaggctgagcggggaggatcagttgagcccaggaggcagaggttgcagtgaaccgacatcacaccattgcactccagtctgggagacagaataagactctatcccgactgcgcttgatctccacgtaaatcccgatctggatcttgccgaagttggcgttgccatcacctcatctggagcaggagcagcgcgtctgagggagggggaccgga

SEQ ID NO: 75244 - DNA, 1510 bp, Homo sapiens
ttttttttttttcaaggttcacggggtttattagggagtcgggagggagaaaacccaggagtccccaggccatccacattgctccccggcatgtgacgatccagcctggctttctctggtcctttctggacagaggctggccaagcaggcagcagcctcaaggggagtgggtaggagctgggggccttctggcagccctactcagaggatgatctggttggtgaagcttcggctcagctccttgtgtggcagaacaatcgagttcaggatgagcacctcggcagggatccggactcggcagcccaggatggtgatagcaggcagcagcttcccgtccttgaagaggctctcactgtccatgcgggctcggggatcgttggggttagggtcactgggggtaccctccacgcgggcccagcgtcccacggtgctcccccagcccacgatgctatgcagaacacacgtgtgctcctgcaaagtggctccatggaggacgatgctctcccggagccgcacaccctcacccacggtcacccccttcccgatggagacgttggggcccagcacagccgagggggccaccttggcggtcgggtggatgtacacattccctcggatccatgggccccctggggtgtgcttggccagccgttctgggtgagtgtcctggtatcggctcaggtagaggcgggaggcgtagagggctgaacctgcggacttgatctgactccagataccatcagtgagatgcacgtatatctggccctgccctgccagggctgaaaacacatcctgctctaggcggatggtacctgcccctggccacaagcctggtgagtcctccaattgcccatcctgctgattacgctggaagacatcccgaagaggcttcaaggcttcaggagaaaagaggtagatgccgcagttgatgatgtcactgataaatgtgctgggtttctccacatagtgcaatacctcgtgtgtctgtggattctcaacgatgcagccgtagttgagggattgcgtcctgttagccgtagtgccaaggagtaagaaagggtgacgctggcgtcggtgggcttccaacatagcactcaaggggaagtcggagcagacatcagcattgagcacgaagaatgcctcggggctcccagccaggatctggtctcgaaaatggtaaagaccaccccctgtgcctaggggggcaaattcctgcaggtacctgactggaaggttaaactcctgctgggcggcttctaggaactgggtgaggggctcatcaggttggtagaagccaatgagcagaatctcctgcattccagggacctgggcacaggcttcaatatggtgttggatcatagggacccctgccacaggaaacaatggtttgggcacctcaaaagacaaaggtctgaagcgagttcccttttgagggcctccaatcaggatcaccgctttgagcataatggtgactgctacctaaacactagctcccttcactccagctctg

SEQ ID NO: 75245 - DNA, 2591 bp, Homo sapiens
ccaggtgactgactaatccgccgccttcaggagacagaattggccaaggcctgaaggccccggagtgcaccagcggcatgtacaaagagaccgtctactccgccttcaatctgctcatgcattacccacccccctcgggagcagggcagcacccccagccgcagcccccgctgcacaaggccaatcagcccccccacggtgtcccccaactctctctctacgaacatttcaacagcccacatcccacccctgcacctgcggacatcagccagaagcaagttcacaggcctctgcagacccctgacctctctggcttctactccctgacctcaggcagcatggggcagctcccccacactgtgagctggttcacccacccatccttgatgctaggttctggtgtacctggtcacccagcagccatcccccacccggccattgtgcccccctcagggaagcaggagggtgcagcccttcgaccgcaacctgaagacacaagcagagtccaaggcagagaaggaggccaagaagccaaccatcaagaagcccctcaatgccttcatgctgtacatgaaggagatgagagccaaggtcattgcagagtgcacacttaaggagagcgctgccatcaaccagatcctgggccgcaggtggcacgcgctgtcgcgagaagagcaggccaagtactatgagctggcccgcaaggagaggcagctgcacatgcagctatacccaggctggtcagcgcgggacaactacgggaagaagaagaggcggtcgagggaaaagcaccaagaatccaccacagataactctcttcactattcctaggaggaaaaagaaatgcattcggtacttacccggagaaggccgctgccccagccccgttccttccgatgacagtgctctaggctgccccgggtccccagctccccaggactcaccctcataccatctgctgccccgcttccccacagaactgcttactagccctgcggagccggcacctacatccccaggtctctccactgctctcagcctcccaaccccagggcccccacaggccccccgcagcaccctgcagagcacacaggtacagcaacaggaatctcagagacaggtggcctagcaggcacaggacacctggccgcctccaggagcctaccccctgaaagtgacagagacccagatctcatggaaactggccaggggtcctgttaacgtcatctcagggtccagaccctgaagatttcagaggctgcagaacttctgcctgaacctggggtcatcgattcaaactgctccaagtggtgggaatcagatctgtcttgatgtgtcatctaattaagggaatcccttgtacctatggctgcctgcatctattctttgtaccatctgtcttgccagccagaagcctctgcctccctagcttttctgctataggtcagagatgggctgaactgagcctagctaccttctctacccatctcccccatcccccactgccacaccctccccattcagacacttcatggaccaagaatgagctggtttgtcaaacaacatgtgagcatggtcacaagcacaaagctcaagatgacagctcttctaaggaaatggagaagctctgtttataaaaacaaaaacaaaaccagctgctactcataagttggaccagaggaagccccttactatgatctcaggagcttgcaagaagcaggaaggggaatggaataggttaagtttaggcctatcaacctaagcaacagaaataatctgacactaccttatcaggcaaattggggaggggagggtgtatctagctctagttcaaattatttggaagtgttccctgagaaacccaccagcctaagaagctctggccccaggcttgtcactagcagctgcagtcaacagttcaaagaagtcatggcccaaatccagtgtgcacccctccccattcacagagcctttttcacaattccatttccagttcatctatggcagtccagccagctcctgggcagcttgagagggcaaacccaaaacctcatgacagccagagcctgtctttcagcattcagtccgcctggccggctccagtttccccatggggctgcgggacagaggaccattacaactagatcaaggagcccagaaaacctccagtagtggacaacaggttttcaccatagcctacgttaacccatttttgagccaagcttcaaccctcagccttgaaaaacaagtctttaatttaatttttgttttttgcctaaatccaaagaaaaagggctgtcgggccaggcgcggtggctcacgcctgtaatcccagcactttggcaggccgaggcaggtggatcacctgacgtcagtagtttgagaccagcctggccaacatggtgaaaccctgtatctactaaaaatacaaaaattatccggacgtggtggtgcgcgcatgtaatcccagctactcgggaggctgaggcggaagaatcacttgaacccgggaggcggaggttccagtgagccgagatggcgctattgcactccagtctgggtaacagggagactgcatctcaaaaaaaaaa

SEQ ID NO: 75246 - DNA, 1076 bp, Homo sapiens; identical to SEQ ID NO: 60679

SEQ ID NO: 75247 - DNA, 4871 bp, Homo sapiens
ggcacgaggaaacctctaggtccaccacctccatcttacacgtgtttccgttgtggtaaacctggacattatattaagaattgcccaacaaatggggataaaaactttgaatctggtcctagggattaaaaagggccactggaattcccagaagtttcatggatggaagtgaaagatcctaatatgaaaggtgcaatgcttaccaacactggaaaatatgcaataccaactatagatgcaagaagcatatgcaattgggaagaaagagaaacctcccttcttaccagaggagccatcttcttcctcagaagaagatgatcctatcccagatgaattgttgtgtctcatctgcaaggatattatgactgatgctgttgtgattccctgctgtggaaacagttactgtgatgaatgtataagaacagcactcctggaatcagatgagcacacatgtccgacgtgtcatcaaaatgatgtttctcctgatgctttaattgccaataaatttttacgacaggctgtaaataacttcaaaaatgaaactggctatacaaaaagactacgaaaacagttaccttctccaccacccccaataccacctccgagaccactgattcagaggaacctacaacctctgatgagatctccgatatcaagacaacaagatcctcttatgattccagtgacatcttcatcaactcacccagctccgtctatatcttcattaacttctaatcagtcttccttggcccctcctgtgtctggaaatccgtcttctgctccagctcctgtacctgatataactgcaacagtatccatatcagttcattcagaaaaatcagatggaccttttcgggattctgataataaaatattgccagctgcagctcttgcatcagagcactcaaagggaacctcctcaattgcaattaccgctcttatggaagagaagggttaccaggtgcctgttcttggaaccccatctttgcttggacagtcattattgcatggacagttgatccccacaactggtccagtaagaataaatactgctcgtccaggtggtggtcgaccaggctgggaacattccaacaaacttggctatctggtttctccaccacaacaaattagaagaggggagaggagctgctacagaagtataaaccgtgggcgacaccacagcgaaagatcacagaggactcaaggcccgtcactaccagcaactccagtctttgtacctgttccaccacctcctttgtatccgcctcctccccatacacttcctctccctccgggtgttcctcctccacagttttctcctcagtttcctcctggccagccagccacccgctgggtatagtgtccctcctccagggtttcctccagctcctgccaatttatcaacaccttgggtatcatcaggagtgcagacagctcattcaaataccatcccaacaacacaagcaccacctttgtccagggaagaattctatagagagcagcgacgactaaaagaagaggaaaagaaaaagtccaagctagatgagtttacaaatgattttgctaaggaattgatggaatacaaaaagattcaaaaggagcgtaggcgctcattttccaggtctaaatctccctatagtggttcttcgtattcaagaagttcatatacttattctaaatcaagatctggttcaacacgttcacgctcttattctcgatcattcagccgctcacattctcgttcctattcacggtcacctccataccccagaagaggcagaggcaagagccgcaattaccgttcacggtctagatctcatggatatcatcgatctaggtcaaggtcacccccttacagacgctatcattcacgatcaagatctcctcaagcgtttaggggacagtctcctaataaacgtaatgtacctcaaggggaaacagaacgtgaatattttaatagatacagagaagttccaccaccatatgacatgaaagcatattatgggagaagtgttgactttagagacccatttgaaaaagaacgctaccgagaatgggagagaaaatatagagagtggtatgaaaaatattataaaggttatgctgctggagcacagcctagaccctcagcaaatagagagaacttttctccagagagatttttgccacttaacatcaggaattctcccttcacaagaggccgcagagaagactatgttggtgggcaaagtcatagaagtcgaaacataggtagcaactatccagaaaagctttcagcaagagatggtcacaatcagaaggataatacaaagtcaaaagagaaggagagtgaaaacgctccaggagatggtaaaggaaataagcataagaaacacagaaaaagaagaaaaggggaggaaagtgagggttttctgaacccagagttattagagacttctaggaaatcaagagaacctacaggtgttgaagaaaataaaacagactcattgtttgttctcccaagtagagatgatgccacacctgttagagatgaaccaatggatgcagaatcaatcacttttaaatcagtgtctgaaaaagacaagagagaaagggataaaccaaaagcaaagggtgataaaaccaaacggaagaatgatggatctgctgtgtccaaaaaagaaaatattgtaaaacctgctaaaggaccccaagaaaaagtagatggagaacgtgagagatctcctcgatctgaacctcccaattaaaaaagcccaaagaggagactccgaaggacttgacaatactaaatcatcatcttcctctcagaaggatgaaaaaatcactgggaacccccaggaaaagctcactctaaatcagcaaaagaacaccaagaaacaaaaccagtcaaagaggaaaaagtgaagaaggactattccaaagatgtcaaatcagaaaagctaacaactaaggaagaaaaggccaagaagcctaatgagaaaaacaaaccacttgataataagggagaaaaaagaaaaagaaaaactgaagaaaaaggcgtagataaagattttgagtcttcttcaatgaaaatctcgaaactagaagtgactgaaatagtgaaaccatcaccaaagcgcaaaatggaacctgatactgaaaaaatggataggacccctgaaaaggacaaaatttctttaagtgcgccagccaaaaaaatcaaactcaacagagaaactgggaagaaaattggaagtacagaaaatatatcaaacacaaaagaaccctctgaaaaattggagtcaacatctagcaaagttaaacaagaaaaagtcaaaggaaaggtcagacgaaaagtgactggaactgaaggatccagctcaactctggtggattacaccagtacgagctcaactggaggcagtcctgtgcggaaatctgaagaaaaaacagatacaaagcgaactgtgattaaaacgatggaagaatataataatgacaataccgcgccagctgaagatgttatcattatgattcaggttcctcaatccaaatgggataaagatgactttgaatctgaagaagaagatgttaaatccacacagcctatatcaagtgtaggaaaacctgctagtgttataaaaaatgttagtacaaagccatcaaatatagtcaagtatcctgagaaagaaagtgagccatccgagaaaattcagaaattcaccaaggacgtgagccatgaaatcatacaacatgaggttaaaagttcaaaaaactctgcatctagtgaaaaagggaaaaccaaagatcgagattattcagtgttggaaaaggagaaccctgaaaagaggaagaacagcactcagccagagaaagagagtaatttggaccgtctgaatgaacaaggaaattttaaaagtctgtctcaatcttccaaagaggctagaacgtcagataaacatgattccactcgtgcttcctcaaataaagacttcactcccaatagagacaaaaaaactgactatgacaccagagagtattcaagttccaaacgtagagatgaaaagaatgaattaacaagacgaaaagactctccttctcggaataaagattctgcatctggacagaaaaataaaccaagggaagagagagatttgcctaaaaaaggaacaggagattccaaaaaaagtaattctagtccctcaagagacagaaaacctcatgatcacaaagccacttatgatactaaacggccaaatgaagagacaaaatctgtagataaaaatccttgtaaggatcgtgagaagcatgtattagaagcaaggaacaataaagagtcaagtggcaataaactactttatatacttaacccaccagagacacaggttgaaaaagagcaaattactgggcaaattgacaagagtactgtcaagcctaaaccccagttaagtcattcctctagactttcctctgacttaactagagaaactgatgaagctgcttttgaaccagactataatgaaagtgacagtgaaagtaatgtttctgtaaaagaagaggaatcttcaggaaacatttctaagggacctgaaagataaaatagtggagaaagcaaaagagagcctggacacagcagcagttgtccaggtgggcataagcaggaatcagagccacagcagccccagcgtcagccccagcagaagccacagtccttctggaagccagacccgaagccacagtagcagtgccagctcagcagaaagtcaggacagcaagaagaagaagaaaaagaaggaaaagaaaaaacacaagaaacataaaaagcataagaagcataagaaacatgcaggcactgaagtggaattggaaaaaagccaaaaacacaaacacaa

SEQ ID NO: 75248 - DNA, 3092 bp, Homo sapiens; identical to SEQ ID NO: 60680

SEQ ID NO: 75249 - DNA, 2252 bp, Homo sapiens; identical to SEQ ID NO: 60681

SEQ ID NO: 75250 - DNA, 1604 bp, Homo sapiens; identical to SEQ ID NO: 60682

SEQ ID NO: 75251 - DNA, 4471 bp, Homo sapiens; identical to SEQ ID NO: 60683

SEQ ID NO: 75252 - DNA, 2078 bp, Homo sapiens; identical to SEQ ID NO: 60684

SEQ ID NO: 75253 - DNA, 1835 bp, Homo sapiens; identical to SEQ ID NO: 60685

SEQ ID NO: 75254 - DNA, 2025 bp, Homo sapiens; identical to SEQ ID NO: 60686

SEQ ID NO: 75255 - DNA, 2088 bp, Homo sapiens; identical to SEQ ID NO: 60687

SEQ ID NO: 75256 - DNA, 1008 bp, Homo sapiens; identical to SEQ ID NO: 60688

SEQ ID NO: 75257 - DNA, 2134 bp, Homo sapiens; identical to SEQ ID NO: 60689

SEQ ID NO: 75258 - DNA, 4393 bp, Homo sapiens; identical to SEQ ID NO: 60691

SEQ ID NO: 75259 - DNA, 3469 bp, Homo sapiens
aatttacccctgacgcggcggcggccgacgggaagctgtgtgtgcttaggtcgtggtggccccggtggtggtgggctccgggcgggctcgcgtcatcctgcccccgctgcgatgcatccgcggcgcccggacggatttgatggcttgggctaccggggtggtgcccgggacgagcagggctttggcggcgccttccctgcaaggtccttcagcaccgggtcggacctgggccactgggtgacgactcccccagatatccccggcagccgcaacctgcactggggcgagaagagcccgccctacggcgtgcccaccacctccaccccgtacgaaggccccacggaggaacccttttccagtggcggcggcggcagtgtgcaggggcagagcagtgaacagctgaatagatttgctggatttggtattggacttgcaagtctctttacagaaaatgtattggcacatccttgcattgttctacgccgccaatgtcaggttaattaccatgctctagcattaccatctcactccatttacagtcatcaatattatgtacagtttcaacaaaactcagggacctagagccctgtggaaaggaatgggaagtacatttattgtccagggagtcacacttggagcagaaggcataattagtgaatttacacctttgccaagggaggttttacataaatggagtcctaaacaaataggagaacaccttctactgaaatccctaacttacgtggtggcaatgcctttttattcagcaagtctgattgaaacagtgcagagtgagataattcgagataatactggcattttggagtgtgttaaagaaggaattggaagagtgataggcatgggagtgcctcatagcaaacgacttcttccgcttctttccttgatcttccctacggtgcttcatggagttcttcattacatcatcagctcagttattcagaagtttgtcctactaattctaaagagaaagacttacaatagccacctagctgagagcactagccctgtgcagagtatgttggatgcttattttccagaacttattgctaactttgctgccagtctttgttctgacgttatactttacccattggaaacagttttgcaccgccttcacattcaaggaacacgcacaataattgacaatacagaccttggctatgaagtgcttccaattaatacacaatatgagggaatgagagactgtatcaataccataaggcaggaggaaggagtgtttggtttttataaagggtttggtgctgttataatacagtacacactgcatgcagctgttttacagattaccaaaattatttactctacacttcttcaaaataacatttgagatttaggttccttcactgagtagtctggaagatataatctggataatttgctatgaagttatgagggataaaagtgaaatactggggaagaaaatggattggaaagtaaaattggtactaaagcccatactgattatcttgactttgttttttaaggcataggtatatattttggatcaaaatccttccaaatttgaaaactcaataaaaataacacttattaaattctagttagtgtagcactcatgctgaagtaaacatgatcgtaggcagaagcaaaattttattataaaatctaaaacaaaactttatagagttgaatctattccatctgacttcaatatttgccaaacgtttattttacctcctagattgatgttggtatagtatccttaatacagtgtagtatattaatgtccttaatacaatcaggaggtttttacctttaagcaaataaattatgtcattattgaaaaagacttaagggatgattagacttggcaatctgtaagcaggagtataaatgttttaaattgcattgtccctatgtaactatcttaatggctatatatatgtattttataaagccatttatgtatacacatgtaacttggaatttccttcatccctacacattttctacacttacatcaccttattgcataaaacaaagtcacgcgctttctgcttgaacatcaaaatatcaaaaaccaaggtacccaaaagatacaagtcagagacaacatccttgtccatatccaaacccagtgtttcagtgctagcaacttaatttctcatacatttatagagtttggtttgctttgctagttgtgtgaatcattgggctgtttttagagccactgttaagagagaatataaaataatcatgacaattactactgtttccacatttacaaattgtgtacttaaatgaacctcatttcccttttatttctgaatggcttgtctgagaggaaacaaaattaaaattcatctgggaatttgtgcctcttgtctagtatatagtcaccactaaataatggcttccgtttttattttctttcaggttttgctttaaattttgttttccaaaatagatgtacgtggagggaaaagcaattattcttatcaccttttatttaaacttctttagatgaatactgaagaaaaatccaaaccttaaaggaaatgtgcccttgtattttatgggtgaggggaaaaagtacatttgtacatttcaacatataataagcaaaaaaattactaatcagtttaataaaaacattttgtctattcctaaatgtaatttggtgggttaagcactttgtgtagtaaaatgatatgtgtctgctctatcattagacattttaaagtttcatgtcttcacgtgaataatcacagttgtatcatgaaccatttagcgctctgaagcacagtgactttgcactgatattgtccaaccaagaatgcatacgaatagaaattcattttacttgctaaatgtcacagaaatggttactttttgcaaatagtagtgttggaacaaaaaagtgatatccaaaaagtgtaaaaacagtaataagtagcaaatctctcgtgtgtgtgtgtgtgtagttactgaaacacctacattttccatttttaaattccaccaaaagggggaaaataaaattaaacaccactgatcacattttatattttatggtgactattttagattaaggtttactttgtccaaccaatagcatttaaattgttttcaattaggatagtttcagataagagtaaaccagaaaatttcaagtttgaaaaatttctagaaaagaatctgaatagaatcaagtatttactagtgaaaatctgtaggatcctttgtttagctaaaaattaaatatttcaggatattttttggaagttagcatgaaaatagttagttacataaattcattttattgtagaataattataagaccgataggctgaaccatacacaaataaggttgatcttgttttcctttttggagaaagagaatacaaattaacattaaaattgaaatgtagaaagtaaaatatgaataattttttacaaccactacaaa

SEQ ID NO: 75260 - DNA, 4206 bp, Homo sapiens
ttttttttttttaaagcaaataaaacatttattgttcagattttttttcattttcttcctttttacaaaaacatgcatacatacacagggtatggtgggtcctaggaaagacacacacacacgcctcactcacacacacgctcacacacacgcctcactcacacacatgctcacacacattttccttcttgaccccaggcctggacccccaaaagccttgaagactttgccagagcaggcctcccctcctccatgtctgtatcttctctcccaccccttccccctcagtcagggctattcctatgtggggggtggggaatcagagctatggtggggggaggccccaggaaacagaggaagggctccccgagtggggcagtggccgagggggtcccaggggtatgctgcgcttctgggggagatgaagggtttggcaccattggatcaggaagcacaggactcccagagcacccatctgctccaccagggcatcgccaggaggttgatgtaggggggcctctggcgagggtacggaccagatggagggctgccagtctcggctgtcagggagcttcgtctcagtgcccagtggtagagggaagcttccagagtcgtctgaggaagcaggtgagagggactacccctgcactcaggaatatgggacctcttggctccccactcccccctagcccctagagcctaggaagggccagcctgtctgaggccaagttcacatttctgtgtggagcctgaggctgtgtgcaaagtctggggtttgcagagccaggaatagtggttaagggtgagcccgacggagccggagccagtcctcctctgtgcagtcctgaggaatgggggccacagccagggcccatactggaggggagaatctgttctcgagagccctgtgggggtcgccgcccagcccgtctcctctcagggtcctctccagttcccattctagacccagggattttctcacgctccctgggataactgtcaaagcaggcaggctgttctctggttccaactacttgcccacaggatctctaaagacccaggaatgggggctattgccaggggtttagaagagaaccacggtcccaagggcatggtgggcgggcagatggttccagagccttagagattcataggttcttcctcctccaccagctgctccgagggcctatcttcagccaggatgcccacagagagggacgccagtgcggttactgcctccacttcttctttgtcagcccctggcactctaggcacccaggagtctggacaggaggccaggcgctgcatgcagccccagtatttactgtgcacccggatcacgggcctccagagagcggatggcattgaggttgggtttctgtttccagccttcttctgaaaggggatccaccctgttacccagaagagcagccacacaggcctcagaggcgtcacagatggctgtgaggtcatggccaccctccaaggccagcaccactgcgcctcctgccaggttcatcagttgctgcgtcatgtatccaaaacatttggcagaaacatggtagccacccagtggggccgggtgaccctcagcagcatcaaatccagcagacaccaggactaggtctggagagaactctcgggcgatgggcatcacgactatcctgaaagcagccaggtactcaggatcccccatgggggggtccagacctccagcccaggccacattgacattgaagccctcaccgctgccagcccctacctcatccacagccccactccccgggaagaagttgccgtcgtcatggcgatgcagggagatgtagagcacactggggtcttggtagaaggtttgctgggtgccgttgccatggtgcacgtcccagtctacaatgaggatcttgctggccttgctctgctgttgcagctgccggcaggcgatggccactgagttgaagaagcagaagcccatggctgttgaatgatctgcatggtgtcctgggggccgcaccacagcgaaaccattctttagctcacgagaagccactttgaaggcgaggtcagtgacactgccagcggcccagcgggctgcattggaggaatgaagctcattccagatggtgtcagtgtccaccccaaccccaccacagggcagcatcacaaacatccgctgtgccaggagccctgccagcttcccgttgtccagtttgaggcggctgagcgggttggtgccgtagaggagcacgtgccgctcagagtggactgactgcagctcttccagggaggccttccggcctcggagacactcacactggctccggagcccccgctcctgcagccgggaccagatgctctggatgcggccggcgtgctccgggtgcctgctgttgtcaccgcaggagcactggtgcttcagcatgaccgagtcatagatcagccctgtggtgaagggcagggtcctggcaggggtctctgagctggagaggactcgggcctggctggcaggctctggggctgacagtgaggcaggtgcggctggggaagactgagcccgggacagaggccggtgcccaccctgggccagaggaagcagcacagtgtccccggtgctgccccgggggagccgcccagccagtcgctgctgttcccagagcaacacctgagggtgctgctggagaggagcggggcctctggcctcaggctgcccatggcccagctccctgtgctccaggccatcgtccaccacctggcccggtcccccgccatctgtctccaggtcttcagccgagggtatctgccgcagccggggcttctcactcggcttggctgacctcttgatcacctggacgtgagttttgagctgctccaggcggggctgcatggggcccggcggtgggggagcggtggcactggggggcaggggctctgagcgagtccggctcagtggccagtggaggcctgacccagagagccgctcggtggtcattaaggactgggcaaagtggaagggcaagggcccaagcccgggcacagtcagcagcggggcatgagagcctgaggggtccaggaggagaatgggctgcaggcgagagggcaaggtgcccccagcctcgggctccaagccatggggcaggaagaggggagtgtgggggctccccaggattggcccccgagggcccagagtcggatgggtcctgcggtcactgtcagccctggcaggggcgggcagccccagagtgattgcgggcagcaaggacactgtcggcaaggcgaacggggccacagaagtctcctgcagccgcagccgctggcccaagagcgcctccgagcccaggatgggattggggccgtgctcgctgtcattgggggagctgcatcctgatgcgggcgtgctgctactacttggggaggagtctccgagggtctctgcgggccgccgccggaggctggggggcgcactctcctttcggagcagtggattcttcctccgctccagggacttcttgggcttatagcgcagcttcaggttgggctcagagactgtcttgcgcagagggaagtgctctggggggtcactgggcaggctgggaacaggaggcaaaaagctgctgagcatggagcgggtggctccttccgtctccaggggctccagggttctgtagggaatgccggggctgttgggatggactgttctttctagggccgcctgctgttttttcagaatcacctccgctagcttctgcttgaccacgctgctggctacagcacttcgcttgctcttgtccttgtggagaagctgccgcagctcttgttcctggggagcctcctgcaactcgggcatcggcgtgtccatggagagctgtgggcagggccggcagcccagaaagggacaaggagttgaggactgagactggtgtctagggatgctgaaggcggggaggctggggaccaagctcaaggtggccccacatgcagggagctccatctttaccctcatgggctccaccgagcgctgctgctgcaggcctgctaggaagaggtggtggtgcaggcgctggggacgctgcagggccagcaatgtgggctctggtgggggctccactgggggccgctggcccacccgcaggtccatgggctgcggctgagggcctggtgtgtctgcacagggcctggggcagcctagggacagagagacggacgcgtggg

SEQ ID NO: 75261 - DNA, 4968 bp, Homo sapiens; identical to SEQ ID NO: 60694

SEQ ID NO: 75262 - DNA, 2150 bp, Homo sapiens
gggggccccaaaaaaaaaattatttttttccatccccggggaggtaagtttgatcctttagaacggccgccccttttttttttttttatcaacacattcactaagatctaatttgtctttttctgacttatgctcatgttttatcttcttttctttttcaaaggtttttctttccatcttctcaatgtccttttctttaatttgagatcgcttctcaggtttttctttactttcctttatatgcttttcttgtttttcaatgtctatttccttttccactaaatgaagccctatagattcctcaatggcactcatacccaaagaagtaaattctgagtctttatctgtgggtatgttttctctctcttcttttagatcttttattttttcctccctaaaagatttctcgctttcctttttaatcttgtctcgttcctctttaaagttcctctcttttgacacatgcttttccttggttgatttatcatctttgatgtttttttccaatttaaaaaagcttttcagacccgaaggccatttaatacagtaaatcttacttgggtagtttagcaaacattttttaaaacccacatccaacagattggttagtattagatacacagatttggtttcaaagctgaaatacccctggtggaataaatcttctcatgaaattcagttatattatgccacaaaacagggacacttatctattgacaacttaaatattaactcagtggggctacctgggtgatataaataggggaaaaaaccagtgggtcatgggatttagggagtgaggaaggactatggacaccagccttaccttggacttggggacccgcaaaggatgttaaaaatctatcctagaatttaaaacaggaaaaatgtccaatattccactccccattcggcccaaaccatcccccaaggaatacacccccaccccacccccacatgaggtttactaaccagctgctacagatgttactatgtcactaattaacaatgatcacagaaaatgtgtcataccagagtttttgttatcatacacaatgcattagtggctgcaggaatcttccttcaaaagctaccgtcagaaggcaaactgacaaatgtccatgccgctggtccaagaaaccacagctaagagccatgaggcattcatttgtacattgagctctctctggcatgctccccactctagttagaggggctggggtatggagagaccgtcccagccgggcgctgcagcctcctactcctgggcctccttgcgggtcaacttgtagatctcagtgggtccgtccacatgggtgatagtggtggtgagctggagttcttccccactatggacacccagatcgccattggactggtcttctccatagtttttatgggatggtgcatacaagaacatcagagcaaagacatacagattccacatcccatagatgcctgtgaaaaaggcactgttcacttggactgtgatgccgccccatttccaatggccttccgttacctgactaacgatgaagaagatgacagtcatggcagcgcaggccaaggtgataagcatgaggaacttgaacctaaaaattagcccctcatagtgtagccgccggactttgctcatagctggcaggctggactgcttcccactgatgttccgaaacacctgaaataccatgaagcatagaaacaggaagtagaggcagaggcagattccagccacgatgatgaaggccatggccagctctgttccaatgtctgtagtccagatactgtagaagggattcgtgagttgtacccctctctcacacatgtcaaatatgaagaggcagaaggagccaacggcaatgggtccgacttgcttccaataccctgcgatgtggttccgctcgtgctgatccatcatgtgctcgccacagaagatgatccagaaggacagaagcatcgcatagaagatgccctgtcggatgtcaccaaacagcagcatccaggtccagtcaaacccgatggaaaaccattccactgggatattgataaaggtcatggaaatcccaagggcaaagatgactttttccagaagcactgggggtcgggacatcatggtgatcctcctccaataccacaccataatgatgaag

SEQ ID NO: 75263 - DNA, 1384 bp, Homo sapiens
ttatttcgcagttcatttcattattattttttgcattatttctgctttttttggtctcctttccgaagggtttttatttaggggaacagctcaactccagctccctgggtgcaatgcgagcctgcccgcaccgagcgcgcttgcaaatatgccccccgccctttccctgggttacgaagtgcccctgtaccgcacggggagtgcacgaagacacgcgtgtgcacaggcggggctctgcgtgtgcgtaccctgtgggcactggagggggctgtcaggtcatatctgcccatacacaagatgggcacagccggggctggggcttcctggggtccgaatttccccgcggcgtctgcctaccacgggggcggaactgaccagtgccctcacggtcaggagagtgtgggggcccgtgaggggccaggacacgggaacacgttgccgaaaacatgtgtatatccatacgcggcggaaacgcgtgtgccagggcaggcctcgggccggatgacccctactcccaccattccccactccaagtccagcttcggcgtctatgaggcctagcggcttccggaatccggtatgaatcaggggcacggttcggagagccgggtctcgaaagcagctcttcagtgaggcctcctgaggctggtgtaggggggtggaggtgcgtcgtgtaccccagaggctgccagcgcctgctcataggtggggaggcctgggggtgggattgggactggaggcaggggcgtcggtgggcccagagggttcaaaggactcagagggctaatgagcccggcctcttggggaacagggctgctggcctcggtcgtgtcgccagcgcagataccaaaaaggctccccaggccggcccaggaacaaatgagcaggatgccacctgtcagccccacagccaggctggccacatccactcgtccacgccctccctttgccattgtagatgtagctctcccaaaagcgctccgtgagagtgttgtcctcaaaatactccctggcctcttcccaggaacacctctcttccagacactcccgtctccaggttcccctggtgtgagcagctcccaggtcccagtggttggctcttggaatccgggtatggctactcaggaagctctgggcctctgggggacccaggaagacttcttggtctgtctcctcactgggtgaagtatccaggcaggtggttaatgccatatatagcagcagcagagaggggtggcccctcatattttccagacacctgcccagaaatgtgagcactgccccttcctctttaatcgagaactccttggccagctacagccaggtttccggagagagaaagagaagagaggacttgagcaagccaggcgaggcacttccgcaa

SEQ ID NO: 75264 - DNA, 2142 bp, Homo sapiens; identical to SEQ ID NO: 60695

SEQ ID NO: 75265 - DNA, 1509 bp, Homo sapiens
  misc_feature (1)...(1509): n = a,t,c or g
ttttttttccgngctgggggcacgtttatcccagccaccgcctccagggcggccgcacaggccctgggcatcaatccagcagggctcccgactcactccctgggagaccagctccccaaccacccggccctgatggcatcccgctgcggccaggtgtcctctcagccgaggtccttgtcactgcctagctgcgtccgcctgccacaccagctcacccgagatgtaggtggcctggacgtgaagggaggtcgtcgagcaccacgaagtctgcgtcagcaccaaagtccagggtccccttactcttctccagccccagcaactgggcggggtgcagggatgcagcctccagggccgactccatgctgcagcctgtggcctgcaggatagtgccggacacagacgtccattggggctatgctgccactcagcgtcttggtgcctgccacgtaggccgtcagaccgtccacttccacttcctgctgtcccagcgtgtgcccggcgttgcccaggcccaaggcagggatggcatcggtgaccagcaccagcccctgggggatgggcacggtggggcgatccgcagggcggcggggttggtgtgcgtgccatctgcaatcatcccatagaagatgcagcggcctgcgggcagccggtcgctggtcaggagccccacgatgcctgggtcgcggtggtggaaaggcagcatggcgttgaagaggtgggtgatgaaggtggctccgctccacacagcatcctctgccgcccgcaggtcagccactgagtgccctagggacacgcagatgccacgggccgtcagcgcccggatcacttcgtggctacggcccaactctggggccagcgtcacgatgcggacattgtccaggggcccgtaggtggccagcaagtcctggaaggcatcggcctcgaaggagcggaggtgggcctcggggtgcgcgcaccgcttctcccggctgatgaaggggccctccaggtgcagcccgaggacccctgccccatggggaccaccactcttcacagggatctgaggaacaacctcaccttgtgataaacctccggtggggaagtgaccagggtggggcagaaggaggtgacgccgtgcgacaggatcctccgggccacgagggcaacccccgaacccacgtcctccgtggcttgagagaagtcaacaccaaatccaccgttgatctgcacgtcgatgaatccgggagccaagatgcggcccccgcagtcccgccgctcgtcggccacgcgccgctcctcaaagaacagcttctctgggtccaagatgcggcctccgcgcacccacagatcctccctgagcagtttccctccgcgcaggatccggcagttagtgaactggagcacgcgggcccccgccgcgccctgctcgccgcgcatcgtgagccgtgtcgggagcgagcggctccggagccccgcggcggccaaatcccgcgcccagtgacgaaccccagccgagagcggagccgcgcc

SEQ ID NO: 75266 - DNA, 3050 bp, Homo sapiens; identical to SEQ ID NO: 60697

SEQ ID NO: 75267 - DNA, 4927 bp, Homo sapiens
ggtcggcggcattcggcggcgatggagcggccctggggagctgcggacggcctctcgcgctggccccatggcctcggcctcctcctcctcctgcagctgctgccgccgtcgaccctcagccaggaccggctggacgcgccgccgccgcccgctgcgccgctgccgcgctggtctggccccatcggggtgagctgggggctgcgggcggccgcagcgcggtggcgcgtttccccgcggcggccgttggcgtcgcagcgcgccgggcgtaggacgaggagtgcggccgggtccgggacttcgtcgccaagctggccaacaacacgcaccagcatgtgtttgatgatctcagaggctcagtatccttgtcctgggttggagatagcactggggtcattctagtcttgactaccttccatgtaccactggtaattatgacttttggacagtccaagctatatcgaagtgaggattatgggaagaactttaaggatattacagatctcatcaataacacctttattcggactgaatttggcatggctattggtcctgagaactctggaaaggtggtgttaacagcagaggtgtctggaggaagtcgtggaggaagaatcttcagatcatcagattttgcgaagaattttgtgcaaacagatctcccttttcatcctctcactcagatgatgtatagccctcaaaattctgattatcttttagctctcagcactgaaaatggcctgtgggtgtccaagaattttgggggaaaatgggaagaaatccacaaagcagtatgtttggccaaatggggatcagacaacaccatcttctttacaacctatgcaaatggctcctgcaaagctgaccttggggctctggaattatggagaacttcagacttgggaaaaagcttcaaaactattggtgtgaaaatctactcatttggtcttgggggacgtttcctttttgcctctgtgatggctgataaggatacaacaagaaggatccacgtttcaacagatcaaggggacacatggagcatggcccagctcccctccgtgggacaggaacagttctattctattctggcagcaaatgatgacatggtattcatgcatgtagatgaacctggagacactgggtttggcacaatctttacctcagatgatcgaggcattgtctattccaagtctttggaccgacatctctacactaccacaggcggagagacggactttaccaacgtgacctccctccgcggcgtctacataacaagcgtgctctccgaagataattctatccagaccatgatcacttttgaccaaggaggaaggtggacgcacctgaggaagcctgaaaacagtgaatgtgatgctacagcaaaaaacaagaatgagtgcagccttcatattcatgcttcctacagcatctcccagaaactgaatgttccaatggccccactctcagagccgaatgccgtaggcattgtcattgctcatggtagcgtgggggatgccatctcagtgatggttccagatgtgtacatctcagatgatgggggttactcctggacaaagatgctggaaggaccccactattacaccatcctggattctggaggcatcattgtggccattgagcacagcagccgtcctatcaatgtgattaagttctccacagacgaaggtcaatgctggcaaacctacacgttcaccagggaccccatctatttcactggcctagcttcagaacctggagctaggtccatgaatatcagcatttggggcttcacagaatctttcctgaccagccagtgggtctcctacaccattgattttaaagatatccttgaaaggaactgtgaagagaaggactataccatatggctggcacactccacagaccctgaagattatgaagatggctgcattttgggctacaaagaacagtttctgcggctacgcaagtcatccgtgtgtcagaatggtcgagactatgttgtgaccaagcagccctccatctgcctctgttccctggaggactttctctgtgattttggctactaccgtccagaaaatgactccaagtgtgtggaacagccagaactgaagggccacgacctggagttttgtctgtacggaagagaagaacacctaacaacaaatgggtaccggaaaattccaggggacaaatgccagggtggggtaaatccagttcgagaagtaaaagacttgaaaaagaaatgcacaagcaactttttgagtccggaaaaacagaattccaagtcaaattctgttccaattatcctggccatcgtgggattgatgctggtcacagtcgtagcaggagtgctcattgtgaagaaatatgtctgtgggggaaggttcctggtgcatctatactctgtgctgcagcagcattgcagaggcccaatggtgtggatggtgtggatgctttggacacagcctcccacactaataaaagtggttatcatgatgactcagatgaggacctcttggaatagctcttcagaggagctggacccagcatggatggtggaaccacagtacctcttacactccctgtggctccaacttcaggaaataaatttcccattgcgagggacccagctctgtttctgctgcttccatcaaagccaaaaggtcttgctctaaagaaatgcagggtgggggtggggaaccctgagcacttttttacaattggctctgagaaaaagggagacattttaaattctttaacttcttatttctcgtcctgtctctttgcaaagtatgggcttgtgtttttgttttttaagggaaacgaaatggaattcgaagggaccttttcactaaccccacttctgtgtgttctgcatggtgcctgccccagggcatctgccaactccagtatcagctctcacagtgtacttggtaccatacatgggctaaactggcgagacgaaacagctgtagagatgaaaacaggctgcagaggctggcacagctggccggcttttctccatctggggacagtcctactccaagaacactgcacaccagctcctcacacagatcccacttacggcgcgcaacgggttctaggctgcaggcagctcgaggacccgcggccccgccccggctcggcctggcagatagcagaggcagcaggccgtgccgggggggcatgttgctgtaaccagtggcccaggggatgttacggtggacagtgcacctggagggcgggccccgcagggtgaaccatgctgcagtggctgtcgggcatcgggtatactccttcgggggttactgctctggtgaagactatgagacactgcgtcagatagatgtgcacattttcaatgcagtgtccttgcgttggacaaagctgcccccggtgaagtctgccatccgtgggcaagctcctgtggtaccctacatgcgctatggacactcaaccgtcctcatcgacgacacagtcctcctttggggcgggcggaatgacaccgaaggggcctgcaatgtgctctatgcctttgacgtcaatacgcacaagtggttcacaccccgagtgtcagggacagttcctggggcccgggatggacattcagcctgtgtcctaggcaagatcatgtacatttttgggggctacgagcagcaggcggactgtttttccaatgacattcacaagctagataccagcaccatgacatggactcttatctgtacaaagggcagccctgcacgctggagggacttccactcagccacaatgctgggaagtcacatgtatgtctttgggggccgtgccgaccgctttgggccattccattccaacaatgagatttactgcaaccgcattcgagtctttgacaccagaactgaggcttggctggactgtcccccgactccagtgctgcctgaggggcgccggagccactcggcctttggctacaatggggagctgtacatctttggtggttataatgcaaggctgaaccggcacttccatgacctctggaagtttaatcctgtgtcctttacctggaaaaagattgaaccgaaggggaaggggccatgtccccgccggcgccagtgctgctgtattgttggtgacaagattgtcctctttgggggtaccagtccatctcctgaggaaggcctgggagatgaatttgaccttatagatcattctgacttacacattttggactttagccctagtctgaagactctgtgcaaactggccgtgattcagtataacctagaccagtcctgtttgcctcatgatatcaggtgggagctgaatgccatgaccaccaacagcaatatcagtcgccccatcgtctcctcccatgggtaggaggaagtttctgccacctcccctcctgagcctgctgtcatcttcactgcccctgcccatctgtcacccacctgctcctttgacccctggacttggtatacctccatgtggagttgttgggcgagaggtgttctctgtgctgtgaattcagtggggagctgtagcggggtgggggctaggttcctccccccttgggccgagggccccttccccttggtgctctgtccccatccacctcctttcagctgctcctgggcctcagctctgcccagggccagccaggttctgctgggaagggaagggaatggggagaagggagaagcaagcagtgtctgagcctcaggagcttccccctccccctttgcctatcccctcccctctgcttgagccttgagccttgactgggagctgaaaggagttgcagctgttggcatgagacctccttctccccgtcttggggaggtggggaccagcagataaatcccacccttccttgagctgtcgctgtactctgaagttcagccagctcagattttataaaaattaattaaaatctccaaaaaaaaaa

SEQ ID NO: 75268 - DNA, 1765 bp, Homo sapiens; identical to SEQ ID NO: 60699

SEQ ID NO: 75269 - DNA, 4000 bp, Homo sapiens; identical to SEQ ID NO: 60700

SEQ ID NO: 75270 - DNA, 2218 bp, Homo sapiens; identical to SEQ ID NO: 60701
  misc_feature (1)...(2218): n = a,t,c or g

SEQ ID NO: 75271 - DNA, 2199 bp, Homo sapiens; identical to SEQ ID NO: 60702

SEQ ID NO: 75272 - DNA, 2565 bp, Homo sapiens; identical to SEQ ID NO: 60703
  misc_feature (1)...(2565): n = a,t,c or g

SEQ ID NO: 75273 - DNA, 1530 bp, Homo sapiens; identical to SEQ ID NO: 60704

SEQ ID NO: 75274 - DNA, 1818 bp, Homo sapiens
ttttttttttttactggggcttctgcaatttcaaatcagcactttgcagggagacaacggggtttttgaatagtatcacctggtatgaaaagttttcccaagaaaccacaaacgattgttcattttttctccttttttgttaactttttgccacactcaagtcagtttaagtcctagcaaaaagacggtagttaggataccactgtggctgtagatgatgtgacactggttgaatttgtgctggcgtttgtgtaaacttccctcgctgtttgtgtttgattccgttagggggcaccctggcttgaattgggctcgaaggattgctcctgctggcactgcaatgtggcccgcggccctgggttctggtgtgtaggtaaaggtaaggctggtggaataaatgattccatcatttcggaccaaagttactggaacctggactggttgccggacccatctccaaccttctcggaatgcagaaatgtctgggacgacacagagcatactctctccacacctgtacatagtttcagcttctacatccccaaaccacactcgtaaatttggagtgaaattctgtcctgtaagttcaagcattgctacgtccccaccgccattcaactgaaggctctctaccacaggcacaggagtgactggggcaaggacagggcccattccctcataaaatgtatactctgccttatctgtgctaatgattgtccaggaagcgccatcatctatcatctctctcactaggtgctattggacatggagtggcctgaaattgaattattctttcttgagaaaggcacaaatacattctttctgtatccttaaggtaaaatgcacatttatggagttgtgacacaggatcatctgcatccaataatgcggtatgcttatcaactttcataattatcaatcttgggagtgccatgccagtaactgagcacacaagtttgcatgtttgtccataatggatgtagacatctcggactgtgaattcttctccttctgattcatcatcatccaagagatgaataaaaaaggctccccactgctgtgaactggcatgaaaattacctccttctacatgcaagtatctggtactaactgtctgggatcgtagtcgattaaacagagccacctttgttcctgaggcaatgcataagtcagcatttttcaatgactgcttctttttggaaggtttggagatgacttttatccgcttgctgaggaacacaccaatgtcatcactgttgccatagaacatctttacagacaacatgaagtgctttcgcttgtctgagtcagatatatacaatgttttggctgtgcaatagttctttccttccaagtttagctgctgcatttcttggtcactatttcctatcccaataaatgcacacggttgagactcttgttcagaacaaccatcgcgttccatttgttctttttttttcttccatccgctgcccataagatatacacaaggaggtgggcaaaaaaaccttttttcatttccatatgacttctgtgcaacttttgcatgaagaataagtactgtttgatcccctcgctcttttaaataatttcgcatagcttccctagtaagtcgtttaggtggaggccgctcaccaaatttcccaggcgatggagcatgcgcaggcggctcctccgcgggcgagccctccgtgtggtccatggggagcgctccggttatccgggttttaggacgcgctttgagggacgtacgtggagactgcagccccccatctttcccctcctttgctctttcctttcctagagattcccacgaaa

SEQ ID NO: 75275 - DNA, 1768 bp, Homo sapiens; identical to SEQ ID NO: 60707

SEQ ID NO: 75276 - DNA, 2772 bp, Homo sapiens; identical to SEQ ID NO: 60708

SEQ ID NO: 75277 - DNA, 4477 bp, Homo sapiens
  misc_feature (1)...(4477): n = a,t,c or g
aggcaccggggnnaaattcccgggtcgacgatttcgtacgcgcggcgccgctcggtgcagaccatgaattacgtggggcagttagccggccaggtgtttgtcaccgtgaaggagctctacaaggggctgaatcccgccacactctcagggtgcattgacatcattgtcatccgccagcccaatggaaacctccaatgctcccctttccacgtccgctttgggaagatgggggtcctgcgctcccgagagaaagtggttgacatagaaatcaatggggaatctgtggatttgcatatgaaattgggagataatggagaagcattttttgttcaagaaacagataatgatcaggaagttatccctatgcacctggccacctcccccatcctgtcagaaggagcttcgagaatggaatgccagctgaaaaggggctctgtggacaggatgagaggcctggaccccagcacgccagcccaagtgatcgctcccagcgagacgccgtcaagcagctctgtagtaaagaagagaagaaaaaggaggagaaagtcacagctggacagcctgaagagagatgacaacatgaacacatctgaggatgaggacatgttccccatcgagatgagctcggatgaggccatggagctgctggagagcagcagaactcttcctaatgatatacctccattccaagatgatattcctgaggaaaacctctccctggctgtgatttaccctcagtcagcctcataccctaattcggatagagagtggtcacccactcccagtccttccggttcccgaccttcaacacctaaaagtgattcagaattggtcagcaagtccacggaaaggacagggcagaagaacccagaaatgctttggctgtggggagagctgccgcaggctgctaagtcttcttctccacacaagatgaaagagtccagcccattgagcagtagaaaaatttgtgataaaagtcactttcaggccattcacagcgaatcttcagacacttttagtgaccaatcgccaactctggtcggtggggcacttttggaccagaacaagcctcagacagaaatgcagtttgtgaatgaagaagacctggagaccttaggagcagcagcgccactcttgcccatgatcgaggagctcaaacccccctctgccagtgtagtccagacagcaaacaagacggattctccttccaggaaaagagataaacgaagccgacatcttggtgctgacggcgtctacttggatgacctcacagacatggatcctgaagtggcggccctgtattttcccaaaaacggagatccttccggactcgcaaaacatgcaagcgacaacggagcccggtcagccaaccagtccccgcagtcggtgggcagctcgggcgtggacagtggcgtggagagcacctcggacgggctgagggacctcccttccatcgccatctccctctgcgggggcctcagcgaccaccgggagatcacgaaagatgcattcctggagcaagctgtgtcatatcaacagtttgtggacaaccccgctattatcgatgaccccaatctcgtggtaaagattgggagtaaatattataactggacaacagcagcacccctcctcctgggcaatgcaggccttccagaaacctttgccaaaggccactgtggaatctatcatgagggataaaatgcccaaaaagggaggaagatggtggttttcatggaggggaagaaacaccacaatcaaggaggaaagtaagccagagcagtgcttggctggcaaggcccatagcaccggagagcaaccgccgcagctcagcttggccaccagggtaaagcatgaatcatcctccagtgatgaggagcgcgcagctgccaagccatcaaacgcagggcacctccctcttctgcctaatgtcagctacaagaagactctccggctgacttccgagcagcttaaaagcttgaagttgaagaatggccccaacgacgtggttttcaagtgtcaccacgcagtaccaaggcacgtgccgctgttgagggcaccatctatctgtggaactgggatgataaaagtcatcatttctgatattgatgggacaattaccagatcagatactcttggccacattttgcccacccttgggaaggattggacccatcagggcatcgctaagctgtaccataaagtgagccagaatggatataaatttctctactgttctgcccgtgccatcgggatggcggacatgacgcggggctacctgcactgggtcaacgagaggggcacggtgctgccccaggggcccctgctgctgagtcccagcagcctcttctctgccctgcacagagaagtgattgaaaagaagccagaaaagtttaaagtccagtgtttgacagacatcaaaaacctgtttttccccaacacagaacccttttatgctgcttttggaaaccgaccagctgatgtgtattcatacaagcaagtaggagtgtctttgaatagaatatttaccgtcaaccctaaaggagagctggtacaggaacatgcaaagaccaacatctcttcgtatgtgagactctgtgaagtagtcgaccacgttttcccgttgctgaaaagaagccattcttcagactttccctgttcggataccttcagtaacttcaccttttggagagagccactgccaccttttgaaaaccaggacattcattctgcctcagcgtaaaatgtcccaagcagcctcttgccagcagtgcagagcctggttgtcacccattaaaggataggtctccccggagtgcacagctccacctgggagcctggcgcgtcatcattggcctgacagcagagagaattgagaagcatttctcccctgccccaccccggggctgacatttctaagcaagataggaagggagcactttctaggctaggagttgggtgcatttgtaccgtgaaaagcattcctcagttgtggcttaatgccagttacgacgctgcctttccggcctgctccagcaagtagctactggttcacgtgcagtttggggctgtgaaacctaggcagaaggcggctgtctgagggctgtccccgcctaggacagggtcaatcgaggaatgccagatgtgcacggtttttggcaaagtagggggcacatttccattatagcaatgttagtgccaccaccttctgaacacagtggggagggctgtgaaggctcatgtgacctggatctgaggtctcctgatagaaatctggacgccaccgggtccaggcctggcctcagacttggccttgtggatgggccccttacagtatttgctgactagtctcatttttaggtgataagtttttcctttaattcctttggttaaaggatagtctatttcattggcatatctccccccaagtttttgtggctcaaggctggaatatttatgccttaatatatctatggcagacatttaagaatgcgctttatctagctcatggtaacttttgcaacgccttagattaaaatgacagtaaatattactaaggcagtattttgaatgagtttgacactgccggcttccttccatccagcgaggtggtgctgacagtgtggacttgagcacacttatgctaaatgataatgatactgacttctgttgggagctctccaaagaaactggttggttttaagaaaatagtttcaagaagttcaactatattcttttagatattatgtattgttttactctgattaggttactgtgataggcatttattcatattctttctataccactgtcattaatatattaaaaagatgtatgtgttagactatcgaaagggccttattctctctttctcatagactgaccttcttttggaatttctgagtcatttattttccttagctttttccactcaaattaagggcaagcgaaaaagtaataatttggcattctttaagcctacagaatgtgattctttcacttgtttattacactggctcgtggacagaacaatttgaaaagtgaaagaattattttggtaaaagattttgctttacttttcgaagcattatttttttaaagagtgttttactccaacgattgaaacattttcctatttaaatttcattgttagaatcacaggaggcaaaaaatggaacggttgaatgaaattttactctttctgtgaaagaaaatccacagagttgttgcctccgttgtagttggtgggccccgttagcattggatgcctttgccaaatggttcatgtggacacacaaaggcaaacagatctgccatcgatcgcagatttctgtagaaacacggatgtgcatgtgcagattcccttttgcaggtattaaaaataattaaaaatagtcctgcctgaggttgcagtgagccgagcttgcactactgcactccagcctgggtgacagagtaagactccatgtcaaaaaaaaaa

SEQ ID NO: 75278 - DNA, 3060 bp, Homo sapiens; identical to SEQ ID NO: 60710

SEQ ID NO: 75279 - DNA, 2175 bp, Homo sapiens; identical to SEQ ID NO: 60711

SEQ ID NO: 75280 - DNA, 3201 bp, Homo sapiens
  misc_feature (1)...(3201): n = a,t,c or g
ttttttttttttgggcgcagagggcgtttattggacctgtccttcccagccgctgcttgtccaggttcagcgctctccgcgggtgaggcaaggaaaccgaggagacgcccgagccgggtcaccacaaggtccgcctggacccccggccgtcacggacggtcctctggatgcagatggtccagggatctgggggtcctgggagagtggtgtgtggactgcgggcccagctggacaaaggcaggggcttcctcagaagctctgctggtcacgcaggcgtccggcccacggccttcaacagccctgcagggcgggctgaggttaaccgcgccgaggagagtccagggcgagcggtggctcttgcagcagccgggctcaggggcagctgaggggtagctgaggagtagctgaggggcagctgggctcaggggtagctgaggggcacccgccaccagagcccaccgcacaggcagttcttgatccagcgctgctcccactgcttcaccgccgtggttctgttgggcgacttgagcatggtgacacagccgcacctggtgcaggccttgcattcctccgtggggcaagcgccaaggtgcagcctccgcaggtggtcgatcttgggctggcctggggccctggcgaggccgtcgagctgcagggtggcagcactgccaggcagcgtgggcgcccggccaaactgcagacgaaggggctgcttgggctgcaggcggctaaccaggccgtcgctggctggcagccagtccaggctggggataagcagctggctgggcagcaggcagcattcatccaccagcgcctcgtccggctcgctcgctgggccctcatcgcgacagcagatccagagcttggtgagcaggcggaagagcagggacatgctgtcctgggtatccgaggtggccgtatacacgggcaggcagctgggcttcagaaggccccagatgcggatgaccaccatcaattcccgaagcatgcccagcgaggtgccgtcccgcaggaagctgtggcccggcctcagcagggaaccagcagaggcttcatggagaggagggctccgaggtgggggagggctccgaggtgggggagggctccgaggtggggcagggctccgaggtggggcagggctggttgggtaggctggccagcaggtacagcacgaagtcgcccacccactgcaagagctgctgcagcgcctgcagtgtgttcatgtccagcacaaattcctccgtcttgaggttgatcatgaccttgtcaatgtcgacgtcggtgatcttggtgcagatctcggtcagccggtcgccggggctcttgtcaggcgtgttgagaaagtgggggcgcagcagcgacttcagggtggagctgatggcgatgaggaagagcttggtgtggtagtcgcacacgcgggtcaccgtgcagggcgacagcttgcagagcgaggccttcatggccaggatccgggtggagaggacctgctgcagggcagcggtctggcgcgtgtactcctcgtgcagcttctccaccaggctctgtaccatactgggctgcacgtgcagcaggatgtcccaccagtcgtagccggtcaccatgcagtactccagcaggaagagcaggtgccgcagcgccagccccacctccagcgggtggcccatggaaggtgagaggcggagccacgctcagcttcccgtggctgtcaatccccaccagggccagtgacgtccacgatagctgcatagcctttaagtggacggcggggcccgcggtgcgggggcgcttcatggccggctcatccacaggcctcggggccgcggagctgtagaagaccgccatggtctgcagtgagagccggtgcacgatgtggacgctgccgtcgtggaaggccagggccagcccgaggccagggtagaactgtgtgtcgctggccaccttgaggtcggtgttggtgagcgagatgggcagcttgggcagcgcccacggccgacacacggtccagatcgttggtggccgataggatccgccatttgagaattgtgggctgtttgtcgccaaccacgggggagatctgctggaagatgttgttcacggggagtccctccttgcgcagggaccagcactccacgatgctgctggtctggctggacgcgcacaaaagcacctgctccgacatgtcccgggccaggaacttgaggtgggtgatggcggggaacttgtccttgcggttgaggtcggtggtgcagcgcatgaacagggagggcaggatatccgtgtcgatacggcacttctcgctcaccacgctcacgcacaccttgtagaactgcacgggcgtacgcgctgctgccgtccgccgtggccaccacgatgttgccgccgccggtgaaggcgatgtcggccagggccacgcgggcgcgcagccggcacaggctcatcggtggacgtcgagcacctgcccgctggcgttncagcagggacacggtgaccaggccgctgaccgtcaccgcgatccagccctccatggcattgccgcacgaacagcgtgagcgacgggtgagaacttgactccgggagaacttctccccgaagctggaggcgcccgacttctccacgtgcagggccagtttcacaccatttgtgcagccagggacagggcccacaaatggggtcccccctccactaaggctgcccactgagcttctcccagctattaagccagggtnggtacccccatgctccagcaccttgatctgccccgtcggccatctgctgaacaggaagccggggaagcctgactggtcccactccagggcaggtgatagcctcgtggtgctctgaggggatcgagtgcaggtcccaggggtgctccgtgtccaggatgtggatcatgcgggtcaggtcctggtcatcgctgcgcaggtccatggtgaaggcgatgagatttcggcaggaccaggcgcaggccaggggcaccgatgggcagtgggtgctcttggaccatttctcccactcacagacgtaggccaagtccatcatcccacctgccgctggccgccgcaaatcacacatgagggcagtcaccagctcctggtcggcccgtgcgccaagctcagcgggcgtccgcggtgcgatcttccctagcgcctcgggtctggcgccgccatcttcctcggtaacaaccagtcgcttgaggcgtgg

SEQ ID NO: 75281 - DNA, 1285 bp, Homo sapiens; identical to SEQ ID NO: 60713

SEQ ID NO: 75282 - DNA, 2358 bp, Homo sapiens
tggacgagaccccgagggggaagcggcggctgattcagggtcgcgcctccgttggaaacttgggctgaataccgcggcgggcgcgagcgaggcgccctagacatcttctccctcccttgcctcagatttattgctaaacatgggtgcatttttggataaacccaaaactgaaaaacataatgctcatggtgctgggaatggtttacgttatggcctgagcagcatgcaaggatggagagtggaaatggaagatgcacacacagctgttgtaggtattcctcacggcttggaagactggtcattttttgcagtttatgatggtcatgctggatcccgagtggcaaattactgctcaacacatttattagaacacatcactactaacgaagactttagggcagctggaaaatcaggatctgctcttgagctttcagtggaaaatgttaagaatggtatcagaacctgggatttttgaaaattgatgaatacatgcgtaaccttttcagacctcagaaaccgggatggacaaggagttggttcaactgccagttggaagttatgatttcacctaagcatatctactttatcaactgtggtgattcacgtgctgttctgtataggaatggacaagtctgcttttctacccaggatcacaaaccttgcaatccaagggaaaaggagcgaatccaaaatgcaggaggcagcgtgatgatacaacgcgttaatggttcattagcagtatctcgtgctctgggggactatgattacaagtgtgttgatggcaagggcccaacagaacaacttgtttctccagagcctgaggtttatgaaattttaagagcagaagaggatgaatttatcatcttggcttgtgatgggatctgggatgttatgagtaatgaggagctctgtgaatatgttaaatctaggcttgaggtatctgatgacctggaaaatgtgtgcaattgggtagtggacacttgtttacacaagggaagtcgagataacatgagtattgtactagtttgcttttcaaatgctcccaaggtctcagatgaagcggtgaaaaaagattcagagttggataagcacttggaatcacgggttgaagagattatggagaagtctggcgaggaaggaatgcctgatcttgcccatgtcatgcgcatcttgtctgcagaaaatatcccaaatttgcctcctgggggaggtcttgctggcaagcgtaatgttattgaagctgtttatagtagactgaatccacatagagaaagtgatggggcctccgatgaagcagaggaaagtggatcacagggaaaattggtggaagctctcaggcaaatgagaattaatcataggggaaactaccgacaacttctggaggagatgctgactagttacaggctagctaaagtagagggagaagaaagccctgctgaaccagctgccacagctacttcttcgaacagtgatgctggaaacccagtgacaatgcaggaaagccatactgaatcagaaagtggtcttgctgaattagacagctctaatgaagatgcagggacaaagatgagtggtgaaaaaatatgactttcctttttggtaatatttttgtgatctttgatggtttttaacctaggaagtgtaatgtatgcatttatataactgttttgttatttgaatcttggaaaactagttttattatattcagatagccttgttttttaaaaaggcctttgcatacacctttatgagatagtgtaaaattgactatttatagtactatggatttaatgaaattatatgtcatttcacattgtatgccagaaattaggctaccaattatgaattaaagtcagtagttaaattaatactagatagaattagaaattttgattagagagattatgctatattatggaaaaacttgttaatgtagaattatactgcttcatattattttacctattagtacactcatagttagcttggtaaataaatttaggttttctttaataattttagttcttcaaagaatgggctgatgctggcctgtaatttttctttccaaggatgataatttgtgtgttgtttgatttgtttatattttacatctctgtaggttttatttttagaagttgtgagatatttgggatgtgtgggctatttttcctttctctgtattctttatgaaaccataactttttgaaaaacctatgtattattcatacagctttgggtttgtatattctgtataggcctaacttacacacatccaaaatgtatgtcaaccaagtgtttagaatgaaattataagtgtttaagtccaaataaagcatgtgatgtggaataaaaaaaaaa

SEQ ID NO: 75283 - DNA, 3622 bp, Homo sapiens; identical to SEQ ID NO: 60715

SEQ ID NO: 75284 - DNA, 2316 bp, Homo sapiens
tttccgttctcttggcccggctgacagagttagccgaggccgccatattgaataagcgacccggcctcctagggggtcgtcgtggtgcagacagtttagcagaacagcctccgcggctccggggagaagcaatatgttaaggatacctgtaagaaaggccttagtaggcctttctaagtctcctaaaggatgtgttcgaacaactgccacagcagcaagcaacttgattgaagtatttgttgatggtcagtctgtcatggtggaaccgggaacgaccgtcctccaagcttgtgagaaggttggcatgcagatccctcgattctgttatcatgaaaggttgtctgttgctggaaactgcaggatgtgccttgttgaaattgagaaagcccctaaggttgtagctgcttgtgccatgccagtaatgaagggttggaatatcctaacaaactcagaaaaatccaaaaaagccagggaaggtgtgatggagttcttattagcaaatcacccattggactgtcctatttgtgaccagggaggtgaatgtgatctgcaggaccagtccatgatgtttggaaatgataggagccgatttttagaggggaagcgtgctgtggaagacaagaacattgggccattggtaaagaccatcatgacaagatgtatacagtgtactcgctgcatcaggtttgcaagtgagattgcaggagtagatgatttgggaacaacaggcagaggaaatgatatgcaagttggcacatacattgaaaagatgttcatgtctgaactgtctgggaatatcattgatatctgccctgtaggtgccctaacctctaagccctatgcctttactgcccggccttgggaaacaagaaagacagaatccattgatgtaatggatgcggttggaagtaatattgtggttagcacaagaactggagaagtgatgaggattttgccacgtatgcatgaggacatcaatgaagagtggatctctgataaaaccagatttgcctatgatgggctaaaacgtcaaagacttaccgagccaatggtcagaaatgaaaaagggcttttaacctatacttcttgggaggatgcgctctctcgcgtagctggaatgttgcagagttttcaaggcaaagatgtggcagcaattgcaggtggcttggtggatgctgaagccctggtagctctcaaagatttgcttaatagagtggactctgacaccttatgcactgaagaggtcttccccactgcaggagctggcacagatttgcgttccaattatcttcttaatactacaattgctggtgtggaagaggcagatgttgttcttctggttggtacaaacccacgttttgaggcaccactgtttaatgctagaattcgaaagagctggctgcataatgacttaaaagtggcccttataggcagtccagtggacctcacttacacatatgaccacctgggagactcccccaaaattcttcaagacattgcttcgggaagccatccatttagccaggtcctaaaggaagctaaaaaaccaatggtggttttaggcagttctgcactccaaagaaatgatggagcagcaattcttgcagctgtttctagcattgcacaaaagattcggatgactagtggtgttactggtgattggaaagttatgaatatccttcataggattgcaagtcaagtagctgctttggaccttggctataagcctggggtggaagcaattcggaagaaccctcccaaggtgctgtttctcctgggagcagatggaggttgtatcacacgacaggatttgccaaaggattgtttcattatttatcaaggacatcatggtgatgttggggctcccatagctgatgttattctcccaggagctgcttacacagagaagtctgctacatatgtcaacactgagggtagagctcagcagactaaggtagcagtgacacctcctggcttggcaagagaagactggaaaattataagagcactctctgagattgctggaatgactcttccatatgatactctggaatcaagtaaggaacagattggaagaagtctctcccaatcttgttcgatatgatgatattgaagggggctaattacttccagcaagcaaatgagctctcaaagctagtgaaccagcagcttcttgctgacccacttgttccacctcagctaactatgaaagacttctacatgacagattcaattagcagagcttcacagacaatggccaaatgtgtcaaagctgtcacagagggtgcccaggcagtagaggaaccatccatatgc

SEQ ID NO: 75285 - DNA, 1578 bp, Homo sapiens; identical to SEQ ID NO: 60716

SEQ ID NO: 75286 - DNA, 3282 bp, Homo sapiens
gtgcgctcaggcggcgctcccggagatgccccgcggcagccgcgctcggggctctaagagaaaaaggagttggaatacagaatgcccatcctttccaggagaaagaccactgcaggtcagaagagcaggtctcaggacagcaggggcagctgcctctctctctgaagcatggctcaggtgtggagaagggtttcagaacacttctgggaatccgtcattaacagctgaagagaagacgattacagaaaagcaccttgaattatgccctagacccaagcaagaaaccaccacatctaaaagcaccagtgggcttacagacataacatggagctccagtggaagtgatttgtcggatgaagataagacactttctcagttacagagagatgaattacagtttatcgactgggagattgacagtgacagggcagaggctagtgactgtgatgaatttgaagatgacgagggtgctgtggaaatctcagactgtgcttcttgtgcaagtaatcagtctttgacaagtgatgagaagctgtcggagcttcccaagccaagttctatagaaattttagagtattcatcagatagtgaaaaagaagatgatttggaaaatgtcctactcattgattcagaatcccctcacaaataccacgtgcagtttgcatcggatgcaagacagattatggagagactgatagatccaaggacaaaatcaacagagaccattttgcatacacctcagaaacccacagctaagtttcccaggactccagaaaattcagcaaagaagaagcttttaagaggtggactagcagaaagactaaatggactgcagaatcgagagagatctgctatttctttgtggagacatcaatgtatttcttaccaaaagacactttcaggtagaaaatctggtgtattaactgtgaaaattttagagctgcatgaggaatgtgccatgcaagttgccatgtgtgagcagttattggggtcaccagccaccagctcctcccaaagtgtggctcccaggcctggagctggcctgaaagttctcttcaccaaggagactgcaggctacctcaggggccgtccccaggacactgtccggatcttccctccctggcaaaaactgattattccaagtggaagttgccctgttattctgaatacttacttttgtgagaaagttgttgccaaagaagattcagaaaaaaacttgtgaagtgtactgtccggacataccccttccaagaagaagcatctctttggcccagatgtttgtaattaagggtctaacaaataattcacctgaaatccaggttgtgtgtagtggtgtagccactacagggacagcctggacccatgggcacaaagaagcaaaacagcgcatcccaaccagcactcccctgagggattctctcctggatgtggtggaaagccagggagctgcctcgtggccaggagctggagtccgagtggtggtgcaaagagtgtattctcttcccagcagagacagcaccaggggtcagcagggggccagctcaggacacacagacccagctggaactcgagcctgccttctggtacaagatgcctgtggaatgttcggtgaagtgcacttggagttcaccatgtcgaaggcaagacagttggaagggaagtcttgcagcctggtgggaatgaaggttctacagaaagtcaccagaggaaggacagcggggattttcagtttgattgacaccctgtggcccccagcgatacctctgaaaacacctggccgcgaccagccctgtgaagagataaaaactcatctgcctcctccagccttgtgttacatcctcacagctcatccaaatctgggacaaattgatataattgacgaagaccccatttataagctttaccagcctccagttacccgctgcttaagagacattctccagatgaatgatcttggtacccgttgcagtttctatgccacggtgatttaccaaaaaccacagctgaagagtctgctgcttctggagcaaagggagatctggctgctagtgaccgatgtcactctgcaaacgaaggaggagagagaccccaggctccccaaaaccctgctggtctatgtggcccccttgtgtgtgctgggctctgaagtcctggaggcactcgctggggctgcccctcacagcctcttcttcaaggacgctctccgtgaccagggtcggattgtttgtgctgaacgaactgtcctcttgcttcagaagccccttttgagtgtggtctctggtgcaagttcctgtgagctgcctggcccggtgatgctcgacagcctggactctgcaacacctgtcaactccatctgcagtgttcaaggcactgtggttggcgtggacgagagcactgctttctcatggcctgtgtgtgacatgtgtggcaacgggagattggaacagaggccggaagacagaggcgccttttcctgtggggactgctcccgggtggtcacatctcctgttctcaagaggcacctgcaggtcttcctggactgccgctcaagaccgcagtgcagagtgaaggtcaagctgttgcagcgcagcatttcctccctgctgaggtttgccgccggtgaagatgggagctacgaagtgaagagtgtcctcggaaaggaagtggggttgctaaattgttttgtccagtccgtaaccgcccacccgaccagctgcattggattggaggaaatcgagcttctgagtgcaggaggggcctcctgccagaacactagccggttgccgcaggatctgtgaactttgcaatgtggcctgccaaggggtggtgggtggtggtggtgattggggggtaggttattgggttaacctatgggaccccagtgaaccgtaggtttacggatcttggaaaggaaactttagatttttctggggaaatgttccagataccagttttgtgaactgttaaatcaaaataccctttttcctacagtttatcttttattttcctgcaaatttaaggaacatatttactccgttttccacattgaatccttaagttttaaactccttcatttggtatttaaggccaatatatgaggaaaaaaatttttttttgttcatttgtaattttaacaagttgaacattttaccatgattgaacatgtttttattacagtatttaacattcccccaaagaataccctgcaaagtgtaaacctttgtcccatactgtgatattaaaaattctgctacaataaatgtcaaacctaaaaaaaaaaaa

SEQ ID NO: 75287 - DNA, 5825 bp, Homo sapiens; identical to SEQ ID NO: 60717

SEQ ID NO: 75288 - DNA, 2648 bp, Homo sapiens; identical to SEQ ID NO: 60718

SEQ ID NO: 75289 - DNA, 8461 bp, Homo sapiens; identical to SEQ ID NO: 60719

SEQ ID NO: 75290 - DNA, 2085 bp, Homo sapiens; identical to SEQ ID NO: 60720
  misc_feature (1)...(2085): n = a,t,c or g

SEQ ID NO: 75291 - DNA, 1846 bp, Homo sapiens; identical to SEQ ID NO: 60721
  misc_feature (1)...(1846): n = a,t,c or g

SEQ ID NO: 75292 - DNA, 1804 bp, Homo sapiens
ttttttttttttacgtatcaacaaaggatcctttattgaccagagcaggaccgtggcatttttatttatatatatatatatatatatatatatatatatatatatatatataaataaaagtttgaagatctggcaggcagtgatcctattggtccggccaccacccccagcactgatttcctgctccctgcacggggaagggggagggatgactgctccacccaggccacagggccacacttccccttgcaaaccagaggaagaaaggggctttttctgtagccatccccctgcacattcagaaattcaaccaagtatttctctcaaaaaaaaaaaaatacagaaattgaaacatttaaatatgaaaaaccaaagggaagtgagtgggaagaggcaagagaggaaaggaactggagtttcttgggaagggactcccatgtctcccttcccatttatgggcttggggtctggggtacgaggctcacacagtgagtttgcagtgacacagctccttgtagatctgccgacgaagtttgggcatgtcctgctgggtgaagctgaatggctgagacagggccagatgcttgcagtactgcaacacaaaagcaccacagtcactgtcattattctgcctggccacattcattttgaagtaacctttccagccctggtggaaatccagtcggtctttctttaccgcctctgcctgtagatacttggcaatatgcttagggcagcggcggtttagggtacgctgcgagtcaaaataggtgatggtgcgtcgcctcacatcaacagagatgagggaccaatgcacctccaggtggatggggattagcagtagctccttattgaagatgtccacgtttttggtccaccttttcaccccatcataacccttggtacggagtttatcaatagaagaaactattgaagaaatgcacctttttcagggactgtgtccatgaccaggtctccatacatgttcatcacctggtcattgagccagttctgtccatacaaggtccccaagtcatccatggtcagcacgtgccgcttataagccactcggaagcccctcaccatggcattgcctggcatccgctggtaagactggatcagctgcaacaccaggcccttcctggaaggggtggaaaactcctgctggaaaatgtcctccagcttctctactacctcatcagtgctgaggggtatgaggctgccataccgtttgaaggaattcgtccaagatgctctgtacgcaggtcacatgctcctctcgcagggggctgtgctggccggcttttctccccaggcctctctgcctcttctgccatgcccaaatctgagccctgaaaaagctcctgggccacatggtccccgatgctgcacacattgctgatgaggatgctggcatcagggggtgccaagctgcgctccccttctggcccagattgtcccccaaaaccgttgggcagagtacatgaaaggaggcccgagtcagggtccagaggagactttggagtccacctgagtccatcttcctccatggggggcccagagggcactggtggagaccctctcaccccatcctcagccatgagagcacctagcagacccagccggggtggaggtggcccccggggggagtcaaaacgacaacagggggatggcacctgtggcgtcgcacccccttgctggggtgaaagatggttcttggggtgtgcgaggccccgccgccggccccggtggcgcccccaaagcttccagtggaatgtcagcgaggtgcttttccacgcgtcgc

SEQ ID NO: 75293 - DNA, 1706 bp, Homo sapiens
aggccctgttgaagtacggaatgccggaagggccgggctcaaagctccgcctctggcgcgaccgacgactggagcgcagggcaggggtagaggctcgtagatggaactggtagtcagctggagagcagcatggaggcgtcctgggggagcttcaacgctgagcggggctggtatgtctctgtccagcagcctgaagaagcggaggccgaagagttgagtccgttgctaagcaacgaacttcacagacagcgatccccaggtgtttcatttggtttatcagtgtttaatttgatgaatgccatcatgggaagtggcatccttggcttagcttatgttttggctaataccggtgtctttggatttagcttcttgctgctgacagttgctctcctggcttcttactcagtccatcttctgcttagtatgtgtattcagacagctgtaacatcttatgaagatcttggactctttgcatttggattacctggaaagttggtggtggcaggcaccataataattcagaatattggagctatgtcatcttatcttttaattattaaaacagagcttcctgctgctattgcagaatttttgactggagactatagtagatattggtatcttgatggacaaacactactaataatcatatgtgttggcattgtgttccctcttgcacttcttcccaaaataggctttcttggctacacaagtagtttatcatttttctttatgatgttctttgctcttgtggtaataattaaaaaatggtccatcccttgtcctctgacattaaattatgtagagaaaggcttccagatttcaaatgttacagatgattgtaagccaaagctctttcatttctccaaagagagtgcttatgccttaccaaccatggctttttcatttctctgccatacctcaatattgcccatatactgtgaacttcaaagtccttcaaagaaaagaatgcagaatgttaccaatacagcaattgctttaagttttctcatttattttatatctgcactctttgggtacctcactttttatgacaaagtggagtcagaattactaaaaggttatagtaaatacttatcacatgatgttgttgtcatgacctgtgaagttatgccatactatttgctgtgcttttggacagtccctctaatccacttccctgccagaaaagctgtaacaatgatgtttttctccaattttccattctcatggattcgccattttttgatcactctagcactcaatattatcatcgttttacttgcaatatatgttcctgacattagaaatgtatttggtgtagttggtgccagtacatcaacatgtttgatttttatattcccaggactattttatcttaaacttagcagagaggattttctgtcatggaaaaagcttggggttggcgtgcagtggtgtgatctcagctcattgcaacctctgcctcccggactcaagcaatcctcccacctcagcctccagagtagctgagactacaggaagagataccatggagatgtgcacccagaggaaaggccacgcaaggacacagcaagaaggcaactgtttacaagccaagggaagaggcctcaggagaaccaaacgtgtccacaccttgatcttgcacttcccaacctccagaactgtgagcaaataaatgatgttgtttaatcccaaaaaaaaaa

SEQ ID NO: 75294 - DNA, 2060 bp, Homo sapiens; identical to SEQ ID NO: 60724

SEQ ID NO: 75295 - DNA, 1744 bp, Homo sapiens; identical to SEQ ID NO: 60725

SEQ ID NO: 75296 - DNA, 7872 bp, Homo sapiens
  misc_feature (1)...(7872): n = a,t,c or g
tgtggacagagtaaaaaagtttattaacattctgagaaggacagaaattttcaagaatcatcattagtgttaacaaagcttgatgaaaaaattcggatgcaaggagggtcaatgagttattgggtggtctttcaaataagcaaacctcaagcaataataccaaagtgttttaaaagagcgtttaaaatgaattttattctttgaattttacaaggtagtctttagaggcttcaaacaagaactctgttgcaaaactctaataaatagcttgccccaaagtccccaaacaaaatgtaaaacaaaatgagaactaaactcagaaggataagcaagacttcagaatgcttgggatgttaggcaatatttctcatttacaaagaggatatcagggcaatgtacaatctccttcatacaagtcaaagagaggaaagagacaggacaattggaaatcttcacaaaggcactccggaaatcttcctatttccatgatagaaatgtcaccagaaaaaaaaaattccatgggaggaattcacaatcaaggattggaaactgtaggcataaaaattctgggtagtgaatgtagcagggagaagagaggaaaatccatcctgtttctttcagggatggagagaggaaggaattgagattacttgggtgaagggaacttccaatcagatgccgctagagtgctgaatgttcccttagaccagagttgccactgaaagggcagaggggtcggtttagtgacagttatgaaggcaacaaacaaaggggtctcctcaggtcagtcaaaactggccagccccatgtctctgtgctctacagcagccttggaagagtgacccaggggcccaaagcagcctgcatcacaagacagcaaaaatagcacatcaataatttctgcagcggaatcctttggatggccatgaaaggatgcagaaaatgccgtgctgaaatttcacactgggacatgcaggtttcaaaagcccattctagtatcacagtcattattcctaacaagcaatgattaaaattcacaattaaacattcactgttagcttctcctagttacaaatactggtgaagtcttgctctggagagaaagattaatttagagatatggtcattttcagcaagctaaaaaaaccagttgtgccacatttttatctttaaaaatctttaaaacgtatacttttgaccaaaatgcattcaaaatgcagacagataaggttttagtttgggggaattctgaaatcaattaatgtttggagccaggaagctgtaagagagattgattccaatttagtggggctcaattaagccaaacaaaaaagagtcttgacagcacaagtgggaaccatcttcctggggaaagggagaagcaggaaatgacctcacaatgcaggactgagaaggggtgtggcctgcaggcactgtcagagctgctctggtttacagacttgctgttaaatatttaactccggtcctgctgatctctggaggacaggtacagacagcactagctcatgcacgagtcattcaagggaggtaggcattttctcaaagcaactccctctccaggcattttagggaagaaggtaaggaaatatccctctctactccccaaacaagttataaaaacattctttttctaggaataatgatatttgttagaataacaagggaaagcttgggttacctgaagttgataagaaagctgatgggaatagaggcggatgggccagggggcgccctggtccaaggcccagtttcttcttaaatacataacagataaagatattgtgcaaaaaaataaagacattcacattttagcagttaaactttttttttactgtttaaaatttttatttactttttttgttttttttttctacaaaaggcaggtgatgattgttgatctgcaactattgtgttgtgcactccccgaaagggggcagagtaggaagccagggaaggtgctctgaggatgctttctatggagggaataagggcttgcaggacactcactggagggagtgtctgggcccttctcctgtcctcctcagccttccctagctcatgtctatggtgttgaaaacccattctgtgaacttcttcagcttgtccgaggcgttctgggactcctcctgtagcctcaggttgtcctctcgcaggtgctgcacctccgcctgaaggtgagctttgtcttctttttccttcttcaaatcttcccgaagcatcttcagcataccttccagctggtccactttagaagccagagtgggagaggagtctttactgctgctgtaaggcttcatctgggccagagcctggtcctccagctgatcactgttggatgcagcactcaaggggcgatggttttcatcactagcagcaaaaaatgaggctctctggacctcataggctttggcagcatctaccaggttggaccaatccaagtctgcagcagtgtcaggcaggggcatcaggccagggtcgggcataggctgcctgcgggtctcctggatgtcagtgagggagctgtccgaggctgagaactctccatgcagcgatttcattcctaaggtgtaagaaggcctcctcaacgggagcgacttggggagagaagggtacgtgctactgaagaggacgtcgttgggcagggcttggtccagaagtgacgccctggaggtgaaaaagtgctccctctggctattgtaaatgctctcgtccgacagtgttctgtgcaaggcccgccgtgaggtgggggtgctggggaaaggagactgaggagaggagagtgcgtggaacttaaaactcttctgtgattcaggagttgggctttcaagatcaattagtttctttagatcttcttcaatggtggacttggaggttggcttaggagatgcccggaggtctctggttgaggcacgcagcctggtgtgggctatttcattgccatcgctctgatgacgctttctcgtgtccataaatcccacggagtttatggttccttcgggttttttccatccaatcaggtacttgctagtagcgccctggcgagggtaaaaactcctaggaccagaggaggaggaggaagaggaggagaaggatggtgcgagctgtgagggggcagctggatgaagctcttctttaggtgaactccgggcactggtgaaaaccactgggctggcagagtgtcgggagctcatggtacttgtgtgggaagcagcatcgtttatactgaaggtgctgttctcccttgtcagaggggtcgagccggcttggctcttgctgtgtatgtctaagctcagggaagactctgttttccggtccaggccgtggctctctgtctccaaagtccgatctgccatggagattacttcactggagctgtgccataggggtgccactttctccttgcctggccctgagcgaggtgacgatgtggcagcccccagcgaggctgtgctgccgtggctggggccataagaggtggtgtcaatgccactgtcagcagaggtgccttgcagatagttatagctgttgagttcggattctgtgcggtccccatcgtaccacttctcatcactatgggcacttgacgcattgctggagagagtattgctactggagtggctcgagtagtggctatcagaatgcccttgtttgtttggagacaaatgaaccactggatcctgccgcattaatctcccactggggctctctcggaaagctggcagtacctttgatactgctgggagatggcatgttggctctgtatattcatgctgctcgaggacaaaagaattgaaatcctgaggtcctctataactgtaagccatctggtcagcaatgctatcctcacttctttgccagctaggcgtggattttccgctgccaccaatatctgactgggtgttctgcctgtcagtggaggctggggatctacggctcactccaaacccttcgggcatggacttctgcctgtaagtgccccccacagaaccagtatcactggatgaagacaagttgctaggagagttccgacactgggatcttgctaaagccatggatgagaccgtcacatagatgtccgaaccaggagacagccgcctctctagtgggcgcccgtcactggagatgcttcgagggatgttggcggctctttctggaggaggcatcttcccatctccttttccagcattcagccgcgaggtcatgggactctgcacctgggacgggacttgaggtgaatgaggccccttgctggcgttcctctgccacttgttattatttcggaagggaaacttgaattcgtatgaaacaccttcattcattttgtactccatcactggcatgcggtaggtttcagagcaactcctccgcggggtgcagtcatcatgcgggggaatgatgacaaccttcaccgtgacagatgttctcaggaggtcgatcatctgctcatggctcagcagtggctaccgccaccttgcagatctccaccaggcgactgccctgcctcagccctgcctgccaggcataaccgtagggctccacatccgccacaatgccctcatagttgacatggaagccaagctgtcctagcccatttcttcgcagagtcatctccaccgattcacagccttttgaaacaaactgcaaccttttgacaatctctttgatctcctcaatgttaataaaactacccactgaaacacattctcctcgttcatagaagattttgaggctggtgtcagttgaagtccaccctatcacatctctacaggaacaattgaagaccacgctctttgtttcctgttcaatgagcacaatgaactcattggagatccctaaaaggcagtctagttccatggccttgttgtagtcttcagcccggactgcccatacaatggcccccatgctgctgagctcggctcctggatatggcttagacttttccttcttcttggaagccagagagatgaacggaaacttgccagaagggtcgataggggtgttggtgacattcttttctgccagatctttcaggtattcctggcgggtccgagttgccatggcccgaaacttctccgatttatgagcagcattttctgcattaatcactttcgccaaaaggaagtccctgaacacatttgacttagggaaagtgacccctttaggaatgggaggcccaaaggaaggcacatctctggacctggtaacagccacactataacagacactgtcagagcacggattgtgcaccctgacgatgacgaaaacgtgctggaagtgggatcggatgttttttgggctgaatggctgtgctccaggctcttggaaaacaattgttacgatatcatttccaatgtgccgcttcctcaggagctgttgtttgttgttgggtgtgtatggcagcatggtagaaacatggaacataatttcataatctttgtatgttgtgtacagagaatgggttccagtggagtcagttttggtatcaagctgtgctcgatacttctcaaatcctttgagccgaactcgctctcccaatagttgaaggaattcttcaaaggctgggccagctgactcattgttgtacatctcttcttcagtgctctgtccagctttgcagtacatgatgcctactttctgctggtagttcagcccttgttcatccagtttcatgagctgctctgtgaccttgggtgtgttgaaggccaaccgcaggcactggacattgagctcaggaaccacgtgctccagcacttctttgagaggcaggcctctggctgtcgagtgcttggctgtcgacggaatggcgtcctccaggaccgaacctctcagtgtcatgagctcactagttctaaaaattattcggtagttgtacggagatccattttctttcatttcatctggtttttcccttcgaatgctcacagccactggaccaagattctcatcagccccaaaatagttccagtgttccttctggtagaaaaattttctataatagtatgcacccagatctacgtgttccacgatgtatcttttcactctatctaggtgcaacaccaagttctccttgggcacttcaagtactgccactcctgcatttgtgcaatgggaactaagggtagactcaaaggaggcactttcacatccactaaaggagccagaatttgattttgaaaggctgattttcctctccccttctccacctatctcattccgaaaatatggacagctcattacaagctcattgcttttatcatctccctggtccatgctgaggcttcctttggaattcaggtcctctgtgctgcccattggggagctaaaactggctgaatgagacagaggtccagagaccaaggatgccacggcagctgcggaagctccagtggtggtgtttctcctcttaataacattgtgcctgttcataattgcctcattcaaatcaaataatatactctggacatcatagtgggcaaagcactttggacatgtccagggcctgacagagtcttctgatcggttatcttcaagatctgatgacttcccaagttcttcacctttggcattgcgcaatttacgaaaaatagatgagtctccagtttcagattttgaacgtcgcttgagtggtttttccctttccttaaaaagcctgaggttctctctctgtgagataggcccgtctattacatccaaagagaaaccagaacccttgccaccaccagtaatgagaaagtcactgagcttggttggagttggacctcgatcagatttgtcatctttgtagccctttaacaaatcaaaaaagctttctccagatgttccctgtttatcaattgaagatgtgctaccatattccctgtgcagtgatggtccagtcttgtatgtaggtgagatacattcatcaaagctatccacatcaagttcacttatggtgatatcactgttgcttcgctggcgtattctgcgaagagcttttctgggggagctggggtaggcttcaggcatgagaaatctggagtccatgttctccgacggtcttgtcttgtttttcagcgtgttctgtatgcttttcagcatggctgagtcattggaattgaggctaacagaacttccctgactcacaggactgcttttggaggacaggctatcaaggcaacttgaggtttctatttcctggcttgaacggctagattcttttatgttttcctttcttgggggccaatctgcaatccttgcccttacccccatttttgggactccgggggttgaggttatatggtgagaaccttcacttcgggggggtcctacaggagccataactgatgatcctaagctgccattttgggaccggaagcgccgcatgtagaaatcatcagtgtggactttgggggtgccgtctgtgccaacaacagaggccctgtcagtggcaagaggcctttctgtctgtgaccgtttcaagctggtcatgatgtaaaagcaagtagacttaaatccctgcagcaaggaccatcatatctgtgttttaaatgtgcacttcccttttggagaatggcttccagaaaatacaacagtggcatgagatcttaatctttttcatttaaaaggttaaatgatgctttatttgtaaagcactgaaaaattggaacttctaaacgttataatccacaacagtttctttgtttcactttaacagagggctttctttcagaaaaaactgaatggaacttgtactactgagattctgtggttgccataatcccatgctttctcgagaccaggatattgcagaatgaatccagcattcnccaccacctcttcccaagctatcgaaagtttagggtactcttaaaa

SEQ ID NO: 75297 - DNA, 4071 bp, Homo sapiens
atacgcgaagcctggacggagtgggtgggagaacgacacgaatggatagataatcatgtacctacaagcactctagtccaaaactcatgctgctcgtatgtagttaatggagacaacacaccttcatctccgtctcaggttgctgccagacccaaaaatacaccagctccaaaaccactcgcatctgagcctgccgatgacactgttaatggagaatcatcctcatttgcaccaactgataatgcgtctgtcacgggtactccagtagtgtctgaagaaaatgccttgtctccaaattgcactagtactactgttgaagatcctccagttcaagaaatactgacttcctcagaaaacaatgaatgtattccttctaccagtgcagaattggaatctgaagctagaagtatattagagcctgacacctctaattctagaagtagttctgcttttgaagcagccaaatcaagacagccagatgggtgtatggatcctgtacggcagcagtctgggaatgccaacacagaaaccttgccatcagggtgggaacaaagaaaagatcctcatggtagaacctattatgtggatcataatactcgaactaccacatgggagagaccacaacctttacctccaggttgggaaagaagagttgatgatcgtagaagagtttattatgtggatcataacaccagaacaacaacgtggcagcggcctaccatggaatctgtccgaaattttgaacagtggcaatctcagcggaaccaattgcagggagctatgcaacagtttaaccaacgatacctctattcggcttcaatgttagctgcagaaaatgacccttatggacctttgccaccaggctgggaaaaaagagtggattcaacagacagggtttactttgtgaatcataacacaaaaacaacccagtgggaagatccaagaactcaaggcttacagaatgaagaacccctgccagaaggctgggaaattagatatactcgtgaaggtgtaaggtactttgttgatcataacacaagaacaacaacattcaaagatcctcgcaatgggaagtcatctgtaactaaaggtggtccacaaattgcttatgaacgcgggtttaggtggaagcttgctcacttacggtatttgtgccagtctaatgcactacctagtcatgttaaagatcaatgtgtcccggcagacattgtttgaagattccttccaacagattatggcattaaaaccctatgacttgaggaggcgcttatatgtaatatttagaggagaagaaggacttgattatggtggcctagcgagagaatggtttttcttgctttcacatgaagttttgaacccaatgtattgcttatttgagtatgcgggcaagaacaactattgtctgcagataaatccagcatcaaccattaatccagaccatctttcatacttctgtttcattggtcgttttattgccatggcactatttcatggaaagtttatcgatactggtttctctttaccattctacaagcgtatgttaagtaaaaaacttactattaaggatttggaatctattgatactgaattttataactcccttatctggataagagataacaacattgaagaatgtggcttagaaatgtacttttctgttgacatggagattttgggaaaagttacttcacatgacctgaagttgggaggttccaatattctggtgactgaggagaacaaagatgaatatattggtttaatgacagaatggcgtttttctcgaggagtacaagaacagaccaaagctttccttgatggttttaatgaagttgttcctcttcagtggctacagtacttcgatgaaaaagaattagaggttatgttgtgtggcatgcaggaggttgacttggcagattggcagagaaatactgtttatcgacattatacaagaaacagcaagcaaatcatttggttttggcagtttgtgaaagagacagacaatgaagtaagaatgcgactattgcagttcgtcactggaacctgccgtttacctctaggaggatttgctgagctcatgggaagtaatgggcctcaaaagttttgcattgaaaaagttggcaaagacacttggttaccaagaagccatacatgttttaatcgcttggatctaccaccatataagagttatgaacaactaaaggaaaaacttctttttgcaatagaagagacagagggatttggacaagaatgaatgtggcttcttattttggaggagctcttgcatttaaataccccagccaagaaaaattgcacagatagtgtatataagctgttcattctgtacagtgaattttccgaacctctcaaagtatgttttccgttcttccacagaaatatgcaaaacagttcatccttttctactttatttattgttcccttgaaatgactgaccaggaaaaagatcatccttaaattttgaagcaagtgagagactttattaaaaatacatatatatctatataaacatatatgatagtggctctagttttatagagctccaagtgtattaaacatgacagccattcattcataaagatctggatttgctttaccttgttaatattatctaggggaaaaagtgcaaattgctccatgttcttctctcccttatgtaacatctcctgagggtgtttagttgcatggctgttcagaaaggtattaagggcttaggccaaatcttactttgagtatgttaaaaaaaaaaaaatgctgctgggcttttctgaaaacaggtgcttgaacttgtcagtttgttttaaataaatacaatagtggaaaatttttctctgttacatcagtaatattgttaaagtaatggatagaaccataacttacccatgaaagtcatatactaaatccaatactatttagtttattatcgaaattggaaggattcattgagcagcatagaagtttgtttacatgttactttgagatgctaggtatttgtggaattaaaaagaatcaagcttcttttgtactttgtttttaaatctgtgatgcttttcaaatttaattcataataaattgatgcaatttcatacttaggaacatacaaaaggtaatgtaaactctgccacttttttgtgttcaaaattttggtttttatggaagcccggatggattgaagagttacataagcatttgaatgctctaatataaggctaatgattttctgttagtgtttgaatatcttcattcctctcaaattcataacagttctatttaactgaattaaataaccatatgaaaaatcttttgggtctccccctttttacacgagataattatttttgtcataacactttttaattgtttttcatcataggggcctttgctgaactacaaaaatgtgtaacaaattaaaatctgatgtgaatgatattaatgctacttttagcaaactgggcttcctaatacaaaattttaaatttccatttgtatcatgcttttaatatgcactgtaaatttcattaacttaaacattttttaatagccatggaactgacttcttaaaatctgttgcctataaatatttcactgctaagtacatacagaaaaacagtaattattgttttgccaaaattttatttttctacatattgagagtgtgttctccattttattcagaattcatagtaaagacgaaagaaaggcagagatctgcttggttgaatagactccttttccaaatccttattatgaacactctggtaattttcaagcctaaagaattaaaaaaaaaattctaatgtatgtgacaggttatgtgatagagggaaactggccttcaaaaacggactgcgtataccataaaagagttaagtattagaattacaaatggtaccactgctgtataaattttgccatgacagaagttattgaatatcattcattgtaggtatgatttagcagatttgactgaagaagggcagctttccagttcgttttcagggtgctggtcttcctcaagtaagaaattacgatgcactaggtgaggctacacagaac

SEQ ID NO: 75298 - DNA, 8435 bp, Homo sapiens; identical to SEQ ID NO: 60727
  misc_feature (1)...(8435): n = a,t,c or g

SEQ ID NO: 75299 - DNA, 2830 bp, Homo sapiens; identical to SEQ ID NO: 60728

SEQ ID NO: 75300 - DNA, 895 bp, Homo sapiens; identical to SEQ ID NO: 60729

SEQ ID NO: 75301 - DNA, 4649 bp, Homo sapiens
gcgattaaattgggtaacccccgggtttttcccgtccccgcgttgttaaaccccggcccatgaattgttattcccccccctataaggggaattggggtcccggcccccccccgaggttttttttttttttttttttttcagactttcagcccctttaattaggtgctctgagaagaggtcagaatggcaggcagggggtggggaaggcggtgcttcttgagccccacttagcaactggtcactcatcctctggcagctggatcttgctggggtcgaagcagttggattccatgatgggaaggccattggcctctcggtatttcacaagcctctcagcttcgcggcgggaccactctttcatcctgtagtcaggcagataggccacaaaggtgctgccaaggaccaggatgatggagacgccaaagaagaagacaagtcgcatgttccagacgtccaaaacggggtccttgtcataaccatgggagtctgggttcttctcatacaagttttcgtcctcgggttctgggtcctcttgccacggtgtggtcggttctgggggccgctttcccgccacagcggacggggcgaccacagtcctggagaagctagattcccagcggacgcgggcggccgggagccctcgcgtcgccgctgccgccaaaagacggcgagcgctcaaaccaaacagcccagccgccatgacagatggtgctgcagggtctcaggggcggggaaagaaatgcgactgtgcgcagctgcagtgggtgcgagcgcgacaatcatcgccccgcctccgccacgctatataggtcccagatctgatttggttttccaatgaggcggggcgttgagcaaccctctttgcctccagttgtcgtggcttcgtggggccaaccattttcggccaggctgagaaatttcttattgatgggtctgctcatttcctgcataggaagaaatcggtgacatttgggtggatacagttcccagccaatcgccccgagttccctcgcccactggggaaagaggcagacgtccgctagtctttcatcttcaaaggaaatcaagcttctaaaaagcgggccctgccgaattggctaatagctactccttttctccactaggggagcgttcgcaaggggtgtggggaggtggccagcgcttgccaatcagaggaggccagggctgtcccctagcgggcggtgaccaatcgccggggccggccagagcgcgcttccttagtaggtggatggtggtcggagcgccgactcccttctcgtcgtcgccattttgagctggtgactgtggccggctgggagtaggcggcagtgagtttccctgggagggcagcgcgcttggcgcttctcccctccccccgatctgcctccagtctcggacttggttgttgcgcgctccggctccggctgagctgggagagttggaggaggtggcggcgggcagaggtgatgtctgggagcccttccttgacagcccgggccgagaagagtccctgcaggaagcatcacccaggctggcagatcatggtagcagcagcgggggtggctgggaagtgaaacggagccagcggctgaggaggggccccagcagcccccgaaggccctatcaggacatggagtatgaaagacgtggtggtcgtggtgacaggactggccgctatggagccactgaccgctcgcaggatgatggtggggagaaccgcagccgagaccacgactaccgggacatggactaccgttcatatcctcgcgagtatggcagccaggagggcaagcatgactatgacgactcatctgaggagcagagtgcggaggattcctacgaggcctccccgggctccgagactcagcgtaggcggcggcggcggcacaggcacagccccaccggcccgccagggcttcccccgagacggcgactatcgggaccaggactatcggaccgagcaaggggaggaggaggaggaggaggaggatgaggaggaggaggagaaggccagtaacatcgtcatgctgaggatgctgccacaggcagccactgaggatgacatccgtggccagctgcagtcgcacggcgtgcaagcacgggaggttcggctgatgcggaacaaatcttcaggtcagagccggggcttcgccttcgtcgagtttagtcacttgcaggacgctacacgatggatggaagccaatcagcactccctcaacatcctgggccagaaggtgtcgatgcactacagtgaccccaagcccaagatcaatgaggactggctgtgcaataagtgtggcgtccagaacttcaaacgccgagagaagtgcttcaaatgtggcgtgcccaagtcagaggcagagcagaagctgcccctcggcacgaggctggatcagcagacactgccactgggtggccgggagctgagccagggcctgcttcccctgccgcagccctaccaggcccagggagtcctggcctcccaagccctgtcacagggctcggagccaagctcagagaacgccaatgacaccatcattttgcgcaacctgaacccacacagcaccatggattccatcctgggggccctggcaccctacgcggtgctgtcctcctccaacgtgcgcgtcataaaggacaagcagacccaactgaaccgcggctttgccttcatccagctctccaccatcgaggcagcccagctgctgcagatcctgcaggccctgcacccaccactcactatcgacggcaagaccatcaatgttgagtttgccaagggttctaagagggacatggcctccaatgaaggcagtcgcatcagtgctgcctctgtggccagcactgccattgctgcggcccagtgggccatccttcacagggcctcccaaggtggggaagggtacctgggccacctccgaggagcctgccggtcgactacagctactaccaacaggatgagggctatggcaacagccagggcacagagtcttccctctatgcccatggctacctcaagggcaccaagggccctggcatcactggaaccaaaggggatcccactggagcaggtcccgaggcctccctagagcctggggccgactctgtgtcgatgcaggctttctctcgcgcccagcctggtgctgctcctggcatctaccaacaatcagccgaggcgagcagtagccagggcactgctgccaacagccagtcgtataccatcatgtcacccgctgtgctcaaatctgagctccagagccctacccatcctagttctgctctcccaccggctaccagccccactgcccaggaatcctacagccagtaccctgttcccgacgtctctacctaccagtacgatgagacctccggctactactatgacccccagaccggcctctactatgaccccaactcccagtattactacaatgctcagagccagcagtacctgtactggggatggggagaggcggacctatgttcccgccctggagcagtcggccgacggacataaggagacaggggcaccctcgaaggagggcaaagagaagaaggagaagcacaagaccaagacagctcaacagattgccaaggacatggaacgctgggcccgcagtctcaacaaacaaaaagaaaacttcaaaaatagcttccagcctatcagctccctgcgagatgacgagaggcgggagtcagccactgcagatgctggctatgccatcctcgagaagaagggagcactagccgagagacagcacaccagcatggatctcccgaaattggccagtgacgaccgcccaagccctccgcgaggactggtggcagcctacagcggggagagtgacagtgaggaggagcaggagcgtgggggccctgagcgggaggagaagctcaccgactggcagaagctggcctgtctgctctgccgacgccagttccccagcaaagaggcgctcatccggcaccagcagctctcagggctccacaagcaaaaccttgagattcaccggcgagcccacttgtcagaaaacgagctagaagcactagagaagaatgacatggagcaaatgaagtaccgggaccgtgcagctgaacgcagagaaaagtatggcatccccgagccgccagagcccaagaggaggaagtacggcggcatatccacagcctctgtagacttcgagcagcctactcgggacgggctgggcagtgacaacattggcagtcggatgctgcaggccatgggctggaaagagggcagcggcctgggccgcaagaagcagggcattgtaacgcctatcgaggcccaaacacgggtgcggggctccggcctgggtgcacggggcagctcctacggggtcacctcaaccgagtcctacaaggagacactgcacaagacaatggtgacccgcttcaacgaggcccagtgagcagcttcaagagcaacttctccacatgttgggtgtccatcctggggcagggaaggacagagtgttggatggctgggacggggccttgctcttgtcggccagcccactccccagccagagagggcttgaccaaatcaaattgaggtggtgacttttgttggaaaattgggctgggatcacgtcctgttttgtaataaaagctgaaaagtctgaaaaaaaaaa

SEQ ID NO: 75302 - DNA, 2830 bp, Homo sapiens
gtcttggtagcggaggcacccgaatgctgcccgggtgagtgtgatgagaagccattagagggttgagtgaagggaaaggatatccaacgagaacctcctgccctgtgtctcatgaagaggcagtatttcaagaagaggcttaaagctgagagtgttttgctaatcagtgaagatgtgactaatgagctgctggggaagtcaagccttctatgaggaagccaaggcccagcagagctgagatgtgactgcagagccgtccaaccccagtcctgtgacctttctctggtgcctgatacctctcagcatttgagggccttttctcttcctgcttcatctctaaaggtccttctaggagagaggtgaaagaaacctggcaaagaaaacggtctcgacaatgagtaggccacccatcactactaactacagatgacttgccatttcatttacaaagatgtcttctgctgctgaaaatggagaggcagcacctggaaaacaaaatgaagaaaaaacctataaaaagactgcatcatctgctattaaaggtgctattcagctgggaataggatacacagtggggtaatctcacttccaagccagaaccgagatgttcttatgcaagacttttatgtggtggaaagtgtgttcctacccagcgaagggagcaatctgaccccagcacatcactacccagactttagatttaagacatacgctccattagcattccgatatttcagagaactttttggtatcaagcctgatgattacttgtattccatctgcagtgaacctctaatagaactgtctaaccctggagccagtggatccttgttttttgtgaccagtgatgatgaatttatcatcaaaacagttcagcacaaagaagctgagtttcttcagaagctactgccaggctattacatgaatttaaaccagaatccaaggactcttttgccaaaattttacggactgtattgtatgcaatcaggaggcattaatatcaggattgtggtgatgaacaacgttttgccacgctccatgagaatgcactttacatatgacttgaaaggctcaacgtataagcgaagagcatcccgtaaagagagagagaaatccaaccccacatttaaggacttaggatttcctgcaagacatggcacggaagggttgtattttgatacggaaacatacaacgcgcttatgaaaacacttcagagagactgccgggtgctagaaagcttcaagatcatggattatagccttctgttgggaattcatttcctggaccattccctcaaagagaaagaggaggagaccccacaaaatgtgcctgatgctaagcggactgggatgcagaaggttctctactcaacagccatggaatctatccagggtccagggaaatctggagatgggataatcacagagaacccagacacaatgggaggcattccagctaaaagccataggggagaaaaactacttttatttatgggcattattgacattctgcaatcatataggttaatgaagaagttagaacattcctggaaagctcttgtttatgatggggacactgtttctgttcatagaccaagcttttatgcagacagatttcttaagttcatgaattccagagttttcaagaaaattcaagctttgaaggcttcaccgtctaagaaacggtgcaattcaatcgccgccctaaaggccacttcacaggagattgtgtcctcaattagccaggaatggaaggatgagaagcgggatttgctgactgaaggacaaagttttagcagccttgatgaagaagccctgggatcccgacacaggccagacctggtccctagcactccatcactgtttgaagctgcttccttggcaaccacaatttcatcttcttccttatacgtcaatgagcactatccacacgacagggcctatcactcttatttcaaacagcaaagggttaccttccagttcaacatttaccttggaagaggggaccatctacttgaccgctgagcccaacactctggaagtgcaggatgacaatgcttctgtgcttgacgtctatttataagtgaaaatggtgatcacctaagcacatggatgagacgtgagcacagttatggcagagaagtttctccgcaccagaattatccacagcaacttggctgagccccactacacacagagaaatcatcaacctgacttaagagttttcaagatgtcaacttcaggctgatcagcagatgggatgtgaaaaatactaccctattctatcatttgctgttgcttgctgaactgtgaagaactgcatgaactatatttaagctgctttctgtaccattgccaatcacctttttggagttggaagtgctattttcctatggacttttgcattatttcattgtgcatgcatccagtgattatacataagcaacatatgtaatctgcttatatatttttaaaaatccatccacacacattggtaaattaagtataaatccctttgccaaaattatagttcatatgtcattgaaagtttaaattggtttcatttaaagatcaatatacctaggtcctgcccttcactttatagaaaactagccttctataaagattttttcactgtttacctagtgaaatgagaaaagcaaagctatttataaaaggccttatgtcgtgtacatacattgtctttgaaatatttgtgatctagtttattgcttgtaaaagagaaattatataatttatttagtaaaattatagttcattactactgtaaactatagttttgtgagagaaataaaatattttgttctca

SEQ ID NO: 75303 - DNA, 2086 bp, Homo sapiens
ggggtttttttccaagccctttaatttggtttccccccgggttttcccctcccccccgtttttaaacccgggcccgggattttatttttggggccccattaaaaaaatttttcttttcccccccccggtttttaaatttggttcttttaaaagggccccccttttttttttttttgggggtcaaatgaagcacgttattttatttcacaaagactgtacaaaattccttataaaacatggggtagatgccacctggttacctcactcggcccccatccaactccgtatgagggggcaggtgagggtggaaactgtgtggatggaatagtattatgtacaaggcaggggttgaagtgataggtacaagttctttcatatttacactatttcacatattcacaggtatatagagagccaggaggaaggagtgaactctggctcgttctcttgtataaaaaagcaccagtgtcctggactggacacccactgctataaaagatgcaggggggcccagggcctgatcgtcaccgactgatatcccgactggagtcccacaacttgttgggcggctcagcccgaaggcgggcgaagaaaggatgctgaagggcttcacccaaggtcagccgcttagctggttcatactctagcatgctttcaatcagatcgaagagctggtggtgttcctctgcctctgaggtcagataccgccgcagcggtttgcagttctcacgaacatagcgcccagctgatgtgttctcatcccaatccaggcgaccccggtaaaaatatttctgctttcttgtctttcggatcatccgggaagggataggacccaagatcctttccatcatggctagatgctctctgttgtcatgggtctggaagagggtgaatcccacatagtattcaaagatgatgcagcctatactccacacatcacaaggctgtgaccagcccaactcaaggatgacttctggtgctcggtaatggcgagtggagacaatggtgctatggtgctcatggtcaaaggtggcactgccaaagtctaccacccgcacagctgtgctcttcacactgcgctcatctcgcttcttctctaggttgtaggtgagctcatagtctgaattcacaaacagaatattttcaggcttgaggtctgtatgtgtcagcttgttatcatggaggaacttgacagcctggcacagctggaaggccatgtggcgcacttggtggatggggtagggcaggtagttgttgtctttgaggaaatcgaaggtgctaaggcccagaagctcaaaggagatacacatgtggccatggtagtcaaaccagtcaaacatctggacacagaggttcttgttgtcagggtctttctcattgattttctctagcacgttgatctcaagtcgagctgcttccttgtacttctccacattcttaatgatcttcagggcaactcgagccccacccctgtaagttggcaggagaggctgcgatggtcaacacattgtacaactcggccgaaggtcccctctcctaaggtgctaacgatttcatcgaagatgagcggctaaatgtccggctgcgcctcctccgccgtctgtgcttcctccggctgctgcgctggctgcggtaactgctgttctcccgctgatattcataggaatgccgatagtctgtgtcatagtaggcatctccccgatcccggctataatcgttgccgtctgtagctgccacagtatcgccggtcatacaccctccggtcggacgaacgatcatcataactgcttcgagaacggacatggtagctgtcctctcgccgacgccgtcgtgtccggtcactactacttgaccaggagcgacttcttcgtcgcttatgctttcggctccgatagtgttcacggtaactcccccggctgcctcgctctgaggagtggtaccttcgaggatgcggcatcgttctggcggcgaggcccgtgcgcttgtcccacaggaagtccgtgatggcggcgacactgcggccggagtcccggcacccccgcggcgacgaaatgctgctccacccccccaacccgggaccctggga

SEQ ID NO: 75304 - DNA, 2381 bp, Homo sapiens; identical to SEQ ID NO: 60733

SEQ ID NO: 75305 - DNA, 2941 bp, Homo sapiens; identical to SEQ ID NO: 60734

SEQ ID NO: 75306 - DNA, 2206 bp, Homo sapiens; identical to SEQ ID NO: 60735
  misc_feature (1)...(2206): n = a,t,c or g

SEQ ID NO: 75307 - DNA, 3572 bp, Homo sapiens; identical to SEQ ID NO: 60736

SEQ ID NO: 75308 - DNA, 1556 bp, Homo sapiens; identical to SEQ ID NO: 60737

SEQ ID NO: 75309 - DNA, 2761 bp, Homo sapiens; identical to SEQ ID NO: 60738

SEQ ID NO: 75310 - DNA, 1806 bp, Homo sapiens; identical to SEQ ID NO: 60739

SEQ ID NO: 75311 - DNA, 3023 bp, Homo sapiens
gcgggtgaacgacgcttcgtgcggcccgtctggctgctacacataccaggtgagcagacacagcacggagatgctgcacaacctgaaccagcagcgcaaaaacggcgggcgcttctgcgacgtgctcttgcgggtaggcgacgagagcttcccagcgcaccgcgcagatgctggccgcctgcagcgagtactttgagtcggtgttcagcgcccagttgggcgacggcggagctgcggacgggggtccggctgatgtagggggcgcgacggcagcaccaggcggcggggccgggggcagccgggagctggagatgcacactatcagctccaaggtatttggggacattctggacttcgcctacacttcccgcatcgtggtgcgcttggagagctttcccgaactcatgacggccgccaagttcctgctgatgaggtcggttatcgagatctgccaggaagtcatcaaacagtccaacgtacagatcctggtaccccctgcccgcgccgatataatgctctttcgcccccctgggacctcggacttgggcttccctttggacatgaccaacggggcagccttggcagccaacagcaatggcatcgccggcagcatgcagccagaggaggaggcagctcgggcggctggtgcagccattgcaggccaagcctctttgcctgtgttacctggggtggaccgcttgcccatggtggctggacccctatccccccaactgctgacttccccattccccagtgtggcatccagtgcccctcccctgactggcaagcgaggccggggccgcccaaggaaggccaacctgctggactcaatgtttgggtccccagggggcctgagggaggcaggcatccttccatgcggtctatgtggtaaggtgttcactgatgccaaccggctccggcagcacgaggcccagcacggtgtcaccagcctccagctgggctacatcgaccttcctcctccgaggctgggtgagaatgggctacccatctctgaagaccccgacggcccccgaaagaggagccggaccaggaagcaggtggcttgtgagatctgcggcaagatcttccgtgatgtgtatcatcttaaccggcacaagctgtcccactctggggagaagccctactcctgccctgtgtgtgggttgcggttcaagagaaaaagaccgcatgttccttaccatgttgcggtcccatgatggggtccgtgggcaagccttacatctgccagagctgtggggaaaggcttctccaggcctgatcacttgaacggacatatcaagcaggtgcacacttctgagcggcctcacaagtgtcagacctgcaatgcttcttttgccacccgagaccgtctgcgctcccacctggcctgtcatgaagacaaggtgccctgccaggtgtgtgggaagtacttgcgggcagcatacatggcagaccacctgaagaagcacagcgaggggcccagcaacttctgcagtatctgtaaccgagaaggccagaaatgctcacatcaggatccgattgagagctctgactcctatggtgacctctcagatgccagcgacctgaagacgccagagaagcagagtgccaatggctctttctcctgcgacatggcagtccccaaaaacaaaatggagtctgatggggagaagaagtacccatgccctgaatgtgggagcttcttccgctctaagtcctacttgaacaaacacatccagaaggtgcatgtccgggctctcgggggccccctgggggacctgggccctgcccttggctcacctttctctcctcagcagaacatgtctctcctcgagtcctttgggtttcagattgttcagtcggcatttgcgtcatctttagtagatcctgaggttgaccagcagcccatggggcctgaagggaaatgaggcagctgctgtgtccccacggaaacaaccatctggggactgctgggaaatgctgtgaatgcggagggaagtgatgtttgggttctgtagctgagagatttttattcatttttaactgccccccaaccccactccaactccttctccaccacccattctcccaatggtctttagaaatagattttcatctgatattctgcagaaatatcaatgagacttggtatgggacaggggcagaaaacactacataggcctccaaggcaaaaaccagttcccagtttctttaaatggggaagaagctggaattcctggtgctcaattcttagtgaccccaatcctatacccaaatctatgatattctgggacctcagtgattttggtcccctcccacttctctagttcgtcatcctcccttcccatatccttcaaaagaaccacactagggtctccacctacttatacaatgcggatgcccaactgtttttaaggaagccagaagcatcccatggaccatggggtgagtgtcctccaagagccccctgagctcagccctctgcctggagggctccagacctttctgagccctgcttggaggcgagcattttcactgctaggacaagctcagctgttgaggacacccccaccccaaatttcagttcttacgtgattttaaccattcaacatgctgttgggttttaattctctaattattattattattggtattattttttaggaccagttgtagtgaattgctactgaaagctatcccaggtgatacagagctctttgtaaaccgcagtcacacattagggttagtattaaactttgtttagatgtaccataattaacttggctagttgattgtttgaagtctatggaagaaatagttttatgcaaaattttaaaaaatgccagtctggtcagggaagtagggggtttcaatgctgttgggaaccaggaaggtgggacagccggcaggtagggacattgtgtacctcagttgtgtcacatgtgagcaagcccaggttgaccttgtgatgtgaattgatctgatcagactgtattaaaaatgttagtacattaaaaaaaaaa

SEQ ID NO: 75312 - DNA, 1572 bp, Homo sapiens; identical to SEQ ID NO: 60740

SEQ ID NO: 75313 - DNA, 5006 bp, Homo sapiens
ttttggccccggtccggactctggcgggggagcccgcggcagtggttggggaagtcgaagccaagcgccgtatgggactttgggcgctgtgagcggcggcgagcaggtgctgctgcatgaggaggcgggtgattctggctttgtcagtctctctcggctgggcccatctctgagggacaaggacctggaaatggaggagctaatgctgcaggatgagacactgctggggaccatgcagagctacatggatgcctcccttatctccctcattgaggattttgggagccttggagaggttgaaatgtctcttccagatccctcttgggacttctccccaccctctttcttagagacctcttcccccaagcttcctagctggagacccccaagatcaagaccacgctggggccaatccccacctccccagcagcgcagtgatggagaagaagaggaggaggtggccagcttcagtggccagattcttgccggggagcttgacaactgtgtgagcagtatcccggacttccccatgcatttggcctgccctgaggaggaagataaagcaacagcagcagagatggcagtgccagcagctggtgatgagagcatctcctccctgagtgagctggtgcgggccatgcacccatactgcctgcccaacctcacccacctggcatcacttgaggatgagcttcaggagcagccagatgatttgacactgcctgagggctgcgtagtgctggagattgtggggcaggcagccacagctggcgatgacctggagatcccagttgtggtgcgacaggtctctcctggaccccggcctgtgctcctggatgactcgctagagactagttctgccttgcagctgcttatgcctacactggagtcagagacagaggctgctgtgcccaaggtaaccctctgctctgagaaagaggggttgtcattgaactcagaggagaagctggactcagcctgcttattgaagcccagggaggtcgtggagccggtggtgcccaaggagcctcagaacccacctgccaatgcagcaccaggttcccagagagctcgaaagggcaggaagaagaagagcaaggagcagccagcagcctgtgtggaaggctatgccaggaggctgaggtcatcttctcgcgggcagtctactgtaggtacagaagtgacctctcaggtagacaacttgcagaaacagcctcaggaagaacttcaaaaagagtctgggcctctccagggtaaggggaagccccgggcttgggctcgggcctgggcagctgccttggagaattctagccctaagaacttggagagaagtgctggacaaagtagtcctgctaaagaaggccctctagacctctacccaaagctggctgacactatccaaaccaatcctataccaacccatctctcattggtcgactctgcccaagccagccccatgccagttgactctgttgaagctgatcccactgcagttggccctgttctagctggccctgtacctgttgaccctgggttggttgaccttgcttcaaccagctcagaactggttgagcctctcccggctgagccagtgctgatcaacccagtcctggctgactcagcagcagttgaccctgcagtggttcccatctcagataacttgccaccagttgatgctgtcccgtctggcccagcgccagttgatctagcactggttgaccctgttcctaatgacctgactccagttgacccagtgctagttaagtccagaccaactgatcccagacgtggtgcagtgtcatcagccctggggggttcagcaccccagctcctcgtggagtcagagtccttggacccaccaaagaccatcatccctgaagtcaaagaggttgtggattctctgaaaattgaaagtggtaccagtgctacaacccatgaagccagacctcggcctctcagcttatctgagtaccggcgacgaaggcagcaacgccaagcagaaacagaagagagaagtccacagcccccaactgggaagtggcctagccttccagagactcccacagggctggcagacatcccttgtcttgtcatcccaccagccccagccaagaagacagctctgcagagaagccctgaaacaccccttgagatttgccttgtgcctgtaggtcccagccctgcttctcctagtcctgagccacctgtaagcaaacctgtggcctcatctcccactgagcaggtgccatcccaggagatgccactgttggcgagaccttcccctcctgtgcagtctgtgtcccctgctgtgcccacacctccctcgatgtctgctgccctgcctttccctgcaggtgggcttggcatgccccccagtctgcccccacctcccttgcagcctcctagtcttccattgtctatggggccagtactacctgatccgtttactcactatgcccccttgccatcctggccttgttatcctcatgtgtccccttctggctatccttgcctgccccccccaccaacggtgcccctagtgtctggtactcctggtgcctatgccgtgcctcccacttgcagtgtgccttgggcaccccctcctgccccagtctcaccttacagttccacatgtacctatgggcccttgggatggggcccagggcctcaacatgctccattctggtctactgttcccccacctcctttgcctccagcctccattgggagagctgttccccaacctaaaatggagtctaggggcactccagctggccctcctgaaaatgtacttcccttgtcgatggctcctcccctcagtcttgggctacctggccatggagctcctcagacagagcctaccaaggtggaggtcaagccagtgcctgcatctccccatccgaaacacaaggtgtctgccctggtgcaaagtccccagatgaaggctctagcatgtgtgtctgctgaaggtgtgactgttgaggagcctgcatcagagaggctaaagcctgagacccaagagaccaggcccagggagaagccccccttgcctgctaccaaggctgttcccacaccaaggcagagcactgtccccaagctgcctgctgtccacccagcccgtctaaggaagctgtccttcctgcctaccccacgtactcagggttctgaagatgtggtacaggctttcatcagtgagattggaattgaggcatcggacctgtccagtctgctggagcagtttgagaaatcagaagccaaaaaggagtgtcctcctccggctcctgctgacagcttggctgtaggaaactcaggcggcgttgacattccccaggagaagaggcccctagaccggttacaagccccagaactggccaacgtggcagggctcacccctccagctacccctccccaccagttatggaagcccctggctgctgtctcactgctggccaaagccaaatctcctaagtccaccgcccaggagggaaccctgaagcctgaaggagttacggaggccaaacatccagctgcagttcgcctccaagaaggggtccatggccctagtcgagtccatgtgggctctggggaccatgactattgtggtccggagcaggaccccccccaaaaaagatgcctgccctactcattccagaggtgggctcccgatggaatgtcaagcgccatcaggacatcaccatcaaacctgtcttgtccttgggcccagctgcccctccgcccccatgcatagctgcctcccgggagccgcttgatcacaggactagcagtgagcaggcagatccctcagcaccctgccttgccccatccagcttgctgtcccctgaggcctcaccctgccggaatgacatgaacactaggactccccctgaaccctcagccaagcagcggtcaatgcgctgttaccgaaaagcctgcaggtcagccagcccctcaagccagggctggcagggccgccgaggccgcaacagccgttctgtcagctctgggtccaaccggactagcgaagcatcttcctcatcctcatcatcgtcttcctcatcccgatctcggtccaggtccctctcccccccacacaagaggtggcgaaggtccagctgtagttcctctggacgttctcgaagatgctcttcctcttcttcgtcatcatcttcctcttcgtcttcctcatcctcatcatccagttctcgaagccgctcacgatccccatccccccgccggagaagtgacaggaggcggcggtacagctcttatcgttcacatgaccattaccaaaggcaaagagtgctacaaaaggagcgtgcaatagaagaaagaagggtggtcttcattggaaagatacctggccgcatgactcgatcagagctgaaacagaggttctccgtttttggagagattgaggagtgcaccatccacttccgtgtccaaggggacaactacggcttcgtcacttatcgctatgctgaggaggcatttgcagccattgagagtggccacaagctgcggcaggcagatgagcagccctttgatctctgctttgggggccgaaggcagttctgcaagaggagctattctgatcttgactccaaccgggaagactttgacccagcacctgtaaagagcaaatttgattctcttgactttgacacattgttgaaacaggcccagaagaacctcaggaggtaaccttgggcccttccctgctatcctttttctcctttggaggtgcccaacctcctccacccccttcccctactctaggggagagagctgctagtgagatgactgttttataaagaaatggaaaaaagtgaaataaaaaatatgttgaatcagatttttttaaaaggggtatttggtttttttataaacaggtattgaaacaagttaacttgcattcctatgtaagataggaggggctgaggggatccccagtgtttggaacataagtcactatgcagactaataaacatcaactagagagaactcca

SEQ ID NO: 75314 - DNA, 1169 bp, Homo sapiens
gtccagtgtggtggaattccgtcgtctctatggtggcggcggatttggagggaccctacgaaccaggagtcaggcgagccgatctggggctgcaggatgttccgctgggagcgctccattcccctgcgaggctcggccgccgccctgtgcaacaacctcagtgtgctgcagctgccggctcgcaacctcacgtattttggcgtggttcatggaccaagcgcccagcttctcagcgctgctcctgagggtgtgcccttggcccagcgccagctccacgctaaggagggtgctggagtgagtcccccacttatcactcaggtccactggtgtgtcctccccttccgagtgctgctggtactcacctcacatcgaggaatacagatgtacgagtccaatggctacaccatggtctactggcatgcactggactctggagatgcctccccagtacaggctgtgtttgcccggggaattgctgccagtggccacttcatctgtgtgggaacgtggtcaggccgggtgctggtgtttgacatcccagcaaagggtcccaacattgtactgagcgaggagctggctgggcaccagatgccaatcacagacattgccaccgagcctgcccagggacaggattgtgtggctgacatggtgacggcagatgactcaggcttgctgtgtgtctggcggtcagggccagaattcacattattgacccgcattccaggatttggagttccgtgcccctctgtgcagctgtggcaggggatcatagcagcaggctatgggaacggacaagtgcatctatatgaggccactacaggaaatctacatgtccagatcaatgcccatgcccgggccatctgcgccctggacctggcttctgaggtgggcaagctactctctgcaggtgaggacacctttgtgcatatctggaagctgagcagaaacccagagagtgggctacattgaggtggaacactgtcatgggtgagtgtgtcgccgacacccagctgtgtggtgctcgattttgtgatttcccaaggcaactccttttgctggtgactggctatgaccttgcggagatccggagattcaccagtgtgtgaaaagagcagccttcctttgtccctgtggtattcataaagtacccgctccccccaaaaaaaaaa

SEQ ID NO: 75315 - DNA, 1627 bp, Homo sapiens
  misc_feature (1)...(1627): n = a,t,c or g
atttgagacctttctgagaccatagtcagtgtggtggaattcggcattttgtcgtgggcaggggctcagctgtcggttccatagaggaccttccagataaggaggcccctccagcccctgactgccgagcttgatttccaggaagggttgtggaagtcaccgagtgccctccatgcacctgtgaagagtgcccagtggggccctccctggagtggagaggagtgactccccgtggccagcagccttgccttcctggggcacaccccgcatacagcttctccccgggctgggacagtggaagggctgccttgccatcacctccctgcgcacttgctttgcccaggtcctggggctctgctcctgccagctcctgggtggttcatgctcctgtgagggcactgaccagccaagcaggaggcctttgtggtggctgagtagaggcatgtggggtcactcatgcgccctcggggtccaggccccactagtcctcctccaagtcccattttggctggtnggacacccaggtgtgtggcctagaggctatcaggctgcagcttggggaagcaaacaagggagggtgatggttcctggccccacaccatcattctggtgtcagccctgagagggtgcctgtcacagcaggttccaggactgctgcctcctgaggatggagaaactgtggcaccctgggggccactaagggaggccagctgattgcagccacgtgtaccttcctcttctcgtctctgtgttttgtagatgaccgcacctcgagcaggagtggggatgccacgtctgcccccagcgcccggccctctgtccaccacggtcattcccggagccgccccgaccctgtccgtgcccacaccagatggcgccctcggaaccgcccggagaaaccaggtgtggtttggcctccgagtcccccccaccgcctgctgtgggcacagcactcagccgcgagggggacagcgggtgggcagcaagactgcttcctttgcggcttcagaccctgttcgctcctaggttcctgtggtccacgcgccgtctccacacccacttcctatacttgagttgatggttagaaccttgtcgtcaccctgcagaagtacagtgccttgaatgccagcttttccgttccctgatgaaaagatatgttaaaaaaaattatcggaaaaggtttcatttgcaattggcttgtgcattgataatctttatttactgttttaagttgcagagatgtgaatggtttacaaatctgaagctgaagttcaatctttggttttctgttgtaaatgccttttacaaacattgaattagctaccttaagtattgaagagcttccattgctaggtgagccctgctttgtcctcagtagagtgccggttccctgggctcatccaggggctgagagacggcgggacgctggggcagggcacactggcggagctgcttgctcagtagggaatgtcagttgttgcgctgggccatgagaaatccgccagaaaacgttaggtgagcagacatgccccccatgccagtgggctgctgtgagtgaggataaagtgtgtgttgggcatagaaaccctggctgcccgcccaccctgtggagacaagtgcagctcct

SEQ ID NO: 75316 - DNA, 859 bp, Homo sapiens
gtcgactgacgtctgacagagcgtccacccgtcttcgacaggactctatggttcttacgcgcgcagacagaccgcctatataagccatgcgcaggcggaggagcgcctctttcccttcggtgtgccactgaagatcctggtgtcgccatgggccgccgccccgcccgttgttaccggtattgtaagaacaagccgtacccaaagtctcgcttctgccgaggtgtccctgatgccaagattcgcatttttgacctggggcggaaaaaggcaaaagtggatgagtttccgctttgtggccacatggtgtcagatgaatatgagcagctgtcctctgaagccctggaggctgcccgaatttgtgccaataagtacatggtaaaaagttgtggcaaagatggcttccatatccgggtgcggctccaccccttccacgtcatccgcatcaacaagatgttgtcctgtgctggggctgacaggctccaaacaggcatgcgaggtgcctttggaaagccccagggcactgtggccagggttcacattggccaagttatcatgtccatccgcaccaagctgcagaacaaggagcatgtgattgaggccctgcgcagggccaagttcaagtttcctgggccgcccagaagatccacatcttcaaagaagtggggcttcaccaagttcaatgctgatgaatttgaagacatggtggctgaaaagcggctcatcccagatggctgtggggtcaagtacatccccaatcgtggccctctggacaagtggcgggccctgcactcatgagggcttccaatgtgctgcccaccctcttaatactcaccaataaattctacttcctgtccaccta

SEQ ID NO: 75317 - DNA, 4075 bp, Homo sapiens; identical to SEQ ID NO: 60743

SEQ ID NO: 75318 - DNA, 1199 bp, Homo sapiens
ttttttttttttccttgattcaaaaatacaatttattttaaaaacaaaaagagggaatggatgcagaagcccgtctgggctttccgtggagtcgccccttcccaatggcgatggccgctccctgtggcctcagcttcctccgtggaatgaaggggtccaggtgacaccttcctcgaagggtgggcgtgggcctgaggctcccaagtcggccaggggctcggcctggctcagaagaggtgcttcacatcaacagtggtacggggtggccgctgggccctgggtagcgtggggtaggggtcgggggaagtcgctgtagggcaggctgaaggggtagaggggtctgtaacgtgagtcctgccagagcagcttgtcctccaggaaggcgacggtgggcagcgtcaggaccagcgtctggtgcttgagcatgctgtgcacatttaggccaacagccgggatcaagttgaaggtcttaagcctagaggtggcctccacgatgctctgtggcatctcctcgtgtgttaagtccacgaggagtacggagtccccccagcggcggtagtgcgccagctctgtcaggtactgtgggtctccggtgggcagctctagggagtccatgatgtgcaggtcgtcctgggccagcttgacggtcagtgccactttgagacccagcgcccgcaccttcatgggcagcatgtagtagtaacttgtggggccccgggggccatgggcaacacctcctcctcgccagagcggagagcggatgctgccatgccgggcccgcccagtgcctttctgcggccaaggcttccggccaccgccccgcacctcggctctcgtcttggtcttggcatagctaattctcttgaagttcttctgccacatagcaacctggtgcagtatgtccagcctgggcgcggtggcgaaaacatcggggtgcaggtcggccaggcccacgcgctcctgctcgaagccccgcaaggactcgacccaggcctgcactgggcgtcgatgagtgggtaccgggagctcgactttgcgcagcacgggctccgggagaccctcgctcgccacctgctccgggttctcggtcgcacgcgctgcctcttccgccagggaactcaggccctggctgccggtaggccgaagccaggcccgcgccccggcccggacgaactgcagcatcgccgcggacgcgtggg

SEQ ID NO: 75319 - DNA, 676 bp, Homo sapiens; identical to SEQ ID NO: 60745

SEQ ID NO: 75320 - DNA, 1826 bp, Homo sapiens; identical to SEQ ID NO: 60746
  misc_feature (1)...(1826): n = a,t,c or g

SEQ ID NO: 75321 - DNA, 3354 bp, Homo sapiens
atacccggatcgacccacacgtccgggcgggagtggcgtggcgcagggatggcacaaaagaaatatcttcaagcaaaattgacccagtttttaagggaagacaggattcaactttggaaacctccatatacagatgaaaataaaaaagttggtttggcattaaaggaccttgctaagcagtactctgacagactagaatgctgtgaaaatgaagtagaaaaggtaatagaagaaatacgttgcaaggcaattgagcgtggaacaggaaatgacaattatagaacaacgggaattgctacaatcgaggtgtttttaccaccaagactaaaaaaagataggaaaaacttgttggagacccgattgcacatcactggcagagaactgaggtccaaaatagctgaaacctttggacttcaagaaaattatatcaaaattgtcataaataagaagcaactacaactagggaaaacccttgaagaacaaggcgtggctcacaatgtgaaagcgatggtgcttgaactaaaacaatctgaagaggacgcgaggaaaaacttccagttagaggaagaggagcaaaatgaggccaaactcaaagaaaaacaaattcagaggaccaagagaggactagaaatactggcaaagagagcagcagagacagtggtggatccagaaatgacaccgtacttagacatagctaaccagacaggcagatcaatcagaattcccccatcagaaagaaaagcccttatgttagctatgggatatcatgagaagggcagagctttcctgaaaagaaaagaatatggaatagccttgccatgtctgttggacgctgacaaatatttctgtgagtgttgcagagagctgctggacacagtggataactatgccgtcctccagctggatatagtgtggtgttacttccgcctggaacagctggaatgccttgatgatgcagaaaaaaaattaaacttggcccagaaatgctttaaaaattgttacggagaaaatcatcagagactggtccacataaaaggaaattgtgggaaagagaaggtactgtttctaagactctacttacttcaagggatccgaaactatcacagtggaaatgatgtagaggcttatgagtatcttaacaaggcacgtcagctctttaaagagctatatattgatccatcaaaagtggacaatttgttgcagttggggtttactgcccaggaagcccggcttggcctgagggcgtgtgatgggaacgtggatcatgcggccactcatattaccaaccgcagagaggaactggcccaaataaggaaggaggaaaaagagaagaaaagacgccgcctcgagaacatcaggtttctgaaagggatgggctactccacgcacgcggcccagcagattctgctcagcaatcctcagatgtggtggttaaatgattccaatcctgaaaccgacaaccgtcaagaaagtccttcccaggaaaacattgaccgattggtgtacatgggttttgatgcactcgtggccgaagctgcgctgagagtgttcagaggcaacgtccagctggccgcccagacccttgctcacaacggaggaagcctgcctcccgagctgccgctgtcgccagaagactctttgtccccgccagccacgtccccttctgactccgcaggaacctctagtgcctcaacagacgaagacatggagacagaggccgtcaatgagatactggaagacattccagagcatgaggaagactatcttgactcaactctggaagatgaagaaattattattgcagagtacctatcctatgtagaaaataggaagtcagcgacaaagaaaaactaaataatgaacagaaatagcgctaattttctgcttataaatgctatcattatgaaaaggctaatgcagctctttctgttcttactttttatctgaattacaagtcctctttgggtgtaggagggggtgggcaggggacaagtccaggaggggtcccagggccttcatgcgtggtctcggggaagaagcttcctctggcctggcgcaggccgttccatctgcctcccaggtctgcgtccctaaccccttccccagcttggtgttttaccccgaaacaggaaggaacaggggtcctgtaaaacaggggtcctggggaaggtgtccagggcagggtcctgggaagggtgtcccgaccgcttcctctccagctgtggctccatctgcccagcttgcctgcctcctgcacccactgccctgaccttcctgcttcccacgctgccatctctgccagggtgccacatgggttcctgtgccaccctttccccgcccctcaaatcgtcctttaagtcttccttccaagtgctgtggggcataacgatgaggcgctggccttgggggccacaccaggtcgcagcaaatggcttcagcctgggacgccagtgttttatgctcttagttcagtaaaatacgcccccgaaattcaagattgagtgtcaggctttatatatattcagcattcctcattacagaaatcttctattgaatgggaaaggtttaaatgctaaccaaagcaatttatttttaattaatatttttagactctgtgctgtcatactgaactcactgctagctaagagacctatcagagatttagatatattttctccaggttttttgtgggttttctttgttgttgttgttgttctagccatgtgacagaggctctttctaaaagtatgtagttcgctgtgtgtcggctccagcagtaaccgtcctcactgcgccacgcactcctctgtagatgtgtgcccagtgggagttccttccagccccaggaccgcagcagcagccaggtgccgagtggattgagtgccaggtgcatccaagactttccctcccttccagaaggcactgactgaagacaggatggatcatgcggagccggctgaaatgctccaactttttcaaagtgtgggtggtccagtttggactgatgggaatcttcttgtcattctttttaaacggatgataccgatggaaataaaaggtgggaaatatattcaaaaaaaaaaaaaaggggggcccttttaaaagaacccttggggggcccaaatttacccggggttggcaaggtaaaatttttttccttatggggggcctttttaaaccctccttgggatttttggaaaggaaccttttttttgggggggggacttattggcccaccccccctccaaaatttaaagcctttagggaaaaaaaaaatttttaaggggaaaagggggaaaaccaaccccaattccctggctgttaaaaatttttctttccggagtagaattaaga

SEQ ID NO: 75322 - DNA, 933 bp, Homo sapiens; identical to SEQ ID NO: 60748

SEQ ID NO: 75323 - DNA, 1083 bp, Homo sapiens
ggcgggaccggacttccggctggtctgtggggtttcgggttcggggtttcctggtgggcgtcaggggcaggcaacagagtggcggccgctacggccctggaacggggccatggagaagctgcggcgagtcctgagcggccaggacgacgaggagcagggcctgactgcgcaggattcacagattaatctcttgaggtcctggatgcctcatcccttagtttcaacaccagattgaaatggtttgccatctgcttcgtatgtggcgttttcttttctattcttggaactggattgctgtggcttccgggcggcataaagctttttgcagtgttttataccctcggcaatcttgctgcgttagccagtacatgctttttaatgggacctgtgaagcaactgaagaaaatgtttgaagcaacaagattgcttgcaacaattgttatgcttttgtgtttcatatttaccctgtgtgctgctctttggtggcataagaagggactggctgtgttattctgcatattgcagttcttgtcaatgacctggtatagcctgtcatacatcccatatgcaagggatgcagttattaaatgctgttcttctctcctaagttgaaaatcagaaacttgtggaaaagagcacttgaatgttggtactctatgtttggtgaagtttgcttttccccataaaacactccaggaacaactgacgtgacagttgaagaccgttttgtactaagtctcattttgtatactggtaaaaactacatgcttgattaaaccattaaatgcttgtaactttaaattcattatgtgtcattaatatacttttccaaagataagatttttaatcactgccagttgtaaattatttttagccaatttttaaatcttttcaaagcagctttgaaatgtgaatatttaaaggtagacctgtgctgcaagataattaaacttttttgcttttaaaaaaagtctgcatttttaagattttttttactttaaatgtgaaacttattttaagctaaaaattgcttattatatgtaataaaaataatatataaatctttacaattttgaaataaac

SEQ ID NO: 75324 - DNA, 1981 bp, Homo sapiens; identical to SEQ ID NO: 60750
  misc_feature (1)...(1981): n = a,t,c or g

SEQ ID NO: 75325 - DNA, 1390 bp, Homo sapiens
acttcccaggggctatataacccttcagctttcagcttccctgaacaccacccagtgtggagcagcccagccaagcactgtcaggaatcctgtgaagcagctccagctatgtgtgaagaagaggacagcactgccttggtgtgtgacaatggctctgggctctgtaaggccggctttgctggggacgatgctcccagggctgttttcccatccattgtgggacgtcccagacatcagggggtgatggtgggaatgggacaaaaagacagctacgtgggtgacgaagcacagagcaaaagaggaatcctgaccctgaagtacccgatagaacatggcatcatcaccaactgggacgacatggaaaagatctggcaccactctttctacaatgagcttcgtgttgcccctgaagagcatcccaccctgctcacggaggcacccctgaaccccaaggccaaccgggagaaaatgactcaaattatgtttgagactttcaatgtcccagccatgtatgtggctatccaggcggtgctgtctctctatgcctctggacgcacaagctggcatcgtgctgtactctggatatggtgtcacccacaatgtccccatctatgagggctatgctttgccccatgccatcatgcgtctggatctggctggccgagatctcactgactacctcatgaagatcctgactgagcgtggctattccttcgttactactgctgagcgtgagattgtccgggacatcaaggagaaactgtgttatgtagctctggactttgaaaatgagatggccactgccgcatggtcatcctcccttgagaagagttacgagttgcctgatgggcaagtgatcaccatcggaaatgaacgtttccgctgcccagagaccctgttccagccatccttcatcgggatggagtctgctggcatccatgaaaccacctacaacagcatcatgaagtgtgatattgacatcaggaaggacctctatgctaacaatgtcctatcagggggcaccactatgtaccctggcattgccgaccgaatgcagaaggagatcacggccctagcacccagcaccatgaagatcaagatcattgcccctccggagcgcaaatactctgtctggatcggtggctccatcctggcctctctgtccaccttccagcagatgtggatcagcaaacaggaatacgatgaagccgggccttccattgtccaccgcaaatgcttctaaaacactttcctgctcctctctgtctcatgcacacaactgtgaatgtcctgtggaattatgccttcagttcttttccaaatcattcctagccaaagctctgactcgttacctatgtgttttttaataaatctgaaataggctactggt

SEQ ID NO: 75326 - DNA, 2018 bp, Homo sapiens; identical to SEQ ID NO: 60751

SEQ ID NO: 75327 - DNA, 1583 bp, Homo sapiens; identical to SEQ ID NO: 60752

SEQ ID NO: 75328 - DNA, 1788 bp, Homo sapiens
ttttttttttttcaggaacataccacgtttatttcttgttgtcaagccagaaatgaaccaaaagaagcacatctcaggtgaaggaacaactccttattgcagtcatagcccagctctcctgggatccggggaacgccctctctcctctccctcactccctcctgtttaacttgggactgaactggaactcaactcttcccccaaacattttaaatccaaaaagaccagcagggggcgccctttcctcagggtctggccctgcaggcagggcaggtgagggcctgaatacccacacccagctctggcaggccccctgccttcaacttggcacttgttccagtgcccggggacccctcgtgcatggagcatctgtgcctctattttgaaacggcaccgtccaacccaaaaaacaacacaggatctcgctaacctgcgggcaggactaacccagactcagccctctgcaggctgatgctgaattccttagtgctttgctctccccagatgcatcctctcttggcaatgggtaggaggcagctggggcagcagctgctgctcgagaaaggatctgagtgtggccttgacattctcaatggcggaatcgctgcagcacatactggcgggcagctggggagggctcaggggatgagaagtacgggtgggccagggcagtcttggctgtgatccgctggctggggtcatactgcaggagttgcatgagcaggtccctgccctctggctccagattgggcacaatctcttccagtcccttcctggtccacttagggaagctgcccttatagtcaggcagctgggtgaccccgggccatgtgtcttcgctgggtgtccccagcatacgaaagatacgaaagagcttggtcaatctcaagagtcaccaggaaacagggcttttcgagtcaccatctctgcaaagatgcaaccaatgctccagatatccacagctgtggtatagaacctggttgccaagagaatctcgggggcgcgataccacagtgtcaccacctcatgggtgtaggtgcgcaggggcaccccgaaggcgcgagccaggccgaagtcagccagcttgatggcacccaactcattgatgagcaggttctggggcttcaggtctcggtggatgacccgatgtgagtggcagaaactcaccccctgcagcagctggaagaggtagctcttgatgaggtgcagggggagctctgagcctggggtggagtccatgtacttcttcaggtcctggctgaggaactcaaacaccagatagagcttcctctcgttgtgcaccacgtccagcagtctgacgatgttggggtgcttcagttccttgagcagcgagatctccctgatggcagtgcttgggaccccctccatctccaaatccagtctgatcttcttcagggccaccagctgccctgtctccctgttcttggccttgtacaccaccccataggtgccctctccgatcttctctaccttctggaacatatccatggccacagagctgcctgggaaacagaaggcactgggcaatttgcaccccacgcccagcgctcccgttgctcctccagcttccatgtggcgccctgcccagcccagcccagcccagactgcccagctcccaaggccctcggcctagccaccccaaccccagctcatcctgcctgggaacctggctgggggtcggccaccccccctcacccagcccagcccccccttcaagggggtcagggggcccccttaacaccagaccagttcagccaggacccccag

SEQ ID NO: 75329 - DNA, 2176 bp, Homo sapiens; identical to SEQ ID NO: 60753

SEQ ID NO: 75330 - DNA, 6321 bp, Homo sapiens; identical to SEQ ID NO: 60754

SEQ ID NO: 75331 - DNA, 3387 bp, Homo sapiens; identical to SEQ ID NO: 60755

SEQ ID NO: 75332 - DNA, 4005 bp, Homo sapiens
gcggccgcccgggcccgggcccgcgtcgggcgcctggctctgtacgcgagcccggggatctgcggccttcgtgccccccctcccccgcccgccctctcgtggagcccggcgccggcggcggctgcccgggcggggggttgcggcgctcaggagaggccccggctccgccccgggcctgcccagggggagagcggagcggtccgcagccgggtcgggtcggggcccctcccgggaggagcgtggagcggcggcggcggcggcggcagcagaaatgatggaagaattgcatagcctgggaccccacgacgccaggaattattggaggccaggttttactggattaggtgttagtaagggaccacttaatagtgagtcttccaaccagagcttgtgcagcgtcggatccttgagtgataaagaagtagagactcccgagaaaaagcagaatgaccagcgaaatcggaaaagaaaagctgaaccatatgaaactagccaagggaaaggcactcctaggggacataaaattagtgattactttgagcgacgagtagaacagcccctctatggtttagatggcagtgctgcaaaggaggcaacggaggagcagtctgctctgccaaccctcatgtcagtgatgctagcaaaacctcggcttgacacagagcagctggcgcaaaggggagctggcctctgcttcacttttgtttcagctcagcaaaacagtccctcatctacgggatctggcaacacagagcattcctgcagctcccaaaaacagatctccatccagcacagacagacctcagtccgacctcacaatagaaaaaatatctgcactagaaaacagtaagaattctgacttagagaagaaggagggaagaatagatgatttattaagagccaactgtgatttgagacggcagatttgatgaacagcaaaagatgctagagaaatacaaaggaacggttaaatagatgttttgacaatgagccaagaaacttccttatagaaaagtcaaaacaagagaagatggcgtgtagagataagagcatgcaagaccgcttgagactgggccactttactactgtccgacacggagcctcatttactgaacagtggacagatggttatgcttttcagaatcttatcaagcaacaggaaaggataaattcacagagggaagagatagaaagacaacggaaaatgttagcaaagcggaaacctcctgccatgggtcaggcccctcctgcaaccaatgagcagaaacagcggaaaagcaagaccaatggagctgaaaatgaaacgttaacgttagcagaataccatgaacaagaagaaatcttcaaactcagattaggtcatcttaaaaaggaggaagcagagatccaggcagagctggagagactagaaagggttagaaatctacatatcagggaactaaaaaggatacataatgaagataattcacaatttaaagatcatccaacgctaaatgacagatatttgttgttacatcttttgggtagaggaggtttcagtgaagtttacaaggcatttgatctaacagagcaaagatacgtagctgtgaaaattcaccagttaaataaaaactggagagatgagaaaaaggagaattaccacaagcatgcatgtagggaataccggattcataaagagctggatcatcccagaatagttaagctgtatgattacttttcactggatactgactcgttttgtacagtattagaatactgtgagggaaatgatctggacttctacctgaaacagcacaaattaatgtcggagaaagaggcccggtccattatcatgcagattgtgaatgctttaaagtacttaaatgaaataaaacctcccatcatacactatgacctcaaaccaggtaatattcttttagtaaatggtacagcgtgtggagagataaaaattacagattttggtctttcgaagatcatggatgatgatagctacaattcagtggatggcatggagctaacatcacaaggtgctggtacttattggtatttaccaccggagtgttttgtggttgggaaagaaccaccaaagatctcaaataaagttgatgtgtggtcggtgggtgtgatcttctatcagtgtctttatggaaggaagccttttggccataaccagtctcagcaagacatcctacaagagaatacgattcttaaagctactgaagtgcagttcccgccaaagccagtagtaacacctgaagcaaaggcgtttattcgacgatgcttggcctaccgaaaggaggaccgcattgatgtccagcagctggcctgtgatccctacttgttgcctcacatccgaaagtcagtctctacaagtagccctgctggagctgctattgcatcaacctctggggcgtccaataacagttcttctaattgagactgactccaaggccacaaactgttcaacacacacaaagtggacaaatggcgttcagcagcgggtttggaacatagcgaatccgaatggatctgatgaaacctgtaccaggtgcttttattttcttgcttttttcccatccatagagcatgacagcatcgattctcattgaggagaaaccttgggcagctccggccaggccttgtaggaaaaggccccgcccgaggttccagcgtcaacggccactgtgtgtggctgctctgagtgaggaaaaaattaaaaagaaaaactggttccatgtactgtgaacttgaaaacttgcagactcaggggggtccctgatgcagtgcttcagatgaagaatgtggacttgaaaatacagactgggctagtccagtgtctatatttaaacttgttcttttcttttaataaagtttaggtaacatctcctgaaaagcttgtagcacaaaggctcagctggggatggtgtttgacttcggaggaaaaaagttgctattgcccgttaaaggcactagagttagtgttttatccctaaataatttcaatttttaaaaacatgcagcttccctctccccttttttatttttgaaagaatacatttggtcataaagtgaaacccgtattagcaagtacgtggcaatgttcattccaatcagatgcagctttctcctccgtctggtctcctgtttgcaattgcttccctcatctcagtagggaaaaaaattgagtgggagtactgagatgtgtgggtttttgccattggacaaagaatgaggttagaagactgcagcttggagtctctctaggttttcaactatttcttcacaatttgaacacttgacggttgtcccttttaatttatttgaagtgctatttttttaaataaaggttcatctgtccatgcagtcctcttggattctctgaatgtagtaactatgaagctatgccaaaggtaggcagaaaatgggcttgggagccagacactccagggatcagtagttcctacccatagtctttgtgtgcttgctaaatggtgtacatttcttgttaaccacgttattaaaacttgatcagcacataagctttcttctgttagatcttttggcagcaaacaaccttccccccaaacctctgaattttgtgggtgtgtggtggtgtgtgtctgtgtgtgcatgtacacacacactttgtctagctcactttaaaagattcatcaaatggaattttaaaaataatctgaaaagaaatagatatttcaggccgggcctggtggttcatgcctgtaatcccagcactttgggaggccgaggtgggtggatcacgaggtcgggagttcgagatcagtctggtcaacatggtgaaacgccatctctactaaaaatataaaaattagcctggcgtggtggcgtgtgcctctagtcccagctacccgggaggctgaggcaggagaatttctggaacccaggaggcggaggttgcagtgagccgagatggcaccactgcaatccagcctaggcaacagaatgagactctgtctcagaaaaaaa

SEQ ID NO: 75333 - DNA, 1612 bp, Homo sapiens; identical to SEQ ID NO: 60757
  misc_feature (1)...(1612): n = a,t,c or g

SEQ ID NO: 75334 - DNA, 3176 bp, Homo sapiens; identical to SEQ ID NO: 60758

SEQ ID NO: 75335 - DNA, 4450 bp, Homo sapiens
gcgcactctcgcaaaaacacacgaccgcggaacacctgttattcagcttccttctcacagtcctgtggaagagcgaaagcccaacctctttgtcttctctgcgttcacggagcacacaaatggaatcaactcgtgtttcagcttctctccccagaagttaccggaaaactgatacagtcaggttaacatctgtggtcacaccaagaccctttggctctcagacaaggggaatctcatcactccccagatcttacacgatggatgatgcttggaagtataatggagatattgaagacattaagagaactccaaacaatgtggtcagcacccctgcaccaagcccggacgcaagccaactggcttcaagcttatctagccagaaagaggtagcagcaacagaagaagatgtgacaaggctgccctctcctacatcccccttctcatctctttcccaagaccaggctgccacttctaaagccacattgtcttccacatctggtcttgatttaatgtctgaatctggagaaggggaaatctccccacaaagagaagtctcaagatcccaggatcagttcagtgatatgagaatcagcataaaccagacgcctgggaagagtcttgactttgggtttacaataaaatgggatattcctgggatcttcgtagcatcagttgaagcaggtagcccagcagaattttctcagctacaagtagatgatgaaattattgctattaacaacaccaagttttcatataacgattcaaaagagtgggaggaagccatggctaaggctcaagaaactggacacctagtgatggatgtgaggcgctatggaaaggctggttcacctgaaacaaagtggattgatgcaacttctggaatttacaactcagaaaaatcttcaaatctatctgtaacaactgatttctccgaaagccttcagagttctaatattgaatccaaagaaatcaatggaattcatgatgaaagcaatgcttttgaatcaaaagcatctgaatccatttctttgaaaaacttaaaaaggcgatcacaattttttgaacaaggaagctctgattcggtggttcctgatcttccagttccaaccatcagtgccccgagtcgctgggtgtgggatcaagaggaggagcggaagcggcaggagaggtggcagaaggagcaggaccgcctactgcaggaaaaatatcaacgtgagcaggagaaactgagggaagagtggcaaagggccaaacaggaggcagagagagagaattccaagtacttggatgaggaactgatggtcctaagctcaaacagcatgtctctgaccacacgggagccctctcttgccacctgggaagctacctggagtgaagggtccaagtcttcagacagagaaggaacccgagcaggagaagaggagaggagacagccacaagaggaagttgttcatgaggaccaaggaaagaagccgcaggatcagcttgttattgagagagagaggaaatgggagcaacagcttcaggaagagcaagagcaaaagcgggcttcaggctgaggctgaggagcagaagcgtcctgcggaggagcaaaagcgccaggcagagatagagcgggaaacatcagtcagaatataccagtacaggaggcctgttgattcctatgatataccaaagacagaagaagcatcttcaggttttcttcctggtgacaggaataaatccagatctactactgaactggatgattactccacaaataaaaatggaaacaataaatatttagaccaaattgggaacacgacctcttcacagaggagatccaagaaagaacaagtaccatcaggagcagaattggagaggcaacaaatccttcaggaaatgaggaagagaacaccccttcacaatgacaacagctggatccgacagcgcagtgccagtgtcaacaaagagcctgttagtcttcctgggatcatgagaagaggcgaatctttagataacctggactccccccgatccaattcttggagacagcctccttggctcaatcagcccacaggattctatgcttcttcctctgtgcaagactttagtcgcccaccacctcagctggtgtccacatcaaaccgtgcctacatgcggaacccctcctccagcgtgcccccaccttcagctggctccgtgaagacctccaccacaggtgtggccaccacacagtcccccaccccgagaagccattccccttcagcttcacagtcaggctctcagctgcgtaacaggtcagtcagtgggaagcgcatatgctcctactgcaataacattctgggcaaaggagccgccatgatcatcgagtccctgggtctttgttatcatttgcattgttttaagtgtgttgcctgtgagtgtgacctcggaggctcttcctcaggagctgaagtcaggatcagaaaccaccaactgtactgcaacgactgctatctcagattcaaatctggacggccaaccgccatgtgatgtaagcctccatacgaaagcactgttgcagatagaagaagaggtggttgctgctcatgtagatctataaatatgtgttgtatgtcttttttgctttttttttaaaaaaaagaataactttttttgcctctttagattacatagaagcattgtagtcttggtagaaccagtatttttgttgtttatttataaggtaattgtgtgtggggaaaagtgcagtatttacctgttgaattcagcatcttgagagcacaagggaaaaaataagaacctacgaatatttttgaggcagataatgatctagtttgactttctagttagtggtgttttgaagagggtattttattgttttttaaaaaaaggttcttaaacattatttgaaatagttaatataaatacataattgcatttgctctgtttattgtaatgtattctaaattaatgcagaaccatatggaaaatttcattaaaatctatccccaaatgtgctttctgtatccttccttctacctattattctgatttttaaaaatgcagttaatgtaccatttatttgcttgatgaagggagctctattttctttaccagaaatgttgctaagtaattcccaatagaaagctgcttattttcattaatgaaaaataaccatggtttgtatactagaagtcttcttcagaaactggtgagcctttctgttcaattgcatttgtaaataaacttgctgatgcatttaacgagtgggtcgtctttttcttaggtgtatgtgtctgacctcaggccttttagccatatttcagtatgtggccttttttgatgttatgttttatccagtagctttactaaggtataattgatgtaataaactgcatatatttaaagtgtatactttgacaaattttgacatggtgtataccttcgaaactatgccacagtctggatgtgtttactgaaacattttaataaggaagtttatttttgataaagttatgtttttggatacaatatatttgtatggtgagagtgatgaattgttggatcatttgaataaaatcttttactaaccccatgataaaaggagaagacaacagtgagcttagaatatctataaagcaaaaaatgtagtctcttgtttaaaaaatctggagcgggaatgcaaggatacaaaactttagcatgctttgagcaaaaatttaaacttactggaatcttttataataatgtaagtggaatggaggattctaggaactgagaactgtattggaataggttcaaaatatgtaagaaatgctaatgtgggagataaaaattttatttagtacttattctgattattattaaagtaaataatgtgttccttgaggataacttgtcaaatgccccccaaagccataaagaatataattttgaatccccaaattcccaaagacaagaactctgtgtttgaattcattctgcatataattatttataagtatagattgtgaatttttccatgttcttaaaattatttttatcttttttcatggttgccatagtgctcccattgtttggccttggtaatatttagttgataattccattactgtgtatttttcacttgtttctaagatcaaacattttaatatgtgcatgttatatataaatatgtaaattctgtgatactctatgatcatctctttctttatattattttcatagacatggaaatagttggctcagagattatggcattttaaggacactcatagtatatattggccaaagtgggttttccagaaaggcactgctggcttcgactcctataagcagcacgtgggcttgttcatctcactgcatgtttatgaagatacagttcttttgccttgttctctgcctgatgtgtatgcagaggcagccctcaatatgcagtggttgaataaatgaatgaagaaaccac

SEQ ID NO: 75336 - DNA, 2477 bp, Homo sapiens
gaggccgcagctcccgatggaaatcatattatgtagaatacttgggtgacatctgcctgagagatctccaagaattacagattgagtctcgctctgttgcccaggctggagcgcagtggtgcaatctctgctcactgcaacctccgtctcccgagttcaagcagttctcctgcctcagcctcctgagtagctgggattacagaagacaaaaatactaatgcatttgagaaagcggtagttttggggggagggggaaaaagcaactgctttcctgatctgcaacttggctggatgctaagatgtcagtggacatgaatagccaggggtctgacagcaatgaagaggactatgacccaaattgtgaggaagaggaagaagaagaagaagacgaccctggggacatagaggactattacttgggagtagccagcgatgtggagcagcagggggctgatgcctttgatcccgaggagtaccagttcacttgcttgacctacaaggaatctgagggtgccctcaatgagcacatgaccagcttagcttctgtcctaaaggtatctcattcagttgctaaacttatattagttaatttccactggcaagtttcagagatattggacagatacaagtccaattctgctcaactgcttgttgaggctcgagttcagcctaatccatcaaaacatgttcccacatcccatccccctcaccactgtgcagtgtgtatgcagtttgtgcgaaaggaaaacctactctctctggcctgtcagcaccagttttgccgcagctgctgggagcagcactgctcagttctcgtcaaggacggcgtgggcgtgggagtctcttgcatggctcaggactgtccactccgtacaccagaggactttgtgtttccattgcttcccaatgaagaattgagagagaaatacaggcgctacctcttcagggactatgtggagagtcattaccagctccagctgtgccctggtgcagactgccccatggttattcgggtacaggagcctagagctcgccgagtacagtgcaatcggtgcaacgaggtcttctgtttcaagtgtcgtcagatgtatcacgcacccacagactgtgccacaatccggaaatggctcacgaagtgtgcagacgactctgaaacagccaactacattagtgctcacactaaagactgtcccaagtgcaacatctgcattgagaagaatggaggctgcaatcacatgcaatgctccaaatgtaaacacgacttctgctggatgtgtctaggagattggaagactcatggcagtgaatactatgagtgcagtcgttacaaggagaatcctgacatcgtgaaccagagccaacaagcccaggcgagggaagccctcaagaagtacttattctactttgagaggtgggaaaaccacaataaaagcttgcagctagaggcacagacataccagcggattcacgagaagattcaggagagggtcatgaacaatctggggacatggatcgactggcagtacctacagaatgctgccaagctcttggccaaggttccttctcttctctcctgttgcagtgtcgatacaccctgcaatacacctacccatatgcatattacatggagtccggacccaggaagaagctgtttgaataccagcaggctcagctggaggctgagatcgaaaacctctcatggaaagtggagcgtgcagacagctatgacagaggggacttggagaaccagatgcatatagcggagcagcggaggagaaccctgctgaaagatttccatgacacctaagttgggatgtggatgtgccggggtgaggaagatgtggctgcaaggtctcccggctgccatactgcatgctgcaggctctgcctttcatgaccccaggcaacagccagggccccactcctgagagacactggcaacacctcttagttgatttctgttttcttctcttttcactttttgtttctaccagggtagaggccatgttgaactggcctcttttcaggacttttatttccccctggatggttgttgggagggagggaaagtgttttctgaatggctattaatagtattagatcattacaacttatgtaactttcaaaggttgtacaattatacaaaaaaaaaaaaaggggcaccttttggaaaaccacagccccttttttaaaaaaaaatgggattgggggggttaacccctcaaccggtttaattaaaaaggaaaaataggcggccaccccccctaaaaatgtttttcctgaaaaaggccccgggcccttttttttcaatattcccgtgggcccaaagtggaaccccaaaaaaaaacctggggggcaaaatggtaggaaatgaaacggccctgggaaagggccttgaaccaaagggggtcacaaaaggcctcctgctttaccggggaaaccggagacagccaaaaaatggtttttttgcacagggg

SEQ ID NO: 75337 - DNA, 2143 bp, Homo sapiens
cgcagcgtcccgccagccagctccttgcacccttcgcggccgaggcgctccctggtgctccccgcgcagccatggctcagcacttctccctggccgcctgcgacgtggtcggattcgacctggaccacactctgtgtcgctacaacctgcccgagagcgccccgctcatttataatagctttgcccagttcctagttaaggagaaagggtacgataaggaattgctcaatgtgaccccagaggattgggatttctgttgcaaaggtttggcattggatctagaagatgggaacttccttaaacttgcaaataatggcactgttctcagggcaagccatggcaccaagatgatgactccagaggtgctggcagaggcatatggcaagaaagagtggaagcacttcttgtcggacactggaatggcttgccgctcaggaaagtattacttttacgacaactactttgacctgccaggagctcttctgtgtgccagggtggtggactatttaacaaaactgaacaatggtcaaaaaacatttgatttttggaaggatatagttgctgctatacaacacaattataaaatgtcagcttttaaggaaaactgtggaatatattttccagaaataaaaagagatccaggcagatatttacatagttgtcctgaatctgtgaaaaaatggcttcgacagctaaagaatgctgggaaaattcttctgttaattaccagttctcacagtgattactgtagacttctctgcgccatatattcttgggaatgattttacagacctttttgacattgtgattacaaatgcattgaagcctggtttcttctcccacttaccaagtcagagacctttccggacactcgagaatgatgaggagcaggaggcactgccatctctggataaacctggctggtactcccaagggaacgctgtccacctctatgaacttctgaagaaaatgactggcaaacctgaacccaaggttgtttattttggtgacagcatgcattcagatattttcccagctcgtcactatagtaattgggagacagtcctcatcctggaagaactcagaggggatgaaggcacgaggagtcagaggcctgaggagtcagagcctctagagaagaaaggaaaatatgagggaccaaaagcaaaacctttaaatacttcatctaaaaaatggggctctttttttattgattcagttttgggactggaaaatacagaagactccttggtttatacatggtcttgtaagagaatcagtacttacagcactattgcaattccaagtattgaagcaatcgcagaattacctctggactacaaatttacaagattctcttcaagcaattcaaaaacagctggctactatccaaatcctccactggtcttatcaagtgatgagacactgatatccaaataagttgtctttactgaaaaatgaagtgaagacccatatatgcagttaaaaaaaagttaattttcaaaaaatactgtaaaagactttaaggaacaagttttattgaccaataagttgatatttgtccataggtctcctttctataaatcatcttgatgtttaacaactcttattatattaaaatctcagtatcctaaaacttagaaccttattgatattttctatacagtagttttgtgattagaattcacctggggacacacactcacacgcacagtcactcttacacatatgcctagtccagtggttctcaaagtgtgatccatagactaatagcatagcattacctgagaacttgataatgcatatttgcaggccccacgcaaaacctgctgaatcagaagctctgagagtaaggcctgccaatctggtttaacaagcccgtcaggtgattctgatttacagtacagtttgagacccactggctagaacatatcctccagagacttggcttaattggtctgggtaaatatggctgagcgttgttatcttttgttatcttttatatgccctaggaaagtacaaccagaattgaaaaccaactgatctataccagttctttcaattaatagtcaagaacattgagtccagtgagattaagtgatttttgcaggctatgaggttttatgctattcctgtgttctcc

SEQ ID NO: 75338 - DNA, 1802 bp, Homo sapiens
aaacaaacaaaaaggaaccagaggccacttgtatatataggtctcttcagcatttattgggggcagaagaggaagatttctgaagagtgcagctgcctgaaccgagccctgccgaacagctgagaattgcactgcaaccatgagtgagaacaataagaattccttggagagcagcctacggcaactaaaatgccatttcacctggaacttgatggagggagaaaactccttggatgattttgaagacaaagtattttaccggactgagtttcagaatcgtgaattcaaagccacaatgtgcaacctactggcctatctaaagcacctcaaagggcaaaacgaggcagccctggaatgcttacgtaaagctgaagagttaatccagcaagagcatgctgaccaggcagaaatcagaagtctggtcacctggggaaactatgcctgggtctactatcacatgggccgactctcagacgttcagatttatgtagacaaggtgaaacatgtctgtgagaagttttccagtccctatagaattgagagtccagagcttgactgtgaggaagggtggacacggttaaagtgtggaggaaaccaaaatgaaagagcgaaggtgtgctttgagaaggctctggaaaagaagccaaagaacccagaattcacctctggactggcaatagcaagctaccgtctggacaactggccaccatctcagaacgccattgaccctctgaggcaagccattcggctgaatcctgacaaccagtaccttaaagtcctcctggctctgaagcttcataagatgcgtgaagaaggtgaagaggaaggtgaaggagagaagtttagttgaagaagccttggagaaagccccaggttgtaacagatgtacttcgcagtgcagcccaagttttatcgaggaaaggatgagccagacaaagcgattgaactgcttaaaaaggctttagaatacataccaaaacaatgcctacctgcattgccaaattgggtgctgctatagggcaaaagtcttccaagtaatgaatctaagagagaatggaatgtatgggaaaagaaagttactggaactaataggacacgctgtggctcatctgaagaaagctgatgaggccaatgataatctcttccgtgtctgttccattcttgccagcctccatgctctagcagatcagtatgaagacgcagagtattacttccaaaaggaattcagtaaagagcttactcctgtagcgaaacaactgctccatctgcggtatggcaactttcagctgtaccaaatgaagtgtgaagacaaggccatccaccactttatagagggtgtaaaaataaaccagaaatcaagggagaaagaaaagatgaaagacaaactgcaaaaaattgccaaaatgcgactttctaaaaatggagcagattctgaggctttgcatgtcttggcattccttcaggagctgaatgaaaaaatgcaacaagcagatgaagactctgagaggggtttggagtctggaagcctcatcccttcagcatcaagctggaatggggaatgaagaatagagatgtggtgcccactaggctactgctgaaagggagctgaaattcctccaccaagttggtattcaaaatatgtaatgactggtatggcaaaagattggactaagacactggccataccactggacagggttatgttaacacctgaattgctgggtcttgagagagcccaaggagttctgggagagggaccagattggggggtaggtccacgggcttggtgatagacatatttc

SEQ ID NO: 75339 - DNA, 2614 bp, Homo sapiens; identical to SEQ ID NO: 60763
  misc_feature (1)...(2614): n = a,t,c or g

SEQ ID NO: 75340 - DNA, 5623 bp, Homo sapiens; identical to SEQ ID NO: 60764

SEQ ID NO: 75341 - DNA, 1915 bp, Homo sapiens; identical to SEQ ID NO: 60765

SEQ ID NO: 75342 - DNA, 1824 bp, Homo sapiens; identical to SEQ ID NO: 60766

SEQ ID NO: 75343 - DNA, 1937 bp, Homo sapiens; identical to SEQ ID NO: 60767

SEQ ID NO: 75344 - DNA, 1049 bp, Homo sapiens; identical to SEQ ID NO: 60768
  misc_feature (1)...(1049): n = a,t,c or g

SEQ ID NO: 75345 - DNA, 1388 bp, Homo sapiens; identical to SEQ ID NO: 60769

SEQ ID NO: 75346 - DNA, 6491 bp, Homo sapiens; identical to SEQ ID NO: 60770

SEQ ID NO: 75347 - DNA, 1366 bp, Homo sapiens
agcacactccagaaaaaaacttcccaaaccctgggcaactgaggttctgatgtggagctctggatggaaagcgtgctgaagtcttgttaaactagcaagcttttgtttggaggtccaccgccgaaggcgcacaggcctgtgggaacacgagcgttgagactgggggcgtctagatgatccaagggctcggacctcaggcacatgcgaatgacccggagtgtggacaacgtccagttcctgccctttctcaccacggaagtcaagtgaggggccgacggctgcgcaacctgggctggctgagttatggggctttgaagggagacgggatcctcatcgtcgtcaacacagtgggtgctgcgcttcagaccctgtatatcttggcatatctgcattactgccctcggaagcgtgttgtgctcctacagactgcaaccctgctaggggtccttctcctgggttatggctacttttggctcctggtacccaaccctgaggcccggcttcagcagttgggcctcttctgcagtgtcttcaccatcagcatgtacctctcaccactggctgacttggctaaggtgattcaaactaaatcaacccaatgtctctcctacccactcaccattgctacccttctcacctctgcctcctggtgcctctatgggtttcgactcagagatccctatatcatggtgtccaactttccaggaatcgtcaccagctttatccgcttctggcttttctggaagtacccccaggagcaagacaggaactactggctcctgcaaacctgaggctgctcatctgaccactgggcaccttagtgccaacctgaaccaaagagacctccttgtttcagctgggcctgctgtccagcttcccaggtgcagtgggttgtgggaacaagagatgactttgaggataaaaggaccaaagaaaaagctttacttagatgattgattggggcctaggagatgaaatcactttttattttttagagatttttttttttaattttggaggttggggtgcaatctttagaatatgccttaaaaggccgggcgcgggggctcacgcctgtaatcccagcactttgggaggccaaggtgggcggatcgcctgaggtcaggagttcaagaccaacctgactaacatggtgaaaccccatctctactaaaaatacaaaattagccaggcatgatggcacatgcctgtaatcccagatacttgggaggctgaggcaggagaattgcttgaacccaggaggtggaggttgcagtgagctgagatcgtgccattgtgatatgaatatgccttatatgctgatatgaatatgccttaaaataaagtgttccccacccctgcaaaa

SEQ ID NO: 75348 - DNA, 5805 bp, Homo sapiens
tttcgtggcgcgggagccgagaggtggcgcgggggtgccaccgttgccgcaggctggagagagattgctcccagtgaggcgcgtaccgtctgggcgagggcttcattcttccgcggcgtccctggaggactggagactgatgcatgagggggctacggaggcgcaggagcggtggtgatggtctgggaagcggagctgaagtgccctgggctttggtgaggcgtgacagtttatcatgaccgtgttcaggcaggaaaacgtggatgattactacgacaccggcgaggaacttggcagtggacagtttgcggttgtgaagaaatgccgtgagaaaagcaccggcctccagtatgccgccaaattcatcaagaaaaggaggactaagtccagccggcggggtgtgagccgcgaggacatcgagcgggaggtcagcatcctgaaggagatccagcaccccaatgtcatcaccctgcacgaggtctatgagaacaagacggacgtcatcctgatcttggaactcgttgcaggtggcgagctgtttgacttcttagctgaaaaggaatctttaactgaagaggaagcaactgaatttctcaaacaaattcttaatggtgtttactacctgcactcccttcaaatcgcccactttgatcttaagcctgagaacataatgcttttggatagaaatgtccccaaacctcggatcaagatcattgactttgggttggcccataaaattgactttggaaatgaatttaaaaacatatttgggactccagagtttgtcgctcctgagatagtcaactatgaacctcttggtcttgaggcagatatgtggagtatcggggtaataacctatatcctcctaagtggggcctccccatttcttggagacactaagcaagaaacgttagcaaatgtatccgctgtcaactacgaatttgaggatgaatacttcagtaataccagtgccctagccaaagatttcataagaagacttctggtcaaggatccaaagaagagaatgacaattcaagatagtttgcagcatccctggatcaagcctaaagatacacaacaggcacttagtagaaaagcatcagcagtaaacatggagaaattcaagaagtttgcagcccggaaaaaatggaaacaatccgttcgcttgatatcactgtgccaaagattatccaggtcattcctgtccagaagtaacatgagtgttgccagaagcgatgatactctggatgaggaagactcctttgtgatgaaagccatcatccatgccatcaacgatgacaatgtcccaggcctgcagcaccttctgggctcattatccaactatgatgttaaccaacccaacaagcacgggacacctccattactcattgctgctggctgtgggaatattcaaatactacagttgctcattaaaagaggctcgagaatcgatgtccaggataagggcgggtccaatgccgtctactgggctgctcggcatggccacgtcgataccttgaaatttctcagtgagaacaaatgccctttggatgtgaaagacaagtctggagagatggccctccacgtggcagctcgctatggccatgctgacgtggctcaagttacttgtgcagcttcggctcaaatcccaatatccaggacaaggaagaagaaacccccctgcactgtgctgcttggcacggctattactctgtggccaaagccctttgtgaagccggctgtaacgtgaacatcaagaaccgagaaggagagacgcccctcctgacagcctctgccaggggctaccacgacatcgtggagtgtctggccgaacatggagccgaccttaatgcttgcgacaaggacggacacattgcccttcatctggctgtaagacggtgtcagatggaggtaatcaagactctcctcagccaagggtgtttcgtcgattatcaagacaggcacggcaatactcccctccatgtggcatgtaaagatggcaacatgcctatcgtggtggccctctgtgaagcaaactgcaatttggacatctccaacaagtatgggcgaacgcctctgcaccttgcggccaacaacggaatcctagacgtggtccggtatctctgtctgatgggagccagcgttgaggcgctgaccacggacggaaagacggcagaagatcttgctagatcggaacagcacgagcacgtagcaggtctccttgcaagacttcgaaaggatacgcaccgaggactcttcatccagcagctccgacccacacagaacctgcagccaagaattaagctcaagctgtttggccactcgggatccgggaaaaccacccttgtagaatctctcaagtgtgggctgctgaggagctttttcagaaggcgtcggcccagactgtcttccaccaactccagcaggttcccaccttcacccctggcttctaagcccacagtctcagtgagcatcaacaacctgtacccaggctgcgagaacgtgagtgtgaggagccgcagcatgatgttcgagccgggtcttaccaaaggratgctggaggtgtttktggccccgacccaccacccgcactgctcggccgatgaccagtccaccaaggccatcgacatccagaacgcttatttgaatggagttggcgatttcagcgtgtgggagttctctggaaatcctgtgtatttctgctgtwatractattttgctgcaaataatcccacgtcaatccatgttgttgtctttagtctagaagagccctatgagatccagctgaacccagtgattttctggctcagtttcctgaagtcccttgtcccagttgaagaacccatagccttcggtggcaagctgaagaacccactccaagttgtcctggtggccacccacgctgacatcatgaatgttcctcgaccggctggaggcgagtttggatatgacaaagacacatcgttgctgaaagagattaggaacagggttggaaatgatcttcacatttcaaataagctgtttgttctggatgctggggcttctgggtcaaaggacatgaaggtacttcgaaatcatctgcaagaaatacgaagccagattgtttcggtctgtcctcccatgactcacctgtgtgagaaaatcatctccacgctgccttcctggaggaagctcaatggacccaaccagctgatgtcgctgcagcagtttgtgtacgacgtgcaggaccagctgaaccccctggccagcgaggaggacctcaggcgcattgctcagcagctccacagcacaggcgagatcaacatcatgcaaagtgaaacagttcaggacgtgctgctcctggacccccgctggctctgcacaaacgtcctggggaagttgctgtccgtggagaccccacgggcgctgcaccactaccggggccgctacaccgtggaggacatccagcgcctggtgcccgacagcgacgtggaggagctgctgcagatcctcgatgccatggacatctgcgcccgggacctgagcagcgggaccatggtggacgtcccagccctgatcaagacagacaacctgcaccgctcctgggctgatgaggaggacgaggtgatggtgtatggtggcgtgcgcatcgtgcccgtggaacacctcaccccctttccatgtggcatctttcacaaggtccaggtgaacctgtgccggtggatccaccagcaaagcacagagggcgacgcggacatccgcctgtgggtgaatggctgcaagctggccaaccgtggggccgagctgctggtgctgctggtcaaccacggccagggcattgaggtccaggtccgtggcctggagacggagaagatcaagtgctgcctgctgctggactcggtgtgcagcaccattgagaacgtcatggccaccacgctgccagggctcctgaccgtgaagcattacctgagcccccagcagctgcgggagcaccatgagcccgtcatgatctaccagccacgggacttcttccgggcacagactctgaaggaaacctcactgaccaacaccatgggggggtacaaggaaagcttcagcagcatcatgtgcttcgggtgtcacgacgtctactcacaggccagcctcggcatggacatccatgcatcagacctgaacctcctcactcggaggaaactgagtcgcctgctggacccgcccgaccccctggggaaggactggtgccttctcgccatgaacttaggcctccctgacctcgtggcaaagtacaacaccaataacggggctcccaaggatttcctccccagccccctccacgccctgctgcgggaatggaccacctaccctgagagcacagtgggcaccctcatgtccaaactgagggagctgggtcgccgggatgccgcagactttttgctgaaggcatcctctgtgttcaaaatcaacctggatggcaatggccaggaggcctatgcctcgagctgcaacagcggcacctcttacaattccattagctctgttgtatcccggtgagggcagcctctggcttgggcagggtctgtttggactgcagaagcaagggggtgatgtagcccatccttccctttggagatgctgagggtgtttcttcctgcacccacagccagggggatgccactcctccctccggcttgacctgtttctctgccgctacctccctccccgtctcattccgttgtctgtggatggtcattgcagtttaagagcagaacagatcttttactttggccgcttgaaaagctagtgtacctcctctcagtgttttggactccatctctcatcctccagtaccttgcttcttactgataattttgctggaattcctaacttttcaatgacattttttttaactactatattgattgtcctttaaaaaagaaaagtgcatatttatccaaaatgtgtatttcttatacgcttttctttgttataccatttcctcagcttatctcttttatatttgtaggagaaactcccatgtatggaatcccactgtatgatttataaacagacaatatgtgagtgccttttgcagaagagggtgtgtttgaaatcatcggagtcagccaggagctgtcaccaaggaaacgctacctctctgtcccttgctgtatgctgatcatcgccagaggtgcttcaccctgagttttgttttgtattgttttctgacagtttttctgttttgtttggcaaggaaaggggagaagggaatcctcctccagggtgattttatgatcagtgttgttgctctaggaagacatttttccgtttgcttttgttccaatgtcaatgtgaacgtccacatgaaacctacacactgtcatgcttcatcattccctctcatctcaggtagaaggttgacacagttgtagggttacagagacctatgtaagaattcagaagacccctgactcatcatttgtggcagtcccttataattggtgcatagcagatggtttccacatttagatcctggtttcataacttcctgtacttgaagtctaaaagcagaaaataaaggaagcaagttttcttccatgattttaaattgtgatcgagttttaaattgataggagggaacatgtcctaattcttctgtcctgagaagcatgtaatgttaatgttatatcatatgtatatatatatatgcactatgtatatacatatatattaatactggtatttttacttaatctataaaatgtcggttaaaaagttgtttgtttttttctttttttataaataaactgttgctcgttaaaaaaaaaa

SEQ ID NO: 75349 - DNA, 1962 bp, Homo sapiens
tttcgtggccgcgagatggggaagatggcagcggccgtgggctctgtggcgactctggcgactgagcccggggaggacgcctttcggaaacttttccgcttctaccgtcagagccggcccgggaccgcagacctggaaggggtcatcgacttctcggcggcccacgcagcccgtggcaagggtcctggtgcccaaaaggtgatcaaatctcagctaaatgtgtcttctgtcagtgagcagaatgcatatagagcaggtcttcagcccgtcagcaagtggcaagcctatggactcaaaggctatcctgggtttatttttatcccaaaccccttcctcccaggttaccagtggcactgggtgaaacagtgccttaagttatattcccagaaacctaatgtatgtaacctggacaaacacatgtctaaagaagagacccaagatctgtgggaacagagcaaagagttcctgaggtataaagaagcgactaaacggagaccccgaagtttactggagaaactgcgttgggtgaccgtaggctaccattataactgggacagtaagaaatactcagcagatcattacacacctttcccttctgacctgggtttcctctcagagcaagtagccgctgcctgtggatttgaggatttccgagctgaagcagggatcctgaattactaccgcctggactccacactgggaatccacgtagacagatctgagctagatcactcccaaacccctggctgtcattcagctttggacagtccgccatctttctcctgggtggtcttcaaagggatgaggcccccacggccatgtttatgcacagtggtgacatcatgataatgtcgggtttcagccgcctcttgaaccacgcagtccctcgtgtccttccaaatccagaaggggaaggcctgcctcactgcctagaggcacctctccctgctgtcctcccgagagattcaatggtagagccttgttctatggaggactggcaggtgtgtgccagctacttgaagaccgctcgtgttaacatgactgtccgacaggtcctggccacagaccagaatttccctctagaacccatcgaggatgaaaaaagagacatcagtacagaaggtttctgccatctggatgaccagaatagcgaagtaaaacgggccaggataaaccctgacagctgagacttggagatcccatcctttttactcaggcacctgcttaccgtaaatgatcatgttattgtgtattgccgtggacttcagcacccagacaagccaaaaacagagacagggaagaactcattgttgatcacactgttgccttggaacccacgcagaagtaaactcagccactttgctcagagaagtgtttgacatggtctgttcctagttacatgttggctgtaatgtatgttgagaagtcagtccaaggaggtatgttcttccacaacagccttctcagcctctgctatttcctttgaggaaggtagaagtgagtttccatgtttgcagagtatttaaatacctcagattttattaatgagaaatacagtacccctccctccactccatctggtaatttatggtaaaattgtggttctgtgaaccagctattagtctcatcttcttaactccctcaggcatcatcaaattctttgatcttctcttccacctctctggctctcatggaagaatcctttacacatgaaaacaatggaactggaaaatcttgtcttttagaaaagaaattaatcacaactatctctcttgcctaaaagataaatataggtaaacccaaggaaaggggaatttagtttctctacatgtcatttcggtctccaaactccctgttggctttttaatgcaattttaattgttggaataaaaaagtcccaagggtgttttgttactgttttctccatgaataaactcacttgattttaaattaaaaaaaaaa

SEQ ID NO: 75350 - DNA, 6553 bp, Homo sapiens
gaatctctcacgagctggagccggagccattttccccccttcggccgcggcgaggaggagccggagcgggagtgacaccgagccggacccagcgcgacctgcggcggctccgggtgactcgggccagtgtagaggtcctcaggccgccggcaggagcagctgggccaattccctggccgggagcggaaggggatggcgtcgggcctgggctccccgtccccctgctcggcgggcagtgaggaggaggatatggatgcacttttgaacaacagcctgcccccaccccacccagaaaatgaagaggacccagaagaggatttgtcagaaacagagactccaaagctcaagaagaagaaaaagcctaagaaacctcgggaccctaaaatccctaagagcaagcgccaaaaaaaggagcgtatgctcttatgccggcagctgggggacagctctggggaggggccagagtttgtggaggaggaggaagaggtggctctgcgctcagacagtgagggcagcgactatactcctggcaagaagaagaagaagaagcttggacctaagaaagagaagaagagcaaatccaagcggaaggaggaggaggaggaggatgatgatgatgatgatgattcaaaggagcctaaatcatctgctcagctcctggaagactggggcatggaagacattgaccacgtgttctcagaggaggattatcgaaccctcaccaactacaaggccttcagccagtttgtcagacccctcattgctgccaaaaatcccaagattgctgtctccaagatgatgatggttttgggtgcaaaatggcgggagttcagtaccaataaccccttcaaaggcagttctggggcatcagtggcagctgcggcagcagcagcggtagctgtggtggagagcatggtgacagccactgaggttgcaccaccacctccccctgtggaggtgcctatccgcaaggccaagaccaaggagggcaaaggtcccaatgctcggaggaagcccaagggcagccctcgtgtacctgatgccaagaagcctaaacccaagaaagtagctcccctgaaaatcaagctgggaggttttggttccaagcgtaagagatcctcgagtgaggatgatgacttagatgtggaatctgacttcgatgatgccagtatcaatagctattctgtttctgatggttccaccagccgtagtagccgcagccgcaagaaactccgaaccactaaaaagaaaaagaaaggcgaggaggaggtgactgctgtggatggttatgagacagaccaccaggactattgcgaggtgtgccagcaaggcggtgagatcatcctgtgtgatacctgtccccgtgcttaccacatggtctgcctggatcccgacatggagaaggctcccgagggcaagtggagctgcccacactgcgagaaggaaggcatccagtgggaagctaaagaggacaattcggagggtgaggagatcctggaagaggttgggggagacctcgaagaggaggatgaccaccatatggaattctgtcgggtctgcaaggatggtggggaactgctctgctgtgatacctgtccttcttcctaccacatccactgcctgaatcccccacttccagagatccccaacggtgaatggctctgtccccgttgtacgtgtccagctctgaagggcaaagtgcagaagatcctaatctggaagtggggtcagccaccatctcccacaccagtgcctcggcctccagatgctgatcccaacacgccctccccaaagcccttggaggggcggccagagcggcagttctttgtgaaatggcaaggcatgtcttactggcactgctcctgggtttctgaactgcagctggagctgcactgctcaggtgatgttccgaaactatcagcggaagaatgatatggatgagccaccttctggggactttggtggtgatgaagagaaaagcccgaaagcgaaagaacaaggaccctaaatttgcagagatggaggaacgcttctatcgctatgggataaaacccgagtgggatgatgatccaccgaatcctcaaccacagtgtggacaagaagggccacgtccactacttgatcaagtggcgggacttaccttacgatcaggcttcttgggagagtgaggatgtggagatccaggattacgacctgttcaagcagagctattggaatcacagggagttaatgaggggtgaggaaggccgaccaggcaagaagctcaagaaggtgaagcttcggaagttggagaggcctccagaaacgccaacagttgatccaacagtgaagtatgagcgacagccagagtacctggatgctacaggtggaaccctgcacccctatcaaatggagggcctgaattggttgcgcttctcctgggctcagggcactgacaccatcttggctgatgagatgggccttgggaaaactgtacagacagcagtcttcctgtattccctttacaaggagggtcattccaaaggccccttcctagtgagcgcccctctttctaccatcatcaacttgggagcgggagtttgaaatgtgggctccagacatgtatgtccgtaacctatgtgggtgacaaggacagccgtgccatcatccgagagaatgagttctccctttgaagacaatgccattcgtggtggcaagaaggcctcccgcatgaagaaagaggcatctgtgaaattccatgtgctgctgacatcctatgaattgatcaccattgacatggctattttgggctctattgattgggcctgcctcatcgtggatgaagcccatcggctgaagaacaatcagtctaagttcttccgggtattgaatggttactcactccagcacaagctgttgctgactgggacaccattacaaaacaatctggaagagttgtttcatctgctcaactttctcacccccgagaggttccacaatttggaaggttttttggaggagtttgctgacattgccaaggaggaccagataaaaaaactgcatgacatgctgggggccgcacatgttgcggcggctcaaagccgatgtgttcaagaacatgccctccaagacagaactaattgtgtcgtgtggagctgagccctatgacagaagaaatactacaagttacatcctccactcgaaatttttgaaggcactcaatggcccgaggtggtggcaaccaggtgtctctgctgaatgtggtgatggatcttaagaagtgctgcaaccatccatacctcttccctgtggctgcaatggaagctcctaagatgcctaatggcatgtatgatggcagtgccctaatcagagcatctgggaaattattgctgctgcagaaaatgctcaagaaccttaaggagggtgggcatcgtgtactcatcttttcccagatgaccaagatgctagacctgctagaggatttcttggaacatgaaggttataaatacgaacgcatcgatggtggaatcactgggaacatgcggcaagaggccattgaccgcttcaatgcaccgggtgctcagcagttctgcttcttgctttccactcgagctgggggccttggaatcaatctggccactgctgacacagttattatctatgactctgactggaacccccataatgacattcaggcctttagcagagctcaccggattgggcaaaataaaaaggtaatgatctaccggtttgtgacccgtgcgtcagtggaggagcgcatcacgcaggtggcaaagaagaaaatgatgctgacgcatctagtggtgcggcctgggctgggctccaagactggatctatgtccaaacaggagcttgatgatatcctcaaatttggcactgaggaactattcaaggatgaagccactgatggaggaggagacaacaaagagggagaagatagcagtgttatccactacgatgataaggccattgaacggctgctagaccgtaaccaggatgagactgaagacacagaattgcagggcatgaatgaatatttgagctcattcaaagtggcccagtatgtggtacgggaagaagaaatgggggaggaagaggaggtagaacgggaaatcattaaacaggaagaaagtgtggatcctgactactgggagaaattgctgcggcaccattatgagcagcagcaagaagatctagcccgaaatctgggcaaaggaaaaagaatccgtaaacaggtcaactacaatgatggctcccaggaggaccgagattggcaggacgaccagtccgacaaccagtccgattactcagtggcttcagaggaaggtgatgaagactttgatgaacgttcagaagctccccgtaggcccagtcgtaagggcctgcggaatgataaagataagccattgcctcctctgttggcccgtgttggtgggaatattgaagtacttggttttaatgctcgtcagcgaaaagcctttcttaatgcaattatgcgatatggtatgccacctcaggatgcttttactacccagtggcttgtaagagacctgcgaggcaaatcagagaaagagttcaaggcatatgtctctcttttcatgcggcatttatgtgagccgggggcagatggggctgagacctttgctgatggtgtcccccgagaaggcctgtctcgccagcatgtccttactagaattggtgttatgtctttgattcgcaagaaggttcaggagtttgaacatgttaatgggcgctggagcatgcctgaactggctgaggtggaggaaaacaagaagatgtcccagccagggtcaccctccccaaaaactcctacaccctccactccaggggacacgcagcccaacactcctgcacctgtcccacctgctgaagatgggataaaaatagaggaaaatagcctcaaagaagaagagagcatagaaggagaaaaggaggttaaatctacagcccctgagactgccattgagtgtacacaggcccctgcccctgcctcagaggatgaaaaggtcgttgttgaaccccctgagggagaggagaaagtggaaaaggcagaggtgaaggagagaacagaggaacctatggagacagagcccaaaggtaaaggtgctgctgatgtagagaaggtggaggaaaagtcagcaatagatctgacccctattgtggtagaagacaaagaagagaagaaagaagaagaagagaaaaaagaggtgatgcttcagaatggagagacccccaaggacctgaatgatgagaaacagaagaaaaatattaaacaacgtttcatgtttaacattgcagatggtggttttactgagttgcactccctttggcagaatgaagagcgggcagccacagttaccaagaagacttatgagatctggcatcgacggcatgactactggctgctagccggcattataaaccatggctatgcccggtggcaagacatccagaatgacccacgctatgccatcctcaatgagcctttcaagggtgaaatgaaccgtggcaatttcttagagatcaagaataaatttctagctcgaaggtttaagctcttagaacaagctctggtgattgaggaacagctgcgccgggctgcttacttgaacatgtcagaagacccttctcacccttccatggccctcaacacccgctttgctgaggtggagtgtttggcggaaagtcatcagcacctgtccaaggagtcaatggcaggaaacaagccagccaatgcagtcctgcacaaagttctgaaacagctggaagaactgctgagtgacatgaaagctgatgtgactcgactcccagctaccattgcccgaattcccccagttgctgtgaggttacagatgtcagagcgtaacattctcagccgcctggcaaaccgggcacccgaacctaccccacagcaggtagcccagcagcagtgaagatgcagactgataccacctccaccgctgagcagtgaccttcctcactttctcttgtcccagcttctcccctgggggcctgagagaccctcaccttccttctgcccatcttccatgttgtaaaggaacagccccagtgcactgggggaggggagggagtgaggggcagtggtgcccttcctgcagaagagacatgcagcagtagcgctggcgccatctgcaggagctggcgggctggccttctggaccctggcttctccccactgtaacgcctgttacacacaaactgttgtgggttcctgccaggcttgaagaaaatgatctgaattttttcctccttttggttttattttgttggtttattttgtgttttcttttctcctttttggggggtattcagagtgggctgggcccctgggcgagacacagctacctctgttggcatctttttaataccaggaacccagcggctctagccactgagcggctaaatgaaataaagtggaaaaaaaaaaaaagggaaaaacccaaagccttaaaaacccccagcaaattttttgatgaaaattgaaaaaaaaagtttccttgtaaaaaaaaaa

SEQ ID NO: 75351 - DNA, 3349 bp, Homo sapiens; identical to SEQ ID NO: 60774

SEQ ID NO: 75352 - DNA, 1535 bp, Homo sapiens
ttttttttttttgatattaaatgttaaattttatttcaaaaaactatcacagcctaaagggaaatataatttaagcattaagatagtacatttcagaaaataagctagtattttcatgttacattttaggtacctatcatttgtcattccaagagatccttgcgttctagactctagaattaaatggggtaaagggttatgcttttaagaactataagctgaaatgatttacttcagttcaatatagaatatttgtcagtcaagataacaatcaatgtgtacaaaaatttacataacaagaggaaaaataggcagtgcagcacctttagaaaaataattaaaagtttcattgcatttacaggtaagtgccacactgagaatttacaatacagtaatttactgcaatcacaggggagttccataaagaaacaaagctcttacactccaggtttttggaaggtgttattggaatgcttaactgaaaccccacagaacttgtatatcccttaggattgagttgatggaaggtcataaaaggttttcatagcatctattatataaaaggagttcactgcatttggatagctggtttagtgtctctgacaagtgtgaagcctagaagaattactggcttgatggtgatctttctgtatccggcaagacagaccttctccacagtaacaacgctggaatatttctagtccatgagagccttttctcctatgcttggtacacacttgaccttctttcaggacaggtttacagatcttggaccagaagtgtctagcacaacacaatcctgaggcacagtctgatgaccggagacaaacagaaccttcttgtcctttggtgtgatacatttttgaagacaaggtggttcttctggaatacccatccaaggtgctatgatcattaccaaagctttcagtgatggtttcctcaatttctcctcggaaatgattttgatcagaagacacacatattccatttttgcagtaattcccggggcagcacatagcgtgacgcatgcagcgttttcggcgcttcctgcaggcgagacagatttgcacgcccgcgtcccctccgcgggtgggactagcgcagtactcatcagtgccgcactcctcgtcctctgcgcacgggtacggctggtagttgtcaatggtctggtacttattcccgcccgggtacaggattcccggcgcggcgctgactgcagagccttgggtgccccgcagcgccgcccagcggtgggggcaggttcttgatagcgttggaattgagaaccgagttcaaggtggcgctcactcccagcagagggtggccgccgagagccgccgctaccatcgcgacaaagacccgggtagctcccgctgcgcccagagccatcatctcagaaggactcaagagggagaaagaaagagaaaatgaccgtcactttgcaagcctgggtccccacgaaaccgtgccggttcggctgcagagtcagggtccgggagccccctgcggtcccagagtcctgactgcagggagca

SEQ ID NO: 75353 - DNA, 2619 bp, Homo sapiens
tggaggtgcccggatgaacatacatcacaatgtgaacagtggtcatctccagatagtagaatttcagatatgtttctttccatttttctgacagtttgaattttctgtaataattaattgacttttatacaatggaaacaacttttttgttttggaaaaaagaaagatgctgccgctaatcagtggatgaaagatgataatatggatacaaaatctattctagaagaacttcttctcaaaagatcacagcaaaagaagaaaatgtcaccaaataattacaaggaacgggctttttgttttgaccaaaacaaacctttcctactatgaatatgacaaaatgaaaaggggcagcagaaaaggatccattgaaattaagaaaatcagatgtgtggagaaagtaaatctcgaggagcagacgcctgtagagagacagtacccatttcagattgtctataaagatgggcttctctatgtctatgcatcaaatgaagagagccgaagtcagtggttgaaagcattacaaaaagagataaggggtaacccccacctgctggtcaagtaccatagtgggttcttcgtggacgggaagttcctgtgttgccagcagagctgtaaagcagccccaggatgtaccctctgggaagcatatgctaatctgcatactgcagtcaatgaagagaaacacagagttcccaccttcccagacagagtgctgaagatacctcgggcagttcctgttctcaaaatggatgcaccatcttcaagtaccactctagcccaatatgacaacgaatcaaagaaaaactatggctcccagccaccatcttcaagtaccagtctagcgcaatatgacagcaactcaaagaaaatctatggctcccagccaaacttcaacatgcagtatattccaagggaagacttccctgactggtggcaagtaagaaaactgaaaagtagcagcagcagtgaagatgttgcaagcagtaaccaaaaagaaagaaatgtgaatcacaccacctcaaagatttcatgggaattccctgagtcaagttcatctgaagaagaggaaaacctggatgattatgactggtttgctggtaacatctccagatcacaatctgaacagttactcagacaaaagggaaaagaaggagcatttatggttagaaattcgagccaagtgggaatgtacacagtgtccttatttagtaaggctgtgaatgataaaaaaggaactgtcaaacattaccacgtgcatacaaatgctgagaacaaattatacctggcagaaaactactgttttgattccattccaaagcttattcattatcatcaacacaattcagcaggcatgatcacacggctccgccaccctgtgtcaacaaaggccaacaaggtccccgactctgtgtccctgggaaatggaatctgggaactgaaaagagaagagattaccttgttgaaggagctgggaagtggccagtttggagtggtccagctgggcaagtggaaggggcagtatgatgttgctgttaagatgatcaaggagggctccatgtcagaagatgaattctttcaggaggcccagactatgatgaaactcatccatcccaagctggttaaattctatggagtgtgttcaaaggaataccccatatacatagtgactgaatatataagcaatggctgcttgctgaattacctgaggagtcacggaaaaggacttgaaccttcccagctcttagaaatgtgctacgatgtctgtgaaggcatggccttcttggagagtcaccaattcatacaccgggacttggctgctcgtaactgcttggtggacagagatctctgtgtgaaagtatctgactttggaatgacaaggtatgttcttgatgaccagtatgtcagttcagtcggaacaaagtttccagtcaagtggtcagctccagaggtgtttcattacttcaaatacagcagcaagtcagacgtatgggcatttgggatcctgatgtggaaggtgttcagcctggggaagcagccctatgacttgtatgacaactcccaggtggttctgaaggtctcccaggtccacaggctttaccggccccacctggcatcggacaccatctaccagatcatgtacagctgctggcacgagcttccagaaaagcgtcccgcatttcagcaactcccggtcttcccattggaacccacttcggggaaaaaggccaagcattgaagaagaaattaggagtgctgataagaatgaatatagatgctggcccagcattttcattcattttaaggaaagtagcaaggcataatgtaatttagctagtttttaatagtgttctctgtattgtctattatttagaaatgaacaaggcaggaaacaaaagattcccttgaaatttagatcaaattagtaattttgttttatgctgctcctgatataacactttccagcctatagcagaagcacattttcagactgcaatatagagactgtgttcatgtgtaaagactgagcagaactgaaaaattacttattggatattcattcttttctttatattgtcattgtcacaacaattaaatatactaccaagtacagaaatgtgg

SEQ ID NO: 75354 - DNA, 1244 bp, Homo sapiens
gacaatgatttcttgcggaacacagtgcacaggcatgagccaccagtcacagcagagcccattcgcctgctagctgagaacgaagatgtggtggttgtagacaagccttcctccattcccgttcacccctgtggccgcttccgacacaacacagttatcttcatcctaggcaaggagcaccaactcaaggagctacaccccttgcatcggcttgaccgccttacctcaggggtgcttatgtttgccaagacagctgcagtctctgagagaattcacgagcaggttcgggaccggcagctggagaaggagtacgtgtgccgggtggaaggggagttccccactgaggaagtgacctgtaaagaacccatcttagtggtgtcttacaaagtaggggtgtgccgtgtagatccccggggcaagccctgtgagacagtgttccagaggctaagctacaatggccagtccagtgtggtacggtgccggccactcacaggccgcacacaccagattcgagtccaccttcagttcttgggccatcccattctcaacgaccccatctacaactcagttgcctggggtccttctcgaggccggggcggctacattcccaagacaaacgaggagttgctacgggacctggtagcagagcaccaggccaaacagagcctggatgtgctagatctctgtgagggtgacctgtccccaggactcacagactctacggccccctcctcagagttgggcaaggacgacctggaagagttggctgcagctgccccagaagatggaggaagtagctgaggcagcccctcaggagttggacacaatagccttggcatcagagaaggcagttgaaacagatgtcatgaatcaagagacagacccactctgtgcagagtgccggctggtgcgacaggatcccttgccccaagaccttgtgatgttcctacatgccctacgctataaagggccaggctttgagtacttttcaccaatgcctgcctgggcacaggatgactggcaaaaggactgagggtgtggccaatggagggattgcttcttgggttgtgacaaggatgggctatagggcaagggctgaccccatgggctagtacttggggtttctataggaatgaggacgggcttctaaagagacctgctcatacttgctacctccttccagtgggaatttggagactttttggtttgtaaatatatccctttttctaacatcaaaaaaaaaa

SEQ ID NO: 75355 - DNA, 5890 bp, Homo sapiens; identical to SEQ ID NO: 60776

SEQ ID NO: 75356 - DNA, 2317 bp, Homo sapiens; identical to SEQ ID NO: 60777

SEQ ID NO: 75357 - DNA, 6941 bp, Homo sapiens; identical to SEQ ID NO: 60778

SEQ ID NO: 75358 - DNA, 4554 bp, Homo sapiens
ccggccgcgtcgactttttttttttgcattaagcacaatacagcaatttatttagatgcttaaaatgaatacaaagggaaaataaagatcacaaaattatacatactacaacagtgtgtcatatattagatggtataaatgaatccaccatgatggtgttgaactaaagataaaactaaatatccaaaatgcagcactcattggtttgctgcttcaacacaacacacttttatacagatctaaaaggtgtcaaaattagtagctgcaaagtcaattcttgcatgtgattttagcttaaaagatttcagaaaacagatctgaaataccagtttttgtttttgacagctgtaatgtcaaggatattcagaacaagaaaaatcctataatacaagagagtccagatatatatcttacgtggctggcctctgttgcaagattgtacaaggttatgtgcaaaaactaagtctgtccaaaaagtccatactagcgcagttttgagcttttgctaggtaaactagatagagcgtttattacacagcaagggcaacactaaaaaaagaaatctatgatgggcacacagtaacaggatcatgagcatcacttgaataggtctaaaagactgtacaaatatacatttcaactattcagaatgaatacatgaaaaaaaatcgcttttcccaaagtctactatacacattagactggtagcttgtatgttggccctacactaccatgtgaattagtttaacacttctcaaagacatctgaccaatcatttcacagagggaaagaaatgttgaaaaggcagataaaataaacctctgcttttcctcgtgtgtattcatgagtcaccagcttattggtttttcacatttagttaccgtgtctgtcagagaaggttctgaagcaagaacagcctgtcctgtcatagacttagaaataaccactggaactgcagcggccacatgccccacagtccaaccagtactcacaaggcagtaccagtgagaagacagctttgcagtcacactggagatcagagttccaggctgcagcatgtcaccaacgccagggaacctggcacttaggcctgttggctgctcagtttaactccggctaagctgccatgcatgggctcagctactccatcagtcatgttgtcaaactgttccccatcctcactgtcaattgtgctattctgccactcaatctgggggttagataagcgctcatcattctcagatgcattcttccactgtgactggtccttagaccaaaacccttcaacttttccataggaactattcttccatttcaactgctctctgtcaccttgcatggtagccttttttttggcagctggcttactgctccttgcatcttcgctttgggaagactcgtcagaccaggttcctggtttcatttcgcaggtattgtcctcaaagtctgacacttgttgggatccaggcccactctcagatggagaagcaccgtctttccactcaacaacatcgtcttggtcaacctcactatcagatgcattgtgcattagtttggttggttcctcagtcaaatgaatagtttcgtattttgaaccatcctctttttggtctagcttctcctcagattctgaagcatcctcaggaattaccttcagtacatgttcctctgggttatcgttagagattttaggttcaacttcaaaaacagggtcaaaagggctaccactttcattggattcttcttccaaattttcaaaactgtctgaggaactgtcatcttccttcccaaggttgagctttttgtcagcagtcttactagcattgactctggaatccttctcatcatgattttcaaatagcccctcagcatcaaaatccatctcatgcttgactttatttaattctttcatgttaaaccccagcaacacgccaggcttgtacttttcacaatcacggacacacttcttccttttgttactaaaatgggaagcgatgtcactctttccaatacccataaactggctgctagcttctcaatttctctcctggtgggatagggctgtttgggtgaaatactttgttagaaagcttttcctggcttcataggaatcatcttcagtgacccttggggtctaaagctaaaacaacaggctcttcaggcttctcttcaaagaagctgggtgaatcactatcatcatctaactttcgttttttcagtaagggaaattccatttgctcgtaagtgcgcttcacaggtgccagacttggagactgattaagccgagagggtgcatttgtcttatcctggccattttgggtctttccaacgcccctgcagtgaactagatgcagagtgatagttgaggcggtcatgttgctggtatacacaccaaggcaatggatacatttgtaggtgagctttttctcaactggatgaaccgtctgaataacttggtgcctctctcgtaagtgatgtgcaagtgcatcagatatgggtccttttaggattgaaaagcaaagaggacaaagggttttcccaacatcttttttatagggcactgcagcttgaggtgaactttttacagggatatctgccttttcctgaacctttggctgtggctttggaggaactggaggattattttgggcatggtaagcaacagattcagctggggcatccctcagattgtatgtagttaccaggagatggatgttagtgtgactaccctgctgcaatgtcaaatcaaaactcaaagtagaatctgttttaggtcccatctcttcatcaatgtgaaccatccgcatgtgtgcggccatcttttccacatcattgaaagttgaacggcaatatggacaagacagaccatgaattaacatatggttgagcagagtatctgtgggtaaatagcgattacagtagaggcatttgctagtaaaattgtgtattttcataatgtagttggctactgctgggactttctcagctttatgttctttttcgaagtgcacactatagacattttcaggaaaaagctcattacagattgtacatattttccacttttgagttgaggaagtgttacctgggggagggcctgtggcagctgcagcaggtttggaactggactgacctaacactctggatgcctgtgactgagagagggaaggagactttaactggcccgatgagagagaagaggcattagcagactgcagggagtatcttgctggtgcctgggacctctgctctgacccaagcccataagaccttccgtttccacttggaagtaactgctttacagactgagattgttgaggaatggaaactggtgcgttgccacctagacccagtctcattgactgaccaacactgtaaccctggcctacagatttgactccatagttgttctgctgcagatgaacactggacatcatgttgactcctgtagaatttaagttaggctttggtattgagagtcgattcaccatctgctgtgatggtaaagaccgggacatttccagaagcaagggaaccgatccttggtgggagtcccatgctcttcttgtcttgaggtttgggagcaattagcatcaagggtttggatcggggaaccactacatttgtgtgcccaatcatggcagtgacctgatagcctatacgttcatggtcttcgatgacatgctgtaccaaagcttcataggactttggcatgaaaaggcatcgcttgcagtgaatactactctcttctcgggcattcgagcctaaggggactgccccattgagtgatttttctcctgcctttgctatgtaaggtgctgccacatgctgaaaatgttccctgtaaatgtgcttcctaactatttcataaagaggatctcggtaagtgcacttcttacagtaataaacagcttgctctacactgtcagcctgcttaggtttaaggccatcatttttgtttttatctttgaaagtgctgaggctgctacttggtgcgctggcgttcggagcatgaaatattttaatgtgtgtttccaaagtctttttgtctgcattgaaggtacagtaggggcaattaaggagaatcctattttcaaagtcttcactatggacattgcggaaatgacttttgtaggcagagaagaattttgaggaaaatggacaagcgctgcagcagaaaggttttgtccgatagtcctggtttttcgtaagtgatgggtcccacagtcctacatcctcccatgtagtgtttttcaaataaaagtcattaggttcaaattgtttaaaatcttctatatgttctttacagtattccaacccaatgtcactaagtatttttttcacagttttccgggcttttcttaaactgccaagattgttgacaggaagttggaacatagtttcttgactcggcctcgaggcgcgcgcggggccggcgtgctcgggggccggacagcggcggcggcggcgggcggatggcggcggcacggcggtggcgccagcggggagggcgcgcccggggcctcgtcgcgctccggctcggcggactccggc

SEQ ID NO: 75359 - DNA, 4879 bp, Homo sapiens
agcggccgcgacagggccagcgagagccccgcagctctgccgcagctgccgcctcgccgcggccgggccggagtagcactgttgcgggagcgcggccttacgaggcggccggagcggtgggcacagctcggcgcggagcgtcctgtcaggcggcggccgagggcgtcgcggactctccccgcgatgatgccgatgatattaactgttttcttgagcaacaatgaacagattttaacagaagttcctataacaccggaaacaacctgtcgagatgttgtagaattttgcatggaacctggagaaggcagctgccatttaactgaagtgtggaggggaaatgaacgtcccataccctttgatcatatgatgtacgaacatcttcagaaatggggtccacggagggaagaagtgaaattttttcttcgacacgaggactccccaactgagaacagtgaacaaggtggccgtcagacccaagagcaacgaactcagagaaatgtaataaatgtacctggagaaaaacgtactgaaaatggggttgggaatccacgtgttgaacttaccctctcagagctccaagatatggcagctaggcaacagcagcagattgaaaatcagcagcagatgttggttgccaaggaacagcgtttacattttctaaagcaacaggagcgccgtcagcagcagtctatttctgaaaatgaaaagcttcagaaattgaaagaacgagttgaagcccaggagaacaagctgaagaaaattcgtgcaatgagaggacaagtcgactacagcaaaatcatgaacggcaatctgtctgctgaaatagaaaggttcagtgccatgttccaggaaaagaagcaggaagtacagactgcaattttaagggttgatcagcttagtcagcaattggaagatttaaagaaaggaaaactgaatgggttccagtcttacaatggcaaattgacgggaccagcggcggtggagttaaaaagactgtaccaagaactacagattcgtaaccaacttaaccaggaacaaaattcaaaacttcagcagcagaaggaactcttaaataagcgcaacatggaggtggccatgatggacaagcgaatcagtgaactgcgtgaacgtctctatgggaaaaaaattcagctgaaccgtgtgaatggcacgtcatcaccacagtcccctctgagcacatcgggcagggtcgctgctgtggggccttatatccaggttcccagtgccggaagctttcctgtgctgggggaccctataaagccccagtctctcagtattgcctcaaatgctgctcatggaagatccaaatccgctaatgatggaaactggccaacattaaaacagaattctagctcttccgtgaaaccagtgcaggtggccggtgcagactggaaggatccgagcgtggaggggtctgtcaagcagggcactgtctccagccagcctgtgcccttctcagcactgggacccacggagaagccgggcatcgagattggtaaagtgccacctcccatcccgggtgtaggcaagcagctgcctccaagctatgggacatacccaagtcctacacctctgggtcctgggtcgacaagctccctggaaaggaggaaggaaggcagcttgcccaggcccagtgcaggcctgccaagtcgacagaggcccaccctgctgcccgccacaggcagcaccccccagccaggctcctcacaacagattcagcagaggatttccgtaccgccaagtcccacgtacccgccagcgggaccacctgcatttccagctggggacagcaagcctgaactcccactgacagtggccattaggcctttcctggctgataaagggtcaaggccacagtctcccaggaaaggaccccagacagtgaattcaagttccatatactccatgtacctccagcaagccacaccacctaagaattaccagccggcagcacacagcgccttaaataagtcagttaaagcagtgtatggtaagcccgttttaccttcgggttcaacctctccatcgccgctgccgtttcttcacgggtcactgtccacgggcacaccacagccttcagccacctttcagaaagtactgagaaagagcctttagcaggatggccccgccgaccccgcagatggcagcaccgtggagagcctgccacggccactcagccccaccaagctcacgcccatcgtgcattcgccactgcgctaccagagtgatgcagacctggaggccctccgcaggaagctggccaacgcgccccggcccctgaaaaagcgcagctccatcacagagcccgagggccccggcgggcccaacatccagaagctgctgtaccagcgcttcaacaccctggccggtggcatggagggcacccctttctaccagcccagcccctcccaggacttcatggtcaccttggccgatgtggacaatggaaacaccaatgccaatggaaacctggaagagctcccccctgcccagcccacagccccactccccgctgagcctgccccgtcatcagatgccaatgataatgagttaccttcccccgaaccagaggagctcatctgtccccaaaccacccaccaaactgccgagccggcagaggacaataacaacaacgtggccacggtccccaccacggagcagatcccgagtcctgtggctgaggccccatctccaggggaagagcaggtccctccagcacctcttccccctgccagccaccctcctgccacctccacgaacaagcggaccaacttgaagaagcccaactcggagcggacggggcacgggctgagagtccggtttaaccccctggcactgctcctagacgcgtctctggaaggagagttcgatctggtgcagaggatcatctatgaggtggaagatcccagcaagcccaacgacgaagggatcaccccactgcacaacgccgtctgcgccggccaccatcacatcgtgaagttcctgctggattttggtgtcaacgtgaatgctgctgatagtgatggatggacgccgctgcactgcgctgcctcttgtaacagcgttcacctctgcaaacagctggtggagagtggtgccgccatttttgcctcaaccataagcgacattgaaactgctgcagacaagtgtgaggagatggaggaaggctacatccagtgctcccagtttctatatggggtgcaggaaaagctgggtgtgatgaacaaaggtgtggcgtatgctctgtgggactacgaggcccagaacagtgacgagctgtccttccacgaaggggacgccctcaccatcctgaggcgcaaggacgaaaagcgagactgaggtggtggtgggctcgccttggagaccgggagggctatgtgcccaaaaacctgctggggctgtatccacggattcaaacccccgacagcgaacactcgcctgaacttccttttggagcaccgcatggtcttgccagctaccaggagccacttaagagattattgtgctgttttccaggaaagctgcagctagaaaatggtcttaatggtgctcactttagcagacagcgtccacaatgtgaatcctacagtttccaggtgaggccctttctccagtttgcccattaactgggagaggtactttcgcctccaaggactgaattttgccaattactataaatccaaataaatacccactttcaaaacacccacccctcttgccattaagaagtcccataacccccggttggttgccagtgaagacagaagctcttactgacttggccccgaggcattcaccccctccagcagtgaacactgtccgccgctgtgaggcctgctcccctgcgaccgctctgccccccgtcaccgaatcggacactcatcctttctcacacttcccacacatgatccttcttcccttcatcaccaaaggaggcctctgtatgggaaacatgttccagtgttggtggcccagtgtgtatgcctcccagtacccactctgctcggccgccttgggggttccgcttcctgttccagttcacctaaaggctgattgtgcaggcccagcactgtggctggactgccgcgccacgggcaccaggacccctaagaccaagtgacaactgggagagcctcagcatatactcttctcctccgatctcacagcctgtcatgctgctcagtgtggttctcacccctgcaagctcaaattcagttccctgaatggagtcaggtgctggaggccgtggcagcggagggtggttggggttggggctgggggtggactggtgtgagggcagaccagggccaggtagacggggctgtttggtgcctgaaggatggcagacgcctggtgtcaggaggggccgccaccaaggagcagcagctggggcagaggagctggggtcaggggccacccctctctgccgatctccctgcctgggctggctgtgaggcccacctttgtcccaggcccagcctcaaggcaaggagggcgcttcactgaggtgtgaattgtacgtacaggctttttatataccaaaagtattttttgactagaccattcaaagctacccgaactatgttggaaattttttttttctcattaaaatacaggcccttaggctctatttttcatgtatgagtcgtgtgtaatttatgtaaaaatgtgtgtacagactcactgatgcagcactgtagcccatcaccttggagcactgactgtacatagtgtggtgaagaaaagtgaacgcccttgtagagcagcccgaccacaggagcatggccgctgccagcccagacgctgctgacgctgtgtaaatgtgcacaataaacccgtctcaccccgaaaaaaaaaa

SEQ ID NO: 75360 - DNA, 7564 bp, Homo sapiens; identical to SEQ ID NO: 60780

SEQ ID NO: 75361 - DNA, 770 bp, Homo sapiens
cacaactttacacctgaatgaacgccaaacctctatggatatataaagggaagcttgaggaggaatttcacagttacagtgcagaagcagaggcaaaagaattaaccagctcttcagtcaagcaaatcctctactcaccatgcttcctcctgccattcatttctatctccttccccttgcatgcatcctaatgaaaagctgtttggcttttaaaaatgatgccacagaaatcctttattcacatgtggttaaacctgttccagcacaccccagcagcaacagcacgttgaatcaagccagaaatggaggcaggcatttcagtaacactggactggatcggaacactcgggttcaagtgggttgccgggaactgcgttccaccaaatacatctctgatgggccagttgcaccagcatcagccctctgaagggagctggtgtgtgctgggcgagtgcttgcccctgccagtgctccctaactggattggaggaggctatggaacaaagtactggagcaggaggagctcccagggagtgggcggtgtgttcaatggacaaaacccgttacccagaggattcccagttgcagtgccaagatggcagcacacgcacctacaaaatcacagttagttcattgcctgcaagtgcaagaggtacacccggcagcacaacgagtccagtcacaactttgagagcatgtcacctgccaagccagtccagcatcacagagagcggaaaagagccagcaaatccagcaagcacagcatgagt

SEQ ID NO: 75362 - DNA, 8872 bp, Homo sapiens; identical to SEQ ID NO: 60782
  misc_feature (1)...(8872): n = a,t,c or g

SEQ ID NO: 75363 - DNA, 1268 bp, Homo sapiens; identical to SEQ ID NO: 60783

SEQ ID NO: 75364 - DNA, 1834 bp, Homo sapiens; identical to SEQ ID NO: 60784

SEQ ID NO: 75365 - DNA, 6292 bp, Homo sapiens; identical to SEQ ID NO: 60785
  misc_feature (1)...(6292): n = a,t,c or g

SEQ ID NO: 75366 - DNA, 3963 bp, Homo sapiens; identical to SEQ ID NO: 60786

SEQ ID NO: 75367 - DNA, 2358 bp, Homo sapiens; identical to SEQ ID NO: 60787

SEQ ID NO: 75368 - DNA, 1837 bp, Homo sapiens
  misc_feature (1)...(1837): n = a,t,c or g
ttttttttttttgactggacttcattttttttaatagatatagatatagatttatatttatatataaaatagttttttacaaaaaaatcaaccaaacaaaaaattaaaatcaacttaaaaaaacaacaaccaaacaacaataacaaaattcaaacaggagcagagatggggctgaggcataggggaggcccctagcgctgccctgaggaggagggggtgagaggctgaggcactcagtctcccttctgcttgggtgcttgcacagtcccattggccagagcagtggggttgcctggggatgaggcatttggtgtctgggaggtgcctcgagaggtgtgtggggggcgcaggtaggtgctgaagagtttcccatagagtgggtcatggagggagaagttctggaactgacagagggagaggccttggctggatcctgcctggcacagctcagcatgcaaagctgtggcagcagggtggggtgaacccagcagcaggtgcaggatggtgctgaagccgtctttgtacagcaggcggttgggaccctctgcttgctcttcagcaaagagctcaaaggccagacgagttagctcttccaggctcctgcccccatccagagctgctagtgcaagggccacatctcggaagtccaccaaacccttggtatcctgctggaagtagccaaaggcaccagccaccgtctgaggatcagagagctgtagctgcctggcaaactcttcctggctgatcattcgactccggcctggctctgccccagcgtccacatagccagcggacagcccagccttccgaagcacttttcccagttcccagagctgtggttccaacgccaccttcagccggcccaccacaatcacaggtaagctccctacaaactcacattcggtggctggaatgcccagagcctgtgccatgaccctctgaacattgttggcatagagggtggggtccctgctctcctcagggctggggtgatacacaggaaggaactccacatccacaatgctgcagggctgagaggctgtgagccagaggactttgagtactccaggacccctccatgcccagctggtggtgtccagactgttggggtagcggatgaggacaggctgcacaggcacccctgcgatgaaggctccctaaatccccatttctggtttgaacttaagcaaagccttcttgttggaacaggtgccctcaggaaagaatagcacctgcggccacttgcctcctgaggtggcccgccttcggacctcctccaccactctgcgtcgagaagccgggtcatgccgggataccaggatggcttggttgaatcgaagaagggctccaatgacaggaacggaaaggttctcagctcgggacacaactttgggcaggtcacagggcagcagaacaatggggtcaaagaaagtggagtgtggggcagcaacaaggacaggggcttgaaggcgagaggctcgctggccacgaacgcgaatccggaggaagcccagcaggaaaaacagcaggcggctcaggcctagcaccccgttgtggcacacagtcttcctccatcctgtaattggctcctgaagctgctcctcactaagaccggccacttgaagccaggcaaagggccagaggagaaagaggacgataaaggccagaagcactcggatgggggccagcaatgcccccaggaggcagaactttgccagggctcaaatggccccattttcctatcctcacgggtccttccgacgcccgctccccacacacctcgtgccaagcttggcgtaatgaggtcaaacagtnctcatnntcatncccccccgcg

SEQ ID NO: 75369 - DNA, 3096 bp, Homo sapiens; identical to SEQ ID NO: 60789
  misc_feature (1)...(3096): n = a,t,c or g

SEQ ID NO: 75370 - DNA, 2930 bp, Homo sapiens
ttttttttttttgggagacacttcttttatttaggaaggaggtccttcccctactggcgccgggctccctgccaagagggtcggggtgaccagccgggatccagaagcactgctcctcacacacagtgggagtggaggatggcttccccgcagcctctttagaaagcccaggagttctctttatttcagagaagggcatttctatacaagacatcattccattacagtcgtcacttccaactacaggctcagggagacgactcttgatattcataggtatatatttactttaatcatattttagaaatcagctcttccacactaagatttacaataaaaataaaataatttgttctgtaaactatagtagaaagtttcaaatgtcttaaaaactatcttccatacaatggaaaaaggcttttgtgttcttttgggcaaagaagacccaaatacgctgagagaagacgcatgggcgtgttgctggagtgatgctggaagcacttctttgctacagacggttgctaagagaacagagtcactttctccccttcagcctggaagtccaactcttctcttgcttaagaatctaacctcgggatcttccaagatgcttaaggctgctctgctgttgcctggtccttggcagcagcaacaagctctgcgagagctgagaagctttttatgtcacttgcttgtagtcccaacttttgtatctgctctcccaagtactcaacatctagggccaactgcagcctgattttgtcgtcgtcgctcatgccaccactgggaccgacggggttggcgggagtggtttttctggcttgtttcagccttttcaggctctcttccatcttcttcacagagtttaatacatctgacacggtttcatagtacttatgagtgctttcactgagagtgccttctagccactgctgaattattgcttgtttgagcttatccttgtgtccgctctgaagctggaataagggcttcagagcactgtccacataggaggaagctgtggttgggacctccttattggttcttcggtaaagcctgggaacctccagggcgctttttaggaaaccgaagcaagagtcacttaaatcctggatgatcttgctactcaaggagggcacacaggctgaaaaagagctctgggagtcctccagggctgctgagatagaagaaaaattcttaaagccaatcatttcaagttttggcttgattatttccaagagttctggaagctgctcctgaagcttgtccaggtctgcaaccacatacacgagctgagtgcgggaaatggaaaccacaggctttgtttccgaaggaccacttccttggtcttcagtgtttccttgggtgatggaaggttctttgctaccagttaccaaaggtttcttgatctccttgggactttcattagaaatgggcctgagtgaaagctccattggacaaacacagagtatcgtgcccaaaatctgccagagtgaagtctccacaggcgatgcaccagtaatggcaagaacatctcatctgaccaacacctcctaaggctgctccaagttctatgagaagccaaaaggcaatacggactttcagctggggcatcttccaggacatctgtaagtgctgcttctaaggatcccgctatttctctaaatcttatttgaaaataaacaggcaagttccacttcttattgaagctgtgataggcaggatgggctcttaatctctttacactagcctgtgatccacactgccgttccaatcttctgacaaaatccatacttatggtatatttctcatgaaatgcatcgggattcccaggattaaaaagcgagggtaacttttcttctaatccttgtactatttgtggccaaacagaattcaccaaaaagtcatatccaggaacagtattgcctttttcactggagatggcacctcctgtgacttctcgaagaaggcggcaatggtgaggaacaaactccaggagtttattatacatgacctgaaggccattgggatgagattcaacaaactgctctataatcacctcgtctatgtatggtttcactagtacttggccaactaaggcctccgcgtcccgtgtcttgtcaatcgtggcgtaagtccgcaagcagtgccgtattatatcgacgtcagacgtctgaaggccttctaataggagaccttccagtgactgctgtaacatggctgtaatgccagctatacgcggtcttactttgtccaaaagaggcatgccttttgctttgacaagcatgaaactgtaactgattaaattctgtggcaattctctccaaaatttgtccagtcaaaagggggctgcttgcttctagtgcagaggtttctttagaactttgagagtttaagattttttcaattttctcaactgaccgaataacttgtataagcctcaatacacacatcttttttttcctaatgtcctcttgtttagacattcgttcatcaactgcccgaattccttcactgacagacgatctaaggctcagaacctcttctcgtaattgtcccaaaggcacagaaagctggttgagggctttgtccatgccaaccaagtttgttgaaagattgacaaaaatctgcataatccttgttgatgagttcgaccatggctgttttaagaagtttatagtagagctccaggtcatctctcagttcttccagctggacccgcttcctacagtcagacacaaaatgatcgacatcgaaatcttccttcatgaactcgtccttgtcgaagcagagcgtgtccggccccttgggcaggttcatcctacttttctccatcccgccggccaccgcctctcagtgccaagatcccagcgagaaaacgcaggaggatgcgcagaccgactcggcggccgcggccaccgccagtttcc

SEQ ID NO: 75371 - DNA, 696 bp, Homo sapiens; identical to SEQ ID NO: 60792

SEQ ID NO: 75372 - DNA, 2374 bp, Homo sapiens; identical to SEQ ID NO: 60793

SEQ ID NO: 75373 - DNA, 1920 bp, Homo sapiens
gtttatcttactacatggttatttttgtagactcttggtatcttttatcctaagacacccacttcttgatttcatgcagcgccacatgaactatatattatacataaagaagaacaaaaaagggaatgcaggttataaccattggccctttaattgaagagtctaaaaactagaggtctgtaacagaatactaatcctgcagaacaagggacagaaaagtcaggcgaggcaagcttgtcttcgtaacctgggctctcaattggggtgctctcttacatttcaattgaatatctgtttttaaacctcccttcaacagtcagggtgtctgtctattttgtggcttccaaaattctaactgcaaaataaatgaccatcttatcatgttttcccatggctatcaggaggatatagcaattttatagattactacatggtcaagaatctacgcatcggatgtattcttttcttcttctttacttgatgcattcaaaagcaacccctggatttttttcaatgtaaaaaagaaaaatagatacccatgccaaaattcatgggtgtaaacagccaacagagccaaacttacaaagaaaatgaaagacttgtttctggacagtggttttattggtaaagatataagacatattggctctattaaaaactcaggtaataaagcactaagcttgatttttgtattgctacagtctctttcttctaaggggaagaaaatctccccaagaataggatgctacctgaggaattatgccgaataaagaaaaggaatggatggtcggcagtgaaattttcttcgggcatcaacatgcagaaagttgcgatgcctgctgtggcagctgccgcctctgttccctcttcattcacttccacaaatgacttgtggacaatttttgatataaaaatatctctggctcctgacatgccagacagatcagccttgctactgttaaagagatcctgcacacctaggcgggcgaggtcggagttgagagtgtaactctcttccagtttgaacctgggcaagctgacattaacttcaatgaaatcgagattctcaggtttagtccactcatgcaacttttccaaagtcaactgttcctcaatcttcttcaggcccgtggactcgtcctcaatgtcatccggcagcaggatgaccatgctgagctcctcgccttggtaaggcagttccagcacaccggaacttaaggtcctcgatgtagccatatgcaaattttttcttctgatacatcattttcacagtttttctgtctttcttattcaatctgaatggtgcattcgtcgtggcttctttcatgaatttatccttccagtttcccttgaaatagatggcatttactagcacaagtttggtcatgttatcaaccatgcccgaagccaacagttccggaatttttccttctgtctgtcctttgacccactggtttatggtcttccttgcatcttcagaggcatgctgaaaatccacactggccaggtcagcaccatatgttttctgagtcgaaaccaagaactcaggaaggaaattgtaagttttctctccatataatctattagcaagtttcagaatataagacgctccacgtttgttgatatcagcattcagactctggaatcttgaatgaacctcttcaaccgtgttgaaatggaaagtcttggacagctgtgctgccgtgttacctctggtccccagaaaaaccatggccatagcagatgaaatgctgaagggagagatgaagatgtttccagccggattgttctcactcaacgccaggaacaggtccaaggcgaagcgggtgtttgctgagctcagctgctccatggtgaaaaccgacaggccgccgaggcacgctccgggctccgagctgggtgcgaggtcaggaaggaggc

SEQ ID NO: 75374 - DNA, 4179 bp, Homo sapiens; identical to SEQ ID NO: 60794

SEQ ID NO: 75375 - DNA, 2441 bp, Homo sapiens
tttcgtcgctgagctgaaggctgtgcggagcggcgcggcacagagcctgttgttgagctcagtatgtcgtgggaatccggggccgggccaggtctaggttcccaggggatggatctcgtgtggagtgcgtggtacggaaagtgcgttaaagggaaagggtcgttgccactctcggcccacggcatcgtggtcgcctggctcagcagggccgagtgggaccaggtgacggtttatctgttctgtgacgaccataagttgcagcggtacgcgcttaaccgcatcacggtgtggaggagcaggtcaggcaacgaactccctctggcagtggcttctactgctgacctgatacgctgtaagctcttggatgtaactggtggcttgggcactgatgaacttagactgctctatggcatggcattggtcaggtttgtgaatcttatctcagagaggaagacaaagtttgccaaggtccccctcaagtgtctggctcaagaggtaaatattccggattggattgttgaccttcgccatgagttgacccacaagaaaatgccccatataaatgactgccgcagaggctgctactttgtcctggattggctccagaagacctattggtgccgccaactggagaacagcctgagagagacctgggagttggaggagttcagggaagggatagaggaagaggatcaagaggaagataagaacattgttgttgatgacatcacagaacagaaaccagagcctcaggatgatgggaaaagtacggagtcagatgtaaaggccgatggagacagcaaaggcagcgaagaggtggattctcattgcaaaaaggccctgagtcataaagagctatatgaaagagcccgagaactgctggtatcatacgaagaggagcagtttacggtgctggagaaatttaggtatttacctaaggccattaaggcgtggaataacccgtccccacgtgtagaatgtgtcctggcagagctcaagggcgttacatgcgagaacagggaggctgtgctggatgcttttctggatgatggcttccttgtccccacatttgaacagttggcagctttgcagatagaatatgaagaaaacgtggacttgaatgacgtcctggtgccaaagccgttctctcagttctggcagcccctgctcaggggcctgcactcccagaacttcacgcaggccctattggagaggatgctctctgaactgccagccttggggatcagcgggatccggcctacgtacatcctcagatggaccgttgaactgatcgtggccaacaccaagactggacggaatgctcgccgattttctgcaggccagtgggaagcaagaaggggctggaggctgttcaactgctccgcctcccttgactggccccggatggttgagtcctgcttgggctcaccttgctgggccagcccccaactccttcggatcatctttcaaagccatggggcagggcttgcaagacgagggagcaggagaagttgttgcgcatctgttccatttatacccagagtggagaaaacagcctggtgcaggagggctctgaggcctcccccattgggaagtctccatatacactagacagcctgtattggagcgtcaagccagccagctccagcttcgggtctgaagcaaaggcccagcaacaggaggagcagggcagtgttaatgatgtcaaggaagaggagaaggaggagaaagaggtcttgccagaccaggtagaggaggaggaagaaaatgatgaccaagaggaggaagaggaggatgaagatgatgaagatgatgaagaggaagacagaatggaggtggggcctttctctacagggcaagagtcccccactgccgagaatgctaggcttctggcccagaaaagaggagctttgcagggctctgcatggcaggttagctcagaagacgtgcgatgggacacatttccccctaggccgaatgcccaggtcaagaccgaggaccccagcagagctcatgctggagaattatgacacccatgtaatcttttggaccaagcctgtgcttagagcagcggctggaaccctcaacatgcaaagactgacaccttgggcctgaagctgtggtgtcggcagttggcaactgcagcaacagcagcagcagcaactttcgaggggcctttctcttggaagccaggggaagcttgcattgggctccaaaactggcctgcagctcttctgattggccatccctggtgcaagtgttcatccagccgtgccagggcatctatttatcccctagtacaactgatgctccctgagacaacctgggagacagcctggatcagccacatcaactcagttgtccaccacaggggaattttgaatgtcttttgtttttgttttgttttgaaaaataataaacaggcaactgtaaaaaaaaaa

SEQ ID NO: 75376 - DNA, 5470 bp, Homo sapiens; identical to SEQ ID NO: 60796
  misc_feature (1)...(5470): n = a,t,c or g

SEQ ID NO: 75377 - DNA, 1913 bp, Homo sapiens; identical to SEQ ID NO: 60797
  misc_feature (1)...(1913): n = a,t,c or g

SEQ ID NO: 75378 - DNA, 750 bp, Homo sapiens; identical to SEQ ID NO: 60798

SEQ ID NO: 75379 - DNA, 1583 bp, Homo sapiens; identical to SEQ ID NO: 60799

SEQ ID NO: 75380 - DNA, 2340 bp, Homo sapiens; identical to SEQ ID NO: 60800

SEQ ID NO: 75381 - DNA, 1156 bp, Homo sapiens
  misc_feature (1)...(1156): n = a,t,c or g
ttttttttttttgtcgccacagcagcggacacgtttaatggcaggcgcctctacagttacaagacatgcctgaggtcagttcgcccccttagggggcactccccgagctaaacacagatgacagcgacccagggtgctggaggcccggggtcacctgaggactgcagaagtcctgcgctccgctaactgtgtggacacgcggctgccaggggcacaggtaggcaacatggatgggaagagagcccaggccgcccccgtctcacagctgcagagcacgcagaccacggcactgcaggccaaccaggcagagctgctggtgcgacacatcctggggctgggctggtcggggagaagctctccggctgacgctgcctgggcctgcccctgcagggcccgggaaccgagcccaggcctctgtttctctgagaggctggagcagagcccttggtggccctggaaagcggctgcaaggtggccttagtcaggggaggcacgcgggcgtcgcgtccagaatcttctgggctatggaggtgagtgcagcgaaggcggggctcccagggaactcctggatgaagtcgtggccctcctccagggtcctcatgagcgcagggtccaggggcacggagcctaagaagggcaccccggcgagctgggccagctcctctccgccgcccctggagaagacgctggtgcactccgtgcagtgtgggcaggtgaagccgctcatattctccacgattcccatcacccgcaagcccgtcttcctacagaaggtcagctcgcgcctcacgtcccccacggacaccgcctggggcgtggtgaccacgagggcccccaggggctggtagggacgcagggcttctatggtggccatgtgctcatcggaggtccccgggggcgtgtccaccaccaggtagtccagctccccccaggccacgtcggacacaaactgctttatcagcgcttcttgcctgcatggcgcagtgccagggccagctccgtggagatggtgcttttcccaacgcccccctttcctgagaggaccaggatgatgtgcctgacgccggccaggtttccaggcntgccgccgcctccatcccgccgcctccaggagctcgnggctgcacgtccttacccgcggccgtcagcctcccag

SEQ ID NO: 75382 - DNA, 4379 bp, Homo sapiens; identical to SEQ ID NO: 60803

SEQ ID NO: 75383 - DNA, 1596 bp, Homo sapiens; identical to SEQ ID NO: 60804

SEQ ID NO: 75384 - DNA, 2526 bp, Homo sapiens; identical to SEQ ID NO: 60805

SEQ ID NO: 75385 - DNA, 5840 bp, Homo sapiens
cgcgcccctgccgcggcccctagctcgcgcctcagctccctcccctttccgggcaggcccgtcccgtcagcaaggcagtgagcaccgcggccagcagagggcggtccggacccaagtctgcagcggcgccattggcgtgtggaaaatgccaccagatggcgggttaggattgcagctccgttgaaggcgcggcccccgctcccgaacccccggcgaccaccccgtaacaacccccccacatcgggaataacacaccggagacttttggggggaaactaggtcgatggtcggcggcgcccggatgggcagctgaggattgcctttgaggttattttaaaagttttgagttgtacagcacttgattattttgctgcattgtgaaaggacctctccagcaatgattacttcagaattaccagtgttacaggattcaactaatgaaactactgcccattccgatgctggcagcgagcttgaagaaacagaggtcaaaggaaaaagaaaaaggggtcgtcctggccggcctccatctacaaataagaaacctcgaaaatctccaggtgagaagagcagaattgaagctggaattagaggagcaggccgtggaagagctaatggacaccctcaacagaatggggaaggggagcctgtcacattatttgaggtggtgaaactggggaaaagtgcaatgcagtccgtggtggatgactggattgaatcatataaacaagacagggacatcgcacttctggatttaatcaacttttttatccagtgttcaggatgtcgaggtactgtgagaatagagatgtttcgaaatatgcagaatgcagaaatcatcagaaaaatgactgaagaatttgatgaggacagtggtgattatcctcttaccatgcctggacctcagtggaaaaaatttcgttcaaacttttgtgaatttattggagtcctgattcgacagtgtcagtatagcataatttatgatgagtatatgatggacacagtaatctcccttttgacgggtttgtcagactcccaggtcagagcttttaggcatacaagtaccctggctgccatgaagctcatgactgctctggtgaatgttgccttaaacctcagtattcatcaggataatacccagagacaatatgaagccgagagaaataaaatgattgggaagagagccaatgaaaggttggagttactacttcagaaacgcaaagagctgcaagaaaatcaggatgaaatcgaaaatatgatgaactctatttttaagggtatatttgttcatagatacccgtgatgctattgctgagattagagccatttgtattgaaagaaattggagtatggatgaaaatgtatagtgatgccttcctaaatgacagttacctaaaatatgttggctggactcttcatgacaggcaaggggaagtcaggctgaagtgtttgaaagctctgcagagtctatataccaatagagaattattccccaaattggaactattcactaaccgattcaaggatcgcattgtatcaatgacacttgataaagaatatgatgttgctgtggaagctattcgattggttactctgatacttcatggaagtgaagaagctctttccaatgaagactgtgaaaatgtttaccacttggtgtactcggcacatcgccctgttgctgtggcagctggagagttccttcacaaaaagctatttagcagacatgacccacaagcagaagaagcattagcaaagaggaggggaagaaacagcccgaatggaaacctcattaggatgctggttcttttctttcttgaaagtgagttacatgaacatgcagcctactttggtggacagtttatgggagagctctcaagaactgttgaaagactgggaatgtatgacagagttgctattagaagaacctgttcaaggagaggaagcaatgtctgatcgtcaagagagtgctcttatagagctaatggtttgtacaattcgtcaagctgctgaggcacatcctccagtgggaaggggtaccggcaagagagtgctaactgccaaagaaaggaaaactcaaattgatgatagaaacaaattgactgaacattttattattacacttcctatgttactgtcaaagtattctgcagatgcagagaaggtagcaaacttgctacaaatcccacagtattttgatttagaaatctacagcacaggtagaatggaaaagcatctggatgctttattaaaacagattaagtttgttgtggagaaacacgtagaatcagatgttctagaagcctgcagtaaaacctatagtatcttatgcagtgcaagaatataccatccagaacagagttgacatagctcgaagccagctgattgatgagtttgtagatcgattcaatcattctgtggaagacctattgcaagagggagaagaagctgatgatgatgacatttacaatgttctttctacattaaagcggttaacttcttttcagaatgcacatgatctcacaaaatgggatctctttggtaattgctacagattattgaagactggaattgaacatggagccatgccagaacaggtagtcgtgcaagcactgcagtgttcccattattcgattctttggcagttggtgaaaattactgatggctctccttccaaagaggatttgttggtattgaggaaaacggtgaaatcctttttggctgtttgccagcagtgcctgtctaatgttaatactccagtgaaagaacaggctttcatgttactctgtgatcttctgatgattttcagccaccaattaatgacaggtggcagagagggccttcagcctttggtgttcaatccagatactggactccaatctgaactcctcagttttgtgatggatcacgtttttattgaccaagacgaggagaaccagagcatggagggtgatgaagaagatgaagctaataaaattgaggccttacataaaagaaggaatctacttgctgctttcagcaaacttatcatttatgacattgttgacatgcatgcagctgcagacatcttcaaacactacatgaagtattacaatgactatggtgatattattaaggaaacactgagtaaaaccaggcagattgataaaattcagtgtgccaagactctcattctcagtttgcaacagttatttaatgaacttgttcaagagcaaggtcccaacctagataggacatctgcccatgtcagtggcattaaagaactggcacgtcgctttgcccttacatttggattggaccagattaagacacgagaagcagttgccacacttcacaaggatggcatagagtttgcatttaaataccaaaatcagaaaggacaagagtatccacctcctaatctggcttttcttgaagtactaagtgaattttcttctaaacttcttcgacaggacaaaaagacagttcattcatacctagagaaattccttaccgagcagatgatggaaaggagggaggatgtatggcttccactcatctcctatagaaattcattagtcactgggggtgaagatgatagaatgtctgtgaacagtggaagtagcagcagcaaaacctcatcagtaaggaataagaaaggacgacctccacttcataaaaaacgagtagaagatgagagtctggataacacatggctaaacaggactgacaccatgattcagactcctggccccctgccagcaccacaactcacatccactgtactgcgggagaacagtcggcccatgggagaccagattcaagaacctgagtctgaacatggttctgaaccagactttttacacaatcctcagatgcagatctcttggttaggccagccgaagttagaagacttaaatcggaaggacagaacaggaatgaactacatgaaagtgagaactggagtgaggcatgctgttcggggtctaatggaggaagatgctgagcccatctttgaagatgtgatgatgtcatcccgaagccagttagaagatatgaatgaagaatttgaggacaccatggttattgatctgcctccatcaagaaatcggcgagagagagctgagctaaggccagacttctttgactctgcagctatcatagaagatgattcaggatttggaatgcctatgttctgaagtctgaagaaaatttacaaatctggaactctattatttagagctagaggcctatatactgtgatagcttgtatggggaaaaacacttttgatgtgatctgatttgttttttaatcaaatgattaaggtcaatccctttttgcagtgacagaagaggagcatgtaaattacccaagggaatgttggtgaatgtcaactcagaaagactgacctgaaaatcatttgtgtcctactattggacttatcccaatacagatgtgtgtgtttttctggagggaggaagaaattttaaatttttaaaacagctgtcaagataaacactgttatacacctgttttatgaaaactcaacattgagtaaaaaaaaacatatttttaactttattttcctgttgtacaatttaaaaaccgttttaacattttgcctttttatgttttaaaagctaaccatttttattaaacctatgaggtaaggcaggctcatcctaattgcgaagagtgttttgggagttcactggggatttgggttggacctttgtggaacacaaataatgaaggagcagaacattgacaagctaagatgaaattctgacatagtacatctctgccaaaaaccacacaccctctgtggatatggatatgaattcccagattttatatactcttgaataaaggtttatttttatttataagtgggcataaaataagaaatgtccatgcagccatttttccaacagatgctgtacaccgttcattttatatagactagggagattcaaatacagtgcattttctattggtatttgttctgtgcatttttagcaacttctaccagcaaataaagtattctcagtaaaacgaaaatgattctcaagttatcagtttgctgtttttaccacttatttcatgccctgccaaattcaagttacacagacttccattttcttaagataatcaatcatgaagaaatcctttatcaatcattcaaaagtaattttaagtgtaacataactgtgtttacttcccatgcacttaatacccttatgcgctaattttgtgaattaagttactgattatagaagtatgtgctgcatagaagtctgtgcttagagggtgaagttcctaagcttaccttgaattacagctacatttcagtgttaaatgtgcatattaagaataattcttttggggaaagaaattatgaatcttcaggacagtctacaatggtttagagttacattctgcctagacttttatgacttgctgctattgttttaaaaaccccacttagtctcttcctttctgatttctaaagtaagcctcagaatttccaaaccaattcatccacagctgtttctgggctggtttttaaagtagctgcaacagaatcatgaggctttccctttttatcaaatacgaaaaacattttttaaaattctgcacacccagtgatcatcttttgtgcgggaaagcaagatgatgatggatgattttattcatccttttagtaaagacacaaaacatttttctcaacatttgtacagttctgaaaaaaacctggtcaccaaaaatatcttctctgctaattcagcaattcttgggctccagttaggggagctggggcctcactttctcccaggattgtgggcttcactggaagtga

SEQ ID NO: 75386 - DNA, 4093 bp, Homo sapiens; identical to SEQ ID NO: 60807

SEQ ID NO: 75387 - DNA, 1110 bp, Homo sapiens; identical to SEQ ID NO: 60808

SEQ ID NO: 75388 - DNA, 2522 bp, Homo sapiens; identical to SEQ ID NO: 60809

SEQ ID NO: 75389 - DNA, 1474 bp, Homo sapiens; identical to SEQ ID NO: 60810

SEQ ID NO: 75390 - DNA, 2121 bp, Homo sapiens; identical to SEQ ID NO: 60811

SEQ ID NO: 75391 - DNA, 2960 bp, Homo sapiens; identical to SEQ ID NO: 60812
  misc_feature (1)...(2960): n = a,t,c or g

SEQ ID NO: 75392 - DNA, 5275 bp, Homo sapiens
tttttttttttttttttttatctggagactgagttttgcactcgttgcccaggctggagtgcaatggtgcgatctcagctcactgcagtctccacctcagcaggagagcaggaatcttcagtgatccacgggcaaatatgcagccattgtgggcacctgttcctcccgcgacctttgtgcccacgtctctccctccagtacctactgcacggccccccacgtccgcctcctgccattgccagcaggtgccttgcgccggtacctggctgtgcttattcatccattatggtcgctctgtcactggtgccattatgtgctcacatgcccactccctcaggtttagaagtcgtgttgcccggcaacagaacaatctgctggcttagcctttggccaagttggcagctggacgaggacgctcagagcccagctcttgagagttcaagtatccgacagttccccactgctcccaggagcggttacccgggcactctgtgcccctcattcctgtttgggccaaggccgaggacctgcgagtagggctcagttgcctggagccccttcagcccatcccccagttcactttgcttgtgggatctccccgttgctcctgcccctggactgagtggcaggccatcctacaaacacccgcacactcgacatcagtggtgtcaagacaactctaagaaggttttccgtgatcctgcaagacctgtgttccatcctggtgattctgtcttcaatttcactgcacaggtaccacagtaagccagtgctgtgtgctccgagttccagggcatcccccagctcagccactacactgagcacaaggactctgtggggcccaggagcaggtagtcacccctttggggtccacaacacccggctgtccccagacttgtgtccagggaagatagtgttgagggccctcaaggagagcggggcagggatgcctgagcaggacaaggaccccagagtccaagaaaatcctgatgatcagagaacggtccccgaggtcaccggggatgcacggtctgcattttggcccctgcgggacaatggaggcctctctccctttgtgcccaggcccgggcctctgcagacagacctccatgcccagagctcagaaatcagatataaccagacatcccagacatcctggacgagctcgagcaccaaacgaaatgctatctccagctcctacagctccacgggaggcttgccggggctaaagcagaggaggggaccagcctcatcccgctgccagctgaccctcagttactcaaagacagtgagtgaggacaggcctcaggctgtctcttcgggtcacacacggtgtgaaaaggcggcagatacagcaccagggcagacactcgcccccaggggtggctcccccagatcccaggcctctaggccccgtagacgcaagattcccctgctgccaagcaggcgaggggagcctttgatgcttgccacctcccttagagctggggtaccgggtcacggctgaagacctgcacctggaaaaacaggcggcatttccagcgcatcaacagtgcactgcacgttgaggacaaggccatctcggactgcagaccctcacggccttcccacactttgtcctcacttgcaacaggggcttctggtctgcctgccgtttctaaagcacccagtatggatgtacacgcaggagacacacaagtcccaagactgcctgggcctactggcccccttagcatctgctgcaggggtcccctctacagctcccatgtctgggaagaagcacagaccaccaggccccctgttctcctcctcagatccccttcctgccacctcttcccattcccaggactcagcccaggtcacctcgctgattcctgcccccttcccagctgcaagcatggatgcgggcatgagaagaacaaggtgtggcacttctgctcctgcagctgccgcagcagcccctcccccctccacattgaaccccacgttggggtcactactcaatgcagtggatgaaggcccctcacatttctgggccctcagccacagctgcagcaggtgcccagaggtcagaaccagagatcccagacctcccggaccagctcgtgccccaaaatgaaatgccatctcgagcccctacagctctacgggaggcctcccggaacaaaagcggagaagggggccagcctcatcccactgccagctgaccctcagttcctcaaacacagacccagggtgcatgcccatctccagcccagggcagctcccctgtaagctgggtgagctactgaagccaaggtgggaggcagctgacaacaccacccacggcccatgcagaggtggtagaaaggctggactcagcaggaacaccaaatcccggaccaggcagaaaccacccaagactgaggggctcgtgccagagcggtggccacagggctgaatggtcgctgagacagagatggaagccaggacaagggagcccaccgggcccagatagagacttcagaacccactcctgagaacagcggagccaggcgcttagaggaagaccaaatgctgccaggacacggattgtccagggattacattccagcatcttattagaggacggaagcagagggtgctgtttcaacgccaccaccaggagagaggcagaggggctgtgccgtgctagagtcctcagggagggagtgacctcgaccctggctgtgctgcaagctgactccagccttgggctcagcagcacccggtgaacagcagcaggaggagccgctagagcagctgctcatgggcagagcagcccttgggcaactcctgccaccaccccctccccagggagcccaaggcaggggaggctcagcatggaatgaaacaggggagtgagggacacaaggaggtgggaagtgggagggtcccagccccaccaagtacgcagagaccccctcgtcgtcctggacaccacaggggcacctgcaggctgggagaccaggtcctctgtgcatgggcccgggaggcagacctgccccaagggtgatgcagaggccacaggtgctgcacgctccaagcgcccactctagacatcagcctccaggttgactaagggtcaggtcatgtttgaaaccaatgcttggctggaccgggacccatggcaagagcacctggggcaccagtgtttagccctggtctgcaggaaggaggacagcagactttaggaccccacagcacggcagtgcttgaccatttcacccactttgggcttccttgagaaatatggatggggacccctctggggatgggcaaggccttccaggataggctcagttttggtcccctgctttttgaggttgggttaaaattccgaccatggcagaggaagcacagctcaggttcccacacctcacttttcacagcctctgagggcagcagtgcacgtggaggagacgtctcccatgaggccaaggcctccagtgctcaccgatgccctctgcgaagttggggtagaactcgtcagtgaagaggggctcgggcagctcacggaaatacagcttcagcgtgcctgcgatggcgttcacgtccatctcgctcatcatcactgacacgtccttgttatctggaaagagcacggaaatgcagcggcctccttgaagatcctgataaatgaagaaaagacacagagaaggatgtgacatgcctgggccatggagcactcttgagatctcatcgtggacaccactgcccacacctccatcccgtcctgcgcaggccgacactcacttgaacgttgaaggctgccttcagtgcctggatgtctgcggccacaccggccggacacgtggtagatgcccacctcctccatgcctcggcgctcgatctcctccacgcactggcgcacgatgtagggcaccttggacctctctctcctgtgggaggggggaatgttctcagtgtcctaacagccctgcttgggccataacacaggagacctgctccctatctgcgcacccggaggtggggtgaggacggtgacgaaggtacccaggtctggggctgcacacagagccttctgcatgcctgtcctccctctgcaagctctgtcttcacggcatgtgctttctcaggaacctttcaagcggccagaacccctgcgaatcacacatgacctttgcgggaaggtcaggaggcctgtctaagtcaagtcagcacgggaagggcatctgacagattccaggcctggggttagcagcctgtgcccccggctgggagatcagacccggtgttggtcctgccacccacgtgctgtgtgagaggagaatccctgacccctgccctgggccttaacacacatccgacgaatgaatgaagggttgcctcagcaccggtgctccaagtcctgcgatgctaagtgcttttctcctctgagtcttagcaatggacaattccaatacctccacacaggacactagagtaagaaaccttcacagttagaacgcagtgctgtgcgggaggccttaacttgagttctgttttgcacctggatttaccagcacatcaaagctgcttcgcaagccccctcatcagcagggcttatgtgggggagctgctgatggagtcctcgctgctcatgcccacagccctcccagagtgctatgcgagtgggctgccgtgcagttgtggggtggggcgtggtgtttaagacacagataggagtccagggtatgactgatggaggccccggcccacgtgaccagcaaggtcagaggcccagccagattccatcctggggaagcaaatgaattctcagaggaagtggtctgtgtctgcatgaactgctctcaaaccaacaaataggcttttctttggcaactgactcgtgacaaagggtttaagaatgtttgaaaaaaaaaaaaggtggggggggaacagggaggcagtaggtcctggaaaagtaaattctttattttacaataagaaagtgattacatattttatttttttttataatggtggaaaattagaagtgattgtgaaaatgatgtctacccgccttgctgatgagtaggatgtgatttggctctttaggaaactgaatttgcagaactgaagaatattgatttataaagggcatggccattgacccagtccatcttatgcaaatctggatgccataaataatatttaaaaatgaaagtattggggtggaggttgcagtgagcagagattgcccccgctacactccagcctggtcgacagagtgaactctgtctcaaaaaaaaaa

SEQ ID NO: 75393 - DNA, 3010 bp, Homo sapiens; identical to SEQ ID NO: 60814

SEQ ID NO: 75394 - DNA, 7728 bp, Homo sapiens; identical to SEQ ID NO: 60554

SEQ ID NO: 75395 - DNA, 2228 bp, Homo sapiens
ttttttttttttgcatttataaaaactggcagatttattctgcaggggcccattttcaagaagctaaaggtgaaggtgggaggggagaagtttcctccccttctcctttctccctcatcttatttcctccaaggggtaaaaaaaatggcctggaccccaaaacctacccaaataaaaaatcaaaaaactgaggttccaaaaagttacagcatcttatttcctcatagaaaaggggaaggagccagagggaaggggagtccctggggtggggggatatctcacccccagcccggtgagacatcccctccccttaaatagctgccccaaatggggcaagcccagggctatagcatttaaaaactcccacatcccattttatcaaaaccaaagagaaaaaaaaatttcccttttcccccaaaacccaaatatatatatatttttttttcttaaaaaaaccaaaactttgaaggcattaagcgttaaagtgaatctagaacaagggaatgtgaaattccctccttccttcccccttcctgtggggttcattggtgcatccccagcagagggaccggccccaaggggatggcagaggggaaggaccaaagggagaaaagggcgggggcctccccagccaatcagcagccagtgtgggtgtgagcagggaagccacacccccttggagttttccaagtgggatggggagtgggaacgatgcattcctgtgtagtcttcagccaattccaagtcaagtagaggcagggaaagcagggtgacaggccgggtgtgcggaaaggagaagcgggtcttctgggtccctgtggtcagggagaaccccgcttcctcagctcctggacgaaggcttcaatgatttcctctttcactttctgcaattccttcttcacctcttccagaagctcctgtttcaccctctgtaggtccgagtaatcactggagctgggcgtgcagggttgggtctcggaagtggtcaccgaagaagacgacttcatccttggcaaggttgtgctgttcttctcccagggtctccgcacagattcactctgggccgggactctggcctctggctcctcctgattggcagattcatccttgggggttttctccccaacttgcgtggctttccttctccgggccagcatggcgttcatctcttccatgagtcccccacctccgcttcgaccactctcagctttgggggctgtgggcccccgtgaaggcctcctcctgcttgctgactttcctgagtttggctccagcaatagctgcggccaggcctggggccccagctcccccaccaccagggccctgtgctgccgggagagggggtgcagggggtggtcctccccctgctccgtgcgctgcagctgggacccccgaagggggcaaacctgggggtggggggggacctggaggagggggaggtcctggtggtgggggtggacccccagcggggggagcaggtgggcctcctgcattggagacccggcgctctatgtgctccgacgggccgggctgctgccttttctgctgctccacctcctccggggaggggccgttcgggaccgaccaggtgggaagtgctgggggtggagggggcccacctcccttccaacgcctctagggcactggccatgccggcggcaaactgggccgcatcctccttgctgccgaagttgaggccccagacctgggcgagcgtcgcgccactgatgggaagttgggggtggcctggttatacttgacaccccggacgatggcacagttgatgaccacctgctggtcgggctgcatcttccggcccacgacgcgaaaggaattggccgtggggttgtggtagatctggacgcggctgaaggcctggggacccgtgccagcagggagccatcgcttgttgccatcatcataaagcatcacagtggcccggctggaacagatgaccgtctcgctcatggctgctcggcgggcggcatgcgtcgcccacgggctggctgctcccggggcgcccctggctggaggttcaggggttcggggctggctccgggctcggctcaggctcccccagggtcccgccccatagagtccggcttcctggggagaatgtggaccgggccggggcgggtctccgggcgccgcttccctcaggcggtctgatgagaggttcctgcagcagaaagggagatgcagcgtccgctccccagcgcgcacccctt

SEQ ID NO: 75396 - DNA, 2636 bp, Homo sapiens; identical to SEQ ID NO: 60817
  misc_feature (1)...(2636): n = a,t,c or g

SEQ ID NO: 75397 - DNA, 609 bp, Homo sapiens; identical to SEQ ID NO: 60818

SEQ ID NO: 75398 - DNA, 1533 bp, Homo sapiens
ttttttttttttcacagcttcaagccttttattccattttggtaggtttgtataaaaatactctctttaggaaaataaatagcagctgccctcgctgtggaggcttggattccctggagctgaaggcttctcaaagctgagatccgcagatcagctcatcacagaagccaagggcgcctcctgagctgtgcggttcaggagggggcggcagaatggcctggtccaatcacctgctgctgctggcagtggggctggtgagttagtgttctaggtgggtaaagtggcaccttctgtcaggagatagggttgggtggatcacaggaagagggtgatggagagtgtggcagtgatctggaaggggttagggctccagagcccctctaaggatctacaaagtctgtgggcttccaggattcctccggcagaaatgggaaatattttgtctctgatttagtgcaaattgtgctagagaggccagctctagagaaacaatgggcagctttggtggccccaagctggctctactgtgaagcacaatatggttagtctcattagagggatggagaagcagctgctggagttgggtatgggatactgtccaggccagctggactggtgggggaaggggagcagacgttgcttagggtggcacctgcagggagtaaggctcgggtgcctcacaaagcgaggagggttggagagccaagggggtcagaggatgggtctccgctgctgctgctactcttgcgatgagctgaggcacaaggctcaggagtgctggggtaggtgaagcccaggctgggggtgaaaggagttagggagggtgtggtcatgagtgtgggggtgtgcagtgcctcaggttcaagcacaggccctggggaaagggagatacaaggtacagggcggcagggggctggtgggctgctggtgccactggtactgcctgtgtccccctccttggctccttccgggattttgcagatgggtcggtgggcttccagcaccagctctaggcgctccttctgcttctgcagctcctcaatctctcgctgcagcccagatttctcatcttccagtttgtcagtctccgcctgcaggaagtcggtcagttccttcctccggttcctgcacttggccgcagccagcttgttccgctcgcgccttactcggcggcgctcctcttcctccgggctgatctgttcacaaggccttcgacgtacccctggaggcggccccagggcccggatgacttccttggccggggctgtggggggctgtactgagggtaggtcagaggcctggggtaacctgctgggccccaggaaatgaggctgtaccatccactgcagctcctgactgccactcatggtgttgatgcttggcaccaggtggaacttctgctgggctgcctgcgctgcggccgggggctgcgcggggccgccgtacccgccgccgttcccggagctcgggccgggttccccgaagtctcggaacatgcccggggctggcggctctgcggggtacacggctgct

SEQ ID NO: 75399 - DNA, 2232 bp, Homo sapiens; identical to SEQ ID NO: 60820
  misc_feature (1)...(2232): n = a,t,c or g

SEQ ID NO: 75400 - DNA, 2551 bp, Homo sapiens; identical to SEQ ID NO: 60821
  misc_feature (1)...(2551): n = a,t,c or g

SEQ ID NO: 75401 - DNA, 3482 bp, Homo sapiens
ctgctgccgccgccgccgccgccgtccctgcgtccttcggtctctgctcccgggacccggctccgccgcagccagccagcatgtcggggatcaagaagcaaaagacggagaaccagcagaaatccaccaatgtagtctatcaggcccaccatgtgagcaggaataagagagggcaagtggttggaacaaggggtgggttccgaggatgtaccgtgtggctaacaggtctctctggtgctggaaaaacaacgataagttttgccctggaggagtaccttgtctcccatgccatcccttgttactccctggatggggacaatgtccgtcatggccttaacagaaatctcggattctctcctggggacagagaggaaaatatccgccggattgctgaggtggctaagctgtttgctgatgctggtctggtctgcattaccagctttatttctccattcgcaaaggatcgtgagaatgcccgcaaaatacatgaatcagcagggctgccattctttgaaatatttgtagatgcacctctaaatatttgtgaaagcagagacgtaaaaggcctctataaaagggccagagctggggagattaaaggatttacaggtattgattctgattatgagaaacctgaaactcctgagcgtgtgcttaaaaccaatttgtccacagtgagtgactgggtccaccaggtagtggaacttctgcaagagcagaacattgtaccctatactataatcaaagatatccacgaactctttgtgccggaaaacaaacttgaccacgtccgagctgaggctgaaactctcccttcattatcaatatactaagctggatctccagtgggtccaggttttgagcgaaggctgggccactcccctcaaaggtttcatgcgggagaaggagtacttacaggttatgcactttgacaccctgctagatgatggcgtgatcaacatgagcatccccattgtactgcccgtctctgcagaggataagacacggctggaagggtgcagcaagtttgtcctggcacatggtggacggagggtagctatcttacgagacgctgaattctatgaacacagaaaagaggaacgctgttcccgtgtttgggggacaacatgtacaaaacacccccatatcaaaatggtgatggaaagtggggactggctggttggtggagaccttcaggtgctggagaaaataagatggaatgatgggctggaccaataccgtctgacacctctggagctcaaacagaaatgtaaagaaatgaatgctgatgcggtgtttgcattccagttgcgcaatcctgtccacaatggccatgccctgttgatgcaggacactcgccgcaggctcctagagaggggctacaagcacccggtcctcctactacaccctctgggcggctggaccaaggatgacgatgtgcctctagactggcggatgaagcagcacgcggctgtgctcgaggaaggggtcctggatcccaagtcaaccattgttgccatctttccgtctcccatgttatatgctggccccacagaggtccagtggcactgcaggtcccggatgattgcgggtgccaatttctacattgtggggagggaccctgcaggaatgccccatcctgaaaccaagaaggatctgtatgaacccactcatgggggcaaggtcttgagcatggcccctggcctcacctctgtggaaatcattccattccgagtggctgcctacaacaaagccaaaaaagccatggacttctatgatccagcaaggcacaatgagtttgacttcatctcaggaactcgaatgaggaagctcgcccgggaaggagagaatcccccagatggcttcatggcccccaaagcatggaaggtcctgacagattattacaggtccctggagaagaactaagcctttggctccagagtttctttctgaagtgctctttgattaccttttctatttttatgattagatgctttgtattaaattgcttctcaatgatgcattttaatcttttataatgaagtaaaagttgtgtctataattaaaaaaatatatatatatatacacacacacatatacatacaaagtcaaactgaagaccaaatcttagcaggtaaaagcaatattcttatacatttcataataaaattagctctatgtattttctactgcacctgagcaggcaggtcccagatttcttaaggctttgtttgaccatgtgtctagttacttgctgaaaagtgaatatattttccagcatgtcttgacaacctgtactcttccaatgtcatttatcagttgtaaaatatatcagattgtgtcctcttctgtacaattgacaaaaaaaaaaatttttttttctcactctaaaagaggtgtggctcacatcaagattcttcctgatattttacctcatgctgtacaaagccttaatgttgtaatcatatcttacgtgttgaagacctgactggagaaacaaaatgtgcaataacgcgaattttatcttagagatctgtgcagcctatttctgtcacaaaagttatattgtctaataagagaagtcttaatggcctctgtgaataatgtaactccagttacacggtgacttttaatagcatacagtgatttgatgaaaggacgtcaaacaatgtggcgatgtcgtgggaaagttatctttcccgctctttgctgtggtcattgtgtcttgcagaaaggatggccctgatgcagcagcagcgccagctgtaataaaaaataattcacactatcagactagcaaggcactagaactggaaaagaccacagaaaacaaagaatccaaccctttcatcttacaggtgaacaaactgtgatgatgcacatgtatgtgttttgtaagctgtgagcaccgtaacaaaatgtaaatttgccattattaggaagtgctggtggcagtgaagaagcacccaggccacttgactcccagtctggtgccctgtctacaccagacaacacaggagctgggtcagattcccctcagctgcttaacaaagttcctcgaacagaaagtgcttacaaagctgccttctcggatactgaaaggtcgagttttctgaactgcactgattttattgcagttgaaaaaaaaaaaaagctattccaaaaatttcaagctgttctgagacatcttctgatggctttacttcctgagaggcaatgttttttactttatgcataattcattgttgccaaggaataaagtgaagaaacagcaccttttaatatataggtctctctggaagagacctaaattagaaagagaaaactgtgacaattttcatattctcattcttaaaaaacactaatcttaactaacaaaagttcttttgagaataagttacacacaatggccacagcagtttgtctttaatagtatagtgcctatactcatgtaatcggttaatcactactgcctttaaaaa

SEQ ID NO: 75402 - DNA, 6617 bp, Homo sapiens
  misc_feature (1)...(6617): n = a,t,c or g
cgtcccggaattctcgggtcgacgatttcgtgtgtcgaagaaacctgactgcgccctgaggagaacagcggagaaggtccaccgagcctggcgaaaggtccgctgagcgggctgtcgtccggagccactccgggctgcggagcacccagtggagaccgcgcctggctcaggtgtgggaccccatccttcctgtcttcgcagaggagtcctcgcgtgaaataagcgggttttgaaaacaaaaaaaagaaggagtggaagagggggccaggatccaggcctccatccccacagaagtgaagctacagctgggaggtctcctcccaccccaaccgtcaccctgggtcccgactgcccacctcctcctcctccccctccccccaacaacaacaacaacaacaactccaagcacaccggccataagagtgcgtgtgtccccaacatgaccgaacgaagaagggacgagctctctgaagagatcaacaacttaagagagaaggtcatgaagcagtcggaggagaacaacaacctgcagagccaggtgcagaagctcacagaggagaacaccacccttcgagagcaagtggaacccacccctgaggatgaggatgatgacatcgagctccgcggtgctgcagcagctgctgccccaccccctccaatagaggaagagtgcccagaagacctcccagagaagttcgatggcaacccagacatgctggctcctttcatggcccagtgccagatcttcatggaaaagagcaccagggatttctcagttgatcgtgtccgtgtctgcttcgtgacaagcatgatgaccggccgtgctgcccgttgggcctcagcaaagctggagcgctcccactacctgatgcacaactacccagctttcatgatggaaatgaagcatgtctttgaagaccctcagaggcgagaggttgccaaacgcaagatcagacgcctgcgccaaggcatggggtctgtcatcgactactccaatgctttccagatgattgccccaggacctggattggaacgagcctgcgctgattgaccagtaccacgagggcctcagcgaccacattcaggaggagctctcccacctcgaggtcgccaagtcgctgtctgctctgattgggcagtgcattcacattgagagaaggctggccagggctgctgcagctcgcaagccacgctcgccaccccgggcgctggtgttgcctcacattgcaagccaccaccaggtagatccaaccgagccggtgggaggtgcccgcatgcgcctgacgcaggaagaaaaagaaagacgcagaaagctgaacctgtgcctctactgtggaacaggaggtcactacgctgacaattgtcctgccaaggcctcaaagtcttcgccggcgggaaactccccggccccgctgtagagggaccttcagcgaccgggccagaaataataaggtccccacaagatgatgcctcatctccacacttgcaagtgatgctccagattcatcttccgggcagacacaccctgttcgtccgagccatgatcgattctggtgcttctggcaacttcattgatcacgaatatgttgctcaaaatggaattcctctaagaatcaaggactggccaatacttgtggaagcaattgatgggcgccccataacatcgggcccagttgtccacgaaactcacgacctgatagttgacctgggagatcaccgagaggtgctgtcatttgatgtgactcagtctccattcttccctgtcgtcctaggggttcgctggctgagcacacatgatcccaatatcacatggagcactcgatctatcgtctttgattctgaatactgccgctaccactgccggatgtattctccaataccaccattggtcccaccaccagcaccacaaccgccactctattatccagtagatggataccgagtttaccaaccagtgagggattactatgtccagaatgtgtacactccagtagatgagcacgtctacccacatcaccgcctgggtgaccctcacatagaaatgatacctggagcacacagtattcccagtggacatgtgtattcactgtccgaacctgaaatggcagctcttcgagattttgtggcaaagaaatgtaaaagatgggctaattactccaacgattgcaccctaatggagcccaaagttctcccaggtgaagagggggtggaaactgcaagtttcttatgattgccgagctccaaacaattttactatccagaatcagtatcctcgcctatctattccaaatttagaagaccaagcacacctggcaacgtacactgaattcgtacctcaaatacctggataccaaacataccccacatatgccgcgtacccgacctacccagtaggattcgcctggtacccagtgggacgagacggacaaggaagatcactatatgtacctgtgatgatcacttggaatccacactggtaccgccagcctccggtaccacagtacccgccgccacagccgccgcctccaccaccaccaccgccgccgcctccatcttacagtaccctgtaaatacctgtcatgtccttcaggatctctgccctcaaaatttattcctgttcagcttctcaatcagtgactgtgtgctaaattttaggctactgtatcttcaggccacctgaggcacatcctctctgaaacggctatggaaggttagggccactctggactggcacacatcctaaagcaccaaaagaccttcaacattttctgagagcaacagagtatttgccaataaatgatctctcatttttccaccttgactgccaatctaactaaaataattaataagtttactttccagccagtcctggaagtctgggttttacctgccaaaacctccatcaccatctaaattataggctgccaaatttgctgtttaacatttacagagaagctgatacaaacgcaggaaatgctgatttctttatggagggggagacgaggaggagggggacatgacttttcttgcggtttcggtaccctctttttaaatcactggaggactgaggccttattaaggaagccaaaattatcggtgcagtgtggaaaggcttccgtgatcctctcgctgcacccttagaaacttcaccgtcttcaaactccatttccatggttctgttaattctcaaggagcagcaactcgactggttctcccaggagcaggaaaaacccttgtgacatgaaacatctcaggcctgaaaagaaagtgctctctcagatggactcttgcatgttaagactatgtcttcacatcatggtgcaaatcacatgtacccaatgactccggctttgacacaacaccttaccatcatcatgccatgatggcttccacaaagcattaaacctggtaaccagagattactggtggctccagcgttgttagatgttcatgaaatgtgaccacctctcaatcacctttgagggctaaagagtagcacatcaaaaggactccaaaatcccatacccaactcttaagagatttgtcctggtacttcagaaagaattttcatgagtgttcttaattggctggaaaagcaccagctgacgttttggaagaatctatccatgtgtctgcctccatatgcatctgggcatttcatcttcagtcccctcattagactgtagcattaggatgtgtggagagaggagaaatgatttagcacccagattcacactcctatgcctggaagggggacatctttgaagaagaggaattagggctgtggacactgtcttgaggatgtggacttccttagtgagctccacattacttgatggtaaccacttcaaaaggatcagaatccacgtaatgaaaaaggtccctctagaggatggagctgatgtgaagctgccaatggatgaaaagcctcagaaagcaactcaaaggactcaaagcaacggacaacacaagagttgtcttcagcccagtgacacctctgatgtcccctggaagctttgtgctaacctgggactgcctgacttcctttagcctggtcccttgctactaccttgaactgttttatctaacctctctttttctgtttaattctttgctactgccattgaccctgctgcaggatttgtgtcattttcctgcctggttgctgagactccattttgctgccacacacagagatgtaagaggcaggctttaattgccaaagcacagtttgagcagtagaaaacaacatggtgtatatctcaaattgcctgacatgaagaggagtctaacggtgaagtttcacttttcatcagcatcatctttcacatgttcattatcatccgctcttattcttgcatgtttaaacacttaaaatttttagtataatttttagtgtgttttgaagtggtgactaggctttcaaaaacttccattgaattacaaagcactatccagttcttattgttaaactaagtaaaaatgataagtaacatagtgtaaaatattcctttactgtgaacttcttacaatgctgtgaatgagaggctcctcagaactggagcatttgtataataattcatcctgttcatcttcaattttaacatcatatataatttcaattctatcaattgggcctttaaaaatcatataaaaggatataaaatttgaaaagagaaacctaattggctatttaatccaaaacaactttttttttccttcaatggaatcagaaagcttgtcaatcactcatgtgttttagagtaattacttttaaaatggtgcatttgtgcttctgaactattttgaagagtcacttctgtttacctcaagtatcaattcatcctccatacatttgaattcaagttgttttttgtcaaatttacagttgtcaattgatcttcaagctgcagggtgcctagaaatgggccgttgtctgtagccctggcatgtgcacacggacatttgccaccactgcaagcaaaagtctggagaagttcaccaacgacaagaacgattagggaaaatatgctgctgtgggttaacaactcagaaagtccctgatccacatttggctgtttactaaagcttgtgattaactttttggcagtgtgtactatgctctattgctatatatgctatctataaatgtagatgttaaggataagtaattctaaatttattattctatagttttgaagtttggttaagtttcctttcactcaattgatttattttgttgttaatcaaatttatgttaattggatcctttaaattttttttggcattttccaacaaaaatggctttattcataagaaaggaaaaaaatcaatggaatttgatatctaaagaagttagaaagggagcaaaataaaaaacataaaggagatagatgaattagtaagcaaatcagtagtcgagtttttcaaactggcaaaattaattaattgacttttagcccaaatttacattgttaattaaatcaagaaggaagaagatctaagagctcccattgataggcaagcctagagagaactagctaaatttatcatgctaggatattgaaacacagaaagtttacatacatttatgaagggtcaatttagtttggacagtgaggtatttgtcttagtggaaaaaaggagaattagtctgatcaaatcgtgaagtaatacagtgaacttgcaggtgcacaaaataagagggccacatctatatggtgcagtctggaattctgtttaagtttgtaggtacctcttggacttctgaattgatccagttgtnattcatccaccacagacatctcacatccagatacagacagttccaagattgacaacagagaacaacctggctggaaaagacctggggcagaaatgggagagccctgcgggaaaccatgctaccatttttcttctaaagagagaatgcacatctgatgagactgaaagttctttgttgttttagattgtaggaatggtattgaattggtctgtggaaaattgcattgcttttatttctttgtgtaatcaagtttgaagtaatagggggatatataatccatgaaggcattttaggggtggggagggactatttaagtaatttttaagtggggttggggttatttaggaattgtttaggaattatattatgtattagatatcgctataagtggacatgcgtacttacttgtaaccctttaccctataattgctatccttaaagatttcaaataaactcggagggaactgcagggagaccaacttatttagagcgaattggacatggataaaaaccccagtgggagaaagttcaaaggtgattagattaataatttaatagaggatgagtgacctctgataaattactgctagaatgaacttgtcaatgatggatggtaaattttcatggaagttataaaagtgataaataaaaacccttgcttttacccctgtcagtagccctcctcctaccactgaaccccattgcccctacccctccttctaactttattgctgtattctcttcactctatatttctctctatttgctaatattgcattgctgttacaataaaaattcaataaagatttagtggttaagtgcaaaaaaaaaa

SEQ ID NO: 75403 - DNA, 4855 bp, Homo sapiens
cggccgcccgacgctctctgctcgcgcttgggctcgcgatggggaagaagtcccgggcggtacccggccgtaggcccatcctgcaactctctccgccgggtcctcggggcagcacgccgggccgggacccggagccggaacccgacactgagccggactcaaccgcggcggtccccagccagcccgccccgtcggcggcgacgaccaccgcggtgactgccgccgcggcctcggacgactcgccttcagaagatgaacaggaagcggtgcaggaggttcctagagttgttcagaatcctccaaaaccagtcatgaccactagacccacagctgttaaagcaacaggcggtctatgcttgcttggtgcttatgctgacagtgatgacgatgacaatgatgtttccgaaaaactagcacaatccaaagagacaaatggaaaccagtcaactgatattgatagtacattggccaacttcctagcggagatcgatgccataacagctcctcagcctgcagctcctgtaggagcttctgctccacctccaactccacctcgaccagagccaaaggaagcagcaacatctaccctttcttcttctacttcaaatggaacagactccacccaaacatctggttggcaatatgatactcagtgttcactggcaggagtcggaattgagatgggcgattggcaggaagtctgggatgagaacacgggatgttattattattggaatacacaaacaaatgaagtgacttgggagttaccccaatatcttgccacacaggtacagggattacagcattaccagcccagttctgtgccaggtgctgaaactagttttgtggtaaatacagacatatattctaaggagaaaacgatttctgtttccagtagtaaaagtggaccagtcatagccaagcgagaagttaaaaaggaagtaaatgaaggaattcaggctctctcaaatagtgaggaggagaagaaaggggtggcagcatcgctgcttgctcctttattgcctgagggaataaaagaagaagaagagagatggagaagaaaagtaatttgtaaagaggagccagtttcagaagtaaaagaaacaagtacaacagtagaagaagcaacaacaatagtaaagccacaggaaattatgttggacaatatagaagacccttctcaggaggatctttgcagtgttgtccaatctggagaaagtgaggaggaagaggaacaagatacccttgaactggagctagttttggaaaggaaaaaagcagagttgcgagccttggaggaaggagatggtagtgtgtcagggtctagtccacgttctgatatcagccagccagcatctcaagatggaatgcgtaggcttatgtctaaaagaggaaaatggaagatgtttgttccgagctaccagttccagaatctaccagtaggagttctagtaaaactggacgagatactccagaaaatggagaaactgcaattggtgctgaaaattcagaaaaaatagatgagaattcagataaagagatggaagtagaagaatctccagagaaaataaaagtacagacaacaccaaaagtagaagaagaacaggatttgaaatttcagattggagaactggcaaataccctgacaagtaaattcgagtttctaggcattaatagacaatccatctccaactttcatgtgctgctcttacagactgagactcgaattgcagactggcgggaaggggctcttaatggaaactaccttaaacgaaaacttcaggatgcagcagaacaactaaaacagtatgaaataaacgccactcctaaaggctggtcctgccactgggacagggatcatagacggtatttctatgtaaacgaacagtcgggcgagtctcagtgggagtttccagatggtgaagaggaagaagaagaaagccaagcacaagaaaatagagatgagactcttgccaaacagaccttgaaagacaaaactggcactgattcaaattcaacagaatcctctgaaacttccacaggttctctttgtaaagaatccttttctggtcaagtttcttcttcatcactcatgcgcagcttcacctccatttctggaccctccttcagtcaaatgttcctgtgcttcaacctccattacccttgggaaatgccaccacccccacctccacctccagaatcacctccaccccctcctccaccacctcctcctgcggaagatggtgagatccaggaggtagagatggaggatgagggaagtgaggagccccctgccccaggaacagaggaagatacccctttgaaaccttcagcacaaaccacagttgtaactagccagagttcagttgattccaccatctctagttcttcttccactaaaggaataaagaggaaagctacagaaattagcactgcagtggttcagaggtcagctaccattggcagttctccagttctctatagccagtcagctatagctacaggtcaccaggcagcagggattggaaaccaggcaacaggaattggacatcagacaataccagttagccttccagcagcaggaatgggtcatcaggccagaggaatgagcctgcagtcaaattaccttggactagcggcagcacctgcaattatgagttatgcagaatgttctgtcccaattggagtgactgctccctcattgcagccagttcaggcccgaggtgctgtgcctaccgctaccattatagaaccaccaccaccacctcctcctcctcctcctccaccaccaccagctcccaaaatgccaccacctgaaaagacaaaaaaaggaaggaaagacaaggcaaagaagagtaagaccaaaatgccatctttggtaaaaaagtggcagagtatccagcgtgagttagatgaagaggacaattctagttccagtgaagaggatcgggaatcaactgcacagaagcgaattgaagagtggaaacagcagcagctggttagtggcatggcagagagaaatgctaattttgaagcccttcctgaggattggagagcaaggctgaagagaaggaaaatggctccaaacacatagtttttaagtttttaaaacttttttgtattattgtttgttttgtgttcagttcaaagtcttaaccagttttattgtcaaataaactataaatgttatgggggagatcttataaatttcctgggcaagagtgtatgcatacaaagttttcacttttgtgaaatgtaatttttctgtttttgcaaagggatgaggtgattggaattgctttgaccatgctgcctttattctcaaactggcaaacttagcatgttaggtgtattaacctcatcagtcttgaagaacatgtggctcatgagtataacacttctgtagaggactccctgacaaaagtgaagaattaacttctcctccagaacaagtgcaattcagaaggcagctctgcattctaccttgcttgactggaattgtctgaagctttttctggcctcttttctctagtcggccacccctgaagtgctgaggtctaagtggtttacctcgtgctgatagatggccacactctttagagtagttctcataagttctagaactggtagctcggtcgtttcgcacactaggtggcatacaggcagcagcaggtgttcatatccttgattttgagaatttcccctcaagtatgtggcagtaaatacaacaagacactctatgtattaatgtctccattgtcttaaccctgttccaaaacaaaattcacctcctttctttatgtgaatgtattctccataaaattccagtatttaaaaagcagtttactgttctgtactttctgttgtatcacaatcaggtaaaagtcactttaaactgaggaaacggcaaattgtgttttaaagctctttgtatttctccagtttctgaccttgtaaatttgtatatatgcactaataaagctttttttataatcctgatgggttatccttttgctcgtcaactcctgttattctgattatgtaaccaggacttgtttttttttctaagcatatacaatgcaaggggcaaacatttaacaacagctttcaagaaaatgagcaggagaatcattgaacccaggaggcggaggttgtggtgggccaatatcacaccattgcactccaacctgggcaacaagagcaagagtccatctaaaaaaagagctgtatataccactttaatctgtccttgggcttcagacttaaatattctcttaaacagcaaaaatactaactaagttaaatttaaaagcaaggagaagcatcattgtaatacgacatccatgtgtattcaaactagaattttctgatggtcttcgtaagataaaggagataattgtcatttctatgacacagcttttataatttgaataaacttagttggagattggagtatttttattatttattttcatgtgagatgggtaatgtgctgacctcataacaaagtttgagggagacacattgtatgtgagaatttgaagtgcttatgaagtacaaaagcagaggccaggtgctcacatctgtaatcccagcactttgggaggccaaggcacacagatcacttgaggtcaggagtttgagaccagcctggccaacatggcgaaaacccctctcttactaaaaatacaaaaattagctggatgtggtggtgtgggcctgtaatcccagctactcgcgaggctgaggcaggagaatcgcttgaacctggcaggcagaggttgcggtgagccaagattgcgtcactgcactccggcgtggacaagagagtgagactccgtcacaaaaaaaaaaa

SEQ ID NO: 75404 - DNA, 6302 bp, Homo sapiens; identical to SEQ ID NO: 60596
  misc_feature (1)...(6302): n = a,t,c or g

SEQ ID NO: 75405 - DNA, 1998 bp, Homo sapiens
tttcgtggcggtggctggggcggtgtccggggagccgctggtgcactggtgcacccagcagttgcggaagactttcggcctggatgtcagcgaggagatcattcagtacgttttgtcaattgagagtgctgaagagatacgagaatatgttactgatctcctccagggaaatgaaggcaaaaaaggtcaattcatagaagaacttataaccaaatggcaaaagaatgatcaggagttgatttcggatcctttgcagcagtgcttcaaaaaagatgaaattttagatgggcagaaatcaggcgaccatctaaagcggggtaggaagaaagggagaaacagacaggaagttcctgcatttactgaacctgacacgactgcagaggttaaaacaccttttgatttggccaaggcacaagagaacagcaactccgtaaagaagaagacaaagtttgtcaatttatacacaagagagggacaggacaggcttgcagtcctgctccctggtcgtcacccttgtgattgcctgggccagaagcacaagctcatcaataactgtctgatctgtgggcgcattgtctgtgaacaagaaggctcaggcccttgcttattctgtggcactctggtgtgtactcatgaggaacaagatattttacggggggactcaaaccaagagccagaaactgctaaagaaactcatgtcaggagtggagaattctggaaaggtggacatctctaccaaggaccttcttcctcatcaagaattgcgaattaagtctggtctggagaaggctatcaagcataaagacaaactgttagagtttgacagaactagtattcgaaggacccaagtcattgatgatgagtcagattactttgccagtgattctaaccaatggttgtccaaacttgagcgggaaaccttgcagaagcgagaggaggagctgagagaacttcgacacgcctctcgactttctaagaaggtcactattgactttgcaggaaggaagatcctggaagaagaaaattcactagcagagtatcatagcagactagatgagacaatacaggccattgccaatggaaccttgaaccagccactgaccaaattggatagatcttctgaagagcctttgggagttctggtaaatcccaacatgtaccagtcccctccccagtgggttgaccacacaggtgcagcctcacagaagaaggctttccgttcttcaggatttggactagagttcaactcatttcagcaccagttgcgaatccaggatcaagaatttcaggaaggctttgatggtggctggtgcctctctgtacatcagccctgggcttctctgcttgtcagagggattaaaagggtggagggcagatcctggtacaccccccacagaggacgactttggatagcagccacagctaaaaaaccctcccctcaagaagtctcagaactccaggctacatatcgtcttcttcgtgggaaagatgtggaatttcctaatgactatccgtcaggttgtcttctgggctgtgtggacctaattgactgcttgtcccagaagcaatttaaggagcagtttccagacatcagtcaagaatctgattctccatttgttttcatctgcaaaaatcctcaggaaatggttgtgaagtttcctattaaaggaaatccaaaaatctggaaattggattccaagatccatcaaggagcaaagaaggggttaatgaagcagaataaagctgtctgacccaggagaaaaggaactatacagcatagtggagttttgtgtactaaaattgctatctactggtcctttggaattgaagtagtagaaacctaaaggcttggcgtcaggcttgaatatctcagaacttaaactcttaccaaaatctgtatatttttcttaaggagtgggattcctactttatgtaatggggtcgaaatctttgaacacattatttataaaaacctgtttaaaaattctaaaaaaaaaa

SEQ ID NO: 75406 - DNA, 4951 bp, Homo sapiens; identical to SEQ ID NO: 60827

SEQ ID NO: 75407 - DNA, 2157 bp, Homo sapiens; identical to SEQ ID NO: 60828

SEQ ID NO: 75408 - DNA, 1532 bp, Homo sapiens; identical to SEQ ID NO: 60829

SEQ ID NO: 75409 - DNA, 3092 bp, Homo sapiens
cggacgcgtggggtaagagaaaggggaaggggaggtgggagaggcacctcaactttgatgtcccgagccttgagtggccactcgcaagctggccaagggcttcacacaatttgccaagatgacagaggggaccaagaagaccagcaaaaagttcaagttcttcaagttcaagggctttgggagtttctccaacctccctcggtccttcactctgagacgatcctcagcttccatcagtaggcagtcccatttggagcctgacacctttgaagccacgcaggatgacatggtgacggtgcccaagagtcccccagcctatgcccgctccagtgacatgtacagccacatgggcaccatgcctcgccccagcatcaagaaagcacagaactcacaggctgcccggcaggcccaggaggcgggtcccaagcccaacttggtacccggaggtgtacccgaccccccaggcttggaggcagccaaagaggtgatggtgaaggccactggccctctagaggacaccccagcaatggaacccaacccttcagcagtggaggtagaccccatcagaaagcctgaggtccccacaggagacgtagaagaggagagacctcccagggacgtgcactcagaaagggctgctggagagccagaggctggcagcgactatgtgaagttctccaaggagaagtacatcctggactcatcgccagagaaactccacaaggaattggaggaggagctcaaactcagcagcacggatctccgcagccatgcctggtaccatggccgcatcccccgagaggtctcggagaccttggtacaacgcaacggcgacttcctcatccgggactcactcaccagcctgggcgactatgtgctcacgtgccgctggcgcaaccaggccttgcacttcaagatcaacaaggtggtggtgaaggcaggcgagagctacacacacatccagtacctgtttgagcaggagagctttgaccacgtgcccgccctcgtgcgctatcatgtgggcagccgcaaggctgtgtcagagcagagtggtgccatcatctactgcccggtgaaccgcaccttcccactgcgctacctcgaggccagctatggcctgggacaggggagtagcaagcctgctagccccgtcagcccctcaggccccaagggcagccacatgaagcggcgcagcgtcaccatgaccgatgggctcactgctgacaaggtcacccgcagcgatggctgccccaccagtacgtcgctgccccgccctcgggactccatccgcagctgtgccctcagcatggaccagatcccagacctgcactcacccatgtcgcccatctccgagagccctagctcccctgcctacagcactgtaacccgtgtccatgccgcccctgcagccccttctgccacagcattgcctgcctcccctgtcgcccgccgttccagtgagccccagctgtgtcccggaagtgccccaaagacccatggggagtcagacaagggcccccacaccagcccctcccacacccttggcaaggcctccccgtcaccatcactcagcagctacagtgacccggactctggccactactgccagctccagcctcccgtgcgtggcagccgagagtgggcagcgactgagacctccagccagcaggccaggagctatggggagaggctaaaggaactgtcagaaaatggggcccctgaaggggactggggcaagaccttcacagtccccatcgtggaagtcacttcttccttcaacccggccaccttccagtcactactgatccccagggataaccggccactggaggtgggccttctgcgcaaggtcaaggagctgctggcagaagtggatgcccggacgctggcccggcatgtcaccaaggtggactgcctggttgctaggatactgggcgttaccaaggagatgcagaccctaatgggagtccgctggggcatggaactgctcaccctcccccatggcccggaagctacgcctagacctgcgggaaaggttccacaccatgtccatcatgctggccgtggacatcctgggctgcaccggctctgcggaggagcgggcagcgctgctgcacaagaccattcagctggcggccgagctgcgggggactatgggcaacatgttcagcttcgcggcggtcatgggtgccctggacatggcccagatttctcggctggagcagacatgggtgaccctgcggcagcgacacacagagggtgccatcctgtacgagaagaagctcaagccttttctcaagagcctcaacgagggcaaagaaggcccgccgctgagcaacaccacgtttcctcatgtgctgcccctcatcaccctgctggagtgtgactcggccccaccagagggccctgagccctggggcagcacggagcacggcgtggaggtggtgctggctcacctggaggccgcccgcacagtggcacaccacggaggcctgtaccacaccaatgctgaagtcaagctgcaggggttccaggcccggccggagctcctggaggtgttcagcacggagttccagatgcgccttctctggggcagtcagggtgccagcagcagccaggcccggcgctatgagaagttcgacaaggtcctcactgccctgtcccacaagctggaacctgctgtccgctccagcgagctgtgaccccagggacatttcccctctgcagctgcggacagcgtcaggggcagaggggcacacaactttccccagagcaccccaaggacactgtgatcaacccgagaatgttctgggttcaactcaagcatctcccttgcacctccagggtcctgcgtggactctgggttccatcccacctgctacatgctcaccaggtctccattgaggaagaacaggaacgccggttcccccaccagcttttgctgctccccttcctgctggggttccctgttttcgagccatgggaggcaggctgctcacgcctcctcactctctgtctgtccctcaccaacaccaaggcctccatctcactgtaaataagtctcttgttcttgtaaataagatgtacagaag

SEQ ID NO: 75410 - DNA, 646 bp, Homo sapiens; identical to SEQ ID NO: 60830

SEQ ID NO: 75411 - DNA, 3558 bp, Homo sapiens; identical to SEQ ID NO: 60831

SEQ ID NO: 75412 - DNA, 2000 bp, Homo sapiens; identical to SEQ ID NO: 60832

SEQ ID NO: 75413 - DNA, 6345 bp, Homo sapiens
gtctcctctggatcttaactactgagcgcaatgctgagccatggagccgggttggccttgtggatcacactgagcctgctgcagactggactggcggagccagagagatgtaacttcaccctggcggagtccaaggcctccagccattctgtgtctatccagtggagaattttgggctcaccctgtaactttagcctcatctatagcagtgacaccctgggggccgcgttgtgccctacctttcggatagacaacaccacatacggatgtaaccttcaagatttacaagcaggaaccatctataacttcaagattatttctctggatgaagagagaactgtggtcttgcaaacagatcctttacctcctgctaggtttggagtcagtaaagagaagacgacttcaaccggcttgcatgtttggtggactccttcttccggaaaagtcacctcatatgaggtgcaattatttgatgaaaataaccaaaagatacagggggttcaaattcaagaaagtacttcatggaatgaatacacttttttcaatctcactgctggtagtaaatacaatattgccatcacagctgtttctggaggaaaacgttctttttcagtttataccaatggatcaacagtgccatctccagtgaaagatattggtatttccacaaaagccaattctctcctgatttcctggtcccatggttctgggaatgtggaacgataccggctgatgctaatggataaagggatcctagttcatggcggtgttgtggacaaacatgctacttcctatgcttttcacgggctgtcccctggctacctctacaacctcactgttatgactgaggctgcagggctgcaaaactacaggtggaaactagtcaggacagcccccatggaagtctcaaatctgaaggtgacaaatgatggcagtttgacctctctaaaagtcaaatggcaaagacctcctgggaaatgtggattcttacaatatcaccctgtctcacaaagggaccatcaaggaatccagagtattagcaccttggattacttgaaactcactttaaagagttagtccccggtcgactttattcaagttacttgttcagctgtgtctctgggtgaactgtctgctcagaagatgggcagtgggcagaacatttccagacaaagttgcaaacctggaggcaaacaataatggcaggatgaggtctcttgtagtgagctggtcgccccctgctggagactgggagcagtatcggatcctactcttcaatgattctgtggtgctgctcaacatcactgtgggaaaggaagaaacacagtatgtcatggatgacacggggctcgtaccgggaagacagtatgaggtggaagtcattgttgagagtggaaatttgaagaattctgagcgttgccaaggcaggacagtccccctggctgtcctccagcttcgtgtcaaacatgccaatgaaacctcactgagtatcatgtggcagacccctgtagcagaatgggagaaatacatcatttccctagctgacagagacctcttactgatccacaagtcactctccaaagatgccaaagaattcacttttactgacctggtgcctggacgaaaatacatggctacagtcaccagtattagtggagacttaaaaaattcctcttcagtaaaaggaagaacagtgcctgcccaagtgactgacttgcatgtggccaaccaaggaatgaccagtagtctgtttactaactggacccaggcacaaggagacgtagaattttaccaagtcttactgatccatgaaaatgtggtcattaaaaatgaaagcatctccagtgagaccagcagatacagcttccactctctcaagtccggcagcctgtactccgtggtggtaacaacagtgagtggagggatctcttcccgacaagtggttgtggagggaagaacagtcccttccagtgtgagtggagtaacggtgaacaattccggtcgtaatgactacctcagcgtttcctggctgctggcgcccggagatgtggataactatgaggtaacattgtctcatgacggcaaggtggttcagtcccttgtcattgccaagtctgtcagagaatgttccttcagctccctcaccccaggccgcctctacaccgtgaccataactacaaggagtggcaagtatgaaaatcactccttcagccaagagcggacagtgcctgacaaagtccagggagtcagtgttagcaactcagccaggagtgactatttaagggtatcctgggtgcatgccactggagactttgatcactatgaagtcaccattaaaaacaaaaacaacttcattcaaactaaaagcattcccaagtcagaaaacgaatgtgtatttgttcagctagtccctggacggttgtacagtgtcactgttactacaaaaagtggacaatatgaagccaatgaacaagggaatgggagaacaattccagagcctgttaaggatctaacattgcgcaacaggagcactgaggacttgcatgtgacttggtcaggagctaatggggatgtcgaccaatatgagatccagctgctcttcaatgacatgaaagtatttcctccttttcaccttgtaaataccgcaaccgagtatcgatttacttccctaacaccaggccgccaatacaaaattcttgtcttgacgattagcggggatgtacagcagtcagccttcattgagggcttcacagttcctagtgctgtcaaaaatattcacatttctcccaatggagcaacagatagcctgacggtgaactggactcctggtgggggagacgttgattcctacacggtgtcggcattcaggcacagtcaaaaggttgactctcagactattcccaagcacgtctttgagcacacgttccacagactggaggccggggagcagtaccagatcatgattgcctcagtcagcgggtccctgaagaatcagataaatgtggttgggcggacagttccagcatctgtccaaggagtaattgcagacaatgcatacagcagttattccttaatagtaagttggcaaaaagctgctggtgtggcagaaagatatgatatcctgcttctaactgaaaatggaatccttctgcgcaacacatcagagccagccaccactaagcaacacaaatttgaagatctaacaccaggcaagaaatacaagatacagatcctaactgtcagtggaggcctctttagcaaggaagcccagactgaaggccgaacagtcccagcagctgtcaccgacctgaggatcacagagaactccaccaggcacctgtccttccgctggaccgcctcagagggggagctcagctggtacaacatctttttgtacaacccagatgggaatctccaggagagagctcaagttgacccactagtccagagcttctctttccagaacttgctacaaggcagaatgtacaagatggtgattgtaactcacagtggggagctgtctaatgagtctttcatatttggtagaacagtcccagcctctgtgagtcatctcagggggtccaatcggaacacgacagacagcctttggttcaactggagtccagcctctggggactttgacttttatgagctgattctctataatcccaatggcacaaagaaggaaaactggaaagacaaggacctgacggagtggcggtttcaaggccttgttcctggaaggaagtacgtgctgtgggtggtaactcacagtggagatctcagcaataaagtcacagcggagagcagaacagctccaagtcctcccagtcttatgtcatttgctgacattgcaaacacatccttggccatcacgtggaaagggcccccagactggacagactacaacgactttgagctgcagtggttgcccagagatgcacttactgtcttcaacccctacaacaacagaaaatcagaaggacgcattgtgtatggtcttcgtccagggagatcctatcaattcaacgtcaagactgtcagtggtgattcctggaaaacttacagcaaaccaatttttggatctgtgaggacaaagcctgacaagatacaaaacctgcattgccggcctcagaactccacggccattgcctgttcttggatccctcctgattctgactttgatggttatagtattgaatgccggaaaatggacacccaagaagttgagttttccagaaagctggagaaagaaaaatctctgctcaacatcatgatgctagtgccccataagaggtacctggtgtccatcaaagtgcagtcggccggcatgaccagcgaggtggttgaagacagcactatcacaatgatagaccgcccccctcctccacccccacacattcgtgtgaatgaaaaggatgtgctaattagcaagtcttccatcaactttactgtcaactgcagctggttcagcgacaccaatggagctgtgaaatacttcacagtggtggtgagagaggctgatggcagtgatgagctgaagccagaacagcagcaccctctcccttcctacctggagtacaggcacaatgcctccattcgggtgtatcagactaattattttgccagcaaatgtgccgaaaatcctaacagcaactccaagagttttaacattaagcttggagcagagatggagagcctaggtggaaaatgcgatcccactcagcaaaaattctgtgatggaccactgaagccacacactgcctacagaatcagcattcgagcttttacacagctctttgatgaggacctgaaggaattcacaaagccactctattcagacacatttttttctttacccatcactactgaatcagagcccttgtttggagctattgaaggtgtgagtgctggtctgtttttaattggcatgctagtggctgttgttgccttattgatctgcagacagaaagtgagccatggtcgagaaagaccctctgcccgtctgagcattcgtagggatcgaccattatctgtccacttaaacctgggccagaaaggtaaccggaaaacttcttgtccaataaaaataaatcagtttgaagggcatttcatgaagctacaggctgactccaactaccttctatccaaggaatacgaggagttaaaagacgtgggccgaaaccagtcatgtgacattgcactcttgccggagaatagagggaaaaatcgatacaacaatatattgccctatgatgccacgcgagtgaagctctccaatgtagatgatgatccttgctctgactacatcaatgccagctacatccctggcaacaacttcagaagagaatacattgtcactcagggaccgcttcctggcaccaaggatgacttctggaaaatggtgtgggaacaaaacgttcacaacatcgtcatggtgacccagtgtgttgagaagggccgagtaaagtgtgaccattactggccagcggaccaggattccctctactatggggacctcatcctgcagatgctctcagagtccgtcctgcctgagtggaccatccgggagtttaagatatgcggtgaggaacagcttgatgcacacagactcatccgccactttcactatacggtgtggccagaccatggagtcccagaaaccacccagtctctgatccagtttgtgagaactgtcagggactacatcaacagaagcccgggtgctgggcccactgtggtgcactgcagtgctggtgtgggtaggactggaacctttattgcattggaccgaatcctccagcagttagactccaaagactctgtggacatttatggagcagggcacgacctaagacttcacagggttcacatggaccagactgagtgtcagtatgtctacctacatcagtgtgtaagagatgtcctcagagcaagaaagctacggagtgaacaagaaaaccccttgtttccaatctatgaaaatgtgaatccagagtatcacagagatccagtctattcaaggcattgagaatgtacctgaagagctcctggataaaaattattcactgtgtgatttgtttttaaaaacttgcttcatgccctacagaggtgccagctatttctgttgatactatgtataatttattaatctggagaatgtttaaaattttatataatttaaaggtaacagatattattgtacatagttgtattttgtagtttcttctgtaaatatgtatttttcataatgtttaatattaagctttatataatactatttttccacactaaagtgttcatgacttgttctacataaaactaattcaacctgtaaaaaaaaaa

SEQ ID NO: 75414 - DNA, 1398 bp, Homo sapiens; identical to SEQ ID NO: 60834

SEQ ID NO: 75415 - DNA, 7347 bp, Homo sapiens; identical to SEQ ID NO: 60835

SEQ ID NO: 75416 - DNA, 1355 bp, Homo sapiens; identical to SEQ ID NO: 60836

SEQ ID NO: 75417 - DNA, 836 bp, Homo sapiens; identical to SEQ ID NO: 60837

SEQ ID NO: 75418 - DNA, 3654 bp, Homo sapiens; identical to SEQ ID NO: 60838

SEQ ID NO: 75419 - DNA, 2898 bp, Homo sapiens; identical to SEQ ID NO: 60840

SEQ ID NO: 75420 - DNA, 2123 bp, Homo sapiens; identical to SEQ ID NO: 60841

SEQ ID NO: 75421 - DNA, 2507 bp, Homo sapiens; identical to SEQ ID NO: 60842

SEQ ID NO: 75422 - DNA, 3994 bp, Homo sapiens; identical to SEQ ID NO: 60843

SEQ ID NO: 75423 - DNA, 4120 bp, Homo sapiens
ttttttttttttgtgggaaaatattttattgctgccatccccatggtgagccgctgggggtgaggggtgaagctgggtggtggatcacagcatcttctggaatagggcgatggcctcatccaccttcctgagctctgcttctgtctgttggagcttggcttcatctgcctcctggacttcgaagcggcaccttgacaggattacccgaggcaggcacggcgtgtcccgcagacgcttgggcctgccgcttgggcctcaactcgcttggctttgcaacttgcccaagctcccgtgcagggtccaacagccccttgaagctgcaggtgggatggagcagcgatcagaagccagagccacagcgcaaccctgggggggcggggagcccccagggctcagcaacagccaccacaacctgcgcttggccagggccttgcacgtagcccgacaccgccgatgccagggcgcccgtggcctcgatccgccacttccaggaaacaagtaggcccggattccgggtgaaggttgtagtcggcccgcaggaggccgcacggctcgcgtgatgcttagcgccagctcaagggcggcttctgcctcggggtccttccaggagcactctgagggctccgggtagggggtaacacagaggctagggggagcttgcggcatcctccggggcagcctctggaacagctcctccgtcacgaagggcatgaagggtgagagcagccgcaggccaacgtccaggcaagtgtacagggtctggcgggcacactcagctgccacctggtccaccccattcagtacaggtttcaggcactccaagtagacatcacagagctcatagagccagaagctgtactgggcagtggtgacggccgggaagtcgtaggcctggaagccttgattgctgagcctcacagcctctgtcaggcggctgcggatccagcggtccaccaggctctcatggcctccgggctgggaggtgggtgagggcacaaaacccttcccaaggccacgaagggcaaacttggtggcattccagagcttgttgcagaagtggcggtaacccagtatccggttcacatccaggttgatgtcacgaccctgggacatgtaggcacataatccaaaccggagagcatcggtgccacattcaggaatccccgctgggaagtcagctttctgcccttctttggccttctccacctcgctgggatccaggttgctgttcagcagctggttgtggaggccctgcagggagattccatagatgacgtccaggggatcgatgacattgcctagagacttgctcatcttccggccgtgagcatctcgcacgatggcatggaggtagacctctctaaagggcagcctgcccgtgagcttcaggcccagcatgaccatccgggccacccagaagaagaggatgtcatgaccggtctccagcagtgtcccggggtagaacacactcaggtcttctgactggttgggccagcccaaaatggataaggggaagaggccagaggagaaccaggtatccaatacatcctcatcttgctggagactgatcttgtcaggggacactccgaactccttggctgccttctcccgggcctccgcctcattgcgtccactcacccagtaccgcccatcagggtcctccccagggggcaccgctgggtcactgacagtgacaaagtaggctgggatgccgatgggccccaccacagcttgcctgggaacatgcaccacttcccggatgttgtccatccaggcatgccatgtgcgctgatggcgctcaggcaggatgcggaggtcaccccgagtcacagcggcgctggcagcctgggccatctccccgcagcgaacgtaccactgcggccgcagcagaggctctaccacgtccttcgaccggttgcaaagtggcaccaccatggggttgtcctcaatgccacggaacagtccccgctccttcagcgccaccagcaccgctttcctggcctcaaacctgggcaggcccaggaaaggcggaggcacattgatgagggccccccgggagtccatgatgctgatggcctccagcccgtgccgctgcccaacttcatagtcattttggtcatgtgcgggggtgatcttcacagcacctgtgccaaagtccatgtccacaaattcatcgaagacaatgggaaggctccgagacaggaatgggtggatcacgttcttccccttcaggtgctggtatctggtatctttggggtgcacagctacagccacatctcccagcattgtctcgatccgagttgttgccaccaccacctcctcgtcgctatctgagccttggaccttataggcaaaggacacgaggaccccgaactccaccttctccttgtagccaggcacggagagcagggtgcgacctgtcagctccttcttatccacctcaatgtcagagatggcggagttgagggtgcaggaccagttaacaaggcgggtactgcgatagatgatgccttcctcgtgaagccggacaaaggcctctgtcacagctgctgagagtttagggtccatggtgaaacaggctcgatcccagtccaaggagctgccaagcttcttcaactggtggtaaatccggtcacctttctcctccttccacttccagacttcctgtagaaaggcctcgcggcccagctggtgccggctcagtccctgctcacgccatagcttcttctccaccaccacctgggtggcaatacctgcatggtcacagccagggttccacagggtggtctccccacgcatgcggtgccatcgagtcagggagtcctggatggcgttggtgagtgcatggcccaggtgcagggagcctgtcacattggggggtgggatgcacatcatgaagacacctcggggatttgctgctgacacattaggacgcccatactctggcttgaagaagccctgctgctcccaccaagggtaccaggcagcctccacataccgagggctgtaggagtcgggcatggggccactgacatctttcttttccccgggtggggttgggaggtcataggtaatgaccccaggatcccgtttctccctcttctctggttttggtttcttctcccctggaggtggctgctgctgttggatcttctgcttctgttggaatttctctagcttctcccgtttctttgcctctttcttgagctgagcagctgtctttgggagggcaggagcctcggggcctggctgatgagagagaggcctggctcctgagtatagaaccacttctcctagcacggctcggaattctggctgccggacacacgtgacaaaccagcgagtcacattattccagatccggcgggcaggtgggtctaggacgtatcggaaaggcagcagcaaggctgtgacagccgccaggtcagccagagtgggggcctccccggccaagtaggtgtgcagccgaagccactcctccaaggggctcagggccctgcccagggcccccagcacagcctgggggtcctgggccgagcttcggagtcccagggccggcagcgttgctccacaggcagctggtattaactccgtgtcggcgtaactgacccactgttggacaaggacagccgcccggctgccccctgggccccccaggcctgctggccacagcagctgggccacagccgtggccccccacacccagagcccaccgggcccctgctccagggccggcaggcggggtgggggaaagctagtcctgctagtcgggggtggctggagacagatgcgggggtgggctcctccccatccgggaccctccccagcctccccatagcgagcggctatgagggctcggaggctggggaaggcatctgggtgaggggagacgtagagggtggacatagttatgagaaggtccgaacgaagtggaaaaactggagggagatggtcagactgggccgggaatccacctcacagccaggcgccggccgcggctggaccggccgagcggcccgggcggaggagtcgagcgggcagagacggtgggcggctctccaggtgaccctagttccctaagatcgccgccccggcagccggcgcccacgtgttcccccct

SEQ ID NO: 75424 - DNA, 1880 bp, Homo sapiens; identical to SEQ ID NO: 60845

SEQ ID NO: 75425 - DNA, 2829 bp, Homo sapiens; identical to SEQ ID NO: 60846
  misc_feature (1)...(2829): n = a,t,c or g

SEQ ID NO: 75426 - DNA, 4666 bp, Homo sapiens
tttgacaacgctagtcgatgaccactccagcttggcacgaggggcaaccagggcctggtggcccaccctgccgcctctgtggagaggcctcccgaggccgggccccatcccgagatgaaggggccctcttattgggctcacgtcggccccgccgggatgctgctgagcgatgtgctgcagccctgatggccagccggcgtaagagtgaagccaagcagatgcccagagctgcacctgccactcgggtaacacgccggagcacacaggagagcctgacagcaggcggaacagaccttaagagggagctgcaccccccagccacctcccatgaggctcctggcaccaagcggtcaccttctgctccagcagccacctcctctgcctcttcttctacatcctcatacaaacgggcaccagctagctcagccccacagcctaagcccctaaagcgtttcaagcgagctgcagggaagaagggtgctcgcacccgtcaggggcctggtgcagagtctgaagacctgtatgacttcgtttttattgtggctggcgagaaggaggatggcgaagagatggagattggggaagtggcttgtggagctttggatggatcacatcccagctgcctggggcttccagcactggaagcttcacaaagattccgcagcatctccaccttggagctattcacagttccactctccacagaggcagccctgacactatgccacctgctgagctcctgggtgtcactggagagcctcacactctcctacaatggcctgggctctaacatcttccgcctgctagacagcctgcgggccctgtcaggccaggctggatgtcgcctccgtgccctgcatctcagtgacctgttctcaccactgcccatcctggagctgacacgtgctatcgtgcgagcactgcccctgctacgggtcctctctattcgtgttgaccacccaagccagcgggacaaccctggtgtgccagggaatgcagggccccctagccacataataggcgatgaggagataccagaaaactgcctggagcagttggagatgggatttccacggggagcccagccagccccactgctgtgctccgttctgaaggcctcgggttctctgcagcagctgtccctggatagtgccacctttgcctctccccaggattttgggcttgttttgcaaacactcaaagagtacaacctagccctgaaaagactgagcttccatgacatgaatctcgctgactgtcagagcgaggtgctctttttgctacagaatctgactctgcaagagattaccttctccttctgccgtctgtttgagaagcgcccagcccaatttctgcctgagatggttgctgctatgaagggcaactccacactgaagggcctccggctgccagggaaccgcctggggaatgctggcctgctggccttggcagatgttttctcagaggattcatcctcctctctctgtcagctggacatcagttccaactgcatcaagccagatgggcttctggagttcgccaagcggctggagcgctggggccgtggagcctttggtcacctgcgcctcttccaaaactggctggaccaggatgcagtcacagccagggaagccatccggcggctccgggctacctgccatgtggttagcgactcatgggactcatcccaggccttcgcagattatgttagcaccatgtgatggggcccgtacctcacagtctcatgctcggtaccatcagcttgcaggggctgaagcatgggctgcccagaaccccaaccaccagttctatctttctctttctgtcaccttttttctcttttttccttcttcccttgcactgaggtcctggaggccttgatgaggcccagcaaacaggcattctcacagctgggtttatagtctttgggccccttactcagtatcctggggaaccctgggcccagggaggtttacagtggtcatcataattggttgaaagagatcccctccccctggccctggggttcctgccttccctcctcaagcagggcacccagggctttaggagaagtataggggggcttctttccctgctggggctttaccacatggctcttcagggcctcaaaacccttttcatacctttattcttttttttaaccaaaaaagtttttcttataaaataaattttgggcaaacatcatgcacccctttttgatgattttttcccaaaaaacaaaattcaacagggccctgtggagcaaggagccccttttccctatctccttcctctaagagctacacccagaccagctggttatcagcggaggccccgctgctcctcatgagaacgctggtggaagacgaaggtgatggcagtggaggcagcatcccaggcagcctggagtacctcatcccggagcccccacttatcagtgcaggggttccaccctgccaggtctgaagtgcagtcagaaccatcagggggtggccggatctgacggctgttgacacaacgtcggcagtgcaacctgtcatgtgtgtcactgaggctagcttcatccaggataaacagctccttcaactcgcccagagagaagtggcgctctacatcctgctcctcatccaccacacagctgctcagtgccttcttgtggctctgacgctggaagatcttctcctcaatggtccctgcagacagcaggcggtagatatagcaagtcttcctttgaccatctcgccagacccgggccatggcttgttcatcattggctgggttccagtcagggtcaaacatgaccagccggttagccccaatgagattgaggccacagcccccagctttgctgctcagcatgaagacaaagtcagggctcgatggactattgaagcgttctacaaccttggctcgcttcttaatggacatcgtgccatccaggcggacgtataagtaccttcgggcacggcacagcttctcaaagagatccaaagtctgggtgtaattcgacaccagcactactttgtcactgctacggcttcgggtcaccgccagaatataatccaggaccagcatcttacctgacagctggggctccagggccttagagctgtaaccaggagggaagaggtccaaggcacccacaaagccatcctcctcttccacacacttatcatagattagagctggatgattacaaagcttctttagcgaggtgatggaagaaagggaagacacactcatcttgccctcaagcaattcttctgccggtttggcttgtctcagaaacctcttgtataactcagtctgaaggggtgtcagcctacaacaaacgacctgctcaatcttcacaggcagatatttagaaaggatatcagaagtcctccgtatcaggcatctattcacaatgctggtgagctcccgcagccgctcctctcctagctgcctgtctgcctcactagcagcagcgtctcgacccttcaaaattggcaattcaaaatgcttcttgaattcatgggcagtccctaggatgccggaattaacaaaatgtaccaagctgaaatactcaagcagatcattctggatgggagttccggagatgagcacccgccggctggtgttcaagctgtccagggcttggtaagtctgattctcagagttcttgagcctgtgtccctcgtcacatatgaccagaccaacacttcctttctggaggactccaacatgaaggcggaaggtctcataggaaatgatgaggatgggagaagacaccctggctccacgctggttcatgaatccttccagcttttggtctatttcatccttagatcctccatcgatggccagaggttggatcctccctccgagccatttcccaacctcattgtaccagttcttcaccaggctggaaggcgacaccaccactgccttgtcaatttctggcttgcactctggactctggcgtaaaagtgtccacatcaatgtgatgcactgcagcgtctttcctaggcccatctcatcagccatgatgcagccatggctgccagggatgcgccgactggtgacacactcccacaggaatttcactccctctctctgatgaggccgcaaaaccttactgagaatagggtcaacaaccacatggacagggagtttctccttgtcaagcttcagctggtcatgagcgctcagcgggggaggctcatacagaaccaaggcatctttttccagggggtcatggagggcccggcggaccccagcccttttcaggcccaatgctcgagagcccagaggaccttgataatttggaatggggactttgaaaggctttgacaaaatgcttcgaataaatgcttcatgctgactgctgtccagacaaggtggttgattggttagctgactcaaaggtttccgaaaaggagacaggaaacactcctggatctgggtctcactgctggatttccgtttcctaggagtcactaggccaggttgccagtcttcatcatcacaggacctgccttcaggttttctcttggccagctggctgggagccaagctcctcctcatcctgggcctaggagtttaaaacgtcaagtacccatgagccaaaggtcaaaagcaggcagcggctaagagtgtaggaccagggtctaatctgcccgaattc

SEQ ID NO: 75427 - DNA, 5254 bp, Homo sapiens; identical to SEQ ID NO: 60848

SEQ ID NO: 75428 - DNA, 4775 bp, Homo sapiens; identical to SEQ ID NO: 60849

SEQ ID NO: 75429 - DNA, 1932 bp, Homo sapiens
ttttttttttttccagaaaaggatattttttttattcaagtaactgcaaataggaaaccagagagggagccccaggctgggacaaatcatggctacccctccccaacagaacagggggaggaggtggcccctacaccctttatggtcgattcgggcccccttgctcactctgctgcagcatcctaggggcagggccccaccttccctgggactggggtagtcggtcacccagcctgccatgccccagcccctcttccccacaaagagtatcttgggggaggggatcgtgggcagaacaggaggcaatgaggatgaacatttggcgctggtagcagcagcaatgacggatgtcgaagaatggaacattgaacaaaaaacaacacaactgtccagaggtagtttgtgaacagaggaaaaatggaaccagaaccttggggggcagggaggagcaggaggggggttgggagcgggcagggtgagctccttgttattggtgccccatctgaggagggggaaatggctgagtggcggaagcaaagtagggttaggggagcagccccagcccacctcaggtggcggccacagggctcttgggcctcacctggacaataagtgactgcatctccatcaccacaatatgtactcagatcccaggcggagggcaagggggctgtggccacagtgaagagggagtaggggactcacccctcctgccttcctgtagccgaagggggctgtccaacctagtacggggactagggaagttggggaaggatgaaaagtgagccccacgtggtgacaaagacagtttggctgggggaatcctgggggccagcacccccctccattggccacacctgctgctgccagggcagtggagtagggcgtgccaggatgagatggggcttgggccccttttaaggccaggggaaccctcccaggccccactatgggaagccagagggaacagtgaaggagcagagagggcgcccccaaaccaaaagcccagagagcaatgtccccaccaccaagggagtggggacgcagcaggtgcagggtgcggctaagtgggatgttagccttgtccaggagggcatgtgtgtatgcgtgggtgggcggggggagctgggaactgaggccaggggaaaactgctccccactcagcccatgggagccctgcagcggctggtgtgctgtgtagtgtggtggtgagggcacaggtggaagatgggggtggcggccagaggcggtggtgatggtgggcctggggaaggggcgggggcggtgggagcggagcaaagctgtccagtcccagaaggaagctgctcctccagtgaggagcaggcggcacgcatgggtcactgctcctcctccgaggactcctgcgagatgccctcctcttcctccttctccagttttttgggtctgccccttggtttccttcctggagttgtggtggttttccgggtcttggcagcacccttgtttttgcttccctttggtcggccccgaggtctcttaggtgttggcacttcgctgggctccttctgactccctaccagcgctgtcccgggactcaccggaggctgcttgcgcggcctgccccggccccgcttctcagtgccgtccttttcctgcttggaggccaagggctggctggacttcgagctcgactcactcatcttcccttctctaaggagcaggtggaagagtgatggctgggatgcgcgagctcggccgccggcctgcggtgcgcgctccgggttgccgggagcggcggtgctgggcgctgaggaccggcctggctccgccgcggccgccgctggtagcaaatgcggatgccttcttggagcccggccagcgccagaaatagccccggctcggagtcccaattagaggagcgcagcaccggctcaggggagcttaaaaagc

SEQ ID NO: 75430 - DNA, 2113 bp, Homo sapiens; identical to SEQ ID NO: 60851

SEQ ID NO: 75431 - DNA, 7564 bp, Homo sapiens; identical to SEQ ID NO: 60780

SEQ ID NO: 75432 - DNA, 4407 bp, Homo sapiens; identical to SEQ ID NO: 60605

SEQ ID NO: 75433 - DNA, 1960 bp, Homo sapiens
aattcccgggtcgagggagtccagctctgcagctggaggtgctcatctgcctggggctcatgggtttggaacgggcactcaatgtgttggcgcctatattctataggaacattgtgaacttgctgactgaaaatgcaccttggaactctctggcctggactgttaccagttacgtcttcctcaagttcctccaggggggtggcactggcagtacaggcttcgtgagcaacctgcgcaccttcctgtggatccgggtgcagcagttcacgtctcggcgggtggagctgctcatcttctcccacctgcacgagctctcactgcgctggcacctggggcgccgcacaggggaggtgctgcggatcgcggatcggggcacatccagtgtcacagggctgctcagctacctggtgttcaatgtcatccccacgctggccgacatcatcattggcatcatctacttcagcatgttcttcaacgcctggtttggcctcattgtgttcctgtgcatgagtctttacctcaccctgaccattgtggtcactgagtggagaaccaagtttcgtcgtgctatgaacacacaggagaacgctacccgggcacgagcagtggactctctgctaaacttcgagacggtgaagtattacaacgccgagagttacgaagtggaacgctatcgagaggccatcatcaaatatcagggtttggagtggaagtcgagcgcttcactggttttactaaatcagacccagaacctggtgattgggctcgggctcctcgccggctccctgctttgcgcatactttgtcactgagcagaagctacaggttggggactatgtgctctttggcacctacattatccagctgtacatgcccctcaattggtttggcacctactacaggatgatccagaccaacttcattgacatggagaacatgtttgacttgctgaaaaagggagacagaagtgaaggaccttcctggagcagggcccttccgctttcagaagggccgtattgagtttgagaacgtgcacttcagctatgccgatgggcgggagactctgcaggacgtgtctttcactgtgatgcctggacagacacttgccctggtgggcccatctggggcagggaagagcacaattttgcgcctgctgtttcgcttctacgacatcagctctggctgcatccgaatagatgggcaggacatttcacaggtgacccaggccctctttcggttctcacattgggagttgtgccccaaagacactgtcctctttaatgacaccatcgccgacaatatccgttacggccgtgtcacagctgggaatgatgaggtggaggctgctgctcaggctgcaggcatccatgatgccattatggctttccctgaagggtacaggacacaggtgggcgagcggggactgaagctgagcggcggggagaagcagcgcgtcgccattgcccgcaccatcctcaaggctccgggcatcattctgctggatgaggcaacgtcagcgctggatacatctaatgagagggccatccaggcttctctggccaaagtctgtgccaaccgcaccaccatcgtagtggcacacaggctctcaactgtggtcaatgctgaccagatcctcgtcatcaaggatggctgcatcgtggagaggggacgacacgaggctctgttgtcccgaggtggggtgtatgctgacatgtggcagctgcagcagggacaggaagaaacctctgaagacactaagcctcagaccatggaacggtgacaaaagtttggccacttccctctcaaagactaacccagaagggaataagatgtgtctcctttccctggcttatttcatcctggtcttggggtatggtgctagctatggtaagggaaagggacctttccgaaaaacatcttttggggaaataaaaatgtggactgtgcgaagaaaaaaaaaa

SEQ ID NO: 75434 - DNA, 2080 bp, Homo sapiens; identical to SEQ ID NO: 60854

SEQ ID NO: 75435 - DNA, 597 bp, Homo sapiens; identical to SEQ ID NO: 60855

SEQ ID NO: 75436 - DNA, 6355 bp, Homo sapiens; identical to SEQ ID NO: 60856

SEQ ID NO: 75437 - DNA, 1465 bp, Homo sapiens; identical to SEQ ID NO: 60857
  misc_feature (1)...(1465): n = a,t,c or g

SEQ ID NO: 75438 - DNA, 2793 bp, Homo sapiens; identical to SEQ ID NO: 60858

SEQ ID NO: 75439 - DNA, 3680 bp, Homo sapiens
tttttttttaccgggcaccaacgttggttttaatggcatcaacacccaggaggtcacacgtcagttctggttggcaacgtctaggggtgaggggctgtggcctccagtcggccccacagcctttgagaactggctgcccggtcccacccgcttcccgccccgccccactgaaaaaacactaaacgattgcactgacagacagaccccagagcgcccggcctcccacacacccacggggctgtcagagtcaaccagggctttggcgtcactcggcggtggcccggggctgcgcccaggatagtgtttatcaaatgtgacacaggttcatttacaaactggggctctggaaggtctacttctgtggctctaagagacttgtctctcatggcttctctcggagctaccggaagttggacctggataacgctgtgtaggttggttggtttatttgtaaggaatgtgtaaggcattttggtaagttgaacagtaacttctttttccaaagaggaaactcagacagaggtgccctcctttgagctgctgccgtcctctgccttttccagctgttcctgcagcttcttcaccgtgtccttctcccttgccagctgctcctgggtcgtcttcagaagctcctgcagtctcgtggcggcgcgccccaggtcacttgttaacttcttctctttttctagtctctccttcagctgtgaggcctcctctgtttctgaagactctagggggccggctgtgcggagcttctccaattcttcttgtaaccgacatgccgaggtctgagcctcctcaaactcggccgtgagcttctgccgctgtgtctgctcatcctccaggatggcttctgtccactccagctgcgtcttcagctgaacggggtcctgctcggctgggggcgcctctggggaggaagctggggccccagctatgtcaccatcctctacgtggctcttcatttcactcaactgctgcctgaccagggcaagctcatcgctctgtttctgggcttcgctcttggcggcatcgagctgagattgagattctaggagaagttgcctcagccctgccacctccttggcgtagttctggcactcggcgctggcggccgccatgtgcttttccagctctgcctccaaatgcgacgtgtgctccctcacctggtccgaactttcaagttctccttttagcttctctacaatctcttcgagatgcttcactgtgacccgggacttctggagctcctcctctgcggcgcccaccttggccctccacacctgctcctcctcctccacgctcttctgcaggtctctgagcatgccctccgtctccgccaggatgctgcggtactggtcacactcggcctgcagtgtgctctgcgtctcctcggcctccctcaacttggaggccaggtccgaggagggctccgcgggagctggcgggtgcttcagcagcgtggggcctttctctttgagatcctgcagccactcggtgtaattctgttgtgccaagacagagagttctgggagcagagccagcagggcctccatggtctgcgcctcaatcagacagagctgcttctccgattcctccttggcctgggtcagggagtgcagcttctccttgcaggcctgctcggccgtggccagtgcctccatggccttccagttcttctcccggaggtcattgttcttcactttctgctgctcgacggcctccctgagctcgatggcctccttctccagacccgacacctgggactccagctccttgaggcgagtctgctgctggtcagcctccgcctggctggcctggacgtcctgggcatcccgcggcctggcccgcctccagcagggcctcaatggaacggattctctctgtgagctgggagttctctgccctggcctcctggagctgcccgtggaggccactcagctcctcgcatttgctgcgcacctccgcctcggaggactgtaacttgctgtgcagctcggccatctgctgctgttgctcctgggccttctcggcatccgcccggaggctggcgtggctgctctgcgtgtggcacagctcccggctgacctcgtccaggcgcttctgcagggcctcctcactctccctgtgggacgcctgcagctgcaggacctgcttctcgaaggcagctgccttggcttccagagctttccgctgctgctcatcttgccgcacagcctctgacttctccaccagctctttgctgaccttgctgagctcctgccgaagcttggccagctctgcgttctgcttgctctccacctggctcgtggcctggttcaaggcatcccgcaggatggagttctcctgctgcaggcgggccagctgcgtgttggggccattctccagctgctcctgaagagtccggatcttgccctgcagctgctgcacctccttcacgtgctcccggtagctggcctgcatgcgtgcctgcacagccgtgatctcctgctcccgggccaccagctgctttttcactttggcctccccggctgctgctttggccttttctgctgccatctccttgttgagctccctcagtttgctcttggcgacagccgcatcttcctgttctgtggccagcagtttttccttctcttccagctggcgtttcagaatcgccacagggtcacccttctgagtggccttgtgccaggtgtcctgaatgatgccagccttctcagacaggatctcgatgagccgctgggcctcgccctcgttgaacaccatgctcccaaccgtggagaccagcgtcttgtaggggaggtagagagggccgtcggcatctgggggcccttttttctttgaaccagacttcttcttggcaggagcctcttgctttggtgcctctgggctctgggccacatctgtatttctgccctccttgggagcagtttccaagatggcagccttcgaagtgagaacctggatggaattcactacagagctgacagctggttccacttttgccacttttttctccttcttctttttgtccttgggggaggaggccagcttctcctggggcatggctggaactgtggcgacaggagcaacgataatggggggctgcactggggttggagccacagccacagcaggagcccgcactggttctcgaaggaggacagtcacattgggggctggatcatgatcaggtatcttcccattaggtttctcttcctttttcttggtctttcctttcttctccactgttttctccttctttttcttctcgactttctggtggtgagttttcgccatctccttgcgctggttggctagggcttcttcatatgacgtttccttcatggagaaagtcgacaccaggaagatgccaatggcagaaacaaccatgaatcctccaaagaccacaacccccaaggtttgagtgtcgtaaatatccatcctggcttgctttcctttcactaggaggtctgccccggcctttgcttcaacagagagggaaatggcacctccaggacctcagaaccggaagcttctttctgcagccagagacgcgagagggaaagcgagagggcaggagccgccgccttcgcagccgccgcggagccgggagagaggagccggccaagcctccgccaagaaaaagcccccgagcagctgtagacgctgcgact

SEQ ID NO: 75440 - DNA, 2083 bp, Homo sapiens; identical to SEQ ID NO: 60859
  misc_feature (1)...(2083): n = a,t,c or g

SEQ ID NO: 75441 - DNA, 2154 bp, Homo sapiens
gctgcgccccacgccagcccgcgccccgcatggctgccgccggggccaggcctgtggagctgggcttcgccgagtcggcgccggcgtggcgactgcgcagcgaggcagttccccagcaaggtgggcgggcggccggcatggctgggcgcggccgggctgccggggccccaggccctggcctgcgagctgtgcggccgcccgctctccttcctgctgcaggtgtatgcgccgctgcctggccgcccggacgccttccaccgctgcatcttcctcttctgctgccgcgagcagccgtgctgtgccggcctgcgagtttttaggaatcaactacccaggaaaaacgatttttactcatatgagccaccttctgagaatcctcccccagaaacaggagaatcagtgtgtctccagcttaagtctggtgctcatctctgcagggtttgtggctgtttaggccccaaaacgtgctccagatgccacaaagcatattactgcagcaaggagcatcagaccctagactggagattgggacataagcaggcttgtgcacaaccagatcatctggaccatataattccagaccacaacttcctttttccagaatttgaaattgtaatagaaacagaagatgagattatgcctgaggttgtggaaaaggaagattactcagagattatagggagcatgggtgaagcacttgaggaagaactggattccatggcaaaacatgaatccagggaagataaaatttttcagaagtttaaaactcagatagcccttgaaccagaacagattcttagatatggcagaggtattgcccccatctggatttctggtgaaaatattcctcaagaaaaggatattccagattgcccctgtggtgccaagagaatattggaattccaggtcatgcctcagctcctaaactacctgaaggctgacagactgggcaagagcattgactggggcatcctggctgtcttcacctgtgctgagagctgcagcttgggtactggctatacagaagaatttgtgtggaagcaggatgtaacagatacaccgtaaaggcatcttaaagccttgaaaaatgttaataatcttttataccttgcaattccatttctgggattttatcctaaggaaatacttataccaaaaatagaggtgcagagatgttgacggattgcttacacagtgtctacttattagtgaaacaaaagtgtccagtgacagggaattaaataaattttggtacatccacagaggaaggctacacagtcttaattataacacctatattgacaacagacataccattataggtggtattcatggtatgatcctattcttgtaaaaatatttgtatgtatgcacagaaatctgcaaagatgtacacttagtgaactggttaccaacgaatggtgggactaactaaaatggtctttttacttatatgtgcatttctttttataataaaaatgggttatatgcctaatgaagtcaaaccatctcactctgagcatttcccaccctaggtttttaaaacacaaaaatacttaggtaaaactcccaacaaacttgtctgatcattagctgattatcacaggctctagtatgtactggaagcccagaatatttgagaaataccaaacctcaggttggtgagtatgatgaacaggaaacccagtaattctgaagcagcagtatcacagttggcaggatgaggaacaacagtggctttgtgatcacagaactggaatttaaagaggctggaccttcagaactgatcttggtcagccagcggccctgcttacagatgagacactgaaaggcaaaaggcgatggtcttccctttccgtgtcagcattgtatacaggttccctatcgcacatacaagggttatggaatgtaagccaaaataagggtctggcctaggaggcagcagcctgaaggaaaggaaggccctgaagtcagttttcaaaggggctgacccttggcctattatgtttctgatacatctgtttaagcaaagcggctcctaagactacactaaggtttcttccatcccctagcaagctcacagttgacaattcccagttctctcagcacccagtggatgcctgccctttaagacacattgctgttgatcagtgg

SEQ ID NO: 75442 - DNA, 2514 bp, Homo sapiens; identical to SEQ ID NO: 60860

SEQ ID NO: 75443 - DNA, 2901 bp, Homo sapiens; identical to SEQ ID NO: 60861

SEQ ID NO: 75444 - DNA, 2705 bp, Homo sapiens; identical to SEQ ID NO: 60862

SEQ ID NO: 75445 - DNA, 403 bp, Homo sapiens; identical to SEQ ID NO: 60863

SEQ ID NO: 75446 - DNA, 1415 bp, Homo sapiens; identical to SEQ ID NO: 60864

SEQ ID NO: 75447 - DNA, 5868 bp, Homo sapiens; identical to SEQ ID NO: 60865

SEQ ID NO: 75448 - DNA, 6087 bp, Homo sapiens; identical to SEQ ID NO: 60867

SEQ ID NO: 75449 - DNA, 1803 bp, Homo sapiens
ttttttttttttcaagtttgagaaatgtagttttattaatagaagggcatgtcttaccatacacactgtccccagataaataaaatcccaacatctttgaaagcacacaaacacacagttttacagggtacaatacaaagtgaactttgatgatgttcttacttgcatttactaaaaatctgagaaagactgtaatcagtctttaaataattatcttgacgtaaagaggaaaagtaggaggcacaatatatatatatcacaaaccaaatcacactctctggtaacatttacaacagggggatttacttaatccaaaaattaaaaggcaaactgggctggagggagggctggtatcattttttttctccaatatttacggctaaatttctatttttgggcatgaaatttattaaacctttttccattagtagggcaaatgtgctctgcaaattctcggatgggcaccacggccaccattacatttgcaaatgtatccaacagccttctgggcagtagaacaggcatcagcaggagcgccacttaggcccactctcttcaagcactcttcatcagacacttcatttccaagatatgccacttctttccagcacaggcccatttcttttctccattcatctacaactgctagcttgtctgatacactgacttccattttgcaatccagttttaaagaagacagcgtctgctttgaacaggccctttctgagattagcctcacctcaataccacttttctttaataaacttatcccaatagcatcttttacatcataagatattatttctttttggtctcctgatacataaatgtggccattggtgagacatccatcaatattgcaaaccaaaagttttatttccttaagcttctctttgccaaaatagccatatcttaatactctttgctctgcaataggccaatcaatatccacatctatatccacactatgttcagctcgcatttcgtagtatgccatttttccaccctgcaagtaacccatctctatcaaatgtcttttagcaaaataaaatgagccattttcatataattctccatcccagtcttgtcgacgaggccgtttagctggatttaaattcagaggttcggtcacttcacgaactcctttctgaatttcactccatcgaaactgatggcgtctcacaacagagaaaacagaatcatatccttcttctcgaatcatttctgcaactttttgaagatcagtaggatgtaaacatggagaagtagcttgaatatttcctacaatgtcaacctcattatgataattaagaaattctatgatggcatctagtgaggtagagctgtcttttgaaacttcagaacttcttcgatgaacttgtgcaccaaattgtttggccacattctcaatttcatcatggtctgtcgaaacccatacactctggaaggcccctgaatccagggccgcacgcaggacccagccaatgagcgggacccccgccaggtgcttaatgttcttcagggggatgcctttgctgcctccccgggccagaattagggctgccaggtgcgggggcttctccacacctcggccctggccgccgcgagagttgcgctgcagcttcggcggccggccccgggacggtcgcccccgcgggttggagacggaggtggcggcccccttctccaccgagtccatcttcctcccacgccttctccccagcttctccacatccgggagctagtccctcaccacctcagctcggcgccgcccctcgtgccaagcttggcgtgtcgatattc

SEQ ID NO: 75450 - DNA, 1447 bp, Homo sapiens; identical to SEQ ID NO: 60869
  misc_feature (1)...(1447): n = a,t,c or g

SEQ ID NO: 75451 - DNA, 1010 bp, Homo sapiens; identical to SEQ ID NO: 60870
  misc_feature (1)...(1010): n = a,t,c or g

SEQ ID NO: 75452 - DNA, 3579 bp, Homo sapiens; identical to SEQ ID NO: 60871

SEQ ID NO: 75453 - DNA, 2061 bp, Homo sapiens
tttcgtgccggtccagagctgtggggtggcctccgcgcggtctctggcggagtcggggaatcggatcaaggcgagaggatccggcagggaaggagcttcggggccgggggttgggccgcacatttacgtgcgcgaagcggagtggaccgggagctggtgacgatggcggggccgcagcccctggcgctgcaactggaacagttgttgaacccgcgaccaagcgaggcggaccctgaagcggaccccgaggaagccactgctgccagggtgattgacaggtttgatgaaggggaagatggggaaggtgatttcctagtagtgggtagcattagaaaactggcatcagcctccctcttggacacggacaaaaggtattgcggcaaaaccacctctagaaaagcatggaatgaagaccattgggagcagactctccaggatcgtctgatgaggaaatatctgatgaggaagggtctggagatgaagattcagagggactgggtctggaggaatatgatgaggacgacctgggtgctgctgaggaacaggagtgtggtgatcacagggagagcaagaagagcagaagccactctgcaaaaacaccgggcttcagtgtccagagtatcagtgactttgagaaatttaccaagggaatggatgaccttgggagcagtgaggaggaggaagacgaagagagtggcatggaagaaggggatgacgcggaagactcccaaggcgagagtgaggaagacagggctggagatagaaacagtgaggatgatggtgtggtgatgaccttctctagtgtcaaagtttctgaggaagtggagaaaggaagagccgtgaagaaccagatagcactgtgggaccagctcttggaaggaaggatcaaactacaaaaagctctgttgaccaccaaccagcttcctcaaccagatgttttcccattgttcaaggacaaaggtggcccagaattttccagtgccctgaaaaatagtcacaaggcacttaaagcattgttgaggtcattggtaggtcttcaggaagagttgcttttccagtacccagacactagatatctagtagatgggacaaagcccaatgcgggaagtgaggagatttctagtgaagatgatgagctggtagaagagaagaagcagcaacgaagaagggtccctgcaaagaggaagctggagatggaggactatcccagcttcatggcaaagcgctttgccgactttacagtctacaggaaccgcacacttcagaaatggcacgataagaccaaactggcttctggaaaactggggaagggttttggtgcctttgaacgctcaatcttgactcagatcgaccatattctgatggacaaagagagattacttcgaaggacacagaccaagcgctctgtctatcgagttcttggcaaacctgagccagcagctcagcctgtcccagagagtttgccaggggaaccggagatccttcctcaagcccctgctaatgctcatctgaaggacttggatgaagaaatctttgatgatgatgacttttaccaccagctccttcgagaactcatagaacggaagaccagctccttggatcccaacgatcaggtggccatgggaaggcagtggcttgcaatccagaagttacgaagcaaaatccacaaaaaagtagataggaaagccagcaaaggcaggaaacttcggtttcatgtccttagcaagctactgagtttcatggcacctattgaccatactacaatgaatgatgatgccaggacagaactgtaccgctctctttttggccagctccaccctcccgacgaaggccacggggattgacatcgcccacctccgacacccagtgggcgccttggctggtgcggctgctggtccagatggaggaaaccagtgactttatggggctgagctagtagggaagcccctggaaagatgctgcgttccgaacctgtgcctaatacacgcaagggcgctgtcccgcccaaccccgcctttaaacgccacaaataaagagcattgttaccgcccaaaaaaaaaa

SEQ ID NO: 75454 - DNA, 1860 bp, Homo sapiens; identical to SEQ ID NO: 60874

SEQ ID NO: 75455 - DNA, 975 bp, Homo sapiens
gtccagtgtggtggaattccgccgccactgtccggccacagcctaacgctcttcgctgtcgtttgcggtctcgcgcagggcggccccggttctggtgtttggcgtcggaattaaacaaccaccatgtcgagcaaaaaggcaaagaccaagaccaccaagaagcgccctcagcgtgcaacatccaatgtgtttgccatgtttgaccagtcacagattcaggagttcaaagaggccttcaacatgattgatcagaacagagatggcttcatcgacaaggaagatttgcatgatatgcttgcttctctagggaagaatcccactgatgcataccttgatgccatgatgaatgaggccccagggcccatcaatttcaccatgttcctgaccatgtttggtgagaagttaaatggcacagatcctgaagatgtcatcagaaacgcctttgctcttgctttgatgaagaagcaacaggcaccattcaggaagattacctaagagagctgctgacaaccatgggggatcggtttacagatgaggaagtggatgagctgtacagagaagcacctattgacaaaaaggggaatttcaattacatcgagttcacacgcatcctgaaacatggagccaaagacaaagatgactgaaagaactttagctaaaatcttccagttacattgtcttactctcttttacttctcagacacttcccccaccctcatagaacctgttgcatgcaacttagtttcacagctttgcctcttctttttgatgtatttattccagacctttctgccactttagcacttggtataatcagactgggaaatgggggatgagggtggtaaattgtattgaaaaagatcgcgaataaaaatcaacaaagtgtgaaagcccagaaaaatatattcgtatttcctgggttttgctgggatttttacatttttatataataaaaatgttattttgaaaaaaaaa

SEQ ID NO: 75456 - DNA, 3684 bp, Homo sapiens
ttttttttttttgaaaaaacggggtttatatgatgttttaaatctgcaaataggtcgttacacaaaagtttttttttgcttttaaataaatttcacacataagaaagagaaatatgaaagcgacggtagtgaccagccaagaggaataataattacattcatcttaatgtgtgtgtgcccagttcctgtttacattaacattgggaaaactccagacctggtaatccaggaaccccaaatttgtgagtggaaagtttttaaaagggcacgtggaagtcaaagggtttctctttttttttttttccccttttagaagctatacataaaaagttgttttccttctgtactgtcacagaacttttacatacattctcagtcctagttgtgaaaggcctaaagagaaagaaactcaatttgcagtccaacacaaaggggggaatttctaaaataaataatccaacagttttttgcatttttttaaattaatttttcatttttttaaaataaaataaccaaaaaagtgtaaagttacaaaaaatgtcgttgaagaataatatattaaaactgtggaaaaaaaggaaaaagacacgtcacaaaattttaagattaatatgaagatcataatttaacataaaagaatatattctatggatttgtcatcccgataaatatgaacaaaattaacaaaaaaaagcatagtttggcaataaatacgttttgataagttaaataagcttttttatattgatgtgcagtgacaagcaaaatttttgctctccaatttctgaaagttatatgaagtttaaaacccagggaagaaagcatggcgtgagtgctctaaggatagacctacggtattctagagcaaaaaccattaaagctacttctacaggaaatcgttttacacagatattgtatgtggaatgaataccattaactgctcaccccttactttttttttttttagcttttctctcatttttttttttgttgttattttttttaaaaagatgtcacatatgaactggggaactttagcaccaaaatcaagtctctcctagtccatctagcttccccttcctccccacttaaaaaaaagaaaaaattaaaatcacaaagtcccgacttaagtcaaaatcttcgtccgctttttcagccttccttcctgcagacctacacaaacccaggcaagattagtcaacaggggttcagatcgggaagaaaaaggttttgaatgtcaagacaggtttcccccaaaacccctggtctgggcaacaactcttccaaggggcaggggtggggggggtgggggggctggtacagggtggagaggtgccaccggggaagacggggaggaggaataagtgtgcgggagacttgaaatgagggaaggtgcagttgtgtcgccagtggagggggctgctggttccgggtctccaccccgccatgggcagaggctccggggaggcccacgggtgccctctggcgctgaagaaggtaatgtagtcacagtgacaaagttagattacaaggcactaagttgcttctgtaaactgttaactgctttttcctcttgtgaatttggcacttaaagccttaagcccggaaaaaaaaaggcatctactgacaaaatatgggacttgtctgttatgccatggtaagtgggctataaaatcccagggagggggtttcaagcccagaagaagctactgacaaattgacttgtccttatgttaggtggggttatgagggggagagggagggcacattctgaggtgctgggggaaaggggttgagccttaaccttgttaatgtagggcctgtggggaatgggatgggtagggagaagagggtatggggatgtggggtgcagggtaggggtctggagtaggcaggaggtccctccctaccctggcttagtcatctgagatggaaagtctgctgaagatgggcaggcgtcttgagttgtccaaggtcggggagtctgagccactgtggctgctgctggagctgctcaggtagccctcctggtccgagagagaatcctgagggctggggggagagtcaaacatgtgaggggactcggacatgggccggaagaggaaggtggtcggggagccacccccgggcagccccatgctaggggcaaagaggcttgccagctcctggctggagaaggcaaaaggggttattggtgccatcgggcagggtaggtgagcccaggaggtcatcggcgctcagaatagggggtggggtgatggacgtggggctgtccagcagcccggtggcagcggcggtggcagcggcactgggaaacccagcaaagctaaagctatgctggaggcggggacggtcagcggagaggtcccgggccccggccagggcacggcgctcttcagcgttgtggatgaagtggcagcggggcccgtaggggcaaaagccgatggtgtggaaggtgcggcacagctccgtcttgtacttggggtggcgggtcaggctgcggagctcgtggatgccgtgtgcgaactggcacttgtccccgtacttacaggcaccgttttcctcaaaggggcggcacagctccggtcttgtagcggctggagttgacctggccgcccccgggctgcttctgggtgggcagcagccgctcgcccccttccgagaaggagcggtctcggaagcggctgtctcgcgagctcagagcgggggctggctcacccttgaggctgctgaggagctggttctggcggaacttggagctgggcagggtgactgagtgcctccgagggaagcccccaccagcaggggtgcccactggctttctgggcaacaggtaaccccctgcactgggagcactatagttgagcatcttgttaccctggagagagaagagaaggatggtaaggacagaggacatccaccaggatgtccactatgggcagccccctacacaatcacaaacgcccgctctttctcaaagaactcatctctacctcggctctagcaagctcccttccctctctccctcccataggccattcacctgggtttattttggccccatgcgtaagaaaccacaagatccaaactgtgtgacaagcaccctgctccatgctgactcctgcaatgcaacccccatgtcctctgtccccaaagctaccactttaaagttcaacttttttactagtcaaatagattcttcaactcaaaatatctcacacaacccagacctctctagattaccgcacccgccccgccaccgcccgcgacaaaaacaggtaaacctcagaaaggagtctatcataggcacgttaggtccccttccaatcagtctctgcttaattgataccccctccttcaagacctggcctaagactctcaacttcctccttcagaagtgttcccttcctttggcaacaggttttcagactgcctttgctttttcttgtggggaggagattgggggcctggtctgaggttgggggagacagggatgtgattcctgaaaataaaactctttgccctaagttcccggaagagatattttctacaataatctctctcaccatttccactcagccctagcccaccccgcccccttcactgagaagatgcctttgcaattagtcttttggctgcaagagcaagcttggataagagctccagtgtttaatctttaacgca

SEQ ID NO: 75457 - DNA, 3624 bp, Homo sapiens; identical to SEQ ID NO: 60877
  misc_feature (1)...(3624): n = a,t,c or g

SEQ ID NO: 75458 - DNA, 1956 bp, Homo sapiens; identical to SEQ ID NO: 60878

SEQ ID NO: 75459 - DNA, 2547 bp, Homo sapiens; identical to SEQ ID NO: 60879

SEQ ID NO: 75460 - DNA, 4423 bp, Homo sapiens; identical to SEQ ID NO: 60881

SEQ ID NO: 75461 - DNA, 1316 bp, Homo sapiens; identical to SEQ ID NO: 60883

SEQ ID NO: 75462 - DNA, 1470 bp, Homo sapiens; identical to SEQ ID NO: 60884
  misc_feature (1)...(1470): n = a,t,c or g

SEQ ID NO: 75463 - DNA, 4176 bp, Homo sapiens
aaggtaagtataattttctgcttttattgaaaatttatatatgactcagtattgtaataaataaacataaccattttcacaaaaaatgacagtgctatgctaaagaagaaaatattaaatgggggatttacttgtagtggcaagacagactttttatcaatacagaataaatattaacagcatttcgtgagccaatggttgagacccaacaaaatgtagggaatcaagcatgatgtaagaaataattttccagagaaaaaaggatggtgtattctcggatgataagactgtctttgtaaactggggcatatcaattagtcccatcctcacagctcaccttcaaaccacagggcttgtttctggctatgttaaaaggaccctcctctgaggaaaagcagaggagaggaactcccattatccttacagtgaaacgcaaccactgcagaaaaactcccactgggtaaatagaacacagtttaataagtagattggatatgatctaactataaaatttaggtaacagagtaagtgttacatgtggcaggaccggaaaaaaatcatgacatttttcttatccccttgtacccctcccactgtcattatgctattaccaacaacaacaagaataatgtttcaaattttcctctcatcaaaaaatgagagaaaataacgagggaagtgtttttgttctttttcgaacagtttcttgaacacctccaataccaatcactcacaaggtgtctgtgcaaatctatttcacaggatttcaaggaaattgttaactcacaaaaaaatccttaaatgaagctattttggagttctgtatattatttggaaaggagggaggaaaagggtggtggtggtaaagtagaggtaaagtagtacaatccagccaaacaaaatgttaaaagttttaaatcaacaatgagtctgactttttctggtttgggaagcaagactctaaaatgttgggagagattctttctgatctgatggctactgaagaacacatttctcctctttcttggccatcttgcctttgttttgctccagagttcgctccaaatgctcatcttcttcttcggcctgcttctcctgcgcgtccaggtccctgacgagcgcatcgcgcttgttcaccagggccaccagctcatctagcagaagctgttcgcgtcgcttctgggcctcggtcttctgccagtcttcaatggctagcattgccctcaattcccggttcagcagctcataccgtcgttctaaatcatgttctttttccagaagagagagctgattcattctccttattaaggcatttttcttattaactaacataaaccattcctgcatcatagcttcttcttcttctgtgttccttcctgtgtccatgagatagcgaaggcgcttctccaccagcgcggcacgggtgtcaatttgcttttgctcattctctagtgctgccaattctcctactacatactgactgggagtctttgaaccctttattaagcacttcatcttctgatggcttcctctgagtttcagttatcgctgccttctcctcatttcctttctttgtatcttcctgtattgatctctgccttttcatctctggtctattctcaatatattggctgaaagactgaagttgagtttttctgactgtagaatctttgctgaacacaacaggatttctaaaacgttctgttgttttttgtaatcgttcagtccggagatcttctgtgccacttttcatgtcctgctctgagctctcagttacagctttctgggcagcactggagggtgaatttgccacctgtggctgaacttctaggagcttcttcagcttcaagtccaccaacttactgttttgttcgggagtatcaaggtcattttctaagttagtaagttcatctccacctcctacaacaaagccttcagggatctcctcgttagtatctatctcaatattatcattttcatctccagatgcctttgacctttctttcaacttttctgcagccctttcaccatagctgggaagttctgacatcttccctccagatcgagcttctgctattagctgacgagctctctctctcagctgccgacgtcgctcttcatcttgctgatcacttagctgcctgttgcagaatggggcggctgtgttggtattgtgcttattccccgcctttaaggctgcatctcttcttgcttgctcaagcagaactcttgctctttccttaagttcttcttgtctagataacaatcgatgctggactatttttgatgaatgatctgcatgatttaaagtggttctatcagcatctggatcagactccgtctgcctcagggaagcatgttttttcttagcaaggtctagatctctactatatgagtatccaagtttagaagtaggagataaacttgtttttttgataggagattctggatctgatctgcattctaaggatctggaattctctaatttttctttctccaagttactaccgatgtctagagtttgaagcttttgttcatctgtctcctcacaaataaagggtggagacatatccttcttcttatcactaacatataagtcactcaattctaaagtctcagctttcaatagtctctttttgcctaacaaaacctgtgcttgggttgaatctgtattggaacatattccagggtcatcagatcctgaagtccttccagagctctgctgagacttctggggttctgtgtcacttttagtcctgcgacagtaaggggaggctgtgcttggactaaggtgatcatcaggagtttgatgctcactttctgactctccaaccccgctatcatttacaaatacagagtcatcctgtgataagaagtctactgctccgctgataggctgttgtagttcaggctcccgcttcagatcactaagctctgcatagaatttttcttgatcaacagaactgtttgtatctgtttcatagtttccaactttatatgtgcttttactgctgttttcctctatctgaacgacatttagttcttggccactgaaatgtgcccttatttgatagagataagtcataacagtcagtttatcaggaattgctaataataccatatcagaaggttccaataatcgggaaattcctatgctggcaaatccatcgtatgcctttttgttgttctctttaatatcttgaggattcagagacttgtagtcaattaaatctggtctaaagtggtgtaatattgcacaaaaagataaaccatttctccacgatgtagtaaaattggtgatttttactcctcggtagttctttgtaacttctttacaccatacaagcaaagactgactagcatttggctttcgccccaaaacaggacttggtatagggcttggcttaggagaagtagagagatcttttcctgcagaaactgtgttttcatttaatactcctgtttttggtgagaggactggtggagccggggcctttcttttcactcgcctttcagtttctagttcttgaacaggatttaccaaattatttggaggaggagttgatttaggttcataaaaaggatttgattcatccaattcttcttcttcagttttagaactatcagcatagaggtacttgctcatatccacaggtcttatattttttttttttgtagactggggaggagaatcctttatggtcacaaatgcttctggctcatcgaatgggttcaaatactgtggagtctgcacctctttaaagggattatagctgttattataaaaagagtcttctgtttttctaggtgaagctgtttcagtgataggttcttctgagtcaggatctccaaatggatttaattctgcagcatcaggatcatcaaatggatttgaattcacggtggccaagtccttttctgcttcatccaaaaagttaagtttgttgataagctctgtaattttagctgccttttcttcttggttcactctgttctcatcatcatcttcattatcttcttcgaagtcatctaaattggccaatgtcagcctggcttcatactcatccaactaggccaacctttgcatgtcttcatctgtggcttttccttccctgtgaaaaatgcaagataatgaaaactgaagagcggcagatacaacttttttagataatggct

SEQ ID NO: 75464 - DNA, 1382 bp, Homo sapiens
ttgaggtgtcccccaggggcagcaatatctgagcacctgtctcccacagcactcaagcatcaagcagtcgtgcatcaagcatccagcaggcccgatccccgcaggccacttgcccatctttgtccactcagttggataatcagaaactggtgcctcagcctcgtgtgcccccggtcatcgtcctggagaaccaaggtctccgctgggtccctaaggataagaacttgtgagtaccccactccctctacctcttcttagaagcccaaggctcctgggtctcctctgtccttggccctgccccaagggtctttctctagacccaatctctgttaagtctgtgtctggacccactacttgctgtttgacctccatgggggttactatttcagagtgatgtggagggactgggaagagtcacggcagatggtgggagctctactggaagatcgggcccaccagcaccttgtggactttgactgccaccttgatgacatccggcaggactggaccaaccagcggctcaacactcaaatcacccagtgggttggtcccactaatggaaatggaaatgcctgagccagggccagcggggcccggttccaatagtgggaccaacccactgggtgtatttgagtgttgagccgctggttggtccagtcctgccggatgtcatcaaggtggcagtcaaagtccacaaggtgctggtgggcccgatcttccagtagagctcccaccatctgccgtgactcttcccagtccctccacatcactaagttcttatccttagggacccagcggagaccttggttctccaggacgatgaccgggggcacacgaggctgaggcaccagtttctgattatccaacataataagtactgcatcagggaagaattctgcaattcgcccagcaattttcaaggccaggggcccagggctctgatcgttcacagctgcattggcatggtagtaaccagccaccaccagaccggcctgtgctccccacacatccacctggttgagggcgacctccaacatgacggacagggccaggtggctgtggaagaggggcacacagtcggtgaggcacaggcattctccagaccgcggcgctggcgccaaaaacagcccgttgactgcggcgtgtgggtaccgggcagcatgcaggcacatcttcacgtaggccagggccgagatctccacctcccccatggcgagcgaggcttcggttcggcgacaacgctaactcgactcgcaggtagcccgccggctcccggcgccctgggtcccggagtccgcccccggcccagtccaggaggaggtcccgattgcatccgagccccgccttcccgcgcccctagctggcggccgcgactctgcgcc

SEQ ID NO: 75465 - DNA, 1783 bp, Homo sapiens
  misc_feature (1)...(1783): n = a,t,c or g
acttgacggcactgcgctgcacgaattcggcacgagctgcagccctggtgcgacccggcccgttgccgtagagatgggcagggctggatggagtggggtgcggtgagctgagctgaccctgcttcgccacggggactgcagtgaccccggcttgccggcagggcgggtaacaggttgagccagggtggggctgctcaggggcgtggagccgaggccaggatttctctgaagacccggcacaggctattcctttctgcgacgagcccattgctatggaaaccaaagcgttaggccagcggggattgaggctgcgggatcatgacgggtctctctcccgaagaaccttgcctaaggcttccccaagcggctacttcctgagcgaacccgcccacccgcctgaaggagagagttttccatggacacagcctagcagaaagacgcagccttcgtgcttcgctgactgctgaccactgacccaccgccttgatgacagcaccctcgtgtgccttcccagttcagttccggcagccctcagtcagcggcctctcgcagataaccaaaagcctgtatatcagcaatggtgtggccgccaacaacaagctcatgctgtctagcaaccagatcaccatggtcatcaatgtctcagtggaggtagtgaacaccttgtatgaggatatccagtacatgcaggtacctgtggctgactcccctaactcacgtctctgtgacttctttgaccctattgctgaccatatccacagcgtggagatgaagcagggccgctactttgctgcactgtgctgctggtgtgagccgctcagctgccctgtgcctcgcctacctcatgaagtaccacgccatgtccctgctggacgcccacacgtggaccaagtcatgccggcccatcatccgacccaacagcggcttttgggagcagctcatccactatgagttccaattgtttggcaagaacactgtgcacatggtcagttccccagtgggaatgatccctgacatctatgagaaggaagtccgtttgatgattccactgtgagccatcccacgagcccctgcattggagtcagaggtacagatctattgttgatcttacaccaagatccaaacttgaacattctacttttgttgatacagaaaaaaacagatgatgccttttatgagcacaaaaaagagttgctgtagcttttaactttataatccattttttttaagattaaactaattgtgagatggtgaagataaattttctgccctgtgagtgacactggccaggggataggttgaggcagatggtgcccagaagaaagagggcagcacccattgcacatggcaggcctggaatcctgcagccctccccaaaaacagattgacccaggaatgaatctgctacaattccacctcattctttcacacccagagccagagccttaagcatcatggtacctcttgcgcttcttacagtgagtgccaatctactagataaatggccttcaggcaggtgctccaggaatcctgggggggtcccagggccacctctggtttccaccttcactataagtgggcccagttctggttttctagattgtacttatgcataagatagttttttaaaaggaaaggcattccactgttgttaaatttttttttngtctttttttttggaaactgttccntgcttntgttcacccatccggggggnttgcagtagtgttgatccaggggctcantgtaggccacaacnttttnagggttcaagngatccctt

SEQ ID NO: 75466 - DNA, 4213 bp, Homo sapiens; identical to SEQ ID NO: 60888

SEQ ID NO: 75467 - DNA, 3439 bp, Homo sapiens; identical to SEQ ID NO: 60889

SEQ ID NO: 75468 - DNA, 6191 bp, Homo sapiens; identical to SEQ ID NO: 60890

SEQ ID NO: 75469 - DNA, 1749 bp, Homo sapiens
ttttaacctcgatgaccattgtgcagtctggtggaattccgcagcccttcgctcgcccggcctccccctccctggttccgcgttctggttccgccatggaatccaacaaggatgaagctgagcgctgtatcagcatcgccctcaaggccatccagagcaaccagcccgaccgggcgctccgcttcctggagaaggcacagcggctgtatccgacgccgcgagttcgcgccctgattgagtccctcaaccagaaaccacagactgccggtgaccaacccccacccacagacacaacccatgccacccacaggaaagcaggtgggaccgatgccccctcggccaacggtgaagctggaggagagagcaccaaaggctacactgcagaacaggttgcagctgtgaaaagggtcaagcaatgtaaagattactatgagatcctgggggtgagcagaggggcctcggatgaggacctgaagaaggcctaccgcagactggccctcaaattccacccagacaagaaccacgcacctggtgccactgaagccttcaaagccattggcacagcatatgcggtactcagcaacccggagaagaggaagcagtatgaccagttcggcgatgacaagagccaggcggcccggcacggccatgggcatggggatttccaccgtggctttgaggccgacatctcccctgaagacctcttcaacatgttctttggcggcggcttcccttctagtaacgtccacgtctacagcaacggccgcatgcgctatacctaccagcaaaggcaggaccgcagggacaaccagggtgatggcgggctaggggtgtttgtgcagctgatgcctatcctcatcctgattctcgtgtcagctctcagccagctcatggtctccagtccaccctacagtctgagtccaagaccgtccgtgggccacatccacaggcgagtcactgaccacctgggtgtcgtctactatgtgggagacactttctccgaagagtacacaggctccagcctcaaaacagtcgagcggaatgtggaagatgattatatcgccaacctccggaacaactgctggaaggagaagcagcagaaggaaggcttgctgtaccgggcacgctactttggcgacacagatatgtaccacagagcacagaagatgggcacccccagctgcagccgactgtcagaggtgcaggcctccctgcatggatagtcctgggccagccacaccaccgaggtccaaactatgaaatccctggagaatttttggtgacatgcactggagccaaggtgatggactgtatatttgaggaaagacaaacaaagaaacaaaattaaaatggaattggaggccgaacgctgcacagctgccctctctctcacccagtaaatgcagaaagctcttaggacagacagaaaacctgccatggggctgcttccctccctcgcagggctggcggaggctccgcatcgcctctctcctaggatacagaaaccatggcaacgaaagtagaatgtaaaactcgcagcagatatcagtgggaagggctgggggagggggcacccagctgcctttcctccctcacaggagccaccaccagccacctctcaggagaagccagaggccctggccaaagataggaggaagaaagagaactctccatagaatgtaatttatagatgcgtgtatatgtatatatatctatttatatgtaaataggcatatatgaagataaaaa

SEQ ID NO: 75470 - DNA, 3884 bp, Homo sapiens; identical to SEQ ID NO: 60892

SEQ ID NO: 75471 - DNA, 2490 bp, Homo sapiens; identical to SEQ ID NO: 60893

SEQ ID NO: 75472 - DNA, 2375 bp, Homo sapiens; identical to SEQ ID NO: 60894

SEQ ID NO: 75473 - DNA, 1446 bp, Homo sapiens; identical to SEQ ID NO: 60895
  misc_feature (1)...(1446): n = a,t,c or g

SEQ ID NO: 75474 - DNA, 972 bp, Homo sapiens; identical to SEQ ID NO: 60897
  misc_feature (1)...(972): n = a,t,c or g

SEQ ID NO: 75475 - DNA, 791 bp, Homo sapiens; identical to SEQ ID NO: 60898

SEQ ID NO: 75476 - DNA, 1818 bp, Homo sapiens; identical to SEQ ID NO: 60531

SEQ ID NO: 75477 - DNA, 2601 bp, Homo sapiens; identical to SEQ ID NO: 60900

SEQ ID NO: 75478 - DNA, 1316 bp, Homo sapiens
cccacgcgtccgcgctcgcctccgggatctcgtgagatcacggccacttccgggagtcggaaaggaaagctgtgggaccatcctggcaaccccggtgtttggctgggttctagcgtagccgtctgtgtggccggtgggggacctgcggtcggagtgggagggccagtctgcacccaagaggtggaagaggacgggctttaggctggaagcgccttagaggagccatttttccagcaggatgcctggtttgcttttatgtgaaccgacagagctttacaacatcctgaatcaggccacaaaactctccagattaacagaccccaactatctctgtttattggatgtccgttccaaatgggagtatgacgaaagccatgtgatcactgcccttcgagtgaagaagaaaaataatgaatatcttctcccggagtctgtggacctggagtgtgtgaagtactgcgtggtgtatgataacaacagcagcaccctggagatactcttaaaagatgatgatgatgattcagactctgatggtgatggcaaagatcttgtgcctcaagcagccattgagtatggcaggatcctgacccgcctcacccaccaccccgtctacatcctgaaagggggctatgagcgcttctcaggcacgtaccactttctccggacccagaagatcatctggatgcctcaggaactggatgcatttcagccataccccattgaaatcgtgccagggaaggtcttcgttggcaatttcagtcaagcctgtgaccccaagattcagaaggacttgaaaatcaaagcccatgtcaatgtctccatggatacagggcccttttttgccaggcgatgctgacaagcttctgcacatccggatagaagattccccggaagcccagattcttcccttcttacgccacatgtgtcacttcattgaaattcaccatcaccttggctctgtcattctgatcttttccacccagggtatcagccgcagttgtgccgccatcatagcctacctcatgcatagtaacgagcagaccttgcagaggtcctgggcctatgtcaagaagtgcaaaaacaacatgtgtccaaatcggggattggtgagccagctgctggaatgggagaagactatccttggagattccatcacaaacatcatggatccgctctactgatcttctccgaggcccaccgaagggtactgaagagcctcacctgggggcattttgtgggtggagggccagagtgtgtatacccaggcttgtctggaaggagaaggcctttgctgcctgaaagtcgcaaaaaaaaaa

SEQ ID NO: 75479 - DNA, 2136 bp, Homo sapiens; identical to SEQ ID NO: 60902

SEQ ID NO: 75480 - DNA, 1705 bp, Homo sapiens
ttttttttttttctgtaatgaataatatttatgcaggcttgttttctaaagcaaaacaatattctcaatgtacaaagtttggccaccatccccactttaagatgaactatgtcttaatgacagagatacttgaaacgttgctcgaaaactataaactttgggattctaatagctagaaacaaattgtcagcttttactaattccaaagaagttaagagagaacctcataagaagagagttttattcaacattatggcatggccagttgtaattgttccaacaaagggaacctactttggtgccccgaggaaatggctgtttgtgatgctggggaaaagtcaagatgctgacgcctaatggctgttctagcctttccaggtttgtaacatgaagatggggaaggaaatgggcaccactgctgtttgtaatctgaggaactcttgggcagcattcactctccaaaggcagtacaaaacttacaaaggaaggtcaaaaagtcttaacactcccattccccccaggaactcttgtctgtgtcatctgggtagggaggggagggaatccggggttccctcagggtccttgttcatgtttaggctttttgataggcttccaatccaactcggctcgcttcagccttgctgctgggcctgaatgtaatagtgtgtgtcatcccttagtaatcactttgaagaggtttccctggacattccctttaaccccagtgggaacgccattatcttccagagcagacacgagtgaaccacgaagagaaaacccacccactggcctgttctcttctttggaagggtcatagtaatgcaggaaagctggatccttccttagaacaaagcgacgcaccttccagtttttcctcttgtgtccctgcttggccaggtagccttgtttcaccaccgtgccacttaactccacagtgctcaggctaatttcttccttggggcttatcttctttttgtagctctcagcaaaagtgtacagggctgtggagtcatccaggaactgctcggccagatccccagagcgaatggctcccatgcttcggacacccacaggcctgaggaagttctcctccatgagcatggaggccagggtcaccgcctccagacggctggccgtgaagctgttggagatgagccagtccaccagggaggagccgaggaaggtctttttataggtgcttccctgctccatgttggggcttgaacggattccggtgttgctatcgtgcatcttgtccacaatgcgatgcaggctgatgtgcgggggcagcttgaaggagtttctcaggctgtgcagctgctggacctttccccgggcttgccctgcatgaatagccccggtgatcttcaaaggcccaggcatcccggcttcctctcgagaacaggcctccaggaagtactccgtggatgtttgagtcttcagcttaatgaggagcggtcggttttcatactccaggcaggggcaggtgatggtgcagccatccaggaggatccggcccttgggaggggtcactctccgacccccctcaagcttgtagtacaccagcgtgttctgccgaaggatgaaccatcgcgccttccagttgtggacaatgtggcccctcttgaccaggaagccctcgttgagcacgccgtcctccatgtcgccgtccgcacgccagggccacgccaggtgcgccacgaaa

SEQ ID NO: 75481 - DNA, 2431 bp, Homo sapiens; identical to SEQ ID NO: 60904
  misc_feature (1)...(2431): n = a,t,c or g

SEQ ID NO: 75482 - DNA, 2689 bp, Homo sapiens; identical to SEQ ID NO: 60906

SEQ ID NO: 75483 - DNA, 3776 bp, Homo sapiens; identical to SEQ ID NO: 60907

SEQ ID NO: 75484 - DNA, 1819 bp, Homo sapiens; identical to SEQ ID NO: 60908

SEQ ID NO: 75485 - DNA, 5737 bp, Homo sapiens
ttttttttttttgcaacaatttaaaaatttattgcattacagtagcatcacatcagcagtcaataatgccactttaagcaaaagtctttcagtatttccgttacacattctgttaacaagaactcatacattggtaaaattcattttaagaaaacttggcaaataacgctttggcctgtaattggcatttctttctctacttttccttcccaccatttcttccttttaaactacaggatttatattttaaaatgttttatttcagaacattaagatagcagttacattttttaatatttatattattttaaaatgactctttaagatacagttttaaacccatgggctagaaatcatacgactgttaattagccgcattatttggtctaacattttttatcattctgaaactggatttgtgtaatacattgataaattcatacaatttggaagagtcagttgaagttacaaggacccaatatctgccctctttcagtgaatgccggcaaatctgttattccattggcaaaatcgtattgctgctctcctgttaatctcacatttataaaaggatcatgaggctgccaagtgctaaaaatggagatggtctagtaactagaaaactccccaccccagggagcacacctacatatctccctacaacctaataatgtgatgtgttttggaacacagacattagaacttcatgaagttttaactgttgattctttcccaagcatcatcaagttatgatttaggcaatgtatgattgaaatgcattcattcatcatgcataggcacaatcacagaaatattgcacaaagtatgtccctgactgaaaatgagaggtacaaaaacgtatttcactcttcgtaaagaagtttgtgaggaaatacaactctgcgatcgtatagacatgtttcctgataatacagacattcacaaacagtagattgcaccacagtgtgtaaacattttaagttgcataaacttctccttgattttcaaagataatataatactgtctactaaaattcctttttgtttcaactaagtactctcacatatattagtttataataatgtttgttattactttctaaagtgttttccactcaaggaaaagaagtaaattcctatgtcagagtaaccgaggtggttgaagaataggtattagccagagaggtctagatagtaaaatcaaacttcaagcctcaaagaagctccatgaacagagaggaatgccaggtgtcacacagctttccttcactctaattcattcttgactagagcctgtatgcctgattcagagacatttaaactcttaaaggatttcttatgatcttcactaaatacattaagaagaatgccaaccagcgccctttcgtgtactgggacaggtagtcatgtgattaaaacagggaacacgaactctgactttaaaatgtattgtagatacaaatgctctaagctaggaaaggtttttcacacccacagccaatgatggcagcctttcattcctcggaaataagccctttttgaggtcattgaaaaaagagtgcaactgctgcagctcacgatgcaatatcttcatgagcccagagcacatacaaatccaaagggaactgccacagtacactgctcattcttggcaccggaacagatgaaacacactgtatcctgcacatacctgccagagcaggccactttcctcttctgtgagatttagaaagctcccccaaaaggttatcactcccatcaccaatacacagaaaatggaggaaaggctgtttccagttctcggcctttaaacagctctaaatgtcagtactccacagtggcatattacaaagtaataaacagtgccacacttgagggcaaaccgcatattgagctatagaagagctcactgtgattaagatgagatcaaacatcatagcagaacattagcaaattttatctgaattctgtaatggacatccatgctgcaataacattagaaaagcacgggagcctattccaaaccagcgagaacagttttgtgcaaagagtgggtctttgtgtgtttgaactcccaccacgtaagggcaaactcgatatgcatgctaatgacctacaattatgaaatgaaaaaagaaaaatgctgaaggatgccagagtgaacatcagtgagagccacagagacccactctcttttaactttttacaaataaacttaaactataaatgagaaccacaaataatcatgagtagctctaacattcaaatgaagtaaatgaattgtgtaggagattaaccccataactgtgtttcgtttttgaaaatgtcttgagcagctctttgatgatggtggtgtttatctccttcttctcggcagccaagcccagcaaaagcatggcacacagcagttgctgcccaagcctgggtgctcctggtggtcctgcatctcaccaaggagctgcacgattggctgttgcagtagggttgtcctgggaagaaccctccctggcttctccttgtgcaggctccacgctgttggtgaggctcgcctcacaaagatcaccatgcttgtcggcagccccgagctcctggggggctggggctcctggactgggttcagcagcagggttctgggcagcggccaggaatttgccgtgcccctcgctgtagctgccacaagccgcaacaccatctcctgcagctccagcagcttcaccttcctctcctccttgtcctgggccagcctgatgatggcctcctcccggtgacgcatctttggcactgtcccctggctctgttagaaggcgatgtacgttctgatggcatctctctctccggtactggatgaatccaagttccagtttctccacatgctccctcaggtccgccttctcctccaggaggtccataaggccgctagactcgcccccagtccctgaggctgggactgctgcctctggctccttctcggccgaggtgagcgtctccatcacctggcccagcttctcctgcagctcctttacttgctgctccaactgcagtgcgctcttgttctcgtgcttcagctcctccaagtcgctctgtggctcggccagctgctgaagcctcttctcccgttcccgaagcctctcctgctgctcctgaagcctctcctcctgctcgcgaagcctctcccttttgcccacggttcaggagactgatgcactgattgttttccacctgagcctggagctctcctgccactctctccagctccttcctcaggtcttgcagctccacctcagaggacactgctggggcatccgggggcagtggctcagccatctggtttttgagtctggacaagctcctctccagctcctctacccgatgcgtatcatgcttcttctcctccttcaatgtgcaaacctcctgcgacattttcctcatcctctgctgccactgggccctctctccttttatttgttcagcatattgatctctctccagctggacttctttaagcgactccttcaactgtgtcacgtgtcctttcagcagtatctgctcccgtatggactgctctaactgccgcttgagaagtgctttactgcggctcgagaacccatccggcttcttcttctgtgtggcggcgacagcacagagagaccactctaactctcctatacgctgcgatgaacgttgcaggcggccggccagatccttggactcttcttcaaagtatctgagagaatgtttcatgtgatacaggtccgtatttagtttctttttctctatgttcaatctctggatttgaccctctagctccctttcagctttctgtttctcattgtttgctttcttttcttcttccagctgatgttccacttgtttcttctgttgtttcaaagatttgatggtgtcattcagtcgactgatttttatggacctcgagttcaggactgctgcttgttcttggcacgggctctgacgcgcatgcagagaggaggaggcggaggaggacttgggggagaggtagagagaacgatcattagggctgggttgtgtgtgggctgtctcagctggcagaggggcacccagtccccgctgcgggaggaggttggagggctggcctgcggggtcactgcacctccgcccagagcctcctacctccagatccttcagggtagcagatgatgtagggccctccccgtggatacctgttgctgactataagagatgagactgcacatggagatgttctgtccccctcagtgtctgagccctccgacttcctttcttccccatcaactggcaacattttcttttctgcctatcttggaccctttgtcccataactcctttgtgccaacttctctcacggttcttatctccccaccatcccaccctgggggccttgcagtgactcatgatgggaagtggctgttctcattgtcctggcttccccttgagactggggatgaggaaaatcaaacagcaaagaccatatcctgggtgtcctgggtgttgacagcaggccatgtactagggattaacataaaatcgacaattatcaatctcattgaaacttcacaaatacaagtcaaacaataccacctctatcatacagacgtgaaaacagaggcccaaagagctcaagcaacttgccctaaatcatatccctagcagacggagaggcaggattcaaacccagaattcttttcttttttgaaacggagtctctctctgccttccaggctggagtgcagtggcgtgatcttggctcactgcaagctccgcctcctaggttcacgccattctcctccctcagactccggagcagctgggactgcaggcgcccgccaccacgcccggcttttttttttgtattttttagtatttcaccgtgtttgcctggatggtctcgatctcctgaccttgtgatccacctgcctcggtctcccgaagtgtggggattacaggcgtgagccactgtgcccggccaaatccagaatccttcaccagtacccaacagtccatccacaatcttaacgattgccctctactgctccttgggccccctgtccccaaaagcctgtccaggcaagactcacagcttcagatgagtggcaaccaccagaagcggccgtctcagggctactgccatttgctttcgtgttcctcttcgctgctgctggaacaccagggcggtttctctgccaatattctttgaactttttcttggctgcagctaatttactctgtccagtttcttctgccattgtggggtggggagggaggcggggctggggccacgtcagccaaatcccagcgagcgctgatcaacacgtccagtcacccttaaagaatcagaaataaataggctgggcatggtggctcatgactgtaatcccagcactttcgggaggccaaagtgggcggatcacctgaggtcagtagttccaagactagcctgcccaacatggtgaaaccccgtctctactaaaaatacaaaaaatagctgagcatggtggcagaggcctgtaatctcagctactcgggtggctgaggcaggataattgcttgaacctgggaggcagaggttgcagtgagctgagatcgtgccattgcactccatcttgggtgacagagtgagacatcatcttctttgctccaagctgcactctggctttgcctttgagtcacgtggcatttctttgtacgatgaccggttctgtcgagtaggcactgcttcagc

SEQ ID NO: 75486 - DNA, 3275 bp, Homo sapiens; identical to SEQ ID NO: 60910

SEQ ID NO: 75487 - DNA, 1502 bp, Homo sapiens; identical to SEQ ID NO: 60911

SEQ ID NO: 75488 - DNA, 827 bp, Homo sapiens; identical to SEQ ID NO: 60912
  misc_feature (1)...(827): n = a,t,c or g

SEQ ID NO: 75489 - DNA, 1121 bp, Homo sapiens; identical to SEQ ID NO: 60913

SEQ ID NO: 75490 - DNA, 2797 bp, Homo sapiens
ttttttttttttaaattgaaaggaaacttttattgagtcatgttttcaaagcaatctagttttttaaaaaagttgaagacaagacagaaaaaagaacatgacacctaagagaatcagacaggacagacagacgggagcgcggggggcggggacagcggctccgtggaggtccagatcttctccatcttggaagatgaggtcgtcgccagaatcctggtccagctcctcgttctctttaagtcttctgctccactgtcttctccagcgactggatgcgcatctgctccttcctcaggctggcctggagggccaacgcttccgcctgggccttgctccggacctgggcgatctcctcgtttgccagctgcagcttctcctccgcgtgggccttcagggcttggtacctctggccctcctgggtgatccttgccaggtaatcctccacgcacttcttcagtgactcttcgttcttgcggtagccctcgatcacctctttctgtttctcaaaacgcttgaagaggtcggagaaggacttctccatggagttcagatctgtggtaagttggtctttttcttttagaactttctggatttcagctttggaaagttccttctgcttctgaacttcctccatggcctggtacacaacctcttcgaacctgtccatgatcttccccagttccaggttcttcccgtggagctcctcacacctgctcctcagctcccggttctcctcctgtgtcgcctttaccactgcatccaggtccttctggctgtactggagcaggtccactataggtccggtggacaggggtgggcccccaggcgcgggaacacctgggggtgggcctggcacaggaatgtccagtgctcccaagaaatcgaactccacaagcttggcttcccgcggacgtcctgagggagtctcatttgcaccgtgcatgctgctggtctcggtggccacgggcactggtctaccaggactgtccctcaggagggggtcgaacttgaggtataaggactgcttcctcaaggccgactccttaaacgaggaagttccaaactgctccaggtaatccacctccgcgcccgtgcctagaacctcagcggggtctctgaagctctcctctttcagctccaaggcaggctgcccctgctgatgggtgggcactggctcactgcctggacagcttgtgggaagcgaggtgctggcagagttcaaggctctctccttgctctctgctgttggggtctcggctgccaactgcaccacaggcgtgtcctccgctgaggctgaatgcagctgctggctcagacagggacctggctcctccgtggcaggcccagcatgcaactgttcagccgctggctggcccagcctggtctcagggctttctgggggctgggcctcactgcaaccagacttggtgtcacctccgaacgggatgaagtttgggtcatccattttgtcccagtcgaggtggtaagagccccgagaagctggcatgggggggtcctctcccgctccgctcctaccgtcgtcctcctccacctcctgcggggccttttgctgcctcactgctgctttcctcaagggaggcttgaggccggacctctctcccagtctccttggtgggggtgcccttttgctggtggcgccatcagatacatcaaattctagttttcaggtccgctcctcgaggagctggccatttggcctgcagccacttcttcctgaggactcagggtcatggccctgccagccaccaggtggttggttggggctgtgctctcaggagcagaggtgtgtgcacaggtaagggtctgagtgccatctgctggcacgggggtgcccacacccgcagggcagcccagggcttcgccaggcagaccctgcaggggtgctcctccgcaggcttccttagggattgcaccaggaggcgaagtggccactgctgcgggagcacagaccccaccgtgccggcattcctcctcggctccgtgcggagtctccgctttgcattcttcctcggctccgtgcggagtctccgctttgtgctgggactctgtcctgcaagggtcttctagggtctcagaggcgggtgtcactcttctgtctaaggaataggaacttaaggttttcctccacggcttgctccaggactgcccagacacttttcctggagacaccatttggttctcagaacttcctgggctctgggaagagcttgagcagtccaggtcagccagggcacctgggccagactcgctggagctgccactcccaaaggctgggcttgcatcccccaggaggtcggtgtcagcctccactggtttctgtagaattccatgagtagttttggcatccacttccttgatgagctgttggttctctttctgtgtccagaccgggtgtgagttttccagtccaagggtgtcatcctgagtgaaaggagcctcaagtttgctggccatgctaggacttagaatcctgtgctgtctgtggatccccgcagaggtgtctgaaaagtcaccttcatagcttttggccaggttcttgggtggcacattttctttctgtgacacacgaagaacagacgatcttccggtaacttctggtggcgaaaacaggaagtcgcaattttctgtatttttttcattgctgacatttttgtcgtttaagacctgcagactcattctgcccgcccgcccgttgccgggctctgagcccgcgccgccgccgccaggaaggaggggtccgcgtctgctccacgccgggggccaagcctggctgcta

SEQ ID NO: 75491 - DNA, 2413 bp, Homo sapiens; identical to SEQ ID NO: 60915
  misc_feature (1)...(2413): n = a,t,c or g

SEQ ID NO: 75492 - DNA, 1668 bp, Homo sapiens
agcggccgcgaccgccggggacgagcttggaggaaaaggaaccgggagccgcccacccgggggcgctctccggacccccagggtcctagcgcgcggcccttaccgagcctgggcgcccggatttcggcagcggatcgcctttccgggttggcggcccgcctgattgggaacagccggccggttgccgggggaacgcgggagtcgggcccgacctgagccacgcgggcttggtgcccacctgtgcgcgccgcctgcgaagaaggaacggtctagggagaaggcgccgccggccgcccccgtccccaccgcggccgtcgctggagagttcgagccgcctagcgcccctggagctccccaaccatgaagcccaacttctccctgcgactgcggatcttcaacctcaactgctggggcattccgtacttgagcaagcaccgggccgaccgcatgaggcgcctgggagactttctgaaccaggagagcttcgacctggctttgctggaggaggtgtggagtgagcaggacttccagtacctgagacagaagctgtcacctacctacccagctgcacaccacttccggagcggaatcattggcagtggcctctgtgtcttctccaaacatccaatccaggagcttacccagcacatctacactctcaatggctacccctacatgatccatcatggtgactggttcagtgggaaggctgtggggctgctggtgctccatctaagtggcatggtgctcaacgcctatgtgacccatctccatgccgaatacaatcgacagaaggacatctacctagcacatcgtgtggcccaagcttgggaattggcccagttcatccaccacacatccaagaaggcagacgtggttctgttgtgtggagacctcaacatgcacccagaagacctgggctgctgcctgctgaaggagtggacagggcttcatgatgcctatcttgaaactcgggacttcaagggctctgaggaaggcaacacaatggtacccaagaactgctacgtcagccagcaggagctgaagccatttccctttggtgtccgcattgactacgtgctttacaaggcagtttctgggttttacatctcctgtaagagttttgaaaccactacaggctttgaccctcacaggggcacccccctctctgatcatgaagccctgatggctactctgtttgtgaggcacagccccccacagcagaaccccagctctacccacggacccagcagagaggtcgccgttgattgtgtgtgcttaaaggaggccttggacgggagcttgggtctgggcatggcttcaggctcgctggtgggccaaccttcgcatagctatgtgattggcctggggctgcattctcctggcactgctgtgtgtcctggcggctggaggaggggccggggaagctgccatactgctctggacccccagtgtagggctggtgctgtgggcaggtgcattctacctcttccacgtacaggaggtcaatggcttatatagggcccaggctgagctccagcatgtgctaggaagggcaagggaggcccaggatctgggcccagagcctcagctctatgccctactctctggggcagcaggagggggacagaactaaagaacaataaagcttggccctttaaaaaaaaa

SEQ ID NO: 75493 - DNA, 1728 bp, Homo sapiens; identical to SEQ ID NO: 60917

SEQ ID NO: 75494 - DNA, 3397 bp, Homo sapiens; identical to SEQ ID NO: 60919

SEQ ID NO: 75495 - DNA, 1432 bp, Homo sapiens; identical to SEQ ID NO: 60920

SEQ ID NO: 75496 - DNA, 1428 bp, Homo sapiens; identical to SEQ ID NO: 60921

SEQ ID NO: 75497 - DNA, 3380 bp, Homo sapiens; identical to SEQ ID NO: 60989

SEQ ID NO: 75498 - DNA, 1879 bp, Homo sapiens
gggctcacgttgtacgttcacatcaggtcccggcccgccggaacctgggcgatccacgatgccgagtttgccacgctgcgacagcccataggcttgcccccccgggcattcgggtggactacgaacacaaactgaagccctaggacttgtcgcccgtttgcgctctcgccgaggcacaggctgctcgcggaccaccctgctccgaaaacctaagaggtaggtggtagcccattcatctggttactgatactggccggcatcagtggacttgtcggcaggtccttgagcaactggtgtgtgaaatgggacggacgtcaaaaggacaagccgggatgtctactaccggccttggccaaggagaatggctggcgtgcttcgcagcgcctttcaaactgcttacaattggataaggaatttccaactgtttccaaggccttgacacgggcagttgacctgtgtgcagccccaggcagctggagccaggtgctgagccagaagatcgggggccaagggtccggccacgtggtggctgtggacctgcaggctatggctccactaccaggtgtggtacagatccagggggacatcacccagctgtccactgccaaggagatcatccagcactttaagggctgccctgcggacctagtggtgtgtgacggggctcctgatgtaaccggtctccatgatgttgatgagtatatgcaggcccagctcctcctagctgctctgaacattgctacacatgtcctgaagccagggggctgctttgtggccaagatattccgaggccgggatgtgacgctcctctacagccagctgcaggtcttcttctccagcgtgctgtgtgccaagcccaggagcagccggaactctagcatcgaggccttcgctgtctgtcagggctatgaccctcccgagggcttcatcccggacctgagcaaacccctgctggaccattcttacgacccagatttcaaccagctggatggtcccacccgcatcattgtgccttttgtgacctgtggggacctgagctcctatgattcggaccgcagttacccactggacctagagggcggctcagagtacaagtacactccacccacacagccccccatctcgccaccataccaggaggcctgcacgttgaagaggaaggggcagctggccaaggagatccgcccccaggactgccccatcagcagagtggacacgtttccccagcccctggccgcccctcagtgccacaccctgctggcccctgagatggaagacaatgaaatgagttgttcaccttaacccattacgctggcaaactgatacaactcagaaactgctcaatgtcaggaaaaccggaacttgttgatgaacttgttttcaaaatatcatctcatcaacgaggcctggacaaacaagccctgaggagggatctgcaacaaccctgaagacaacaaggaaagaaaccatgaaagtctgtctgtactgcagtgggaattcttgagtgaggtcttacctcttctttaaacctcttcaggagtgtcctgattatgtccagaattttccctaaaggcagggattcttaacctggatagaagccaggggtaaccatgaacttgatggaagaaaatgttacatctttattttcagcaatgaaactgaaatttagccttactcccaagttataaatgctggcaacaaatcacagtagtaaaagcagtacctgggattttcccaccaatacaaaccagttacagcaactgtaatgtaacataaaaagggcatcttgaagtattgttcatatttgtcacctcttggaatgatagcagatcctgtaagttgatgtattaattaaaaagcccatatattactgcatctc

SEQ ID NO: 75499 - DNA, 2021 bp, Homo sapiens
ttctgttgtgacgcggctgcatgaattcagcacgaggattccgtgggtggtggtgcatggccgttcttagttggtggagcgatttgtctggttaattccgataacgaacgagactctggcatgctaactagttacgcgacccccgagcggtcggcgtcccccaacttcttagagggacaagtggcgttcagccacccgagattgagcaataacaggtctgtgacgcccagtatgagggagatcgtgcacatccaggccggccagtgcggcaaccagatcggggccaagttctgggaagtcatcagtgatgagcatggcatcgaccccagcggcaactacgtgggcgactcggacttgcagctggagcggatcagcgtctactacaacgaggcctcttctcacaagtacgtgcctcgagccattctggtggacctggaacccggaaccatggacagtgtccgctcaggggcctttggacatctcttcaggcctgacaatttcatctttggtcagagtggggccggcaacaactgggccaagggtcactacacggagggggcggagctggtggattcggtcctggatgtggtgcggaaggagtgtgaaaactgcgactgcctgcagggcttccagctgacccactcgctggggggcggcacgggctccggcatgggcacgttgctcatcagcaaggtgcgtgaggagtatcccgaccgcatcatgaacaccttcagcgtcgtgccctcacccaaggtgtcagacacggtggtggagccctacaacgccacgctgtccatccaccagctggtggagaacacggatgagacctactgcatcgacaacgaggcgctctacgacatctgcttccgcaccctcaagctggccacgcccacctacggggacctcaaccacctggtatcggccaccatgagcggagtcaccacctccttgcgcttcccgggccagctcaacgctgacctgcgcaagctggccgtcaacatggtgcccttcccgcgcctgcacttcttcatgcccggcttcgcccccctcacagcccggggcagccagcagtaccgggccctgaccgtgcccgagctcacccagcagatgttcgatgccaagaacatgatggccgcctgcgacccgcgccacggccgctacctgacggtggccaccgtgttccgcgggccgcatgtccatgaaggaggtggacgagcagatgctggccatccagagcaagaacagcagctacttcgtggagtggattcccaacaacgtgaaggtggccgtgtgcgacatcccgccccgcggcctgaagatggcctccaccttcatcggcaacagcacggccatccaggagctgttcaagcgcatctccgagcagttctcagccatgttccggcgcaaggccttcctgcactggttcacgggtgagggcatggatgaaatggagttcaccgaggcggagagcaacatgaacgacctggtatccgagtaccagcagtaccaggatgccaccgccaatgacggggaggaagcttttgaggatgaggaagaggagatcgatggatagtcggaatagagccgccccaactcagatcctacaacacgcaagttccttcttgaaccctggtgcctcctaccctatggccctgaatggtgcactggtttaattgtgttggtgtcggcccctcacaaatgcagccaagtcatgtaattagtcatctggaacaaagactaaaaacagcagagaattgcgggttctacccagtcagaagatcacaccatggagactttctactagaggacttgaaagagaactgaggggccacaaaataaacttcaccttccattaagtgttcaagcatgtctgcaaattaggagggagttagaaacagtctttttcatcctttgtgatgaagcctgaaattgtgccgtgttgccttatatgaatatgcagtatgggactttgaaataatgattcataataaaatactaaacgtgtgtcttcaaaaaaaaaa

SEQ ID NO: 75500 - DNA, 1483 bp, Homo sapiens; identical to SEQ ID NO: 60925

SEQ ID NO: 75501 - DNA, 4427 bp, Homo sapiens
agagaccgtgctggagttcgccctgccggaaagcagcacgccgccgcggcattttacgacgtcggcggtgacaggccctgggactctgggaatacccagcttcctccccgcaacccggtgaaagccaacgcaatgttcggtgcgggggacgaggacgacaccgatttcctctcgccgagcggcggtgccagattggcctcactttttggactggatcaggcagctgctggccatggaaatgaatttttccagtacacagccccaaaacagcctaagaaaggccagggaacggcagcaacaggaaatcaggcaacaccaaaaacagcaccagccaccatgagcactcccacaatactggtcgcaacagcagtccatgcatatcgatacacaaatggtcaatatgtaaagcagggcaaatttggtgctgcagttctggggaaccacacaaccagagagtataggattcttctttatatcagtcaacaacagccagttacggttgctaggattcatgtgaactttgagctaatggttcggcccaataactatagcaccttttatgatgaccagagacagaactggtccatcatgtttgagtcggaaaaggctgctgtggagttcaataagcaggtgtgcattgctaagtgcaacagtacctcttccctggatgcagtgctctcccaggacctcattgtggcagacggccctgctgtagaagttggagattctttggaagtggcctataccggctggctctttcagaatcatgtgctgggccaggttttcgactccactgctaacaaagataagttgcttcgcttgaagttaggatcaggaaaagtcatcaagggctgggaggatggaatgctgggcatgaaaaaaggaggaaagcgattgcttattgtccctccagcctgtgctgttggctcagaaggggtaataggctggactcaagcaacggactcgatcctggtgttcgaggtggaggttaggcgggtgaagattgccaaagattctggctctgatggtcacagtgttagttcccgcgattctgcagctccgtctcccattcctggtgctgacaacctctctgctgatcctgttgtgtcaccacccacatcaatacctttcaaatcaggggagccagctcttcgtaccaaatctaactccctcagtgaacaacttgcaataaatacaagtcccgatgcagtcaaagccaagttgatctctcggatggctaaaatgggccagcccatgctgcccatccttccaccacagctggattccaatgattcagaaatcgaagatgtgaacactctgcaaggaggtgggcagcctgtggtgactccgtccgtccagccctctcttcagccggcccatccagcgttaccacagatgacctcacaggcacctcagccatctgttactgggctccaggcaccttctgctgccttaatgcaagtgtcatctctcgattcccactcagctgtatctggaaatgcccaatcctttcagccctatgcaggtatgcaagcctacgcttatccccaggcatctgccgtcacctcccagctgcagcccgttcggcctttgtacccagcaccgctctctcagcctccccatttccaaggatcaggtgatatggcttcatttctcatgactgaagcccggcaacataacactgaaattcgaatggcagtcagcaaagtggctgataaaatggatcatctcatgactaaggttgaagagttacagaaacatagtgctggcaattccatgcttattcctagcatgtcagttacaatggaaacaagcatgattatgagcaacatccagcgaatcattcaggaaaatgaaagattgaagcaagagatccttgaaaagagcaatcggatagaagaacagaatgacaagattagtgaactaattgaacgaaatcagaggtatgttgagcagagtaacctgatgatggagaagaggaacaactcacttcagacagccacagaaaacacacaggcaagagtattgcatgctgaacaagagaaggccaaggtgacagaggagttagcagcggccactgcacaggtctctcatctgcagctgaaaatgactgctcaccaaaaaaaggaaacagagctgcagatgcagctgacagaaagcctgaaggagacagatcttctcaggggccagctcaccaaagtgcaggcaaagctctcagagctccaagaaacctctgagcaagcacagtccaaattcaaaagtgaaaagcagaaccggaaacaactggaactcaaggtgacatccctggaggaggaactgactgaccttcgagttgagaaggagtccttggaaaagaacctctcagaaaggaaaaagaagtcagctcaagagcgttctcaggccgaggaggagatagatgaaattcgcaagtcataccaggaggaattggacaaacttcgacagctcttgaaaaagactcgagtgtccacagaccaagcagctgcagagcagctgtctttagtacaggctgagctacagacccagtgggaagcaaaatgtgaacatttgttggcctccgccaaggatgagcacctgcagcagtaccaggaggtgtgcgcacagagagatgcctaccagcagaagctggtacaacttcaggaaaagtctgtttgttttgcagtgtttagccctccaggcccaaatcacagctctcaccaagcaaaatgaacagcacatcaaggaactagagaagaacaagtcccagatgtctggggttgaagctgctgcatctgacccctcagagaaggtcaagaagatcatgaaccaggtgttccagtccttacggagagagtttgagctggaggaatcttacaatggcaggaccattctgggaaccatcatgaatacgatcaagatggtgactcttcagctgttaaaccaacaggagcaagagaaggaagagagcagcagtgaagaagaagaagaaaaagcagaagagcggccacgaagaccttcccaggagcagtcagcctcagccagttctgggcagcctcaagcacccctgaatagggagaggccagagtcccccatggtgccctcagagcaggtggtcgaggaagctgtcccgttgcctcctcaggccctcaccacttcccaggatggacacagaaggaaaggggactcagaagctgaggcactctcagagataaaagatggttcccttccacccgaactgtcttgcatcccatcccacagagttctagggcccccgacttcaattccacctgagcccctaggccctgtatccatggactctgagtgtgaggagtcacttgctgccagcccaatggcagctaaagcccgacaacccatcagggaaaggtctgtgtcagggaagtagcaccagatggcccactacaagaaagctccacaagactgtccctgacttcaggaccccgaggagggggacccactggccttagggcctgaaagcccaggagagcctcagcctccacagctcaagaaagatgatgtcactagctccaccggtccccacaaggagctgtcaagcacagaggcaggttccacagttgcaggagcagccctcagacccagccatcattcccagcgttccagtctctctggggatgaagaggatgaactgtttaaaggggcaactctgaaagctctgaggcccaaagcacagcctgaggaggaggatgaagacgaggtgagcatgaagggacgcccgcccccaacgcccctttttggagatgatgatgatgacgatgacattgactggctgggatgaagacccaggaaactggtgcaaaggtttctctgcaacccttccctaagcatgattttgcacagccaaccctgggtctaggcgagccacagggtgaggtcaaggtgagcattctgggaacaatatttgggctcagagggtgggttggcccaccttctgagccccacccccgccagacctggtgaagaggatcataaccctgtcttcaagaacactgggatttcagcagcaagttggaagaaggactggtaggttcccctccaagccagtcacctgtaagagtcctgtcctctgccagactttttaatctcttcattaactctcagactgacctgggagccctcctctacctgaatccagtgctcaactgtgccccggcaacaagacctgggctgaggtctccctggtagaactaagggagattacaccatctaaatcccagtgcagtcaacagcctggcctatagtcctgggacatgtatcttcttctttgccttaaatctgatacaagaggtcaatgactttgaaaataaaactaaaataaatgtctataatgaaacttgacccaagcccttggagaaaaattgagtttggttccaagggctgtctgtgctcttttg

SEQ ID NO: 75502 - DNA, 1376 bp, Homo sapiens
  misc_feature (1)...(1376): n = a,t,c or g
ttttttttttttcctcttttaaggtttaacttttaatcagccaaacatcttgcgcagaccctgagccagccctgcatcctggttcttcccctgaatgaccaccttccccagttcctcctgggctgcccggtttttgggacctatcgccagcaccttcttgaggtcagcagttgctttttccaggttcccaagggcagcctgggcaacccccgcttcggtataaggcctttaaatggccaggctcccgctccaacacccggtcacagctctgggctgccaactgaggctgccctagcaacaactgacaggcagccagattggcatgaaggacagttcgttctggagggccacggtgggggtaaagtcaggagcagccgaagagccccgtccatagcatcgggcagctccttacaggggttcccagctcgaaataggtttctgtgccccttggcacggttcttccttgggcaggggcttccttctcgctagtctccagcttccaggaggtctcggccttgagtgaaggatgccagtgtgagcctgacaggaggtccagagtggcccaggcagctgaagctctgcttcctcaccttgacacatggactccaagcatttctctatgagctccccccaagtttcctccctccatggccctacgcccatagttagctctgtccagccctctggcggccctgatccgaaaggaaaccccaaagccagtacccggcagcaggagcctagtttgggtttgtccaagccatggccacggattacgatcttcttgacaaagctcccatcggggcagtaccagagatcagaagcttgaagggcctctggcatctgactggttgatccatgagacttatgagagtctccttcaagttcagcaaccagtttttcagctccttgagtatgctctagaatttggctggctggatctgggcttacttccagctcaagcgtttcggtaggagggtctcggggctgctgcctaatctgaataactgaatcaaggttctcccgaaggttcttttcccactcttgttgcggctgagaggtgtccttttctccaattgtattgactggtggcgtctccatatggatgcttagtcccttccacggtgagtgaacagttttggtcagaaagggatgaaccaggttcaggtcagcacctgaaaagaaaaccaaacaatgctaatagcagggttcttatttagactcctttctcgtcctttcccattcttctgagacccaggcccctagtcctgaaagtccccagttttgctttcctccaaaaatctgctccagcttccccgttccacccncgaattccncggctcttcgctacgntctcaggttctcaggttntgtggcca

SEQ ID NO: 75503 - DNA, 5615 bp, Homo sapiens; identical to SEQ ID NO: 60928

SEQ ID NO: 75504 - DNA, 4190 bp, Homo sapiens; identical to SEQ ID NO: 60929

SEQ ID NO: 75505 - DNA, 2148 bp, Homo sapiens; identical to SEQ ID NO: 60930

SEQ ID NO: 75506 - DNA, 3143 bp, Homo sapiens; identical to SEQ ID NO: 60931
  misc_feature (1)...(3143): n = a,t,c or g

SEQ ID NO: 75507 - DNA, 1119 bp, Homo sapiens
gacaggtcctcactcttaccacaaagctcaagtcagcttggcctctcaagtggagagataatcgttctatagcaagaagtacaaagattctctgcagacaaaaccagctagccaaggttccacaacatgtgtacacgtataagtctgatggatcagaagaaatatgtacccgggaatcagatgtagccagcccacatactaacaaacatcaaagcaagcctagtcagattgagtcccatttgaacaatctttataaaggtttcttcatgttatttacaattcaaagtaaatttactttataagcagctagggaattctttatttagtaatgtcctaacataaaagttcacataactgcttctgtcaaaccatgatactgagctttgtgacaacccagaaataactaagagaaggcaaacataataccttagagatcaagaaacatttacacagttcaactgtttaaaaatagctcaacattcagccagtgagtagagtgtgaatgccagcatacacagtatacaggtccttcagggaggcaagagacctttcgactggtctgcaggtgcctccaaatgctggtcctgtggaacttctttctgagtctcgttttcttccaacgcagtctgtggtctgacactcaagtgttcggatttccgggaaacgtgactacctccgtgttgagtccttgcttcgcctactcgtcttaaaatgacaccttctgccaataaagccttccctgtttccacaaataacttctcttcatctgtttctccaagtttctgtagctcagtgtacttctccacaaaccgttgacaggtagacttgaagtttggattgaatagatcaaaagctctttgaccagacccatacactgaataaaacttcgctctaatccgatcctcgtggtaccagatgtcttggatgggagctttggctttgccatatcgcactcgaggcctttggaagacgggctccctcagcgggggaaaggcgtcatatacgtcaaaccacaggggcttctccttcagcaccccggcccgaaccaggtcccgagtccgagagaagatgctccctacggtttccagccggctgcctgccatgatctgcgccacgaaa

SEQ ID NO: 75508 - DNA, 1359 bp, Homo sapiens; identical to SEQ ID NO: 60933

SEQ ID NO: 75509 - DNA, 2967 bp, Homo sapiens; identical to SEQ ID NO: 60934

SEQ ID NO: 75510 - DNA, 2558 bp, Homo sapiens
tgcccgcctgctgaattcggcacgaggacacgctgaacagaattcacctcacgtccagtatgagatgggagtatgaacaaacagtcatgcagagtgatgagtgcaaacatggactataaagcggccatagagaatgaactgtgtttgtgtttagagaagacacactccccacccctgaacaggcttcttaaaagtactagaaaggaacagaaatgaataaaagtcgctggcagagtagaagacgacatgggagaagaagccaccagcagaacccttggttcagactccgtgattctgaagacaggtctgactcccgggcagcacagcccgctcacgattccggccacggtgatgacgagtctccgtcaacctcgtctggcacagctgggacctcctctgtgccagagctacctgggttttactttgaccctgaaaagaaacgctacttccgcttgctccctggacataacaactgcaaccccctgacgaaagagagcatccggcagaaggagatggagagcaagagactgcggctgctccaggaagaagacagacggaaaaagattgccaggatgggatttaatgcatcttccatgctacgaaaaagccagctgggttttctcaacgtcaccaattactgccatttagcccacgagctgcgtctcagctgcatggagaggaaaaaggtccagattcgaagcatggatccctccgccttggcaagcgaccgatttaacctcatactggcagataccaacagtgaccggctcttcacagtgaacgatgttacagttggaggctccaagtatggtatcatcaacctgcaaagtctgaagacccctacgctcaaggtgttcatgcacgaaaacctctacttcaccaaccggaaggtgagattcggtgtgctgggcctcgctgaatcacttggattcccacattctgctatgcctcatgggactcgcagagactccaggctgtgccaccctgctcccagcatcactgttcgtcaatagtcacccagcaggaatagaccggcctgggcatgctctgcagtttccggatccctggtgcctggtcctgtgcctggtccctgaatatccaagcaaataactgcttcagtacaggcttgtctcggcgggtcctgttgaccaacgtggtgacgggacaccggcagtcctttgggaccaacagtgatgtcttggcccagcagtttgctctcatggctcctctgctgtttaatggctgccgctctggggaaatctttgccattgatctgcgttgtggaaatcaaggcaagggatggaaggccacccgcctgtttcatgattcagcagtgacctctgtgcggatcctccaagatgagcaatacctgatggcttcagacatggctggaaagatcaagctgtgggacctgaggaccacgaagtgcgtaaggcagtacgaaggccacgtgaatgagtacgcctacctgcccctgcatgtgcacgaggaagaaggaatcctggtggcagtgggccaggactgctacacgagaatctggagcctccacgatgcccgcctactgagaaccataccctccccgtaccctgcctccaaggccgacattcccagtgtggccttctcgtcgcggctggggggctcccggggcgcgccggggctgctcatggctgtcgggcaggacctttactgttactcctacagctaattctgcagggcacagcccagagccatgtggatttgacttacgggagtaaagcgtaactttttactgcatctaatgagggtgttttaagtgacactcagtgtacacagatcccatcctctggctgctaggagagaagtgctgaatgttccgtgtggagatgctcaggaaagttatttgagttaaattgctggctgagagagcttggaagtccttttcataaaaggtacctctttccttttcttattgaattcttagaacttagttaaccctccctgccttttcttaacaaaaaggacttttctaaggactgaagattggcaaaaacgaaaagcttcttcctccaagagcccattgaagaagcccagtgatgagacggtgagatggtttgagtcctcggtgcctgggtagcaggaagaaagacctgcatcctgcatctgtacttggggaagccagcggagaggacggggaggttacttctctaagtttctgcagaaatattgaaggctggagtttggaatcccttaaacttggcccttcctcaaactcagcagcagatcctccgggattcctgcctgttattatcccaaaggcggtggaagggaaagatggatcttctttacatgcctagaagttttaaacggtccttaacatgcctttgttcaagcaccttcccagaatgtaaaggttcagcagctctggtttctattacggtgacttgaatgtcagattcaagggcccggcgtcaaaggaaattggttttgactttttgtaatctagggagcgacaggttcgtgagatgtttattcagtgttaaagagcctgtttttctaccaaacaataaaaccaagagaag

SEQ ID NO: 75511 - DNA, 3003 bp, Homo sapiens
tttcgtggacgtccacgatctctttcgccggctcggcgcgggggccaaattcgacacgagacgcttctcggcagacgcagctcgattccagataggaaaaaggaaatatgactttgattcttcggaggtgcttcagggactggacttttttggaaacaagaagtctgtcccaggtgtgtgtggagcatcacaaacacatcagaagccccaaaatggagagaaaaaagaagagagcctaactgaaaggaagagggagcagagcaagaaaaaaaggaagacgatgacttcagaaattgcttcccaagaagaaggtgctactatacagtggatgtcatctgtagaagcaaagattgaagacaaaaaagttcagagagaaagtaaactaacttccggaaagttggagaatctcagaaaagaaaagataaacttcttgcggaataaacacaaaattcacgtccaaggaaccgatcttcctgacccaattgctacatttcagcaacttgaccaggaatataaaatcaattctcgactacttcagaacattctagatgcaggtttccaaatgcctacgccaatccaaatgcaagccatcccagttatgctgcatggtcgggaacttctggcttctgctccaactggatctggaaaaacattagcttttagcattcctattttaatgcagctgaaacaacccgcaaataaaggcttcagagccctgattatatcaccaacacgagaacttgccagccagattcacagagagttaataaaaatttctgagggaacaggattcagaatacacatgatccacaaagcagcagtggcagccaagaaatttggacctaaatcatctaaaaagtttgatattcttgtgactactccaaatcgactaatctatttattaaagcaagatccccccggaatcgacctagcaagtgttgagtggcttgtagtagacgaatcagataaactgtttgaagatggcaaaactgggttcagagaccagctggcttccattttcctggcctgcacatcccacaaggtccgaagagctatgttcagtgcaacttttgcatatgatgttgaacagtggtgcaaactcaacctggacaatgtcatcagtgtgtccattggagcaaggaattctgcagtagaaactgtagaacaagagcttctctttgttggatctgagaccggaaaacttctggccatgagagaacttgttaaaaagggtttcaatccacctgttcttgtttttgttcagtccattgaaagggctaaagaactttttcatgagctcatatatgaaggtattaatgtggatgttattcatgcagagagaacacaacaacagagagataacacagtccacagtttcagagcaggaaaaatctgggttctgatttgtacagccttgctagcaagagggattgattttaaaggtgtgaacttggtgatcaactatgactttccaactagctcagtggaatatatccacaggataggtcgaactggaagagcagggaataagggaaaagcaattacatttttcactgaggatgataagccattattaagaagcgttgctaatgttatacagcaggctgggtgtcctgtaccagaatacataaaaggttttcagaaactactaagcaaacaaaagaaaaagatgattaagaaaccattggaaagggagagcattagtacaactccaaaatgtttcttagaaaaagctaaggataaacagaaaaaggtcactggtcagaacagcaagaagaaagtagctcttgaagacaaaagttaaaaacagactttaaaaatactgtcccagaaatgtaattttatgatcccagcatgaatgttattttcatggaatacttgaagtcttacagtcacctgtaccaaacatttgaaatcaactacaagtacatgggactggtgataaatgatcctaaactatcaagtcagtttcaatttgtaggtgccttttttttttcctgtaaagatgagggtcttgccatgttgtccaggctggtcttgaactcctgacctcacacaatcctcctgccttagcctcctgagtaactgaaattacaggcacaagctgttgcacccagcctctgtaggggacttttaaatgattatacaatggaaataacattcattgacatttctgtggtttgaatcccagagagatacttcttatagaaaaacaaatgtttatgctaaaaataacaccaaaatgtggttgaactcttaaggacttttcccttcaagtgtgaaggaaggtgtgatgaatgctgtggagaggcatctggaacagaaattcaaaataaagccttgacattaaataccccttccactgctcactttgtggatggtagcatgagctgtctaccaagaagaaacctgctgctctcttaattttaatatttcctaatttgttgatggccttttgtgttgtgaaccacaacaaagagaggcctcttttgtggctggttattccagttccctgggattttaaattctttggtctattaagtatccttgtattggatacgtaataccttagtgctgtcataatgttgtacaagatcatgatcagcttctccctttcttcattttctgtgatttaaccatgttctttcctgtctctttccatttaagatattttatttgaatactgataaacattttatcctgataaggaagaatgttcttgttacttgatatacctctgtcttcattctcttacagcttatctttccttaggttgatggtgcctcatttaataagtagatctctacttaagctaaaggattatgatcatatggtgttggagactattagctattagatttttctcaaaatatgagaattgtacaatggaatgaaaaagtgacttcatatacgtaagactggtgcctaagaatgacttgaatgttatcagtactaccacagaactataatatacattgccttttctcagcaaaaaaaaaaaaa

SEQ ID NO: 75512 - DNA, 2801 bp, Homo sapiens; identical to SEQ ID NO: 60937
  misc_feature (1)...(2801): n = a,t,c or g

SEQ ID NO: 75513 - DNA, 896 bp, Homo sapiens; identical to SEQ ID NO: 60938

SEQ ID NO: 75514 - DNA, 1986 bp, Homo sapiens
taataataaaaaataactttttaaatgggcaaaggctctgaatagacatttctccaaaaaacatatacaaatggccaatcagcacatgaaaagatgttcaacatcatcagccatcagggaaatacaagtcaaaattgcaatggtatacaattaatataccatttaacattcccaatagtagcctacaacttccatttccactgtggaaaacggtttggaagttcctcacggtagtcaagttacttaactgctctgtaaaatgaagttaatcacattcactttggatgaatgagttcatatatattagctataattactacagcaattatcattgtgtacattattactgattgggtcaaattattaaccccgtctccctaattcatttacttttgttactttggatgaatatttaaagtagtcttgaactgagatatgtatgtaaaggttctatcacattggcatataacatgtgctcaacaaatgaaagctataattatttatttccaaagagtttaaagattaaacttccctcaaaacaaacaaaaggcaaggtaacatcccaagctgtgaggggctgagtctctcctaggtgcagggcagcacaggaactggctgcacaaggccagagaggttacgtggcggctctcttcaaattagaccacacagagcgcttcattccctgtgcagtcttcacatcttcccagtccagtttgacgtctggaacctcatcttctggctctggatccttcctcaagggcccccggggggacgcaaccacaatgggcagagggccacattcctcccggatttccacaacatggaggcccttcttatcagccagctgttgatgggtttcctgtctggagagcccacggaagaggccctgggtgaggctgagcatattaatggacccagagaccttggcatacatgtctttgatgccaatgagccggcagatggtgatgatggccctgtggcagcggaggccgtaacctttgggttgtttcttcatcttgatatgcgtccttttaaatcttaatgaaatatcatggaatattgtatggtcttcatatcgttctatataatgcaaatggtgaactgctctgttctttgctttcctgaaagcatccatccgatcagtagctttcccaatagaaaaacctcaagtatcctggtatcaaaatcctcatatgtttctccacagggaccagggtcaggggggccaagactgatgcctccccatgagtttccactccatcctcgctcccgtttaaccttcatcttcttctttcggtcccactcttctctctgctggatcatgtctgcctccaccttctcctgctcttccttgcttctttgggcaatggtctgcactgctccatttttcataagagggacattcagtccgggccatagaaaaccataacgcccttcaccaatgatctgacccctgttcagatcctttcttttcttctttttagttcttttgcctcttcctttttttgctccagcaccagtctctgctaaagcgcctttccacagctcatctgcagtcaatttagtgaagaaactatatggtctatactgctggctcatcaggtgactgggagaagaaatacagcattgtgtctgcagtgcacggctcaagctggcgtagggatgggtgtctctggttcccagtgatgacaaatggccattgccgagaacactcttccatgccaaaatggaagctgctggtaaggtgtttagggaacactgcctccccaataaatgacctgccgtcccgctacacagcacggggaggcagcccacagcgcgcaccgcggtcgccatgctggagtccgagccgcgcctcggcctccgcccagggcagccttgcccaccgcctaccgcgactgctcctcgtcaaacggcaagccttgggccgcagcggaattcctgaggcccgagtccacgcagcagcgcaggccggggtgagggact

SEQ ID NO: 75515 - DNA, 4038 bp, Homo sapiens; identical to SEQ ID NO: 60940
  misc_feature (1)...(4038): n = a,t,c or g

SEQ ID NO: 75516 - DNA, 5451 bp, Homo sapiens; identical to SEQ ID NO: 60941

SEQ ID NO: 75517 - DNA, 3501 bp, Homo sapiens; identical to SEQ ID NO: 60942

SEQ ID NO: 75518 - DNA, 1366 bp, Homo sapiens; identical to SEQ ID NO: 60943

SEQ ID NO: 75519 - DNA, 2122 bp, Homo sapiens; identical to SEQ ID NO: 60944
  misc_feature (1)...(2122): n = a,t,c or g

SEQ ID NO: 75520 - DNA, 2036 bp, Homo sapiens; identical to SEQ ID NO: 60945
  misc_feature (1)...(2036): n = a,t,c or g

SEQ ID NO: 75521 - DNA, 1689 bp, Homo sapiens; identical to SEQ ID NO: 60946

SEQ ID NO: 75522 - DNA, 4327 bp, Homo sapiens; identical to SEQ ID NO: 60947

SEQ ID NO: 75523 - DNA, 2143 bp, Homo sapiens
gcaggctaattttttttttatttttgttttgtagagctagagtttcatcatgttgcccaggttggttttgatcacgggagtgatcctcctgtggtggcctcctaaagtgctgggatgacaaccaccatggccagctggtttgtttcaatttgagtgacaaaatttaggaatcggggctccagcttttcactgcagacatttattgtgggtcatcttccctaaggcaccagcagagggggaacgggccacagcagggctgcagccacggtctccagatattgcccagcctgtccagctgcagaggaactgggctgagtgtccgctggtgttcccacaccgcctgctggacttcgttccatcacctgatagaaaacgggctctgaggctggtgtgaggatgtgggtctcagaagggtctcttgagaggtcaaagagcaaaggtggatcgtggtggactactttttccccaaagcacgggcagacctttcttccatagcaggcaccggctccctctggctggaacacaggcgtcacaaagtggactttccacattgttcctctgtcccgttgatgccacctggctgcgtgcagaaacctctcacaataatgcatcaggaactcgtggtctgagtgttgggctgtccccaggagcaagggcagaaggtcttggccgtcaatcactctgtcctggggcacctcgctgcccgccagccggaccacggtggggaacacgtccatcagactcgtgggctcgccaatcactcggccggccgggagcaccccgggccagcggaagatcccgggcacgcggatcccaccttcccatcctcccatgcccttcccacctttataaattccattccagccaccatactgggtgtttccaagttgattctctagggaaccgccgtgatccgacgtaaaataaatgagggtgctgttgctcaaaccctccacgtccaaagtgtcaaggatccgtcctaccatccagtccatctcctttacgttgtccccatacagcccgtggagactcttcccgaggaagttctccatagtgataagagggatgtgaacgtgtagaaaggaaacaaagaggaggaaaggcccatgcttattccttttgagaaaggacgcaacctcctgcagaataaggggtgtcgttctttggaagcacatgggctgctccgtgatggtgtggtttctcatcagaaagcaatcggcatggacaatcagagcacccacaaaataggagcttgcgaggaggaggacggccgaaagggctgaccagatgaccggcatccacgagacgggtatcaggtgtgtgagcttccctgctaccagtgtgagggcaaccaaggccaggacttggaagaggaagttgagtttttgttccaggttgacacgcttctctgagagttcccagcgggcgcaatcacccatcaaggagaaaggcattccgtagaaatggtcaaagccatgatggagagggtggtggcaatgatcactggctgactcacagttgagacccagatgccattttccaatgagtccagtggcatagcctttctcttccagtatttttgcaaaagttgtctcatttgttggaagacctccagatgctccggtccactgaagaacacggtaaccaatgctggaaaccatccctgatcgcacagggtatctgcccgtgaggaaggcggctctgcttggggtgcacaaagatgcggcagagatgtgttgggtcagcttcacgccgtcctctgcaaggcggtcaatattcggagtcctcatggtgttgttgccatagcagccaatgtccccaatgccaaggtcgtccgccatcagaagaaggatgttcggtcgggaggcggaaatgtcgctggaagctgatggtgccaaacttagcagtacagcgagcatcgctggcagccagctcctgaaacacaaacaagaatggtgcagatgtaacatgttgtctctctctctacttcctctgctcctgggctccttcctgaatccccgatcaagaagaggaaggttctctcccaaaggaagcaagcgtgaaggcagagagcacttgcacaaggctttgagctgggaatgattaacttcgagtttgtttttccctacgatttcgtacgaaa

SEQ ID NO: 75524 - DNA, 1331 bp, Homo sapiens; identical to SEQ ID NO: 60949

SEQ ID NO: 75525 - DNA, 2878 bp, Homo sapiens; identical to SEQ ID NO: 60950

SEQ ID NO: 75526 - DNA, 1376 bp, Homo sapiens; identical to SEQ ID NO: 60951

SEQ ID NO: 75527 - DNA, 1623 bp, Homo sapiens; identical to SEQ ID NO: 60952
  misc_feature (1)...(1623): n = a,t,c or g

SEQ ID NO: 75528 - DNA, 1891 bp, Homo sapiens; identical to SEQ ID NO: 60597

SEQ ID NO: 75529 - DNA, 1369 bp, Homo sapiens; identical to SEQ ID NO: 60954

SEQ ID NO: 75530 - DNA, 3289 bp, Homo sapiens
tgccattgtacattctttattaaacatcaatactgaaaacagatttactgacatatgtatataaattataatcaaaactgggaaaaggggacaaggaaattggtaatctctctctctcatgcgggtggtgcgatctgggctcactgcaaacctccaacttcctgggttcaaggcaattctcctgcctcaagcctcccaagtagttgaaaattaccaggtgtgcaactaccacacccggctaaattttcgcatttttaatagtgacaggtcttcaccatgttggtcaaggccggtctcggaactcctgacctcagatgatccaacccgccttggcctcccaaagtactggaattacaggcgtgaaccatgcatggcgccgtggccttcgctttctttttctatgtcctcctccttcactatcgtcttcataataaaagatgtctcgaaatgggaaaacttgcttgggtgctgcaggagtctggattttagtgccttttttctccatcattttttctaacttttccttcagcaaaggtagagtcgtctcataaaggtagtcgatgatctctggaaaagtctttttctgccaaaatggaacatagacagctttcagcctagaaaatttagtttgaacgtaagatggaggaacatcacctatggcactagcaagatcttcccagtctatttcattagtatcttccacatttatttcatacaacctttcaataaggctgaccttggcccgcagggcattcatgccatagtatatacgccgaccattagtcatcctcttggttagaatttctgtccacttacttttacactgcatccaatttctggtttgcactttagcttctacttctacccaagatatgcccttgtagagtttttcccgaacaattgataggcaactttcaggattttcttggagtttggaatccacctcttttaactcctggggagacatcttcttcagaatcacttcttcgacagccttgattagtttccgggtttcagacttactccaagcaccacgatttctttgactgctgatctgtgagaacttgagggccacggagaggctacgtcgggccaccatctcaccaatcgtcttccagtcattcccaaggagagaatggtacatctttaacttctcagtatctccttcgctatacctgcctttgtaattgttgacatcgaacatcttctttgctcgatagtatataagtttccagggccgggcaatgttccttaccaatgtgtaatctaaacgagtatctccttttcaagttggtgatcacagatttttcctcaggatatctgtccgtgtacaggagcttgtctgcactctcaatgcctgtcagggctagaaagtcttccacatttttctctaactgcttattttcctttacagaaaacttgccaaatttaatagcgacaccttgtgctttaaattccttaaaccgttccaagtcgtcccggtacatccgcttgattgtgctggtggccctgtccttgatgttaggaatgaactcctgaagctgtttcacggcagaacccaaatccgcatctgaatcatcggcatctcctgaatctgcagataagtatcttatttcggaatcttcagctgtttccacattgtgttcttcatttgcaggttctaaccttggcgcctcttgcacgtgcttgcttgccaaacaggcctgggttttcttttgtcggggcctagatttcacaccttcttccatcatggcgccatcaccttctactgaatcaaagagtgtgctctcagagttcttactgggcactgaaaaatcatcaccagacactcgtgcccttttgacagacgtaagcttccttttcttagacttcttctttgtactgttggattccttgaaccctttaagagctgtactgccttccacagtcccaacctcactgcccacctgtgatccttcagggtatgcactctcgaggctctcaggcatggccactgcctcaaattcctggtgattggactttttcttttttttcttagacttgtttttataagcaggtgctggtattcctgcagtttcaccatgcaggcccacagcaggccggcgattcctgcatatcagccccaacctcactgcccacttgtgatccttcaggcatggccaatgactcaaattcctggtgattggactttttcttcttttttttcttagacttttttttgtgagtaggtcctagtagttgtggagtttcatcatccaagcccacagtaggctgggattcctgcatatcggtcccggcctctctgcctgcttgcgatccttcaggcatggccaggtgtctcatattcccggttactggactttttcttttttttcttagacttgtttttatgagcagatgcctggtagttctgtaatttcaccccctggacccacagaaagccaggactcctcctgggtggggaattctgactgaggcagggtgtccctttgcccgctggctctcccaggatgcagctttcctctgatgctttttattctttttctccctaactttactgtgcagggcttctgatttatgtgccatgtgacttagcaagtacctgaaatttgtctgttttaggctttccttggtaacttctgttctatgctcatatcaacacaaacaacatcaacatcctttctaaaatgctttggtgtgttgttaatattttctttatccacaaggacaactgtaacacctgcttcctcgtccacctccaaagcactatatcttctcttttttctctttttgagtgtggaagtggcatttgcagtctcatcacagattctggattttttcaaaggagaagaaatgagatgctggaaatcttttttcctctttttcctcctagttatttgagactgttcattcaccagggaggagtctctgaaaatttcgtgggaatgtttctgaggtctttccttatgtatagaacactttttctttttcttgtcagaaactggagtgtggatttcaaatctgcttgattctccttccattttattccatggagaagccattagactccattcgagtgcaggatccacaaaagggcttcgcagtggggatatcaggtatccactgacctcaaaccagaagttggcctctttgtgaaagaagttggatatgccttgttagtgtccaacaaagagcggacgttctgcgatacactggaataaatttcacaagccactaacgttaatactcacatacagggtgtgtgcccacgcgtccgcggacgcgtggg

SEQ ID NO: 75531 - DNA, 3470 bp, Homo sapiens; identical to SEQ ID NO: 60956
  misc_feature (1)...(3470): n = a,t,c or g

SEQ ID NO: 75532 - DNA, 1026 bp, Homo sapiens
ttttttttttttaaaagtatttattatagtaaaggttactgttggaaaagatgaggggctttggtcgcatatgttgttgggcatttgtctttagaacgattggacattatttgcatcatgaattgtaatttttatgactatgcataattggtttttttcctgacccttggaatcgttagtttcatgtaactttttaaaaaattaaaacattgcagactaaatgtactgataagtacatactgaacacatttaattacccacagtaattaaaaagtcctgatctttacttcttaaggatggaaaattcattaacttgcaatctctgggatttctctattatccacaatgagagtatgaataatcccttccttccgcttccccactactggacagcctttatgtaacaggtcatgggtcccgatactgaagtgagtttcagtcccatcatctacaaactcacccgctgtctccaattttttaccattgcaccatacgtccatagcatctttttccaaaacaattctaaagttctcaccatccatgtgtaatacccaagtattggtggtttttgatctgtcctccatatacttcttgagacttttcccattaatttccagagtatattcataagcaaaaccactgatagcgtctatatttatggtcgcttttgtctttgcagctccaacatagaatgtttctttgcccactaatttgaacatccactcttttcttatctcttcctttccatctacatatactactcgtttgcctgatgtagtcccatgttcaaattcgatcttgtggactccgtcacttaaagcaacatcccaaacagctacgagatctgtcattttttctaggctgtaaggagggctgtgctctgtgggccgcgggaggctctggggtaggtttcaccaaacaaccggttggttccgactcggctgcgtaggccgcgtggccttgctcccctggccgagaaacaggcgcagccggcgcggaggttgaaagctctgcaggcgcgagtac

SEQ ID NO: 75533 - DNA, 1874 bp, Homo sapiens; identical to SEQ ID NO: 60958

SEQ ID NO: 75534 - DNA, 2066 bp, Homo sapiens
ttggggccggctgccttaaagcagtgaaaaagaaagcaaatagcctggcgtgaatgccaaaatgaccgctcaacaaggacagctggatagatacgggcagagaatggaacagagtatggacagaaggggggcagtgataaaccccgtctcctccccgctacacaatgggaaatgaggagatgctggaaggatcaacggccggatgatcaacaaccttaacaaaattaagggcagacgcaggggaccgcggcagcggccatgaggcaggtgggaagcaggcacagtgatgagccggctgaggctgtgggatcgtttattggggctctgtccagccaggctgcagcacccgcctgggcctggcccggtgccaccaggtgccgggtgggtggaggggagaaagtgcaggagcggccgccgcccctagggctcggccggctcctggtcctgtctccgtctctctgaagcggtgcggcgcttcagcgtagagcgaggtgtcgtcgtcgctgcccttcgccgcccgcgccgcccatcccgctcctctctgctctcggccaaccgcgctctcgtcgatgttctccagtggagtccgcatgctgcaccgacagctcccgacagcgccaggctcggcaacgggctctgctccgggtgccagccacggcttgaagtgaggccaggtgcttctgtttccactcggggtacttgaggcacgccttgtacatcttcttcatggccttgggagccaggaactgagaagatttattcaccacccacttgggtaaggagcctttggggtccacctgggccaggtaggtgatgacgcagctcttgggccctgtgctctggatgaggtagcccgtctggatggacacagctcggaccaagtctttccgaggtgggtatttgggatgtttgactgagtagttcataatgatgtaatcagcgcccatggggagccaggagcggagggtgatgacatcacggttcttcaggggcttgggacacctccaggagtaatagcccacgtcagcgttgactgtcaagcgggcgatgtcaaaagtctcaatgacgttgctgtcccatttcttgcggtactcaatgtcgtgtaggacgtcgtagagtgtctcggctggcacatcacagcactccatccggcacttgatcttgtgcagcgtccgatccatctccacagcctgcacccagacagacaccccagccctgctataggtcaggttccagcccacctcagcctcacactctgaccggaagctgcgaaagtcttggtcatcgggcacctggacactctcacggcccaggaccggccgaggcccttggggctctgtagaggccgccagcttctccatggggagtgtggggaggcccagggccctggtcctagtccggctctcctgggtcctccgcggaggctccgacaacgtcgacgcggctgcagatgctgacgccaccttcctgggacctgagaagcagggtctgtacagctccagcaacactctccttttcctccagaattctccagatcctcctcagtttcttggctctggtgctcatctcaacacagcagggtcttcctccatcaggccaaggtgggggtaggagaagaattgggaacagggactcccctaggttctcagggtacagtcagtcaatctaagcctgtatccaacaaagacactgacccctggggtacaaggaagggctccaggcccaaaggcaggaggattaggctttagctcttgctcacagcctgctgagacctggggcaagcccctgtccctctttgggccctcaggtttgcaatttgcagaatggaggaaatgggttcctcaatctacaatcacctgactataataatattttgcctttatataccgcgtgggtaaattcctgaaagtaaactaagctgttttcacccctggatctcatttgatcctcccaacagcctgtttgcatttacaaatgagaaagctccagttccctaagggaacaaaattacccaaagtcacacagcaagctggaagcagagcctgggtgcagtccttgaatcctga

SEQ ID NO: 75535 - DNA, 1169 bp, Homo sapiens; identical to SEQ ID NO: 61584

SEQ ID NO: 75536 - DNA, 3753 bp, Homo sapiens; identical to SEQ ID NO: 60960

SEQ ID NO: 75537 - DNA, 2881 bp, Homo sapiens; identical to SEQ ID NO: 60962

SEQ ID NO: 75538 - DNA, 2417 bp, Homo sapiens; identical to SEQ ID NO: 60963

SEQ ID NO: 75539 - DNA, 2205 bp, Homo sapiens
ttttttttttttctggctacaaattttattccgttacaaatagcaccgagcccttggggctgcccctgtggagagggatccccctcctggacccccacctcctcccctgagctacccatgtagtgtctgggagctggcacacggcccagggtccctctggaagctgggccaggccaaggggttaggcccaggcccttcgtggggtgggcccagggccagctgtggcagatgtgcaggtaggtgagcggcagcctctcagatgagcacactggccacgggcacgcgggtggagcggccccgctggggcaccacaatccggtcgtctgtggaccctgcttcgtgcagcaggccctgcacgtgcagctgtgcccgccggcggtcggcctcaatgaagatgggcggtgcccaggaaggctgcgccgcccagtgccccaacaaacgcgcagagcatgagcgagaactgcagagcccggaactcggacaagaaggaggggggccagttccggcgcaggcggtcagagatcaggccaatgaggtaggggctcccagcatcacccagcaggtgggacagcacgatctggaaggcctcggcggtggagcgtcgggtagggatcaccacgtacagcagaatgtcggccacgatggcccagttcatggacaggagggtctctccaatgaagatgaaaatataagtggccacgatgctaccacgggcgcaggcaagggacaggaagaggaagggtgcagagcccaggaggccagtggcacagaccaggggatcagcccgggggttggagtggcggagccggcggctgatctccacacccaggcccacacccaggactccggtcaggcaggtgatgagtccaaagatgagactgtcagaggaagagcaggagtctccgggaaggcagggtggggtctccccaaggaccacgcgggaacgcagcaggaatgccggagcccacagagccagggagcccgtgacaaaggccacagcagtgaagcccagggaagacaggacgaaactaggatttcttgccagagccctcagatctgcccaccacgaggtggggttcaggggtggcaaatctgagtggcgctccacggctccccttggcggctcccgcactaccaggaacagcagcagaacggccaccactcctagacccggtgtcaccctcagagcccagtgccagtctccagccatatccttcactttggagcctgcaatgtagcccagaccactgcccaccggaatggcaaagtagaagatgctgagcatccggctccgctggtcggccacaaagaggtcggcaatgagagtgggcgcgatggtggaataactggcctccccgacccccaccaggccccgggtcaggaggagcagccagaaatgctctccggggatgaaggatgaccccagtgtcaccagggaccagaaggcaatgcccccgcacatgagatacttccgattgtacctgtcacccaggtagccaaacacaggtgccaacaccatgtaactggagatgaacacggtctggatgagcccagagctactgtccccgatgttgaagaactgctcgatgtcgggaaggacgccagccacggtgaagcggtccatgtagttcaggagattgatgtagcacagcaccgccactatgagagccgaacggccgggagacaggccggtgatgcgctgcagcccctcctggtccgggacctcgggctcctcggacttcgggttccccgtggaccctggcaaccccggggtgccaggcactggcccgtcgtccgggtcatccgcctggctgaggaagggcgccggtgtcggacccggccatggtcccggggggccgcgcccgcccgcgctccggtcccaccgacgattcccaccttgcgaggggaggaggctggagaaaggaggatggaccgaacacaggcgagggaagtgcgcccggagacggggagcttgccctgaagcacagagcaccactgagaagggacccgggccctgtcacgcctccccgtctcagtagacacacagcgcggaggggacgtgcggaatacacgtgatgtcggggacaggagcgggctgaagagggcacgatcccacgcggaggccacccctcacccggggtaggagcccgctgcacttgctgtcgctcagcccgggcgtgcaccgcggcagccgccatgttgctt

SEQ ID NO: 75540 - DNA, 4068 bp, Homo sapiens; identical to SEQ ID NO: 60965

SEQ ID NO: 75541 - DNA, 2593 bp, Homo sapiens; identical to SEQ ID NO: 60967

SEQ ID NO: 75542 - DNA, 1986 bp, Homo sapiens
agcggccgccctttttttttttttttcagtaatacagatgtctattttattaaaaaagttacaaacaggtggactgcagggtcgtcttacaaaatgacaagaatgaaatctattggaaaaattttacttttacaaatctttataggtaaattgttcaatgtttgtacttgttatttgagattttacctttcactgataaagttacagtacattagatccatgataataggttacattattttatttgcagagccctactgcagtgatttgaacaactcctaaatagatgccataataaagacaagacatatattgcatttaatattaatttattatcctaataagcaacatgcaatctattgaggaagctaaaataacttttggtcccttttcttaaaatgtgctggagaaaccacctttaaaatcactttcccctgattcctgcgatcctaagtgaattcaagtcaaatttgctgctgaggtcaatgacaatgaacactgtaattttgagagagagagagagagagagagagagagagagagagagagagagagagaaacaagaacacaatctacaggaaagaaacattataaaaaaatcaaaatctctagaaaatttaaatcatgatgaattatttgattcctttagaatttcacaaagccacaaagctaataacaatgatccatgatcacttaacctacttttaaatgagtgtttggttttaagtttggtattaaagtgcaaacttaaattaagtattcacttcaagcagttcataaataaggaacaatgtttcaattgcctctatctttacaatctcaccataaaattcaaaatttaagaacaagagttcactttgagggaatttgctcaggaatcaaatgcaacacgatttaaaaaaaggaaatcaaagtttagtcaatttctactcagtaattaatggtcatgctgacccataaatcacatgaatgtagataccactttatttgaacatcacacacaatataaatttaaaattgccacaccctttcataaaccatcactgcatatattagagctttccttgacaaagttattgagctcttattatagatcaaaagtatagttttggttttgttttattttatttagaagcatgttcaaatgactaaagctgggctcctaaaatcgagaactttggtgcagtaggtgagctgcagttactaacttctgcaaatgaaaagcacacaactaaaatcaaataaaaacccaacaataaaatactgtcaaacttacacaatttaaaaatcattgctagaaaaagccctcattgtcacgatgttaaaactgaaccaaaatattactctgcataagtttcctttctgattctacacctgcgttactgttaaaatgttcaagtattcagacaaaaatatgctgattaggtaaacaacatggaaggcaatggctattagaaagcacatttgcaaaaataaaaaatagcccagagacttggcgctattctccctcctgttacacagattttgtctctaatacgaacatgcttcttgagaaataactaaaaagcaattgtgatagtgcaagaaaactttaacaaatattgctttaaactattattcagaaagacaaatattaagaactagaaagtgtgtatgattttatttgaattcaattttacatgtgcagaagtctactagatgtcaattacaagcctgataggcaaagatgagctatctctgtttaggtatacaattaatttaccatggatacaatatcccttttcaaaggcattgctaaataggtcataactaaatttagaacttcacagaaaggaaaatgttactgccgcaattcaatgctgtaaatgagattaacacatgtgaaaacctaatggaactgaatgcttaactcttcaactaaatgctctacagtcaatttcaaatatcaattgtaaccttcagaacatgttaattacaaaaaaaaaa

SEQ ID NO: 75543 - DNA, 2287 bp, Homo sapiens
caggcggtggctatacttattaaagttggcgggagctgagcgatcagtcggtcctgggctggctgtggtgtagggcgttgcaggcagcgctcacctcctcaggccggcagaatgcgggtggctgtggctggctgctgccacggcgagctggataagatctatgagacgctggcgctggcagagcggcgcggcccggggcctgtcgacctcttgctgtgctgcggcgacttccaggcggtgcgcaacgaggcggatctacgctgcatggccgtgccgcccaagtatcgtcacatgcaaaccttctacaggtattactctggagagaaaaaggctccagttctcacgctcttcattgggggaaaccatgaagcctcaaatcatttgcaagagttaccctatggtggctgggtggcaccaaacatttattatttaggtttggctggtgtggtaaaataccgaggtgtaaggatcggtggaatctctggtatctttaaatctcatgactatcgaaaaggtcattttgagtgccccccttataattcatctacaatcaggagtatatatcatgtgagaaatattgaagtctataaattaaaacagctgaagcagcctatagatatattcttgtctcatgattggccaagaagtatatatcattatggaaataagaagcaacttcttaagactaaatcttttttccgacaagaagtggaaaataacacattaggaagtccagctgcctcagagcttttagagcatctcaaacctacttattggttttctgcccaccttcatgtgaagtttgccgccttgatgcagcatcaggcaaaggataaaggacagacagccagagcaaccaaatttttagccttggacaaatgcttaccacatagagattttcttcagatattagagatagaacatgaccccagtgctcctgattacttggaatatgatattgaatggctcactattctcagggctacggatgatcttattaatgtgactgggcgcctgtggaatatgccagaaaataatggcctgcatgcaaggtgggattatagtgcaacagaagaaggtatgaaagaagtattggaaaaattgaatcatgatctcaaggttccatgtaactttagtgtaacagctgcttgttatgatcctagcaagccacagacacaaatgcagctgattcataggatcaatcctcagacaactgaattttgtgcccaacttggcatcatagacatcaatgttaggcttcagaagtccaaggaagaacatcatgtgtgtggtgaatatgaagaacaggatgatgtggagagtaatgactctggagaagaccagagtgaatataatacagacacatctgctctgtcttctattaatccagatgaaataatgttagatgaagaagaagatgaagatagtattgtaagtgcacatagtggcatgaatacaccatcggtagaaccttctgatcaagcttctgagttttctgcaagtttctctgatgtcaggatcttgccaggctctatgattgtatcttctgatgatacggtggattccacaattgatagagaggggaaacctggtgggactgtggagtcagggaatggagaggacttaaccaaggtgccattgaagaggctgagtgatgaacatgaacctgaacaaagaaagaaaattaagaggaggaatcaagccatttacgctgcagtggatgatgatgatgatgatgcagcttaagatgatttacttgttttgtttttgtgtttgttttgcttttttgagatggagtttcactcttgtcacctagactggagtgcaatggcgtgatctcgggttcaccggcaacctccgcctcccaggttcaagcaattctcctgcctcagcctccccaagtaggtgggactacaggtgccccgccaccacacccggctaatttttgcatttttagtaatgacaggggtttcacccatgttggccaggctggtctcccaactccctgaccctcaggcgatcccacctgtcttggccttctaaagtgcctgggattacaggcgtgagccactgtgccctggccgacaatttacttgtcttagtattatatgtagatatgtgattttttgagactgtatttttagagctgaatttttgactaaagacttaaactttgataaattatggaagatacattagagaattttagttagatattgactttatctttaggctgttgtatgtttcagatgcaaacatattcaagtttcatatatttaaaaaaaaa

SEQ ID NO: 75544 - DNA, 3275 bp, Homo sapiens; identical to SEQ ID NO: 60970
  misc_feature (1)...(3275): n = a,t,c or g

SEQ ID NO: 75545 - DNA, 1709 bp, Homo sapiens; identical to SEQ ID NO: 60971

SEQ ID NO: 75546 - DNA, 2134 bp, Homo sapiens
gaacttccgggtcgacccacgcgtccgcttggacgagcctggagagcctccctccccctcgctcaccaccacctctacttcgcagtggaagaaacattggtttgtgctgacagattcaagtctcaaatattacagagactccactgctgaggaggcagatgagctggatggtgagatcgacctgcgttcctgcacggatgtcactgagtacgcggtgcagcgcaactatggcttccagatccacaccaaggatgctgtctataccttgtcggccatgacctcaggcatccggcggaactggatcgaggctctgagaaagaccgtacgtccaacttcagccccagatgtcaccaagctctcggactctaacaaggagaacgcgctgcacagctacagcacccagaagggccccctgaaggcaggggagcagcgggcgggctctgaggtcatcagccggggtggccctcggaaggcggacgggcagcgtcaggccttggactacgtggagctctcgccgctgacccaggcttccccgcagcgggcccgcaccccagcccgcactcctgaccgcctggccaagcaggaggagctggagcgggacctggcccagcgctccgaggagcggcgcaagtggtttgaggccacagacagcaggaccccagaggtgcctgctggtgaggggccgcgccggggcctgggtgcccccctgactgaggaccagcaaaaccggcttagtgaggagatcgagaagaagtggcaggagctggagaagctgcccctgcgggagaataagcgggtgcccctcactgccctgctcaaccaaagccgcggagagcgccgagggcccccaagtgacggccacgaggcactggagaaggaggttcaggctcttcgggcccagctggaggcgtggcgtctccaaggggaggctcctcagagtgcactgagatcccaggaggatggccacatccccccgggctacatctcacaggaggcatgtgagcgcagcctggcagagatggagtcctcgcaccagcaggtgatggaggagctgcagcggcaccacgagcgggagctgcagcgcctgcagcaggagaaggagtggctcctggctgaggagacggcagccacggcctcagccattgaagccatgaagaaggcctaccaggaagagctgagccgagagctgagcaaaacacggagtctccagcagggcccggatggcctccggaagcagcaccagtcagatgtggaggcactgaagcgagagctgcaggtgctatcggagcagtactcgcagaagtgcctggagattggggcactcatgcggcaggctgaggagcgcgagcacacgctgcgccgctgccagcaggagggccaggagctgctgcgccacaaccaggagctgcatgggccgcctgtcagaggagatagaccagctgcgcggcttcattgcctcgcagggcatgggcaatggctgcgggcgcagcaacgagcggagttcctgcgagctagaggtgctgcttcgcgtaaaagaaaacgaactccagtacctaaagaaggaggtgcagtgcctccgggacgagctccagatgatgcagaaggacaagcgcttcacctcgggaaagtaccaggacgttctatgtggagctgagccaccatcaagaccacggctctgagcgggagattcgagcagctgaaggagcacctgcgtccttgccatggccggccctccaggagaaggagtcgatgcgcaacagcctggctgagtagaggtcccgcccagctgcagaccctccaggctggaggaccagccgccctccttccctcctggatggaagtaaaaagccaagctttctccccaccctctgtgggccacacgtgcacttgcacccaccacacacacacacacacacacacacacacacacagacacacagacacatacgcacacacgtgcacacatgtacacacggatacacacacacacacacacacacacacactgcatatctgagcacgcccctcgcactgggtctcaccttgcaccttcttcaggattttatatgtgaagagatttttatatagatttttttcctttttttccaaaacactttatactttaaaaaaaaaa

SEQ ID NO: 75547 - DNA, 5612 bp, Homo sapiens; identical to SEQ ID NO: 60973

SEQ ID NO: 75548 - DNA, 857 bp, Homo sapiens; identical to SEQ ID NO: 60974

SEQ ID NO: 75549 - DNA, 3402 bp, Homo sapiens; identical to SEQ ID NO: 60975

SEQ ID NO: 75550 - DNA, 1578 bp, Homo sapiens; identical to SEQ ID NO: 60976

SEQ ID NO: 75551 - DNA, 3281 bp, Homo sapiens
gtgacggtggcgcacaagaaggctccgccggccctgatcgacgagtgcatcgagaagttcaatcacgtcagcggcagccgggggtccgagagcccccgccccaacccgccccatgccgcgcccacagggagccaggagcctgtgcgcaggcccatgcgcaagtccttctcccagcccggcctgcgctcgctggcctttaggaaggagctgcaggatgggggcctccgaagcagcggcttcttcagctccttcgaggagagcgacattgagaaccacctcattagcggacacaatattgtgcagcccacagatattcgaggaaaattcgaactattgctctttaacgattgggccagtctgaagtttacctcatcagtcctgacaccaaaaaaattaggcattgggagaaaaatttttaagggagatatccttttgctctcagggcatcagacaccgtggaccacttttggttttatctgtcgggagtcttccggaggtggcggctttcattttgtctgttacgtgtttcagtgcacaaatgaggctctggttgatgaaattatgatgaccctgaaacaggccttcacggtggccgcagtgcagcagacagctaaggcgccagcccagctgtgtgagggctgccccccctgcaaagccctgccacaagctctgtgagaggatagagggaatgaattcctcccaaaacaaaactagaactgcaaaagcaccctgacgacattaacccaatcaggagcaggcgactatttttgaagaggttcagaaattgagaccgagaaatgagcagcgagagaatgaattgattatttcttttttgagatgtttatttgaagagaaacagaaagaacacatccatattggggagatgaagcagacatcgcagatggcagcagagaatattggaagtgaattaccacccagtgccactcgatttaggctagatatgctgaaaaacaaagcaaagagatctttaacagagtctttagaaagtattttgtcccggggtaataaagccagaggcctgcaggaacactccatcagtgtggatctggatagctccctgtctagtacattaagtaacaccagcaaagagccatctgtgtgtgaaaaggaggccttgcccatctctgagagctcctttaagctcctcggctcctcggaggacctgtccagtgactcggagagtcatctcccagaagagccagctccgctgtcgccccagcaggccttcaggaggcgagcaaacaccctgagtcacttccccatcgaatgccaggaacctccacaacctgcccgggggtccccgggggtttcgcaaaggaaacttatgaggtatcactcagtgagcacagagacgcctcatgaacgaaaggactttgaatccaaagcaaaccatcttggtgattctggtgggactcctgtgaagacccggaggcattcctggaggcagcagatattcctccgagtagccaccccgcagaaggcgtgcgattcttccagcagatatgaagattattcagagctgggagagcttcccccacgatctcctttagaaccagtttgtgaagatgggccctttggccccccaccagaggaaaagaaaaggacatctcgtgagctccgagagctgtggcaaaaggctattcttcaacagatactgctgcttagaatggagaaggaaaatcagaagctccaagcctctgaaaatgatttgctgaacaagcgcctgaagctcgattatgaagaaattactccctgtcttaaagaagtaactacagtgtgggaaaagatgcttagcactccaggaagatcaaaaattaagtttgacatggaaaaaatgcactcggctgttgggcaaggtgtgcccacgtcatcaccgaggtgaaatctggaaatttctagctgagcaattccaccttaaacaccagtttcccagcaaacagcagccaaaggatgtgccatacaaagaactcttaaagcagctgacttcccagcagcatgcgattcttattgaccttgggcgaacctttcctacacacccatacttctctgcccagcttggagcaggacagctatcgctttacaacattttgaaggcctactcacttctagaccaggaagtgggatattgccaaggtctcagctttgtagcaggcattttgcttcttcatatgagtgaggaagaggcgtttaaaatgctcaagtttctgatgtttgacatggggctgcggaaacagtatcggccagacatgattattttacagatccagatgtaccagctctcgaggttgcttcatgattaccacagagacctctacaatcacctggaggagcacgagatcggccccagcctctacgctgccccctggttcctcaccatgtttgcctcacagttcccgctgggattcgtagccagagtctttgatatgatttttcttcagggaacagaggtcatatttaaagtggctttaagtctgttgggaagccataagcccttgattctgcagcatgaaaacctagaaaccatagttgactttataaaaagcacgctacccaaccttggcttggtacagatggaaaagaccatcaatcaggtatttgaaatggacatcgctaaacagttacaagcttatgaagttgagtaccacgtccttcaagaagaacttatcgattcctctcctctcagtgacaaccaaagaatggataaattagagaaaaccaacagcagcttacgcaaacagaaccttgacctccttgaacagttgcaggtggcaaatggtaggatccaaagccttgaggccaccattgagaagctcctgagcagtgagagcaagctgaagcaggccatgcttaccttagaactggagcggtcggccctgctgcagacggtggaggagctgcggcggcggagcgcaaagcccagcgaccgggagcctgagtgcacgcagcccgagcccacgggcgactgacagctctgcaggagagattgcaacaccatcccacactgtccaggccttaactgagagggacagaagacgctggaaggagagaaggaagcgggaagtgtgcttctcagggaggaaaccggcttgccagcaagtagattcttacgaactccaacttgcaattcagggggcatgtcccagtgttttttttgttgtttttagatactaaatcgtcccttctccagtcctgattactgtacacagtagctttagatggcgtggacgtgaataaatgcaacttatgttttaaaaaaaaaa

SEQ ID NO: 75552 - DNA, 4956 bp, Homo sapiens
ttctcccgggacgacgatttcgttgaaaatcacagttattttgtttctgggggggaaaagcaggtgatattctcagtggagaccaggacaaggaacagaaagacccttactttgtggagaccccctatggttatcaactagacttagatttcctcaaatatgtggatgacatacagaagggaaataccatcaaaagactgaacatccagaagaggcggaagccgtccgtgccatgcccagaacccaggaccacatctggtcagcaaggtatatggacttccactgaatccctctcatcctccaacagtgatgacaacaagcagtgccccaacttcctcatagccagaagtcaagttacatcaactccaatctcaaagccacctccccctctggagacctcactcccttttcttaccatcccagaaaatcgacagctgccacctccctcaccacaactcccaaagcataaccttcatgtcaccaagacactgatggagacccggagaagactggaacaggagagagccaccatgcagatgacaccgggtgagttcagaaggcccaggctggccagttttggaggcatgggcaccacaagctccctcccttcttttgtgggttctggaaaccacaatcctgccaagcaccagcttcagaatggataccaaggtaatggggattatggtagctatgccccagctgctcccaccacttcctccatggggagctccatccgccacagccccctgagctcagggatctccaccccagtgaccaacgtgagccccatgcacctgcagcacatccgcgagcagatggccattgctctgaaacgcctgaaggagctggaggagcaggtgcgaaccatccctgtgctccaggtaaagatctctgtcttgcaagaagagaaaaggcagttggtctcacagctgaaaaaccaaagggctgcatcccagatcaatgtctgtggtgtgaggaagcggtcctatagtgcggggaacgcctcccagctggaacagctctcccgggcccgaagaagtggcggggaattatacattgactatgaggaggaagaaatggagaccgtagaacagagcacgcagaggataaaggagttccggcaactttacagcagacatgcaagccctggagcagaagatccaggacagcagctgtgaggcctcctcagagctcagggagaatggagagtgccggtctgtggctgtgggtgccgaggagaacatgaacgacatcgtcgtgtaccacagaggctccaggtcctgtaaggatgcagctgtagggacacttgttgagatgagaaattgtggggtcagcgtgacagaggccatgcttggagtgatgactgaagctgacaaagaaattgagctgcaacagcagaccatagaatccttgaaggaaaagatctatcgcctagaagtacagcttagagaaaccacccatgaccgggagatgactaaactgaaacaagagctgcaggctgctggatcgaggaaaaaggttgacaaagccacgatggcccagccgcttgttttcagtaaggtggtggaggcagtggtgcagaccagagaccaaatggtcggcagtcacatggacctggtggacacgtgtgttgggacctccgtggaaacaaacagtgtaggcatctcctgccagcctgaatgtaagaataaagtcgtagggcctgagctgcctatgaattggtggattgttaaggagagggtggaaatgcatgaccgatgtgctgggaggtctgtggaaatgtgtgacaagagtgtgagtgtggaagtcagcgtctgcgaaacaggcagcaacacagaggagtctgtgaacgacctcacactcctcaagacaaacttgaatctcaaagaagtgcggtctatcggttgtggagattgttctgttgacgtgaccgtctgctctccaaaggagtgcgcctcccggggcgtgaacactgaggctgttagccaggtggaagctgccgtcatggcagtgcctcgtactgcagaccaggacactagcacagatttggaacaggtgcaccagttcaccaacaccgagacggccaccctcatagagtcctgcaccaacacttgtctaagcactttggacaagcagaccagcacccagactgtggagacgcggacagtagctgtaggagaaggccgtgtcaaggacatcaactcctccaccaagacgcggtccattggtgttggaacgttgctttctggccattctgggtttgacaggccatcagctgtgaagaccaaagagtcaggggtggggcagataaatattaacgacaactatctggttggtctcaaaatgaggactatagcttgtgggccaccacagttgactgtggggctgacagccagcagaaggagcgtgggggttggggatgaccctgtaggggaatctctggagaacccccagcctcaagctccacttggaatgatgactggcctggatcactacattgagcgtatccagaagctgctggcagaacagcagacactgctggctgagaactacagtgaactggcagaagctttcggggaacctcactcacagatgggctccctcaactctcagctcatcagcaccctgtcgtctatcaactctgtcatgaaatctgcaagcactgaagagctgaggaaccctgacttccagaaaaccagtctgggtaaaatcacaggcagttatttgggatatacctgtaagtgtgggggccttcagtcaggaagtcccttaagctcccagacatcccagcctgagcaagaagtggggacctcagaaggaaagccaatcagcagcctggatgccttccccactcaggaaggtacgctgtctccagtgaacctgacagacgaccagatcgccgctggcctctatgcatgtacaaacaatgaaagtacactgaagtccatcatgaagaagaaagatggtaacaaagattcaaatggcgcaaaaaagaatcttcagtttgttggcattaatggagggtatgaaacaacttcaagtgatgattccagctcagatgaaagctcttcttccgagtcagatgacgagtgtgatgtcattgagtatcctcttgaagaagaggaggaggaggaggatgaagacactcggggaatggcagaagggcaccatgcagttaatattgaaggtttgaagtctgccagggtggaagatgaaatgcaggttcaagaatgtgaacctgagaaggtggaaatcagagagaggtatgaattaagtgaaaagatgttgtctgcatgcaacttactgaaaaatactataaatgaccccaaagctttgaccagcaaagatatgaggttctgtctgaacaccctccagcacgagtggttccgcgtgtccagtcagaagtcagccattccagccatggtgggggactacatagctgcttttgaggccatttccccagatgtcctccgctatgtcatcaacttggcagacggcaacggcaacacagccctccattacagcgtgtcccactccaacttcgagattgtgaagctgctgttagatgccgatgtgtgtaatgtggatcaccagaacaaggcaggctacacccccatcatgttggcggccctcgccgctgtggaagcagagaaggacatgcggattgtggaagaactcttcggctgtggggatgtgaatgccaaagctagtcaggcgggacagacggccctcatgctggcggtcagtcacggacggatagacatggtgaagggccttctggcctgtggggctgatgtcaacatccaggatgacgagggctccacggccctcatgtgtgccagcgagcacgggcacgtggagattgtcaagctgctgctggcccagcccggctgcaacggtcacctagaggacaacgatggcagcactgcgctctcaatcgccctggaagcaggacacaaggacatcgctgttcttctgtatgcccatgtcaactttgcaaaagcccagtctccgggcacccctaggcttggaaggaagacgtctcctggccccacccaccgaggttcatttgattgattgtatgcaaatagccctttatttacatgccactattaagctgctaattgttcctgttggggtgacagatactgaatgtatacgtattgtgcctgagctcaccagcaaacagaagcatcaagcccaggggtaaaggctgaagctttcacagtgcagagactgctagcctgggcacacgcacctcctttctggccgtcttctgtgtagggcacactttaacccagtctctgttgctgttgagtctctgctccgttttgtacagtcacagggaattctgatctgaaggggcaccttctgttcactcccacaaagtggtgtctggttctcactgagacgttttaagatttttccacaaatatttatatgtactaaatgtggaaccattagaaagttcttccaaaatctcattccagcatagttttggatttttcttttgtcttattttaaaataaggaagtcgagatgactttgatcattggtaacttgggcctgggccagacaaagtataaaacttacaaaagaatattctcatttggtcttaactaggtagatgtaatatatgactttttataaaaagggtatctatatgaacttgacacagtattttcagcttttgtattccatactaaagccatgaagaactacacgtaacatcatcatttgtattaattgcacaactccaatgctaaaggttggattgtgttagaggaatcggctctgtatttgcctctagagaaacacagtgttctctttgtatttatggattcctttttaccgtgtcacatttactttggtcctctatgtatttaaatgtttgaagtgccttagactcttgccatattttcaaaataaaattccattaagctcttaaaaaaaaaa

SEQ ID NO: 75553 - DNA, 4704 bp, Homo sapiens
tttcgtgcttaaggaagtaaaatggcggacctggcgaacgaagaaaagcctgccattgctccgcccgtctttgtgtttcagaaggataaaggacaaaagtcccctgcagagcaaaaaaacttgtcggattcgggagaggagcctcggggggaggctgaggccccccaccatggcacgggtcaccccgagtcagctggcgagcatgccctagaacctcctgcccctgctggcgcctcagccagcactcctccgcctcccgctcctgaagcccagcttcctccttttccgcgagaactggcagggaggtcagctggcggctccagtcctgaaggcggagaagattctgacagagaagatggaaattactgccctcctgtcaagcgagaaagaacatcctctttaacccagttcccaccctcacagtcagaggaaaggagcagtggcttccggttgaagccaccaacgctgatccacggccaagcccccagcgcaggtctgccaagccagaagcccaaggagcagcagcggagcgtgcttcgcccggcagtgttacaagctccgcagccaaaggcgctgtcccagactgtccccagcagtggcaccaacggggtcagcctcccagcagactgcacgggggcagtgcccgcagcatcccctgacactgctgcatggagaagtccttccgaagctgccgatgaggtgtgtgcacttgaggagaaagagccccagaaaaatgagtccagcaatgcctctgaagaggaagcctgtgagaaaaaagaccccgccacacagcaagcctttgtatttgggcagaacttgagggacagagttaagctgataaatgagagcgtggacgaagccgacatggagaatgctggacaccccagcgcagacacgccaaccgcaacgaactatttcctccagtatatcagttccagtttagagaactcaaccaatagtgccgacgcctccagcaacaaatttgtatttggccagaacatgagcgagcgagttttgagccccccaaaattaaacgaggtcagttcagatgccaacagggaaaatgcagctgccgagtcagggtctgagtcctcgtcccaggaggccacccctgagaaagagtccctggctgagtcggcagccgcctacaccaaggcaacagcgcggaagtgtttgttggaaaaagtggaagtcatcaccggggaggaggcggagagcaatgtgttacagatgcagtgcaagctgtttgtctttgacaagacctcacagtcctgggtggagagaggccgggggctgctcagactcaatgacatggcgtccaccgatgacggcacactacagtcccgacttagtgatgccggacccagggggagcctgcgacatgatcctcaacaccaagctgtgggcccagatgcagatcgacaaggccagcgagaaggagcattcgcatcacagccatggacaacgaggaccagggcgtgaaggtcttcctgatctcggccagctccaaggacacaggtcaggtgtatgcagccctgcaccaccgcatcctggccctgcgcagccgcgtggagcaggagcaggaggccaagatgcccgcgcctgagcctggggcagccccatccaacgaggaggacgacagcgacgatgacgatgtcctggctccttcaggggccaccgcagctggtgctggtgacgaaggggacgggcagacgaccgggagcacatagcggccgggagcccggctgcacaccaggctgctgctttgtccgtctatccaccgcgcccacccgcccccaccccaccggcagcgtccaggtgcggggccgggaaccacacaccccactgggccggccacagtctggacccgcacgtcctgttcaaaagcagactcgggaactgcctgaatgtggtttgggacacgagacctcatcatattgatgagcgaacaaacaagaacatttcctccctcccctcctttgaattgaaatggcacattaagacttgtcacggcttctcactgggactggagacctcgttccttcaccccgcgtgtcgccagcctctgggtccagccagagcccctggcttctccgccacccacacccttcccaccctgctgtggggccctgcctttgtggggagcagccagccctctgcccctgcccagggctccccaactataggcctgggacccccgcccagcttggggggctgctcgtacgagtgtagacactgggcccattggacgtgctgttaactactatcttcatttcccacttcccctctctgattgggggtgtatattttacatctttttttctttttattttcgaaggctttgttttggtttcttaggttaagatgctctcgagcgttgagcaggcacagctctgtcgaggtccctgtcccccacctgtggttctggcctctgaggttgggggactacttgtttcccaccccaggttcctccaggccaagtcatggggtgatgaggagttggggccctgtctgtcctaggcctggagagtgcctgtctgggaaaaggtcactggacctggaagggtccccagggtcccctgactcccgtctccatctgtcacgtggttcaccatcatcaggcaccaggcgcaaactgcttcccgctgttggccatcccttccccagccacaggtgtccctgcccccaggacagtccagggccaggggcttctgtgagaggcagagggggaccctcaccaaatcttggtggaagagcccaggggctggtcccagaacaggcagtctcacaagcacgcagcacactggagtggacgcctgtgcccacccgagcctggagcatggccaagagccagcttgcaccacccacctgggaggccgaggaggaggtcccctgggcacagggcctctttgggacttcagaggaaatctcccagtcccactctcggagggttaagagaaggcctcctgcagctgtgccgtccacacctctaggtcgccagagccctggcccccagcccccagcaagcctgagcccgggaagaaccagaggccctcccgagagacccagtcacacgtctctgctttaagccttagccagctagtgacgagtacaacgagataacgcccatgtgttttggaacatttatgtaagattgtcatatgaaatgtatttgggaactacattaaacttttaactaaaaccctggcctctgcatgccccaggggcctcaggaagcccctgaccaggaacggcctccacctccccgggcgaggacctccagcagcctggggcctcatgctcccacccagcgtgtcaccagtgctggggtccagccacagccctgttctctccaccaccaccccgactttaacccccaaccctgctggaaggccccgccggtctgcccccgcccagagctgccagcctcgggccgctcaccagaatgtagatactgggcccgctggacgtgttacctgctatttttattccccatttgccatcttctgattgggggttgatgttttacagatttttttttcaaaggctttatttcagtttctgaggttaggatgcccctgtgcccctcgctccacacctgggcaggtctaaacttccttccaggatggcctccacacacagcctcccacctggggtcacctggcttcctgggggacccgcaagggaggggcagggagcagcagtccgggtgcggggatcgggggacctcggcgggggcatccacaggggctgcaagacctctggtcagcatggcgtgggtggggagagcgtttctccctggggtcctgagccagtgactcctgttaggacctttgtcccacctccgcctggtggaccggcagggacctggtctagccagtcctgcagcctccattcccccacctgcccctccccgctctgtggtgtggctgcccaggagagaaggggcccagggaagggaggtctccggcaggggtggggagtgacaggccagggcagcagggctgagccggagctgctcacagctgccaggcactggtcatcatggccacgaactcctcatccgtgttcatggaggcactcacgccgctgtagtagtcctggaattccgccagtgtgacctgcccgtccttctcagaggagtcgaagttgtccaggaagcggcgcagcacctcgtcctcggtccactccccactgcgcaccttggggtgggcacggccactgtacaccccgcggaggtcgtccaccgtcacgacgccgtccccactgcggtccagcttggcaaatgcagctgcgatgacagcctcccgggcctgggacatggggggccgcagcgcccgaaggaactcctccagatccagcgtcccgctgccattgcggtcccacttcctgcacacaccctctgcctccgcctggtccagcaccagcccgagtttggccagaccctgccggaactcatcagcgtccagggatctgctcccgtcccggtctagttggcggaaaaacctggccaggccctggatgcccgaggccccgcgggacaggcactgtgcccggagtttctccatggtggcatccacggcgtccatgcttggtctgggctctgggcagctggcctgcgtctgtcccagagtcctgcctgcggggccttgtgttagctgtgttgtgcctggggagactgttgctagtggacggacgcgtggg

SEQ ID NO: 75554 - DNA, 5773 bp, Homo sapiens
tttcgtgatcatagctgggggaggctgagcgtgggagcggtgctgccagtcctgcctgaaaacgcgaaatgagtcttgcttggttctccctccactgggcgtgagagcccctgcccaggaggcccaggacaaatggccccatagtggaaactgggaagcttttaggcatctgatcagagcgggagccagccgggggaccacagtgctggacaggccaaccaactcaaacttgaagacatgaaatccccaaggagaaccactttgtgcctcatgtttattgtgatttattcttccaaagctgcactgaactggaattacgagtctactattcatcctttgagtcttcatgaacatgaaccagctggtgaagaggcactgaggcaaaaacgagccgttgccacaaaaagtcctacggctgaagaatacactgttaatattgagatcagttttgaaaatgcatccttcctggatcctatcaaagcctacttgaacagcctcagttttccaattcatgggaataacactgaccaaattactgacattttgagcataaatgtgacaacagtctgcagacctgctggaaatgaaatctggtgctcctgcgagacaggttatgggtggcctcgggaaaggtgtcttcacaatctcatttgtcaagagcgtgacgtcttcctcccagggcaccattgcagttgccttaaagaactgcctcccaatggacctttttgcctgcttcaggaagatgttaccctgaacatgagagtcagactaaatgtaggctttcaagaagacctcatgaacacttcctccgccctctataggtcctacaagaccgacttggaaacagcgttccggaagggttacggaattttaccaggcttcaagggcgtgactgtgacagggttcaagtctggaagtgtggttgtgacatatgaagtcaagactacaccaccatcacttgagttaatacataaagccaatgaacaagttgtacagagcctcaatcagacctacaaaatggactacaactcctttcaagcagttactatcaatgaaagcaatttctttgtcacaccagaaatcatctttgaaggggacacagtcagtctggtgtgtgaaaaggaagttttgtcctccaatgtgtcttggcgctatgaagaacagcagttggaaatccagaacagcagcagattctcgatttacaccgcacttttcaacaacatgacttcggtgtccaagctcaccatccacaacatcactccaggtgatgcaggtgaatatgtttgcaaactgatattagacatttttgaatatgagtgcaagaagaaaatagatgttatgcccatccaaattttggcaaatgaagaaatgaaggtgatgtgcgacaacaatcctgtatctttgaactgctgcagtcagggtaatgttaattggagcaaagtagaatggaagcaggaaggaaaaataaatattccaggaacccctgagacagacatagattctagctgcagcagatacaccctcaaggctgatggaacccagtgcccaagcgggtcgtctggaacaacagtcatctacacttgtgagttcatcagtgcctatggagccagaggcagtgcaaacataaaagtgacattcatctctgtggccaatctaacaataaccccggacccaatttctgtttctgagggacaaaacttttctataaaatgcatcagtgatgtgagtaactatgatgaggtttattggaacacttctgctggaattaaaatataccaaagattttataccacgaggaggtatcttgatggagcagaatcagtactgacagtcaagacctcgaccagggagtggaatggaacctatcactgcatatttagatataagaattcatacagtattgcaaccaaagacgtcattgttcacccgctgcctctaaagctgaacatcatggttgatcctttggaagctactgtttcatgcagtggttcccatcacatcaagtgctgcatagaggaggatggagactacaaagttactttccatatgggttcctcatcccttcctgctgcaaaagaagttaacaaaaaacaagtgtgctacaaacacaatttcaatgcaagctcagtttcctggtgttcaaaaactgttgatgtgtgttgtcactttaccaatgctgctaataattcagtttggagcccatctatgaagctgaatctggttcctggggaaaacatcacatgccaggatcccgtaataggtgtcggagagccggggaaagtcatccagaagctatgccggttctcaaacgttcccagcagccctgaggagtcccattaggcgggaccatcacttacaaatgtgtaggctcccagtggggggtagaagagaaatgactgcatctctgccccaataaacagtctgctccagatggctaaggctttgatcaagagcccctctcaggatgagatgctccctacatacctgaaggatctttctattagcatagacaaagcggaacatgaaatcagctcttctcctgggagtctgggagccattattaacatccttgatctgctctcaacagttccaacccaagtaaattcagaaatgatgacgcacgtgctctctacggttaatgtcatccttggcaagcccgtcttgaacacctggaaggttttacaacagcaatggaccaatcagagttcacagctactacattcagtggaaagattttcccaagcattacagtcaggagatagccctcctttgtccttctcccaaactaatgtgcagatgagcagcacggtaatcaagtccagccacccagaaacctatcaacagaggtttgttttcccatactttgacctctggggcaatgtggtcattgacaagagctacctagaaaacttgcagtcggattcgtctattgtcaccatggctttcccaactctccaagccatccttgctcaggatatccaggaaaataactttgcagagagcttagtgatgacaaccactgtcagccacaatacgactatgccattcaggatttcaatgacttttaagaacaatagcccttcaggcggcgaaacgaagtgtgtcttctggaacttcaggcttgccaacaacacaggggggtgggacagcagtgggtgctatgttgaagaaggtgatggggacaatgtcacctgtatctgtgaccacctaacatcattctccatcctcatgtcccctgactccccagatcctagttctctcctgggaatactcctggatattatttcttatgttggggtgggcttttccatcttgagcttggcagcctgtctagttgtggaagctgtggtgtggaaatcggtgaccaagaatcggacttcttatatgcgccacacctgcatagtgaatatcgctgcctcccttctgggtcgccaacacctggttcattggggtcgctgccatccaggacaatcgctacatactctgcaagacagcctgtgtggctgccaccttcttcatccacttcttctacctcagcgtcttcttctggatgctgacactgggcctcatgctgttctatcgcctggttttcattctgcatgaaacaagcaggtccactcagaaagccattgccttctgtcttggctatggctgcccacttgccatctcggtcatcacgctgggagccacccagccccgggaagtctatacgaggaagaatgtctgttggctcaactgggaggacaccaaggccctgctggctttcgccatcccagcactgatcattgtggtggtgaacataaccatcactattgtggtcatcaccaagatcctgaggccttccattggagacaagccatgcaagcaggagaagagcagcctgtttcagatcagcaagagcattggggtcctcacaccactcttgggcctcacttggggttttggtctcaccactgtgttcccagggaccaaccttgtgttccatatcatatttgccatcctcaatgtcttccagggattattcattttactctttggatgcctctgggatctgaaggtacaggaagctttgctgaataagttttcattgtcgagatggtcttcacagcactcaaagtcaacatccctgggttcatccacacctgtgttttctatgagttctccaatatcaaggagatttaacaatttgtttggtaaaacaggaacgtataatgtttccaccccagaagcaaccagctcatccctggaaaactcatccagtgcttcttcgttgctcaactaagaacaggataatccaacctacgtgacctcccggggacagtggctgtgcttttaaaaagagatgcttgcaaagcaatggggaacgtgttctcggggcaggtttccgggagcagatgccaaaaagactttttcatagagaagaggctttcttttgtaaagacagaataaaaataattgttatgtttctgtttgttccctccccctcccccttgtgtgataccacatgtgtatagtatttaagtgaaactcaagccctcaaggcccaacttctctgtctatattgtaatatagaatttcgaagagacattttcactttttacacattgggcacaaagataagctttgattaaagtagtaagtaaaaggctacctaggaaatacttcagtgaattctaagaaggaaggaaggaagaaaggaaggaaagaagggagggaaacagggagaaagggaaaaagaagaaaaagagaaagatgaaaataggaacaaataaagacaaacaacattaagggccatattgtaagatttccatgttaatgatctaatataatcactcagtgcaacattgagaatttttttttaatggctcaaaaatggaaactgaaagcaagtcatggggaatgaatactttgggcagtatcttcctcatgtcttcttagctaagaggaggaaaaaaaggctgaaaaaatagggaggaaattccttcatcagaacgacttcaagtggataacaatatttataagaaatgaatggaaggaaatatgatcctcctgagactaactttgtatgttaaggtttgaactaagtgaatgtatctgcagaggaagtattacaaagatatgtcattagatccaagtgctgattaaatttttatagtttatcagaaaagccttatattttagtttgttccacattttgaaagcaaaaaatatatatttgatatacccttcaattgccaaatttgatatgttgcactgaagacagaccctgtcatatatttaatggcttcaagcaggtacttctctgtgcattatagaatagattttaataatcttatagcattgtatattattattgctgttgtcactgttattattattgtggatactggcccttggtgtgttgcatagctccctatgtattctctgtttccatctttaagttcccagaccaatatacattaagagttttgcatggtctaaattgtgtttattccaaccacgtggaaagctcctggaaagaaattttacattcggttgttctgtgctcctaatgacacttgaccttgttgaacaaatggcagagcctttcccaaggatttgattgtttgtgaattatctgcatgtgtgcttttttttggtgtgtatgtatttcattaaaaaatataaatacttatgaaaattgcacgcatattagagttaaccatgtactattgatacagcaacgctacattgcaaataaaagtccgatcccaaaaggagaatgagacaaaaa

SEQ ID NO: 75555 - DNA, 583 bp, Homo sapiens; identical to SEQ ID NO: 60980

SEQ ID NO: 75556 - DNA, 4790 bp, Homo sapiens; identical to SEQ ID NO: 60981

SEQ ID NO: 75557 - DNA, 704 bp, Homo sapiens; identical to SEQ ID NO: 60982

SEQ ID NO: 75558 - DNA, 4866 bp, Homo sapiens; identical to SEQ ID NO: 60983

SEQ ID NO: 75559 - DNA, 1677 bp, Homo sapiens; identical to SEQ ID NO: 60984

SEQ ID NO: 75560 - DNA, 1058 bp, Homo sapiens; identical to SEQ ID NO: 60985

SEQ ID NO: 75561 - DNA, 1068 bp, Homo sapiens; identical to SEQ ID NO: 60986

SEQ ID NO: 75562 - DNA, 1973 bp, Homo sapiens
gcacgaggcccgcactaagggaaacatggctctagcgcggcccggtgcggctcttttccctcgtgactcggttgctcctggcgccgcgacggggcctcacggtccgcagtcccgacgaacccctgccggtggtgcgcatcccagtggctctacagcggcagttggaacagcggcagagcaggcggcggaacctcccgaggccggtgctggttcgacccggaccgctgctggtttcggcgcggcggccggagttgaaccagccggcgcgcctcacactgggccgttgggagcgcgcgccgctagcctctcaaggctggaagagtcgacgcgcgcgtcgggaccacttctccatcgagcgcgcgcaacaggaggcgccagcggtgcgaaagctctcgtctaagggcagctttgctgaccttggggcctggaagccccgtgtgctgcacgcactacaggagggctgcgcctgaagtcgttcaagcccacaaccgtgcagtctagcaccatcccctcactacttcgcggccgccatgtcgtttgcgccgcagaaaccggcagtggcaagactctcagctacctcctgccgctgcttcaacggctcttgggcccacccaagcctggactcccttcctatccccgcgccccgaggcctggtccttgttccttcccgagaattggcccaacaggtgcgggctgtggcccaacccttgggccgctccttgggcctgctggtgcgggacctggagggaggccacggcatgcgtaggatcaggctgcagctgtccagacagccttcagcagatgtgcttgtggccactccaggggctctgtggaaggccctgaaaagtcgactgatcagtctggagcaactctccttcttggtgttggatgaggcagacacactgctggatgaaagcttcctggaactggtggactacatcttagagaagagccacatagcagaaggcccagctgacttggaagaccccttcaatcccaaagctcagttagtgctggtaggagccacatttcccgaaggtgtaggccagttgctgaataaagtcgccagcccagatgctgtcaccaccatcaccagctccaagctccactgtatcatgcctcatgtgaaacagacatttctgagactgaagggagcagataaggtggccgagctggtgcacatcctcaagcatcgtgacagagcagaaaggactggtccctcaggaactgttctggtgttctgtaatagctccagcactgtgaactggctgggatatattctggatgaccacaaaatccaacacctaaggttgcaggggcaaatgccagccttgatgagggtaggaatcttccagtccttccagaagagctcccgagacatacttctctgcacagacatagcctctcggggcctggacagcactggtgtggagctggttgtcaattatgatttccccccaacgctgcaagattacatccacagagcagggagagtgggccgtgtggggagcgaggtgccaggcaccgtcatcagttttgtgacccatccctgggatgtgagcctggttcagaagattgagctggcggctcgccgaaggagaagtcttccaggactagcatcctcggtgaaagagcctttgccccaagcaacctgattttgacaaatctgattaaaatgtgatgctagaacagggatctttcccagtatcttgagtgggtgaccacacttgtcagtgggaggctctgggctgccctgtcggctccttgagggcgggatgaactgctttgtgacttggaaaggtacgctgctggccagcattggagaagaagctgctgagcatggctttctgtagtctttagcaagacacaagtggattttgactttgtatcatgtcatgatttctaacaataaatgatgtttttatgtgcaaaaaaaaaaaaaagaggggccccccttataaaaaaacacattg

SEQ ID NO: 75563 - DNA, 1456 bp, Homo sapiens; identical to SEQ ID NO: 60988

SEQ ID NO: 75564 - DNA, 3380 bp, Homo sapiens; identical to SEQ ID NO: 60989

SEQ ID NO: 75565 - DNA, 2851 bp, Homo sapiens
tcagcgcggtggccagcgcgcagaggcgggcgcggaggcggctagaaggtgaccgcggatcccagcttcctgcagccagccctgaaggatggctgccatattgggagacaccatcatggtggctaaaggccttgtcaagctgacccaggcggccgtggaaacccacctgcagcacttgggcatcggaggggagctgatcatggcggccagggccctgcagtccacggctgtggagcagattggcatgttcttggggaaggtgcagggtcaggataaacatgaagaatattttgctgagaacttcggcggcccagaaggggagttccacttctcagtcccgcatgcagccggagcctccacagacttctcttcagcctccgctcccgaccagtcagcgcccccatccctgggtcatgcccacagcgagggcccagctcctgcctacgtggccagtggaccctttagagaagccgggttccccggccaggcctcctcccctctgggcagggccaacgggaggctctttgcaaaccccagagactcattctctgccatgggctttcagcgaaggttcttccaccaggaccaatcccctgttgggggcctcacagccgaggacattgagaaggcccggcaggctaaggctcgccccgagaacaagcagcacaaacagacgctcagcgagcatgcccgggagcggaaggtgcctgtgacgaggattggccggctggccaacttcggaggtctggccgtgggcctgggcttcggggcactggcagaggtcgccaagaagagcctgcgctccgaggacccctcagggaagaaggccgtgctgggttccagtcctttcctgtccgaggccaatgcagagcggatcgtgcgcacgctctgcaaggtgcgtggtgcggcactcaagctgggccagatgctgagcatccaggatgatgcctttatcaacccccacctggctaagatcttcgagcgggtgcggcagagcgcggacttcatgccactgaagcagatgatgaaaactctcaacaacgacctgggccccaactggcgggacaagttggaatacttcgaggagcggcccttcgccgccgcatccattgggcaggtgcacttggcccgaatgaagggcggccgcgaggtggcccatgaagatccagtaccctggcgtggcccagagcatcaacagtgatgtcaacaacctcatggccgtgttgaacatgagcaacatgcttccagaaggcctgttccccgagcacctgatcgacgtgctgaggcgggagctggccctggagtgtgactaccagcgagaggccgcctgtgcccgcaagttcagggacctgctgaagggccaccccttcttctatgtgcctgagattgtggatgagctctgcagcccacatgtgctgaccacagagctggtgtctggcttccccctggaccaggccgaagggctcagccaggagattcggaacgagatctgctacaacatcctggttctgtgcctgagggagctgtttgagttccacttcatgcaaacagaccccaactggtccaacttcttctatgacccccagcagcacaaggtggctcttttggattttggggcaacgcgggaatatgacagatccttcaccgacctctacattcagatcatcagggctgctgccgacagggacagggagactgtgcgggcgaaatccatagagatgaagttcctcaccggctacgaggtcaaggtcatggaagacgcccacttggatgccatcctcatcctgggggaggccttcgcctctgatgagccttttgattttggcactcagagcaccaccgagaagatccacaacctgattcccgtcatgctgaggcaccgtctcgtccccccacccgaggaaacctactccctgcacaggaagatggggggctccttcctcatctgctccaagctgaaggcccgcttcccctgcaaggccatgttcgaggaggcctacagcaactactgcaagaggcaggcccagcagtagggctgcgggccacgcccaggccggctccgcgggaactctctccctcagacaggccaaaaaccagtagcgaggtcgtggtgatgctctttttaactcctttgcccaataaggggggtggctgcctggagccccgtagccagcgctttccacggtttctgttgctaaatggttgtagggtgagaagtgcaagaatgaagatgaagccccactgctcggtcagtctgcctccgtgtgtcctctgaaataagcagatgaagatgaaagggcaactttgttttcttctttttcctgatgtgaatgttaagcagaagggagagagtccttactcccttccaatctctgttcagtgcaaaacccagaaacatgaacagatacgattgtgggatttttatcatctgtgtagtaggtgtgtgtatgtgtttctagagtgagatttgtgttttctgcccttttcctctccagccgatgggctggagctgggagaggtgctgagctaacagtgccaacaagtgctccttaagcctgcgaggcccaggcctgtggggctggttctcacctttgacagctgaatgttcctaaagaactgctgccccacagtgagggtgggagcagcggaacagggaatgccagacacaggctcgctgctgctggaaggcggggtgggacttccttcctctgtccggagaggcacaggtgtcaccagttccagccaaaggctcctcacaggcgctgtgaatttttgtacaagtcttgtaattatcgaatcaacaacttgcttcaatttaataaaaatgctcatgggaagtgcaaaaaaaaaa

SEQ ID NO: 75566 - DNA, 1897 bp, Homo sapiens
ttttttttttttggtttcttcaaaattttattaacaaaacccagggagaggaggcaaggatgagtggactccgcagccccaccaggcactgaacatgtcgacggggacagtccctctgataaaggcagatgggcggtcaaccggtggatgggcacagggagaaccggagaaacagatgagtggaggaacggacacacgggcaccgggcggctcccccatctggaatgcagggtgtaaggggtccgggccaggaggctcagcggtcggcactggagcgcaggtcggtagtgaggggatcgtgctggatcgtctggtgcagcatcagggccagcaatcccgcgcggtttgtcatggctgtgcgcacattgcgctcctgctcaaacagctcgtccagcttgtaccacacacgcacgcgctccaagtccacttccgcacgccgcagcttctcccagcagtaatggcgattgcactggcgcttgggcaggcggcagaagtcacccgtgagctcaaagacatcacgtacaagggggcacccgcatacctcgtcagctggcactttggggtcccgtgagtgctcggggcacagcacctggagccgcttacagtatgttttgctctgaggattatacacatcacagaagagtcgtgtggccccttcaatgcgtgtggggtacatggacccaaaggacgtctggctctcatacttggcgtagcagcgctccatgtggcgcaaggcaacacgtgggttgatggggtgcccacaggaaacacagaagatctgcaggtctgtgtcatcactgtcaccctcgttgctctcctcatcctcgcgcacagcctgctgcttggcacgtagaatgatggcctcaagctcatggaatcggcgttccatttcctgaaggcgggtgcgggcactctgctgctctcggcgaatgcgttcgagcagcttcttgccgtgctcttcagcaatgcaagggctctgctgccactgctggatgcgctgggggaggatctcgtagatgcggttggctgccagcttcatgccacagtcatctgagcaatacttggagctgggctgggcggggcgcacacagccggcccaggcactggggcagtgacgcagggtccttggcatcagccctctctgggtgtttccaattaaccttgtgcttcctgcttctgccgaagccgcttgtatcgctcctccttccttcttcctcagacttccttctcccgaacgcttcacatgcttcactttcactgccctcttccgcagcgcggggtcccaggaatggggactcttctgtgtcgctcatcccagggcaggccattgtcatcaaaggcccctgcacagaagtccttgataccaggtcaggatccagagggtgggtccctcatctgagagtggctcaggtgtgtctgtagcctcaggaggctccttgactgttgatgacgccactgccccctcatcttcacggatgcgccctaacttctgtgatggctgtggctgctgttgggtgggcagtggccggcggggccttggcagggactctgagggcgtcactggtgagagctgcagggcagaatctcaggactggccctgaccgccctgcccgcatgccccaccccaccctggggggctggactcaccgaggaagggaagtacttgtacgattcctgtgccggcaggaggaaggcccaggtcagccccaggtggatggagggcggccttgccctagccctacccacctggcctggccttacctccccagacacacctccccgctacccctcattgccaggaatgctcagccctgcctgatctgtaccgacatgcatgaccacctgaaaacacctggccccactctgtctacccagggttggtgggggtgttctgccc

SEQ ID NO: 75567 - DNA, 1584 bp, Homo sapiens
cccggtcctaagctttgatcctttaaaacgggccccccttttttttttttttctggaaggttctcaggtctttatttgctctctcaaattccaggaattgacttatttaattaatccatcaacctctcatagcaaatatttgagaaaacaaatttatattcagattcttattttcagtagggaagtaagaagttgcagctcagtgcacgtaaagttgagacagagatggagacatccagccccacctctctggaacaagaaagatgactggggaggaaacacaggtcagcatgggaacaggggtcacagtggacacaagggtgggctgtctctccacctcctcacattatgctaacagggacgcagacacattcaggtgcctttgcagaaagagatgccagaggctcttgaagtcacaaaggggaggcgtgaagaaatcctgcatctcagtccctcacaagacagctgtctcaggcttttcaagctgtgagagacacatcagagccctgggcactgtcgctgcacgcagcctgagagtagctccctccttttccacctgaactcttcctcctacacatcacagcagcgaccacagctccgatgaccacaactgctaggacagccaggccagcaacaatgcccacgatggggacggtggactgggaagacggctcccatctcagggtgaggggcttcggcagcccctcatgctgtacatggcatgtgtatctctgctcttctccagaaggcaccaccacagctgccccactttctggaaggttctatctcctgctggtctggtctccacaagctcagtgttcctgagtttggtcctcggcatccccgctgccaggtcagtgtgatctcccgcagggtagaagcccagggcccagcacctcagggtggcctcatggtcagagatggggtggtgggtcacgtgtgtctttggggggtccgcgcgctccagcgtgtccttcccgttctccaggtatctgcggagccactccacgcacgtgccctccaggtaggctctgtcctgctccgccacacgggccgcctcccacttgcgctgggtgatctgagccgcggtgtccgccgcggtccaggagcgcaggtcctcgttcagggcgatgtaatccttgccgtcgtaggcgtactggttatgcccgcggaggaggcgcccgtccggccccacgtcgcagcccgtacatgctctggagggtgtgagacccggcctcgctctggttgtagtagccgcgcaggttccgcaggctctctcggtcagtctgtgcctgggccttgtagatctgtgtgttccggtcccaatactccggcccctcctgctctatccacggcgcccgcggctcctctctcggactcgcggcgtcgctgtcgaacctcacgaactgggtgtcgtccacgtagcccactgagatgaagcggggctccccgcggccgggccgggacacggaggtgtagaaatacctcatggagtgggagccggcccaggtctcggtcagggccactgccccccagagcagcaggaggacggttcggggcgccatgaccagcatctcggcgtct

SEQ ID NO: 75568 - DNA, 3611 bp, Homo sapiens; identical to SEQ ID NO: 60993

SEQ ID NO: 75569 - DNA, 2583 bp, Homo sapiens; identical to SEQ ID NO: 60994

SEQ ID NO: 75570 - DNA, 2332 bp, Homo sapiens
agatacacaacaaattttaaaagagactctgtgctgcaagaggatggattgagaataactttacttgtttttttgggaggaggttaatgggtgggaggggtgagaggggagaatctgatttacatacggacttgagactcccaaggcagtaccccgggtcgtcctctgcaaggttgccccggtgggtgcttgactcccagctggcgtcccgggagcccggggtggagtccatggagggagagcgaacggggaatgttggagggggcctggagtggggggagggggcgggtgaggcaaggcccggcccgcaacaagtcctgcctctgggccccgggagcgtcctccctgtgtccgggacgggcgagggcttaatgctatggacagcggagaggcctggcggggcacagcggggactgagggctcagtggggcgggtggcgcgattcggccaaggcccccgcggcccaacactttcgccgctgaactggtaagtgaacttcttcttcaacttcttgaactcgcccgtcttgccagtaggttcgcagcgcgcgcgccatcttctggtaggtcatcttcttgcggttgcccttctggatgccccagcgtgtcgccagcgcctccttgtgcttggacgagaactggaaggtgcccttgtccttgtccacccaccagatgctgtccttcatgtcgccgctgcggagcaggtccaacaggaactgccgctttgtcccccctgccttgaggaatgcagtgaagctagcacgggccttgtcctctgcacgttaccttacctcagagattacatgccttacctcgctgaatcatcacagccctaggagtacgtggcatgcctggatgtccctgccctggctgtggcatggcgggcccaaggctcctcttcctcactgcccttgccctggagctcttgggaagggctgggggttcccagccggccctccggagccgggggactgcgacggcctgtcgcctggacaacaaggaaagcgagtcctggggggctctgctgagcggagagcggctggacacctggatctgctccctcctgggttccctcatggtggggctcagtggggtcttcccgttgcttgtcattcccctagagatggggaccatgctgcgctcagaagctggggcctggcgcctgaagcagctgctcagcttcgccctggggggactcttgggcaatgtgtttctgcatctgctgcccgaagcctgggcctacacgtgcagcgccagccctggtggtgaggggcagagcctgcagcagcagcaacagctggggctgtgggtcattgctggcatcctgaccttcctggcgttggagaagatgttcctggacagcaaggaggaggggaccagccaggcccccaacaaagaccccactgctgctgccgccgcgctcaatggaggccactgtctggcccagccggctgcagagcccggcctcggtgccgtggtccggagcatcaaagtcagcggctacctcaacctgctggccaacaccatcgataacttcacccacgggctggctgtggctgccagcttccttgtgagcaagaagatcgggctcctgacaaccatggccatcctcctgcatgagatcccccatgaggtgggcgactttgccatcctgctccgggccggctttgaccgatggagcgcagccaagctgcaactctcaacagcgctggggggcctactgggcgctggcttcgccatctgtacccagtcccccaagggagtagaggagacggcagcctgggtcctgcccttcacctctggcggctttctctacatcgccttggtgaacgtgctccctgacctcttggaagaagaggacccgtggtgagtgacctgttggaggaagaggactgccactcacagggcccttaggggctcaggagggaagggctcctggccgctgcctgctccccctgcccatgcctccaccgtgagccgttccctccccacaggcgctccctgcagcagctgcttctgctctgtgcgggcatcgtggtaatggtgctgttctcgctcttcgtggattaactttccctgatgccgacgcccctgccccctgcagcaataagatgctcggattcactctgtgaccgcatatgtgagaggcaaagagggcgagtggctgcgaaagagaatgagcctcccgccagacaggagggaggtgcgtgtggatgtatgtggtgtgcacatgtggccagaggtgtgtgcgcgagaccgacactgtgatccctgtgctgggtccggggcccagtgtagcgcctgtccccagccatgctgtggttacctctcct

SEQ ID NO: 75571 - DNA, 4593 bp, Homo sapiens; identical to SEQ ID NO: 60996
  misc_feature (1)...(4593): n = a,t,c or g

SEQ ID NO: 75572 - DNA, 764 bp, Homo sapiens; identical to SEQ ID NO: 60997

SEQ ID NO: 75573 - DNA, 5999 bp, Homo sapiens; identical to SEQ ID NO: 60998

SEQ ID NO: 75574 - DNA, 3893 bp, Homo sapiens
ttttttttttttccagtttttaaatggggattttaatagacatacttccaaagaagacatgcaaatggtcaataagcacatgaaaagatgctcaatatcattagtcatcagggaaatgcaaattaaaactataaaataggcggtgcaccctgggatagggagcgatctccgagcgaggcggcaagatggacgcgggatttttccgcggaacaagtgcagaacaggataatcggttcagcaacaaacagaagaaactactgaagcagctgaaatttgcagaatgcctagaaaaaaaggtggacatgagcaaagtaaatttggaggttataaagccttggataacaaaaagagtaacggaaatccttgggtttgaagatgatgttgtgattgagtttatattcaaccagctggaagtgaagaatccagactccaaaatgatgcaaatcaacctgactggatttttgaatggaaaaaatgctcgagaatttatgggagaactgtggcccctgctgctaagtgcacaagaaaacatcgcgggaatcccttctgctttcctagaactgaagaaagaagaaataaaacaaagacagattgaacaagaaaaactggcatctatgaaaaagcaagatgaagacaaagataaaagagataaggaagaaaaagaaagcagcagagaaaaaagggagcggtctcgtagcccaagaagacgcaaatccagatctccttcccctagaagacgatcttcccctgtcaggagagagagaaagcgcagtcattctcgatctccccgtcacagaaccaagagccggagtccttcccctgctccagaaaagaaggaaaaaactccagagctcccagaaccttcagtgaaagtaaaagaaccttcagtacaagaggctacttctactagtgacattctgaaagttcccaaacctgaacctataccagagcctaaagaaccttctccggaaaaaaattccaaaaaagaaaaggagaaggagaagacccgaccacgatctcggtcacgctccaaatcaagatcccggacgcggtcccgctctccttctcacactcgacctagacggcgccatagatcccgatcaagatcgtattcacctagaaggcggccaagcccaagaaggcggccatctcctcgaagaagaactccgccaagaagaatgcctcctccaccaaggcatagaaggagtagatctccagtaagacgaaaaagacgttcgtcagcatccttgtctgggagtagctcatcatcctcttcatctcgttcacgggcaccaccaaagaagcctcccaagaggacatccagcccccctcggaaaactcgtaggttatctccttcagcaagtcctccaaggcgaaggcacaggccatcacctcctgcaactccaccacccaaaactcggcattcccctacaccccagcagtcaaaccgtacaagaaaaagtccgtgtgtcctgtgtccccagggagaacttcaggtaaagtgacaaaacataaaggtactgagaaaagagaatccccttcaccagcacccgaagcctagaaaagtagagttatctgaatcggaagaagataaaggtggcaaaatggctgcagcagattctgtgcagcagagacgccaatacagacgacaaaaccagcagtcttcatctgactctggctcctcctcctcctcagaagatgaacgacccaagagatcccatgtgaagaatggtgaggttggcaggcggcggagacattccccttcccggagtgcttctccatcaccacgaaagcgccaaaaagagacttcccctcgtggtagacggaggagaagtccatccccaccacccaccagaaggcgacggtctccttctcccgcccctcctcctcgacggcgcaggactcccacaccaccaccacgacgaaggactccttctcctcccccacgtcggcgctcaccttctcctagaagatactctcctccaatacagaggagatactctccttctccacctccaaagagaagaacggcttcacctcctccccctcctaaacgaagagcatcaccatctccaccaccaaagcgcggggtctcccattctccacctcccaaacaaagaagctccccagtcaccaagagacgttcaccttcattatcatccaagcataggaaagggtcttccccaagccgctctacccgggaggcccgatcaccacaaccaaacaaacggcattcgccctcaccacggcctcgagctcctcagacctcctcaagtcctccacccgttcgaagaggagcgtcgtcatcaccccaaagaaggcagtccccgtctccaagtactaggcccattaggagagtctccaggactccggaacctaaaaagataaaaaaggctgcttccccaagcccacagtctgtaagaagggtctcatcctcccgatctgtctccgggtctcctgagccagcagctaaaaagcccccagcacctccatcccccgtccagtctcagtcaccgtctacaaactggtcaccagctgtaccggtcaaaaaggccaaaagcccaacaccgagcccatcaccgccaagaaattcagatcaggaaggaggtggaaagaaaaagaagaaaaagaaggacaagaaacacaaaaaggataagaagcacaagaagcacaaaaaacacaagaaggaaaaggctgtggctgcagctgctgcagctgctgtgacccctgcagccattgcagctgccacaaccacattagcacaggaagagccagtggcagcgccagagccgaagaaggagactgaaagtgaagctgaagataaccttgatgatttagaaaagcacctgcgtgaaaaggccctgagatcaatgaggaaggcccaagtgtccccacagtcttagggggaaatgtttgttatgatgtaaattttatttggtttgtacgcagttcaatttcaaaattgctaaaatgtgtttgagctttagactataacatttgttgtaataattgctaggttgaagttcaacatgtaaaaaaagggggcatggatttacattgcaaaaggtgtccacagtgtattagtgacattctttcattgacagctgacataattcattgagtgaaatattttaagccaaaaaaaaattccctttttaaaaaagggggtttaaatactgttggcatttttatggttcctttaaatgccctagctattcccagaggggtttttttgtttgtttttttggttttgattttctttttgtttttctttcttcttcttatttttttcatttgagtcttagctcccatttaagttatgcttctgaccttgtatggtctgtaagcttgcccagaaataagaccactgttttgaactaccacaaaagtataaatgaatattttaatgccacaatctttcctgttgcctgtggagtctctgctgaaatgaatcaggattcgagctctaggatgagacagaaaatgaaagcatgttgtttgccaggacactgtgggtttatattgatgtgtaacaagttgatttggaacactggactctcattctgttattctggttttgttttttttgttttgttttttttcttttgtaaaggcaatgagctagtcccagaaaggatccttcagttacatacaatttgtttaatgaaatgtcatggctctgttcatatttttgtcttgttcttccaattggtatatacaactttcagagcctcttgtatttggaaggctggaagggcccagactttggaatagtgtcttggtttcactgtttttgttttgatttttttttttgttttgatttttttttaaactaaagctatataaagcttgtggattaaacagaataaatttctaaatttaaaaattttaaa

SEQ ID NO: 75575 - DNA, 1860 bp, Homo sapiens; identical to SEQ ID NO: 60874

SEQ ID NO: 75576 - DNA, 964 bp, Homo sapiens; identical to SEQ ID NO: 61001

SEQ ID NO: 75577 - DNA, 1673 bp, Homo sapiens; identical to SEQ ID NO: 61002

SEQ ID NO: 75578 - DNA, 1312 bp, Homo sapiens; identical to SEQ ID NO: 61003

SEQ ID NO: 75579 - DNA, 1350 bp, Homo sapiens; identical to SEQ ID NO: 61004

SEQ ID NO: 75580 - DNA, 4406 bp, Homo sapiens; identical to SEQ ID NO: 61005

SEQ ID NO: 75581 - DNA, 1835 bp, Homo sapiens; identical to SEQ ID NO: 61006

SEQ ID NO: 75582 - DNA, 4600 bp, Homo sapiens; identical to SEQ ID NO: 61007

SEQ ID NO: 75583 - DNA, 1961 bp, Homo sapiens; identical to SEQ ID NO: 61008

SEQ ID NO: 75584 - DNA, 2928 bp, Homo sapiens; identical to SEQ ID NO: 61009

SEQ ID NO: 75585 - DNA, 1556 bp, Homo sapiens; identical to SEQ ID NO: 61010

SEQ ID NO: 75586 - DNA, 3151 bp, Homo sapiens; identical to SEQ ID NO: 61011

SEQ ID NO: 75587 - DNA, 1938 bp, Homo sapiens; identical to SEQ ID NO: 61012
  misc_feature (1)...(1938): n = a,t,c or g

SEQ ID NO: 75588 - DNA, 4192 bp, Homo sapiens; identical to SEQ ID NO: 61013

SEQ ID NO: 75589 - DNA, 2026 bp, Homo sapiens
cgacgatttcgtgttgccgccgggctgagagaagagcttgcggggtttgcggttgatggccccgactgaagggctggaggcggtgtatgccgctgttcttgctgtcgctcccgacacctccgtccgcttctggtcatgagaggagacagaggcctgaagcaaagacatctgggtcagagaaaaagtatttaagggccatgcaagccaatcgtagccaactgcacagtcctccaggaactggaagcagtgaggatgcctcaacccctcagtgtgtccacacaagattgacaggagagggttcttgccctcattctggagatgttcatatccagataaactccatacctaaagaatgtgcagaaaatgcaagctccagaaatataaggtcaggtgtccatagctgtgcccatggatgtgtacacagtcgcttacggggtcactcccacagtgaagcaaggctgactgatgatactgccgcagaatctggagatcatggtagtagctccttctcagaattccgctatctcttcaagtggctgcaaaaaagtcttccatatattttgattctgagcgtcaaacttgttatgcagcatataacaggaatttctcttggaattgggctgctaacaacttttatgtatgcaaacaaaagcattgtaaatcaggtttttctaagagaaaggtcctcaaagattcagtgtgcttggttactggtattcttagcaggatcttctgttcttttatattacacctttcattctcagtcactttattacagcttaatttttttaaatcctactttggaccatttgagcttctgggaagtattttggattgttggaattacagacttcattctgaaattctttttcatgggcttaaaatgccttattttattggtgccttctttcatcatgccttttaaatctaagggttactggtatatgcttttagaagaattgtgtcaatactaccgaacttttgttcccataccagtttggtttcgctaccttataagctatggggagtttggtaacgtaactagatggagtcttgggatactgctggctttactctacctcatattaaaacttttggaattttttgggcatctgagaactttcagacaggttttacgaatattttttacacaaccaagttatggagtggctgccagcaagagacagtgttcagatgtggatgatatttgttcaatatgtcaagctgaatttcagaagccaattcttctcatctgtcagcatatattttgtgaagagtgcatgaccttatggtttaacagagagaaaacatgtccactctgcagaactgtgatttcagaccatataaacaaatggaaggatggagccacttcatcacaccttcaaatatattaagttgtataaactatcaaggccacaaaatactaatgtcatttggtcataatgactactgataaggcatcagaatggattttcagggctaccagaaaaatgtttccagatggttttagaatgtaggacttatgatccaattcaccaaaagattaaatgaaaccaccctgtgttttaaaatatatataatgttcaacctaatgtatatgcaacatttattctattctaattatttgacaggtaactgcagtgttaaattgtaaatgtgttttctttatgttaccaaaacagcgaatttgaaattaggaactagtgggttttaggaggaactcagggtattctttcctggacattgtttttcaggaataaagaatatttttcataatatttttaaggatacatactatctaaaagtagaattttgttcagcattgacttttataattcccatcctaaaaattcttaatattttcataaaatttgtatttttaaatgaaaattctaaatgttgtattttatcagtaacattttctaagtgaagattaatttactgaggatgatacattatagtattgtattattctctgtagtaagattagtaataagtgaaaataaatgatttaaattcaaaaaaa

SEQ ID NO: 75590 - DNA, 2401 bp, Homo sapiens; identical to SEQ ID NO: 61015

SEQ ID NO: 75591 - DNA, 6976 bp, Homo sapiens; identical to SEQ ID NO: 61016

SEQ ID NO: 75592 - DNA, 3010 bp, Homo sapiens; identical to SEQ ID NO: 61017

SEQ ID NO: 75593 - DNA, 1953 bp, Homo sapiens; identical to SEQ ID NO: 61019

SEQ ID NO: 75594 - DNA, 5259 bp, Homo sapiens; identical to SEQ ID NO: 61020

SEQ ID NO: 75595 - DNA, 3686 bp, Homo sapiens; identical to SEQ ID NO: 61021

SEQ ID NO: 75596 - DNA, 899 bp, Homo sapiens
agacctgagcatggcggccaccaggtgcctgcgctggggcctgagccgagccggagtctggctgctcccaccgcccgcacggtgcccacgccgggcgctgcacaagcagaaagacggcactgagttcaagagcatctacagcctggacaagctctaccccgaatctcagggctcggacaccgcctggagggtcccgaatggtgcaaagcaagccgacagtgacatccctctagatcgcttgacaatatcttattgtcggagtagtggtcctggggggcagaatgtgaacaaagtgaattccaaggcagaagtcaggttccatttggcaactgccgagtggatcgcggagcccgtgcggcagaagatagccatcacgcataaaaacaagatcaacaggttaggagagttgatcctcacctctgagagcagccgctatcagttccggaatctggcagattgcctgccagaaaattcgagacatgatcactgagcccagccagacaccgaaggagccaacaaaagaagatgttaaacttcatagaatccatggatagaaaacatgaatcgggaaaggctgagacaaaagagaattcattctgctgtaaagacaagcaggagggtcgacatggactgaaatcaccctctgcagctgggagggctcttctgggcgtccgggcagctgcagctgagaggactttcacaccataaggagatttctgtttttctttttggctgttaatgcttgtctataacattggagccatcacaagaatgttcatttggaatgaaggctgcaggcactggttgcagacgtctttataggcagtcaccatgttgtcaaaccttaataatgcacctcatgtattagtcacaataaaaatcagaactcaaaaaaaaaa

SEQ ID NO: 75597 - DNA, 5148 bp, Homo sapiens
  misc_feature (1)...(5148): n = a,t,c or g
ggcggtagtgcgtcggctgctgcccgggtctggcagaactcgggttttttgggctgagacagtggcagctgcggccccgaccccaagtgcggggacctccggcgaataaaggtcggcctgcgggtaggccggtagggcctgcggtccggcctgcgggagaactgggtcgtcagtcctccgagtggtggggctggggactttgagggagttggctctagggcacagtccctgcctggccaggtcggaggaacaagtgctgggatctggcgtgtgtgctccaggggctctttccgcggccctttccacctcttttcactttggggacggtaggcctttataaacggactaatgctgggtgatttgttcctgtggttgttgatgccgaggaaagactctgggccccaggactcacctaaactggagttcgaatactgttcgctcgctgtgtgaccttggaaaaaaaaacaagcttttctgaagtgagaagctgttctcagccacgagtcctgtgcaagatcactaatgattacctggcatttctgcgacacaggcaggtcctcagggtttgtgcaagtttgcaaacatgttcaccctgtctcagacctcgagagcatggttcatcgaatagagcccgtcaggcacgaaaagaaaggcttgtgcagaaggaacgggagcgggcagctgttgtgatccaggcccatgtccggaagttttnctactgtcggagtcgactgcagagagatatcaggagagagattgatgacttttttaaagcagatgaccctgagtccactaaaagaagtgcactttgtattttcaagattgccaggaaactgctgttcctattcagaatcaaagaggataatgagagatttgagaagttgtgtcgcagcatcctgagcagcatggatgctgagaatgagcctaaggtgtggtatgtgtccctggcttgttctaaggacctcaccctcctttggattcaacagatcaagaacattttgtggtactgctgtgattttctcaagcagctcaagcctgaaatcctgcaggactcccgactcatcaccctgtacctcacgatgcttgtcaccttcacagacacttcaacgtggaaaattcttcggggaaaaggtgaaagtcttcgaccagcgatgaaccacatttgtgcaaatataatgggacatctcaaccagcatggattttattctgtgctgcagatattgttaacccgtggcctggcaagaccccgtccttgtctatccaaaggcactttaacagcagctttttctctagcgttacgccctgtgattgctgcacagttctcagacaatctgattcggccgttcctcatccacatcatgtgtgtgcctgctctggtgactcatctcagcacagtgacccctgagcgcctcactgttttagaatcccatgacatgcttcgtaaattcatcatatttttaagagaccaagatcgatgccgtgatgtatgtgaaagtttagaaggatgccatacgctttgtctaatgggcaacctcctacacttgggctccctcagccccagagtgttagaggaggagacagatgggttcgtgagtttgctcacccagacgctgtgctactgtcggaagtatgtgtctcagaagaagtccaacctgacccactggcatcctgtccttggctggttctcccaatctgtggattatggccttaacgagtcaatgcacttgatcaccaaacagctgcagttcttgtggggggtgcctctgatccggatcttcttctgtgacatcctgagcaagaagctactggagagccaggagccagcccacgcacagccagcatcccctcagaatgtgctcccagtgaagagtctcctaaagcgtgcttttcaaaagtcggcatcagtccggaatattctcaggcctgtcgggggtaaacgggtcgactctgcagaagtccagaaggtttgcaacatctgtgtcctctaccagacctcgctgacaactctcacacagattcggctgcagatactcacaggtctcacttaccttgatgacctgcttcccaaactgtgggcatttatctgtgagctcgggccccacggagggttaaagctcttcttggaatgcctgaacaatgacactgaagagtccaagcaactcttggccatgctgatgctgttctgtgactgttcgcggcacctcatcacaatccttgatgacattgaagtttatgaagaacagatttcattcaaactggaagagctggtcactatctcctctttcctgaattcttttgtgtttaagatgatctgggatggaattgtagagaacgccaagggtgagaccttggagctgttccagtctgtccacgggtggcttatggtgctgtacgagcgggactgccggcggcgcttcacccccgaggaccactggctgcgaaaggatctcaaacctagcgtgctcttccaagaactcgacagggacagaaaacgggcacagttgatcctgcagtacatcccacatgtcatccctcacaaaaacagagttctactgtttcgaaccatggttaccaaggagaaggagaaactggggctggtggaaaccagctctgcctccccgcatgtcactcacatcaccatccgccggtccaggatgctggagagcttgtttgagtgcccctggccactggtgatcaatgccgagagctgctaggaaggcagtgtgtgctgaacagtggatgtttctgacattcttcaaggacggctacgagcagcttaggcagctctcccagcacgccatgaagggggtcatcccgtgtgaagtttgtcaatgacctcggggtggacgaagcagggattgatcaagacggtgtttttaaggagttcttgggaagagatcatcaagagagtttttgacccagcacttcaatctgttcaagacaaccaagtggggatgagaggctgtacccctcacccacatccatacatccatgagaattacctgcagctcttccgagtttgtggggaagatgctggggaaggctgtgtatgagggaattgtggtggacgtgccatttgcatccttcttcctgagccaactgcttgggcaccaccacagcgtcttctatagctcggtggatgaactgccttctctggactccgagttctataaaaacctcacctccatcaagcgctatgatggggacatcactgacctgggcctgacgctgtcttacgacgaggacgtcatgggtcagcttgtttgccatgaactgattcctggagggaagaccattcctgttacaaatgaaaataaaattagctacatccatctgatggcacattttcgaatgcacactcaaataaaaaaccaaacagctgccctcattagcggattccgttccattatcaaacccgagtggatccgaatgttctcaactcctgaactgcagcgtctcatctctggcgacaatgctgagattgatctggaagatttaaagaagcacacagtctactacggtggtttccatggaagtcacagagtcatcatctggctctgggatattctggcctccgacttcacaccggatgagagagctatgtttctgaagttcgtgaccagctgctccagacccccgctcctgggattcgcctacctcaagcctccattctccatccgctgcgtggaggtgtcggacgatcaggacaccggggacactctgggcagcgtcctccggggcttcttcaccatccgcaagcgggagccaggcggccgcctgcccacctcctccacctgcttcaacctgctcaagcttgcccaaactacagcaagaagagcgtcctccgcgaggaagctgcgctacagccatcagcactgaacacgggctttgaactctcctagctcctgtcccagccctgcctccagggctcctgggctgccagggaccttcagctcccagaggcagtgtggtcctgggaatgtgaccaacatgccaggtgacattggcccctagaccctctctatagccatgagactccttgtggcctcaagaaatttagacgcccacgacagcactacacagcatctccaggtgatgcccaaggcacagggctgcagaaaataaacctccagattccaccaacacgggtccattcttcctggtgatggcagaggggcttcttttagctagtttgatcttttgggagtctgtcttttccttagccgtctgagtgagctgtgtatgaacaagtcccaggagttccaagagtctagagtggtttttgcagcatgggttgagtgtacaaagcctactgtgcgtgagatcctctccttccgtttctgaaatctcttactcaggtaaggcctcgccaagcctctatgcaccccacaaagtttctgcctccatgccgtccacagcgcctcttcccagacagccaggcccatctgctgcccagggaagcgcaggcgcctgctagggacgctatggacaccgtgagtccaaggcgctgctcctgccttgaagccacgcgctccacgccgcggccctcccattttctgcgtcctcagcgggctgagctgccagagagccttcccggacctattcccgtcctatgcattcacattggcatcctggtttgggggaagaaaaacaacggcccttagcagcagccccgtttccagaatgtgctgcctgttccccaaagcctgcttgtcccgcggaggacggctgcctttgaccctgcttatttgtctcactggttatctaatgaggaacaaacactaacctaaggtacacatcccatctgggcggtggcttcactcctgagtctgcaaaatcccaggaaacttgggtcttgctgcccatccttcctcagcacagggaacccggaagcccgttgcactgacagaggctcacaccctctgggttttttgttttttttttaaacttcatttctcttccaacccattgggttcctctgccctcattctttacctttgttgtaagaactttagctccagggaactgaggcaaaggccctgtttgtggtctgtgttgacagccacccaccctctcccacctcatgctcctgcacctgcaccaccaaggttgatgccggattcgaagccaggaaggcccagtccctcg

SEQ ID NO: 75598 - DNA, 4591 bp, Homo sapiens
tttcgtcccccctccgcgactgcggataatgagcgcctcgggccgcccagcgcagccggagtatccacctcgatgaccacgggctgagccccgcgccgccaccatgtccgtggccttcgcgtctgcccggccaagaggcaaaggggaggttacgcagcaaaccatccagaagatgctggacgagaaccaccacctgatccagtgcatcctggagtaccagagcaagggcaagacggccgagtgcacgcagtaccagcagatcctgcaccggaacctggtatacctggccacgatcgcagactccaaccagaacatgcagtccctgcttcctgccccgcccacgcagaacatgaacctgggccctggagccctgactcagagcggctccagccagggcctgcactctcagggcagcctgagtgacgccatcagcacgggcctgccaccctcctccctcctgcagggccagattggcaacgggccgagccacgtgtccatgcagcagacggcgcctaacacgctgcccaccacctccatgagcatctctgggcccggctacagccacgcgggacccgcctcgcagggcgtccccatgcaggggcaaggcaccatcggcaactacgtgtctcggaccaacatcaacatgcagtccaacccagtctccatgatgcagcagcaggcggccacgtcgcactacagctcggcgcagggcggcagccagcactaccagggccagtcgtccatcgccatgatggggcagggcagccaggggagcagcatgatggggcagcggcccatggcgccctaccggccctcccagcaaggctcttcccagcagtacctgggccaggcagcagtactatggcgagcagtacagccacagccagggcagctgcgcagccccatgggccagcagtcatacaccggaggcccatgtcgattacgcctaccagcagtcatcttacacggagcagagctacgccaggtcattcgaggagtccacgcagcactactatgaggggggaaactcccagtacagccagcagcaggccgggtaccagcagggtgccgcgcagcagcagacgtactcccagcagcagtaccccagcccagcagagctaccccgggcagcagcagggctacgggtctgcccagggagccccgtcacagtaccccggctaccagcaaggccaaggccagcagtacggaagctaccgagcaccgcagacagcgccgtctgcccagcagcagcggccctacggctatgaacagggccagtatggaaattaccagcagtaagggacacacattctggctggagcccttgtggtagcgtgttcatccaggggccggatgggctggcggcagctctggtgaattgtgacatgttggttacctgttcgcccagtgccacgtctgcatgtgaagcgtgctcatttcatgctgggtatgacgccgagcgcacaccactggcgtgagacagcgcttggtggtgtgatacttttggtgctgtgtatagtattgtatgtcggtacacggagaggtatcctttttttgtcccccgcccccttctcaatgtttctagctagctttgggggtcattttgtcatcagagcattctgtgcccagggacaggacagatctcgaggacaccacagtccacctgttcccgtcaacagacgttaggtctcattttcctcctcatgcagtgttgtagtgtgggttgtcaacttttctttaactggctacgccacagctggacacacatgcagcccctggagggcagcctcttcctgtgcctcgatggggtgggtgggagggcatcttctgtgcgttgggtcagtttctgttacgtaacgaaaaggataaacatctcccacgggagaggccacagatggccacttccagagcttgcccattgcctgtctctcgccaattccgtttatccaaaaaggtacatgtttttgtattaaaaagtaaacagggatcagtgactgtattccaaataaatatgaatccctaagggccgtggacaaattgcctaacccagggccagcggtattgctgaaggaaaggggcagctctctgggaagtgggccctcagagattactctggctttgacccttgtttagctgatggtcatttctgggattggaatatttaataagcccaattctaagttgataggtaattttaaatattcaaaccaaatcttcccaacagttggcaagttgtttattttatattatttcttccaggacctacttgctcagatctccaagcaagcatttcttttcttttagggatgtctgaaagtcacatccagttacattactgtgttctttctaatgaaaagtaaaggttttatatagagaaacttgagtaatttttacatttctaagacattaaatcccatttaaattctgtgtgaacattaaagacagcacacttgcaaaagtatggtcaaaggaaaaaaatcccacatttcaattaacaagtagcatggacatttgatcaacctttagttggaataataatattcatatttgctatgaatccttttaaaaaaatctttggataaatgctgacagatttccaagaactaccaagaaaatacaagagatatccaatgcttgatatatgaggcctagtaataacgatatttctctttaattgatgttttgttttaaaagttaaaagtaattcttggcgtggtggttcacgcctgtaatcccagcactttgggaggccgaagcgggcggatcacctgaggtcgggagttcgagaccagcctgaccaacatggagaaaccccgtccctactaaaaatacaaaattagccaggtatggtggtgcatacctgtaatcccagctactcgggaacctgaggcaggagaatggcttgaacccaggagacagaggtggtggtggggcaagatcgcaccattgcacccgagcctaggcaacaagagtggaaattccgtctcaaaaaaataaataaataaataaataaataagttaaaattaattctttatccagagtcgggtgctttagaatttataagtcacttatgtgttttgcttgaattaattctgacagcccctatgaggaaatctggaggcaggtaacagttcccattttagagatgaagaactgaggcacagattaaaggacttgcctgtgttgaataccagtcctgttctaggacattctcccctctcctaggagacggatgtcacgcacaaatggggagagaagtgtttattttgtaggcactaagggtttctaaaacccttaacactggtaagggctcaaaaataaacgtatgtgttcatattcgatcaccgaaatgagagttcttaattgctaattgacaaacgcgttagcaatttcagttagggagtcatctcccttgattgtgttcttttcctgtcaattttcatagacctaatttgcaaactcaatcggggactaaaatttcccactgaaaatgttaaacattttagataactgtgaagatagtttatttttattccttgccaatctgggaatatgccttttttgtgtgtttgtgtgtttttttaagtgctgtattaataatactttctgaaagaaaaggacacttaccccaaaacttcaatctgaaatgtcttacattaagaatatcttgaatgttgtgtatatattttaaaaagcactttgcaaaatagtttgtacatttatttcctaatttatacatgatttttggtgttaatatatttaatgattaataacagaatgtttatttaatgtgctgtccatttttatgtaatattatggggaaagtgatgccagcagttccttttcattattctatcttctgtcatatgaatgttgagcaaagcttaggccaacatgaattgtttgtgaagtgtggttgatggtgctttgtttttttctgactacttctatggaaggccagtgaagaagcaaaggaagacatgaaaattgacgctcattcttcttcctattgttccctgacatccagcaaattgtgaatttgaaaaatgatggccagttttcagaagtgctgacaaattcatattgggtatgcaaaagctcatcacccattaaggtttgttgttgaatcaacagtactcagcatattaaaacagtacatcagaactcatgccaacagtctttatgatgggattaaggtggacaagatctcctaagatctgtgaatgggattaaggtggacaagatctcctaagatctgaaaagaaaccttaatacgctcatatggttggagtgttaagtgaacctctgattttgtcagggtttttctacgtgtaggcgtgaatagggggcaccccttcaaaactgtacaaagaagacgactgttttccatttccatttaaacatttttagccacttcatttctatttattgaacaggtcaaatttgtcttgttatttgtgagtacagtacatttaaaaaacatccttatcggttatttttttttcagtcggagtttgacgtataaaattgtttatgcttttggtgtaatctctttaattaaactggttcttcaaaaatcaaaaaaaaaaa

SEQ ID NO: 75599 - DNA, 2312 bp, Homo sapiens
tttcgtgtggagaaagcctgcccacgtggctggcgggagcctcccggcctgggattggtcgaaaaggaggggcgtggggcgggcgtgggggcagttccccagcccaggtcctcctctcacccgggccagttttcaaggcgggctgtaactggtggcatttgtcccgggaccaggctggagtgcaacggtgcgatctcggctcatcacaacctccacctctcgggttcaaacgattctcctgccttagcctcccaagtagctgggattacaggtccacagttttatgtgtgagcaagatggaggctgacctgtctggctttaacatcgatgccccccgttgggaccagcgcaccttcctggggagagtgaagcacttcctaaacatcacggacccccgcactgtctttgtatctgagcgggagctggactgggccaaggtgatggtggagaagagcaggatgggggttgtgcccccaggcacccaagtggagcagctgctgtatgccaagaagctgtatgactcggccttccaccccgacactggggagaagatgaatgtcatcgggcgcatgtctttccagcttcctggcggcatgatcatcacgggcttcatgctccagttctacaggacgatgccggcggtgatcttctggcagtgggtgaaccagtccttcaatgccttagtcaactacaccaacaggaatgcggcttcccccacatcagtcaggcagatggccctttcctacttcacagccacaaccactgctgtggccacggctgtgggcatgaacatgttgacaaagaaagcgccgcccttggtgggccgctgggtgccctttgccgctgtggctgcggctaactgtgtcaatatccccatgatgcgacagcaggagctcataaagggaatctgcgtgaaggacaggaatgaaaatgagattggtcattcccggagagctgcggccataggcatcacccaagtagttatttctcggatcaccatgtcagctcctgggatgatcttgctgccagtcatcatggaaaggcttgagaaattgcacttcatgcagaaagtcaaggtcctgacgccccattgcaggtcatgctgagcgggtgcttcctcatcttcatggtgccagtggcgtgtgggcttttcccacagaaatgtgaattgccagtttcctatctggaaccgaagctccaagacactatcaaggccaagtatggagaacttgagccttatgtctacttcaataagggtctctaaatgccccacttcagcaaggaccagtctattcccatattcaccagctcctccttagctacgtgcacacttgtgtcctccttcccctttgccaacaaggcctgaaggccagggtagattggggggtgggacaatgaatgcctcatacttacaccctggtactggttgattggacctcaggggaaaaaagtgaaaaagggtagcaaaggccaatgtcttctagctgcttcctcaacccctgtcccctggagaccagaagctgaggccctctcagggaggagacatccaagcaaatcatttggaaaagttaggaaacctttaggattctggttccagccagggttgaggaaaagaccttggatcaaaaggaagcttctatacctctttcttcttcgcttcctcctctcccaagcaatggaaacttttacccatgtaattctagctgaactcaggaaaaagaagggggaaaggactctgtccccttggggctcatcacccttccacatcctcctcctcgttgccccctggtcaggcagcttctttttttttttttaaaaagggagttttgttttgccccccaggcggaaaggcaggggcccaatttggttaaatggaaaatttgccctcgggattaaaggaaattttctggcttaaccctttaaggaaccgggaataacggggccctggcccccccccggggaaaattttggattttaagggaaaaggggtttaaccatggtggccaaaaggggtttaaacccctgaccttaggggaaccccccccccaaacctttgaaattggggggattaccgggttggacccccaaacccagcccggaagggttttttgggagggggggtaaccttggaattttcaaacccttaggggtttttagggctaaaaaggggaccggcccaggccacaaaattaacggggttttaaaaacatggttgaacctaattttggaaattttctttaaaaaagggaaggttttttaacccaatggccaaaaactttggtttaaaaaaatagccccataactgggaagaa

SEQ ID NO: 75600 - DNA, 2202 bp, Homo sapiens; identical to SEQ ID NO: 61026

SEQ ID NO: 75601 - DNA, 3393 bp, Homo sapiens; identical to SEQ ID NO: 61027

SEQ ID NO: 75602 - DNA, 1895 bp, Homo sapiens; identical to SEQ ID NO: 61028

SEQ ID NO: 75603 - DNA, 1678 bp, Homo sapiens; identical to SEQ ID NO: 61029

SEQ ID NO: 75604 - DNA, 2359 bp, Homo sapiens; identical to SEQ ID NO: 61031

SEQ ID NO: 75605 - DNA, 2160 bp, Homo sapiens
tttcgtcggcgacggggcgctctcgggctgccggcggggccgagcgccgcgcgtcccgagcatggcaggctccctgcctccctgcgtggtggactgtggcaccgggtataccaagcttggctacgcaggcaacactgagccccagttcattattccttcatgtattgccatcagagagtcagcaaaggtagttgaccaagctcaaaggagagtgttgaggggagttgatgaccttgactttttcataggagatgaagccatcgataaacctacatatgctacaaagtggccgatacgacatggaatcattgaagactgggatcttatggaaaggttcatggagcaagtggtttttaaatatcttcgagctgaacctgaggaccattattttttaatgacagaacctccactcaatacaccagaaaacagagagtatcttgcagaaattatgtttgaatcatttaacgtaccaggactctacattgcagttcaggcagtgctggccttggcggcatcttggacatctcgacaagtgggtgaacgtacgttaacggggatagtcattgacagcggagatggagtcacccatgttatcccagtggcagaaggttatgtaattggaagctgcatcaaacacatcccgattgcaggtagagatattacgtatttcattcaacagctgctaagggagagggaggtgggaatccctcctgagcagtcactggagaccgcaaaagccattaaggagaaatactgttacatttgccccgatatagtcaaggaatttgccaagtatgatgtggatccccggaagtggatcaaacagtacacgggtatcaatgcgatcaaccagaagaagtttgttatagacgttggttacgaaagattcctgggacctgaaatattctttcacccggagtttgccaacccagactttatggagtccatctcagatgttgttgatgaagtaatacagaactgccccatcgatgtgcggcgcccgctgtataagaatgtcgtactctcaggaggctccaccatgttcagggatttcggacgccgactgcagagggatttgaagagagtggtggatgctaggctgaggctcagcgaggagctcagcggcggcgaggatcaagccgaagcctgtggaggtccaggtggtcacgcatcacatgcagcgctacgccgtgttggttcggagggctccatgctggcctcgactcccgagttctttcaggtctgccacaccaagaaggactatgaagagtacgggcccagcatctgccgccacaaccccgtctttggagtcatgtcctagtgtctgcctgaacgcgtcgttcgatggtgtcacgttggggaacaagtgtccttcacaacccagagaaggccgccgttctgtaaatagcgacgtcggtgttgctgcccagcagcgtgcttgcattgccggtgcatgaggcgcggcgcgggcccttcagtaaaagccatttatccgtgtgccgaccgctgtctgccagcctcctccttctcccgccctcctcaccctcgctctccctcctcctcctcctccgagctgctagctgacaaatacaattctgaaggaatccaaatgtgactttgaaaattgttagagaaaacaacattaggaaaatgggcgcaaaatcgttaggtcccaggagagaatgtgggggcgcaaacccttttcctcccagcctatttttgtaaataaaatgtttaaacttgaaatacaaatcgatgtttatatttcctatcattttgtattttatggtatttggtacaactggctgatactaagcacgaatagatattgatgttatggagtgctgtaatccaaagtttttaattgtgaggcatgttctgatatgtttataggcaaacaaataaaacagcaaacttttttgccacatgtttgctagaaaatgattatactttattggagtgacatgaagtttgaacactaaacagtaatgtatgagaattactacagatacatgtatcttttagttttttttgtttgaactttctggagctgttttatagaagatgatggtttgttgtcggtgagtgttggatgaaatacttccttgctctcattgtaataaaagctgttagaatatttgtaaatatcaaaaaaaaaaa

SEQ ID NO: 75606 - DNA, 1191 bp, Homo sapiens; identical to SEQ ID NO: 61033
  misc_feature (1)...(1191): n = a,t,c or g

SEQ ID NO: 75607 - DNA, 3892 bp, Homo sapiens; identical to SEQ ID NO: 61034

SEQ ID NO: 75608 - DNA, 2652 bp, Homo sapiens; identical to SEQ ID NO: 61035

SEQ ID NO: 75609 - DNA, 2123 bp, Homo sapiens; identical to SEQ ID NO: 61036
  misc_feature (1)...(2123): n = a,t,c or g

SEQ ID NO: 75610 - DNA, 827 bp, Homo sapiens; identical to SEQ ID NO: 60912
  misc_feature (1)...(827): n = a,t,c or g

SEQ ID NO: 75611 - DNA, 6333 bp, Homo sapiens
ttttttttttgttctttaaagcactttattaatgaaagttcggaaacctaaaaattgaacagtagtttaataaaatgtggcacatatgatggaatatcatgcagccattaagagatgtagaaatatacttgacacagcaagacagtcatggtattgttgagtgaaaaaaagttacaaaacagtatgtacactttgatcccattaaaaatatctataaatgcacagaaaagtctggaaggccatatacttaaataacagtggttctccctggatgatggaattatcagtgatttttctttctcactgaatcttttttctttttgccaacagggctatgacttgtattataaaaaagcattaacaattctttaaaaagtgtcctttgaagtaagaatgagagcagaacttagcaatctaagaggcacagggatgtacacatggtttctgatactgttttaacggtttgtcaaggtgttttgatgttagtcaccaattaaaaggcactgtgttgagtgaaaacgtggatggtggtagtgcttactttagactaagcaatccattcctagaaaccttccacagcaaacaagtactggcattctaagcaatacttcccactatgatatccttataccttcctacccacttgtaatacagcccagaagtttcccctacatggacagggcactgttgttggttaagggttacagaaggcagagaggatttttcaagtgatgtcagagaataggcctgaaggtgaaatgaatgttctcttagttctattgcagtggttctcaagcttagagtgcaacagtattactcaaacagcttttacaacagattgctgggctccactctcagagtttgattcagtaggtctctgaaaaggcttataaatttgcatttttctttcattcaacaaaaatttattgagttcatactatgtcctagatcttgtgctaagagttgggaatgtaactgccatcaaaagaattatagtttttatctcagggagcctacattctagagtgacagatatacactaaacaaataaattataaaaataactataattacaatgactactgctagaacacaattaagattagaagactcagtttttgtcttaaaatatttaaaaagctgtcacatggaagactgattccatgagcccttgaaaacaaaaaataagtaaaaatgaaggtagaaagttcttgaaaatagtaatcagcattttaaacaagtctccaggagatgccaatattgccggtctggggtctcacactttgccaatcactgctctactgagtagacattttttctttccttgagacaagagtcttattctatcacccaggttggagtgcagtggtgcaatcttggctcactgtagcctctgcctctggggttcaagtgattctcctgcctcagcctcccgagtagctggaattacaggtgcacgccaccatgcccggctaatttttatattttcagtagagacagggtttccccatgttggccaggctggtctcgaactcctgacctcagatgatccacccgcctcagcctccaaagtgctgggattacaggcatgagccacggcacccaggccctgagtagactttctaatgagcgtaatatgggagaaagggcaggggtggttgtggaactctctctccagcgtttgagactcacatgaggtaaaagccacttcatcttatctggaggtcttgaggcaaagttggctataggctaaactatgaagctatctctccattacagcacctcactgaagcttaaagtgctaaatagtagggcaatatttcagaatttcaggtgtttgggagatagggaaggaatttttctggaattctgtcagcatggaggtgagtggggcctctatgggtaaacaagtctgtgggtttttgccttgccctccattgtcttctccactccacagtttatcccagaaatgtttccccaacactagcttcccagtctcactttgttctttgttcagggggaggataacaggagactatgaagatgactctaccccactggtgatcctggcctcaggatttatttcccatgtgacgcagagtgaggaggcacattcccatttttgagacctcatttcttgcaacatcaatttttctgattagcaccataaaaagttttaacaccatgaccgtttaggttagattactttgaggaaaaaggtagacacaatccaatcactttttttttcatttatagaagagcctacaattattttagtttttcattcatatgtgcatccttcacatgtcactatactttcagattaagctcagtggcacagagcttatttaaacaattctgaactgcaccatgaattaataggcttcccaagctttttcttccacgcccaagaaacttcaggcctttacctgagtaaaaactaaacttgactttaaaataagccaaaaccaaaataaaacccaaacaaccaaaccccattaaaataaaaagcaataaacctaagaacaagcatatatattgtggtggttctgtggtagacaaacgtaccagaagcctttgaagcttaacattattgaaggtttctgtacattactgggtaactaaaatcaactttcacttgatggaaagctgaaagttctgaaaaatgatttatactgactgtgggaaggttaaacctggggtctgatttaaagagggtggaggataggattgatagagagaaaacagagcccagatgtaaaagaggtatctctggtgcacagtgatatgcaaggcctatagacttggtaggtcaggatgctacaggggctaacaaggggaaactgatatttacaggatgtgtttactatgtgccaagcctttccctgaaaggcacctgaaatacaagataacatttgctaatcctcacaaccaccctatggtgtcataattattgtcctcattttactggtaaggaaaaggcagttatacatctcatttgaagcttaaagagcacaatatgtgaggaagcctggatttgaacccaggaccatttcactccattaccgatattctttcccctgtattactacatttcccataaacctaattcatagttgctgtttaagtcgatctgaagttttggtatgatctttcaaagcctaaatctggacttataaaacacaatagatggtactctaggctgtagaacttcctttctgaggggagagaaaatttcatttacttggttttacagaaaactgaccagcttgagcagcttttcagggtttctttaagaatatggcaattgagagtgagtcaaaacatcttgtacaactataaaactgcagaagaatttgtctcatggcacagaaataaaagggtaactactacttttaaagtttagactgtgagttaaattgtcaacatgtttaccaagttcttattaggagctcttaacacaaaattttaaaacggtgtttaagtattcatttttttaaaagtaccaaaaagtatcattttaatagcttaacattccctcaataaatgaactatacttttgtacttcatgcttaagttagagtaaattgctttagttgtcagaatgtgctatgctatcttggttacacatctttttatctggaacagttcttccccagaccctctctcactcccaaaactggagttacatgactcccaaatacagtaccttgtattttccccatcacaccacgaatcctactataggataattgcttaattttctgtatcctttaatggtctttaagctctgcaggggcaagaactgtgtgcatattgttcaggacagtatccccagttgaccagcacagtatctggccctcaacaaatgtttgttgaatgaatgaattagaacagaagtcttaacatggaaacaatgatttatagcaatggccccaacagcaattttctagcttccaatgtgtcactaataatttcattagtatgtgtttcataagcagagatcctcatcaagatagcctgtgttcattaataaattttcaatgttttaatagtaagctcagagtgacccaatttattttgttcgtatacaatttataatgtagttgcattattccgtatttgtatacaaatctgctgttcaataagaacacattctctttactgtaccacagtacagtaaatggatccaatcccaattatgcattaaattgtgccaattgaataatcttaaaaactttatgtttaatgaagtaaatttgtcctagattttctagaaccttaactacaaatttatcagagaaatacggtattgcttttcaagaactagttgttcttaaatttaaaagaaaccattcagtagtgtttaaaaaaccaaacaactctgaaaataacccatcaaaacataatattaaaatcatttgatttctgttgggaaaaccagggtaaacatagtttaaatgcgtttttgtctatggaaagcattcaggaaaattctacttttcacaaaagaggtttatatcctacagctctttttaagaccgaaagtttaaaataaattttaattttattctttggctattatttatacctaataaatgagtcgctgatatcaattcacaatagatttaattttacataaaaggaaaaggcttgctgttaatgaaaaatcccagtagaaaacagttctgctttaagttgaggctcaaaagtagaagctgcttattagtgaaacctcaataaaaagagaattttcgtaagaaaacattcttcggcatgaaagctctaacataaattctgtaatgaaatatttaccatgcaactttattggcagaaaggccagtttctgatggctggtattttcagtctcttaacacattaacatgggaaggatacttaacctgctttatttagagttaattgtatataaatacaatgtcatgatgggcaacctttccataagtccacctacttaattggagcagttctaagtaggtaattgggcaccttgcccttctgggtttcccctttcccccattagccagtctgaatcccatcccaacaacactgaacacagtgatcaccctcaactgcccagaagtgaataattccagtactgtttgctgccatccataaatccataagagaaccccggccctttcctgctgcccactacactcccttaaggtcactgaggttggaaggagaggtgattactaggccacttgttgaagccatggcagaagaaccaatcgcatttggtaaaactgatggtacaggtgtcacagaagtctgattgttgttactaagataattggatggaaaacttcccagttgtttctggaggtccaacatatactggtaacactgtgcatagtaagtcatctgggcttctacaaagtcattcagacagcgaaggtgatgggcatgtgtactgctgattccctctagcagaagtctggtaatctctgcttgacgatcaaattcactttgagttattcttaattcctgttcagatgaatttctagtttctgcagcttttgccttttttagtctcgtttttgcagcatccaaatccagtctcttattttgcaatagtttcctttctttagcaattgttttgtaatctccttctataaagtttcttaaaggagtaagaaaatttaaggctgacgtttgaatcagttctctgtctgctgttccaattcttttttgggtttctcccacatttaataagggcattaccataagctgttcctgggccaaactcagtccctgcatcaatcatatattgtcccaaaagttctgggttgtttatacgacttggagcttttctatccagtttctcataaacaaattcttctatcctggcatttggatttggctgcaataacacttcagtttgtttcattattttttctgtccatattttggtacattcagctttgctaaggaggttctctaagtgagcatccaattctgtcttctcagcctggccaagcttttcttctgtgaactgcacggcgcgactgaggaaggtgcctgcgtcggccgccagcttcttcacgttgaagtccatgatattcatcctaggcggcagccgggcggagccggccgacctagcggcggcgaggcggaggtgccgcggccgggctagggcgcagggctagagcggcgagggcagacgtggtaggtggaagggagggcgccagccccgcagccgcagctgtcgtttccgtgaacggggaggatgaaggcggggcgagggaggagaacaagcgcgcggcggcagcgccaaggatgggtcagtcggctcggagaacggccgctaac

SEQ ID NO: 75612 - DNA, 5245 bp, Homo sapiens; identical to SEQ ID NO: 61039

SEQ ID NO: 75613 - DNA, 1719 bp, Homo sapiens; identical to SEQ ID NO: 61040

SEQ ID NO: 75614 - DNA, 2016 bp, Homo sapiens; identical to SEQ ID NO: 61041

SEQ ID NO: 75615 - DNA, 4204 bp, Homo sapiens
  misc_feature (1)...(4204): n = a,t,c or g
ttttttttttttgcttttcctcaacttctttaatctataaaaatttcatgcacacaacctgataaaatacatcagagtcaagacatccgatttaagtattttaggcatatttaataaataacttcagtaaatagcactgtaaaaagtgaactgttaaaactaaaggcacttaaaacaagaatgtgactagtgtgaaacaagatgggcaactcaaatggtgagaagtaaacatacagtggtctgttatggcactaactcaaagtaagactcgcgtaggtgagagctgttgcatagccacagtataacttcacatgttcattaaaaaggcaaattgaccgctaaaacttcaaagaaaaagtactcataaaaaaagtcttaccccaaaattgcaaacaaatacattaaaagattagaagaggtgatagaaagcaccagacattaaacaaaataaaaataataaaataaattcaactcaaaaggtccccattcagcaaatactttgtaaagtatggcctgtatgtaaatagtgctaaatcaaggactttttagcagaaaattgctcggttcttttatctaaggcttgaatttgtaaagtgaaggcataaaagttaccaaacattaagtaactcttaaaatggcacacaggttttaaagctattggtttttccttcctaactctctgaatttttcccatggcctttgtagatcaactatttcaaacgtattttacaccagcaactctcaacatacttgtctttcagatatgtcatcagtcatgtctaacaggcaaatagcaaaataacagatttaaaacaatccttaactagctagcaggacatttactttggattctgcataactgcaaactgacatatttgtaaagctaaaaatcagttttaatacatgattaacagaaactctcatcatgctcattactttaactattgccctttcaatcgctatagaaatatcacttaatccaataagcttgatttcaatagtccaggaagaaaaggtcaaaaaggcacaatgtgaccttagctgacaagaataaccatcctgtctcaagtcttttgtcagtccctggcatgaattacaacattattttcaaaataataaaacattttaaaaattatacatattgtacattttcaaaacctgcacatgagtaaaaccatggcaatattgccctaaagctacctaactgtgactatggaaattgctactttgcattcagtgttgtgggatttgcacgggcagtactcattttccctcatacttcggattgaccacagttgttacggcactcttataaataggattttcacccgtgtcccatttggcattcattttctccttttcaaatttagcaaactcccttctgtcatgaattatcattaaaagcttccatatcagcagtaatgcaaggccaataagaacaattccagcaaccacaccagctacaattggaatgatgtctggaccagtgggacactctggattctccacaacatgaaccatgacctcgttgttcccattcactgaatacgtaaaatagaaccaacagtcgtcaacatccttctccttacaatgggacacaggatcaggttggaccggctggggtaatttgtcccgactttctaccttggtaatgttaaaataggaacattcctgtgtgcatgtgtctttcttttctcctttattgaaggctctgcactgaacacattctttatgctcagcacagacaccaaggcaggtctgacacatctcacacgtttgcccttgaaacttcggatctgtacacttacagacaccacactcgcagatgccccggccattgcagatctgtccgttgctggcttcacaagtactagtatccaaagaacagtcacatgcactgccagtgtagttggggttgcactcacacacacgacacttgcaaacaccatttcctccacaaattaagccattggatctatcacagttgaaattatcacactcgcagaatttgccagaataaatttcatttgtattatccctcttcctacaaacacactgtccggcagacggcactctcccatggttactggcagatttctggaactggttttctttcctggcagtaaagcatccaatgtcttcactgttaacttcatctgtgctgcattcacaatgtctaccaacacgcccttcattgcacctgcacgcgccacactcaaatgtcccatttccttcatgacacttgggactttcagggatgccttcgctttggcattcacattcacagatgtactgaagaataacctctacttcctccgtaaagcccagaggcctaattttaaagctgtcagaatccttttttggacacttatttgaagttatgctaatttcaaattgaacctcatctccaatggaaatattggaacattttcttccattttcccctgttccattcaccccgttcttgccagtaagattggtaacttatggttactccttctgacaatttgccgttttccaaaatgacttctgaggaaagggaattgtatgcatcaatgatcaactgaattacattgctagaatttgcagataatgttcctactgctgacttagggatcaagtttttcagctccttgtaaacaggctgaaattcttcagtaactgcaaaaattgtctgaatattattttcactcagtttctggacaaggtgagcaatagaaggataatcataataatggctcattgtgtacatattattttccaggtgacattgtccatcatttggtaaaacaatgccaccaagtttcccatctccagcaaagtgaaacccggcatctgtggaaaacaccagcagccgtgtaacattcctccagccaatcagtgatccgcaaactgcaacttgcatgatggcatcgaaaccaccttctggagaatccaaatttccagatatgcgctgttttccaacaagttcattaaatacttctcctttattagtaagactgagcacatttttgtagctaaatgggctggtgcagttctgttcacttgtgcaagggttcctgagcttagctggtgttgtgctaatgtaaggcatcacagtcttttccacaaatgagccaaatccaattctgaagtccgaagtaatcctcctcatttcattcatcagatctgttccaagactttttacattctccaaatcgtctttcattgagtaagacaggtcccataaggtagtagaggtcaatgggatagtcttcagctctcttgaattttaatgtaaatgtctgtggctcccctgatcttaatcgcaaaaccaactgctgtggttggatctgagtaatatcctctggcttgagcttctctgctgttcctttgctacggttggttacatttttatttttctttatatctttggagcctctgggattttctatgtcatctggagggcaacccttcttttttaaggcttctaaatcatcacatcgtgcagaagtaggcattccttcctgtaaaaatgttgaatttgtgcaccacccacaatttggccctgcttgtatacattctccacatgatttggcatttgcttttaaacatctattttcatctgtttgagcaaacacacagcaaactgaactgatcagtccaatccagaaaattggttgtaaattcatatcaggcagcagctatcctccaactcctcgaacgagagaatgagagaaacatgcaggctgctttatagggtagatgtggaaaccaacgctctggaagtacagtactctgacaaaggtcacacagaaattcagtggcagacccggcactgacacccaggtttcctgtctcccaatcgagaagcctttagtacatcaaactgcttctctgatcaggtatctgaaaataaattaccacaaagaaatgtgaccaatgaagtctttctgtctttaactcaaacatgccaatcactggaaaaacccagaaatacctatgtcactcacaaaaatgcctctcaaaggaattagaagttcagagaagaaactggggaaggtaaatgcttttctagattcctcttcctccacccccccttgactattaaaagtgttcccaggtcctccttcagcccgtttttcactccacaccctcctttggtgtttgcatgcacagcctatagcttcaaccagcaatagcgtngnnttgtcaaattacgaaa

SEQ ID NO: 75616 - DNA, 910 bp, Homo sapiens
ttttttttttttctaatccaacagttattttattaggatgtcagccctgggtccagagtgagagatagggacaggggacagcccagcgaggctgggtcgggggtcaccccaggatgttccaaccacaggggcagcatctcctccactccacatgctggccaagggcacagagctgccgtatcgcctgccaagggggtggctcaatgctgctgccctggtcctgtatgggcccggggtgccgagaacagacagcaagcctcaggcgccggtcctttgagctttcttgatttcctcagagagcgcctccttcagctctgcgtaggcctggtccaggctgtcgttaatgatgaccacatcaaacaggccgggctccttgctgctctccatgtcggcctgggcagcagccagccgcttcaccaggctctcctcggtttcagtgttgcgctgccgcagccgctgctccagcacgtgcagtgaaggcggctgcacagagatgtagatgggccgcagatcggtggccttgatgttccgcacaccctgcaggtccacgtccagcacacagatgcggttcatggcctgcacggcctgcaccgccaccttgctcgtgccatacaggttccccgagaactcggcatgctcgatgaagtcgccggctgctatgtcacgctgcatcacctccctggttacaaagtagtaatctttgccgttctcctcgccgggcctcgggttcctcgtggtatccctccacgagagccctggactcacgggacacgctgaagccaaagatgccgctgtgctcctggagcagcctcttcagcagggtgctcttcccagctcccgaaggcccgctcagcaccacaggcctggggcccgacatgccgtccggtggggcccggcccagggcggccgc

SEQ ID NO: 75617 - DNA, 1330 bp, Homo sapiens; identical to SEQ ID NO: 61044

SEQ ID NO: 75618 - DNA, 5115 bp, Homo sapiens; identical to SEQ ID NO: 61045

SEQ ID NO: 75619 - DNA, 4707 bp, Homo sapiens; identical to SEQ ID NO: 61046
  misc_feature (1)...(4707): n = a,t,c or g

SEQ ID NO: 75620 - DNA, 3015 bp, Homo sapiens; identical to SEQ ID NO: 61047
  misc_feature (1)...(3015): n = a,t,c or g

SEQ ID NO: 75621 - DNA, 4413 bp, Homo sapiens
  misc_feature (1)...(4413): n = a,t,c or g
actcggccggcagcggaccgcagccaccagccgcccgcgccctccagccccgtccgggagtccccggcccgctgcggtgccgtgagtacctccaaccccctgcgccccggagggaggccgaggggcttagccaccagggctcggaagtgggggccgaatccggtgcgagacccaaggagaggggagcagagccggagttggggagactgtggctgaaaactgtgtcttcctggagactaggctggcattttgactttggggttgctgaaaagccaggagtcaaaatgactgagcgctttgactgccaccattgcaacgaatctctctttggcaagaagtacatcctgcgggaggagagcccctactgcgtggtgtgctttgagaccctgttcgccaacacctgcgaggagtgtgggaagcccatcggctgtgactgcaaggtgcaacattagaggaaatcaatcagcactgggactggctggaacaaaatctcctccacaccttgtctgtctttgataataaagatgacattgccagttttgtcaaagggaaggtaaagccgtgtgtctgggtggctgacggatgacacagctgagccattctcctcatcaggtgtgactgtcgttgaagcagcgcacacttctcgggggcctgtgcacctcagtccctcctgcttcctgtcccttgcaccccctgccttcccattgctggctcactgagcagggactgtcatctctgtgtgtcaggctctgatagccgaggagaccagcagcaggctcgccgagcaggaggaggaacccgagaaattccgagaagccctggtgaagttcgaggccaggttcaacttccccgaggcggagaagctggtcacctactactcctgctgctgttggaagggcagggtgccccgccagggctggctgtacctcagcatcaaccacctctgcttctactccttcttcctgggcaaggaacttaaacttgtggttccgtgggttgatatccagaaattagaaagaacgtccaatgtctttctgacggataccatccgaatcaccacgcagaataaggagcgtgacttctccatgttcctgaacctggatgaggtgtttaaggtcatggagcagctggccgacgtgacgctgcgaaggctgctggataatgaggtctttgacctcgaccccgatctgcaggagccgagccagatcaccaagagggacctggaagccagagcacagaatgagttcttccgggctttcttcaggttgccgaggaaggagaagctgcacgcggttgtggactgttcgctctggacgccgttcagtcgctgtcacaccgcggggcggatgttcgcctctgacagctacatctgctttgccagcagagaagatggctgctgtaagatcatcctgccactcagagaggtggtgagcatcgagaagatggaggacacgagcctgctgccgcatcccatcattgtcagtatcagaagcaaggtggccttccagttcattgagctccgggaccgagacagcctggtggaggcgctgcttgcgaggttgaagcaggtccacgccaaccaccccgtgcactacgacacctctgcggatgatgacatggcttcactcgtgtttcattcaacaaggcatgtgccagtgaccacagatttggggatcctgaaataatgtcttctcaaaatagcgaggagagtgagaaagagaagagcccgctgatgcaccccgatgnccctggtcaccgccttccagcagtcaggcagccagagccctgactcccgaatgtccagagaacagataaaaataagcctgtggaatgaccactttgtggaatacggcagaaccgtgtgtatgtttcgcacagagaagattcggaagctcgtagccatgggcatccctgaatctttgcgagggagactctggcttctcttctcagatgcggtgacggatcttgcctcacaccctggttactacgggaatctggtggaggagtccctggggaaatgctgcctggtaaccgaggagatagaacgagacctgcaccgctccctgccagagcaccccgccttccagaacgaaacgggaattgctgctttgaggagagtcttgacggcctatgcccaccggaaccccaagattggatactgccagtccatgaacatcctgacctccgtgctgctgctgtacaccaaggaggaggaagccttctggctgttggttgctgtgtgtgagcggatgctgcccgattacttcaaccaccgagtgatcggggcacaagttgaccagtctgtcttcgaggagctcatcaagggtcatctcccagagctggcagagcacatgaacgacctctcagccctggcgtccgtctctctctcgtggttcctgaccctgttcctcagcatcatgcctctagagagtgcggtgaatgtggtagactgcttcttctatgatggcatcaaagccatcttccagctgggactggctgtgcttgaggccaatgctgaggacctgtgcagcagcaaggatgatggccaggccttgatgatcctcagcaggtttctagatcacattaagaatgaggacagcccagggcccccagttggcagccaccatgcctttttctccgacgaccaggagccctaccctgtgactgatatttcggacctgatccgggattcctatgagaaatttggagaccagtctgtggagcagatcgagcacctacgttacaagcacaggatcagggtcctccaaggccacgaggacaccacaaagcagaacgtgcttcgagtcgttatcccggaagtctcaattcttcctgaagacctagaggagctctacgacttattcaagagagaacatatgatgagctgttactgggagcagcccaggcccatggcctcacgccacgaccccagccggccctatgctgagcagtaccgcatagacgcccggcagtttgcacacctgtttcagctagtctcgccctggacctgcggggcccacacggagatcctcgccgaaaggacgttcaggctcttggatgacaacatggaccagctcatcgagttcaaagcgtttgtgagctgcctcgatattatgtataatggagaaatgaatgagaagattaaactattatacaggcttcatatccctccagcactcactgaaaatgaccgagacagccagtcgccgttgaggaatcctctgttgtcaacatcgagacccctggttttcgggaaacccaatggtgatgcagttgattatcagaaacagctgaagcagatgattaaggatttagccaaagaaaaagataaaactgagaaagaattgcccaaaatgagccagagagaatttatccagttctgtaaaactctgtacagtatgttccatgaagatccagaagaaaatgatttgtatcaagccatcgccacagtcaccacactgctgctgcagatcggggaggtggggcagcgaggcagcagctctggaagctgctcccaggagtgtggggaggagctgcgggcttcagctccttctcctgaggactcggtttttgcagacactgggaagacgccccaggactcccaggcatttccagaggcggcagaaagggactggactgtctcccttgaacatattttagcttcacttctgactgaacagtcattagtcaacttttttgaaaagccactggacatgaaatccaaacttgaaaatgccaagatcaatcagtacaatctcaaaacttttgaaatgagccaccaatcacaatctgaacttaagctgagtaacttgtagcaagacagcagctgctatgcacactggagtccaccataccaaagcacgaaccagactgtttcttggggtcagccctaaaccgagatttcagtctaccttaccaatggggcatctggctaaacaacctgacaaactgtggccaggggaaccgacacaaccctcaagcatttctatgtattgagaattgtcagtgccctaaggtatccattggttcccttgatgccaacttacaatttttaccggatttgctgaaatgggcacttctgctgtgatgctagtgttgattttgctctcagatgaacacaatgtctcatactaaccaagaagcaagaaaagccccatgctttcatttttcacttggagtgacaatgggagaggtcaggaatcaagttcactttcaagatctaagggagtccactatctgtgcaattgtatttggcttttttttgcactgtttcaatgctggtaattgaaaccattttaatatatttggttgtattcactttatatgtccttccaaaaatgttgttgtgtacataccatgctttcaatgttggcttccaagttttttaataagaaactttttgtaaaaaaaaaa

SEQ ID NO: 75622 - DNA, 3608 bp, Homo sapiens; identical to SEQ ID NO: 61049

SEQ ID NO: 75623 - DNA, 1047 bp, Homo sapiens; identical to SEQ ID NO: 61050

SEQ ID NO: 75624 - DNA, 2548 bp, Homo sapiens
cttcggcgtcgcgtcgctcctgcgctggagctctaggccggcgtctctccgcgagccgcgggtcaagtgccagtggctaagggtgcgcgagtagccgccacccgttcggcgttggctctggcgtcggggtcgttgtgtcgtgacaaccgctgcggtagccgtttccgaggcagcagttgcggccgctttagccctgagcgggatctgcggctgcctgcgagtctctgctgtgccgacccttctcttcgcggaccccacgccaagcagcgaccctgagccgacagccggagcgcccggcaatggcggcctcgacggcctcgcaccggcccatcaaggggatcttgaagaacaagacctctacgacttcctctatggaggcgtcggccgaacagccccgcgggaaatgtcgacgaggagctgagcaaaaaatcccagaagtgggatgaaatgaacatcttggcgacgtatcatccagcagacaaagactatggtttaatgaaaatagatgaaccaagcactccttaccatagtatgatgggggatgatgaagatgcctgtagtgacaccgaggccactgaagccatggcgccagacatcttagccaggaaattagctgcagctgaaggcttggagccaaagtatcggattcaggaacaagaaagcagtggagaggaggatagtgacctctcacctgaagaacgagaaaaaaagcgacaatttgaaatgaaaaggaagcttcactacaatgaaggactcaatatcaaactagccagacaattaatttcaaaagacctacatgatgatgatgaagatgaagaaatgttagagactgcagatggagaaagcatgaatacggaagaatcaaatcaaggatctactccaagtgaccaacagcaaaacaaattacgaagttcatagacgagatttgttcaacactgcaattgtttgttagatgtaaaccctgtgactatagtacgttgcttcttgttcttcacaattcatgacttaagtaccaaaatgcataccagttattatatattgccaagaattaaatgataaacttagagactgattagactgaaaatgcctaatcgatatatatattcttgtgcctagtactttaccacaaatacagtgtaatatcatcagtccaaaactgcattacttttgtaaaaacactggttaatttgtataagatattatagagctttttatgctttagaagttaaacaatatctttgggggggaactaatttattttcatcacttgaaatgtggtagctcttacaaagtttattgatttgtttttttaaaaatcaaaagccaattgaacaacaggatatatagactgataaatatttaggctgaatagtattttaacacttgtcttcaacttgatttgtctgtttaattgaaaagaattataagagttactgttgcattttctgacctactatttttaaaattcctgttgagtttctttgtgtttacaaggaaaggactgaactttttctcatcaaaactagcttttttccccacaaataaattatcaggttaaactttcaccaatgtctgctctgttttttgtttttggggggtttttgtttgtttttgttttttaatgtttttggtacactgggcagacttcagagcagttttttaaaaaaataaatattctaatgtagctatctcgccattccctttaaatacctgtcttaacctcctgcttttctttcctactcctttccacacatacgcacacaatcttctaccttttaaaggatcattaagactgtcaccacattaggagctctttctctcactcttctgtcatttgctgctatgttgaaattcttattttgaccatcaatgcctatgaattcttctaatacgtgaagaaaatagtttgagtagcagcagtgctataggtgggaaatacagtttagctgctgaatttctatacctctctgatttacagattgctaattaaatggctattattagtttggattaattcgacttaagaaaacaactaactgagggttttttttgtttgttttttgagggttttctttgcatgagaattgtatgtaaccagtgatatgattattcctgaatgtacagacagaagtaagcctggacattgttaaatagtccctgctttaagggactacgataatgtgtactatgacaaacgtgctttattcttctaacgcagtaagaattaggtggaattttttccttcaaccaagtgcaggaaagccctgtgtgtcttggtttagttatggtttcatttctagccatacaattgatgaattgtgtacaacttttgttagtaccaaaataatctgttatatgaacagacttctaaaataacgtctgtatattttatatatagatacatatatgaaagaaggcttttattgaacagcttatcttccacttgcaggtttatggaaacagcagtatttgaaaataaataaaaagtgggagaattccttgctgttagaagaatgtggccattattttgattttttgaatgagatat

SEQ ID NO: 75625 - DNA, 871 bp, Homo sapiens
  misc_feature (1)...(871): n = a,t,c or g
ttttttttttttggcatttcaaaacgggctttaaatactcatcagggtgccacacaaaggagctggggtgagaacttcgtacatgtgagtgtggggctggggtgccctgagagagaaaaaggggacccatctgtcagggcagctggggtgccccacaccccatttctgggactagggagcagagtagaaaatttctctggagggtcccagggctaacctgggagccagccctcttttcgaggtagacaatcggggaagggaacccangaagtagctcccatggtggcaagtggcttcctcaagtggtactgctgatagcttggggtagcctggggccggtggtgacatccttagggggcagcttggcttggggtcctccagggaattgggggcgcattttcggaactgctggggctgtgtagcgagtgaggaggatgccaacgccctcaatgagggccaacaggatgccccccatcattgctgagcccaccatggccagtgggccactgcgggcagccagcacagccccggtcaatgctccactggtgatagagttccagggatcctccttgccccgaagccgcaccaggccacagtcgatggtggagaacaggcccccccacactgcgaagctacctccaatctggggggctcggatcctcacagcattggcactacctctcaaccggtgccgaattccaacaggggcattgcggaaacccttgatggcctggaagactccgccaccgatgacacccatagtgaaggctccaccgcaatcatccacaattcgccatgggcagggctcccgagcgtactcctccatggcgctggcacgaaatcgtcggncgggaaagcggatngatggtca

SEQ ID NO: 75626 - DNA, 2144 bp, Homo sapiens
  misc_feature (1)...(2144): n = a,t,c or g
tttggttccaaggggtttaattggggaacccccgggtttttcccccccccccctttttaaaacccggccccggaaattaaatttgggggcccctaaaaaaaatttttactttcccacccccgggtattaaaatttgttttttttaaagggccccccctttttttttttttgattttataatagtttatatttgcacacaaattctgccacattgttcagtaccaccaaagtaaaattcttgaatctttcattgaaaatgaaaaacccatctgtcacctgttcccagtaaaaaactgattgttctatgaaatcggctgttttagtcagataggaactgaagtttgaaagacagcctttccaagttgccaggtcatcaaataatgaccattctaggaacatggtaggaccaaagacaatgacaaggccaagcagaaggattagcaaaaataacttataaaagctccagggaatcttgctaatgaatgtgccagtgtcttgaggcaaagaaagtttatccacatcgactagttttatgtcttcccactgactggtatcaaagttcttcattaaagggcttgcaggcaaattagagggaggtaaaggagtttccttgattactttgattttctctctaaactcctgcatctgttgcagaaatacaatgggttctgacacatctttgaaagcctcagcaatgttaaaggccatccgttgctcctgcaagatggtgttgagtttgttgatctctgggtcatatgcttgcataacagcaagtttcatggtctcaaagtcagacagaatttcattcttcttttgatccagtgtgtgttgtaacttctcaaaaaattccttcactttatctgaatctttagtcagtaactgtagggatttcctcttactagtttccaaggtatccaagcgagaaagagcatctccccgacgccaggtctcaaagctctggaagagggactcaaaggcatccctttcctgagcataggcatcttcaatagaacagaagacatgtttggtgtgctccccacgagtagccacagatccccacaaatccagctgcatatcagtccaggccagaaaatgttgagaggctgccccaaagtgtcctttgcatactggcattttgggagagatcttgatcttgttatacttttccacaatacccttcagggagtaattaacctgcaggggtattaattcccagtagctgaaagttttcttacggcatgtaggacacttgaatggaactggtctccacaaggaattccgcacactcccttctaagataccttctaagcattttttgcagaagttgtgggagcaaggcaaaacccgtggatcatcaaacagactacaacaaatagggcatgtgagatcttcttcaagcagctccatcacatcctctgtctcctacaagctgatgtatttggcagggttactatttcccagggcaaagcaggtcttttttttcacgttttgactaacgaactagaggctnctgcaaagaaagaagaaaaagaacagtattaacgcatttatttgcacagcaccccaatcttgaccctcaattttttcaatcgcccccacaaataaagcccggctgtttagacctggtgaaccgccaggagcctggagctctttgtattaagcagcttctcggttagggcgccctcccccggcgccatgcaaccaaacgctggcggcgcgctgtaacataaggcccacacccgtcttttcttttctaggggatgtggagacgctggtagcggggccaggaaggctccggacggagcaggttttctggaccacagacacactgccccggcgccctccgcaggccgctcctccccaggcccatgacagtgccccgctggtttctgccgcgctgccggactggagctcagacggccttcgccagcccccccaacccacgcagatccctgctgacctgggcaactccccaccctcgctgaaggttcgaggaccaccccgctttcccgagaggagccgggcggcgggtacttatctccgacctccggctagtgggaaaggccgcgcgcccgcccgtcctccaactacagggaccgcacggtacgcgccaagcacagccccaaaatggactcgcgacgaaa

SEQ ID NO: 75627 - DNA, 1081 bp, Homo sapiens; identical to SEQ ID NO: 61054
  misc_feature (1)...(1081): n = a,t,c or g

SEQ ID NO: 75628 - DNA, 3294 bp, Homo sapiens
ttttttttttttaataaaagtacttatggtgtcaatgccaaagcaacaaaaaattcccctttttccttcactattgacagcttcagtttctgtacttactgtgtcatcctatccattcccttccctgagcctgggactgcttttccaggggaaactaggagggaagggaggagtcctcccaaagttaccctttaagcttgataattagctccatagccatgctaaagcatgactgtagatccccaagtccctgacacattttcttctaagaaactggttagccaagaaagtaaagacgtaagccctgaagatggcaaaaggtgtcataatctcccaaagtcatctgtatagatgcttcatttaaccctttttcttttgcagacaaagggttaaaaatctcttctttctacctatatctttaaagagggattgacaagcccaaatttccttttatgaaaagacccaaggtttctggccaacaattcacttttttcagtctcttaggtcctcttgcatgcctgagaatattgagtattcggaatctcctaccagcccttggtaaatgaccctaccaggtggaatagtttgagctttatctgctcttttttaatgggatagaggggaaggcaacacgtcttattttatcaaaaattgcaaagctacacgctctttgtggagaagcaccaaaaggaaaaccttagtttggaaggattcattgtaaataaaaatagtaactcagccctccattcagggaggagaaaggcattttaaagctagtatattgaaggtttcccccttgacttcagtgttgaatggctcttgcaaggacttcttgaaggatttttttctcactagccagtgtttggccgacaggttgcacctctgcctgagaagatgccaggttaaaccccttcacatgggtgctccattgccgccatgggctttttgtcagggataagggtgcagccagccagcatgtccagagaggccaagatagagtcatacaggcgatctgcgtggctctccagctcaccagactgctttgcgatcctcccaaggacatcctctaaaactggggtgttctccaacaggcactgaagaagaatctcccccttctgtaagacactctccgtcagagactgatgttcatctatatctttcttaaattgccggtaaagctgcagagaagactttgagacttgtaagattggacctggctggagtcccgtggtcagtaacatctgacaacattatacagccagcagatcagctcttccagctgacaggcaaaatgtcttcagcacattgcaccagtgattcttttccctgttctcctcctttcctgggaagctgcccttcaacatctgggtctgagaatggccaccggtccaacctagctggcaaggaggggcgtgttttcagcagtccagaggagaccccgagggcctggctgctccccagactgccttcccctgcggagtcgtgggcacggacgaaggagcgcaggaaacagggattctggccctcaggatccccagatccttggagggcagctccagggggaagctggctttggctggagcttgaagggaaggaagctggcccatcactgtctgacacttccaaggggctctgccctttgatatccccagtgggcagggtaaccaaggtagaaatggatcctagatacgaaaccaggctagaaacctgtgtcagccgagcggggagggcaagatactcgtcatcactttccacttcctcttctgatttccacctagactctgtgcaggtagggcgccgggcactctggctggtcctcttctccctctctggcctgggcgagggccaccctctgtcccgtgtccttagctggggagagcccatatcaaggtgcttgcctatagtcagccggtccttcgcacccctcagggctggctctctgcgctcccaacgagcatccctactgcctggggctctgggggtagatgcaagttggctccaagatgccaagcccatgccaccctgtttctggggtactctggagggccactgcttaaggcttggctctctgggcccagaaaatggcagggcagtggcctctgctggtgggcagttgggggagacattagtaggtgatttgagggtgcttgctggagagacagagaagctatccaggtctaccccggagtcctgcaggacagggtcagctggcacacggctatcaaggtgctttgggagctgaggcccgggcctcagtgggtaagtatagtcaagcagatcttcatactctttatttgggttccagagaggggagtggcggtcgggtgatggaggcagggaatctggcagcacacaggcccagtactcagcctggaaggagaggcgtctcctgcctagcccagaagcatcacccccagagaacacaggctgtggtgaccactggggccgaggtcctagccccaccacagaggaaggttcctgggggacgaccggctccagggaggaggagaccttggccagagaaccaccacgaggctccgccctctcctggtgaccctggagactgctgcctgtggaggaagcagagatgctgcagctggaaggctgagctgcggaacctgggctcagcacggacttccactgtgacaggcaagagagacctgagctgtgaggctgctggctgaggtccagtgcctggggcaaatctgctagggatggatcatcttcggtatcagcatcatgtcctgagcaaatagttgttctgggaaggctcagagtctgagggaactcctcggaggaagaaagcttggtcttctccacctggctttccccggagagcagaaggtctccagaccccatggtggcaggaggcaggccactgagtgcaggctcagacctctcagctacgggctctctgttggcatcactggcctgtggctggtgggctctagaggggccgccagggtcagtcccaatccagcaagtaggggcaggtatcccttctgccccccatacaggggagatgagccctccctcagcttccaggcgtgggggctgctccccactcatgggccctgggatgtccagctcccgctccctgcagctccctctcccataggactgggcctttgtgtcttcagatgcttccgcttctgccttttcttcacccagggccattgagactccctacctaggtcagggttctgctgaagacttcagcttcctaccgcaccgcgaacgcttcgcacgtccggagcggtctcagcagccccatgcgctggccccgagacgaaa

SEQ ID NO: 75629 - DNA, 1875 bp, Homo sapiens; identical to SEQ ID NO: 61056

SEQ ID NO: 75630 - DNA, 1731 bp, Homo sapiens; identical to SEQ ID NO: 61057
  misc_feature (1)...(1731): n = a,t,c or g

SEQ ID NO: 75631 - DNA, 1383 bp, Homo sapiens; identical to SEQ ID NO: 61058

SEQ ID NO: 75632 - DNA, 3750 bp, Homo sapiens; identical to SEQ ID NO: 61059

SEQ ID NO: 75633 - DNA, 1783 bp, Homo sapiens
ccgggtcgacgatttcgtcttcgtcgtcgggggcctcgctgtaattctgttcccattgtgcccctacttcaagtactccgtcatgatcaacaaggccacgccctacaactacccagtgcccgtccgtgatgatgggaacatgcccgacgtgcccagccacccccaggaccctcagggccccagcctggagtggctgaagaaactgtgagcacctccactgacagaggcggcccctcccacggctcccaataaaaatgtgaaaaccaacccccgaacgtgagcatgtgtgtgatcagaggtgggaacaagtagacggtggccggggtgagtgtggggtcagtttattgggcatgcgtcagtcaaaggctgggctggccagggtcgggtagggcagcagtttgtctggaccccgagaaacccaactggaatccagggcctcatctgcttcaaagccaaagtcttcctcaaccttaatctgcaccggggccagctctggagtcagcgcatttcctgctgggcgtccatcccgtggcactcgccgcctcttccgcccactgggcccctcaccgggggctgggactgccgggtttctgggggtgcaggagtccttctgggcggggacagtgtctctttctctggaggctcattctccgcattgcctggggtgggggcatccgtgccctggctgccctcatcctggcaggcaggagggggaggtaggtgatgggtgggtcctgagctcccagttcctgaccctcctggaggcccaacactcacctccagcacaatggtgaactggctggcccggtagtcatccccgtaggagtccagcactctcatgaggaacctgctcagggggagaagccaccaacggaataacttatctcctagcggctggggaaaagggccacaggatagagctcagctcccactccactcaacgccaaagctgtcctggagccagacggtcctgagctctggcactggaggcctgggagccatgcccttgaccagccttgagacctcgagcaagacaaggcaaccattctgaggctgagtttcctgctctgcaaacgacatgacaccctcggctggatgttgcagcggtgacactgaagtagtgacaccagacgatttctgtacttaatgtgatgtcagcacttagtaaacattcatatgtgagttataatttttattgataactgaagagaggggagtacagaacgctcctcctaatgacctcacctcttataaacacccccttctcttttttccccagcccctgcctccagagttccttaaggttcaattgatggaatgcctcctctgcaccagcacctgggcaggtttgttgttgttgttttgcgacggagtcttactctgtcacccaggctggagtgcagtggcatgatattggctcaccacaacctccacctcccaggttcaagcgattctcctgcctcagcctcctgagtagctgggattacaggtgcccgccaccacacccagctaatttttgtatatttagtagagacagggtttcaccatttgggccaggctggtcttgaactcctgaccttgtgatccacccacctcggcctcccaaagtgctgggattacaggcgtgagccaccgcgcccggcctattatgcttttaagactcagaagtatctggccactactgatgtttacaaagtaggaaatttagcctgtagttccagctactccagaggctgagggggtaagatcacataagcccaagaggctgcagtgaggtacgatt

SEQ ID NO: 75634 - DNA, 1755 bp, Homo sapiens; identical to SEQ ID NO: 61061
  misc_feature (1)...(1755): n = a,t,c or g

SEQ ID NO: 75635 - DNA, 2426 bp, Homo sapiens
agcctcgacgcactgatttcggcacgaggaggtgcaggccaggggccgtaaggcctggagggcgccagccgggccggcgggcggggtgattgaaccgcgttccctggagctggaggctcgggggaaagggccagcacggagcgggcgctcggttgctgcgcacaaaggctgaggctccaagagctgcagggcgtgtttgggaccccagagtcagaaggagtgagaaccctgacccctaatcccactgcatccagccaataggagcccagccaccatggcggagctgcaggaggtgcagatcacagaggagaagccactgttgccaggacagacgcctgaggcggccaaggaggctgagttagctgcccgaatcctcctggaccagggacagactcactctgtggagacaccatacggctctgtcactttcactgtctatgggcacccccaaacccaaacgcccagcgatccttacctaccacgatgtgggactcaactataaatcttgcttccagccactgtttcagttcgaggacatgcaggaaatcattcagaactttgtgcgggttcatgtggatgcccctggaatggaagagggagcccctgtgttccctttgggatatcagtacccatctctggaccagcttgcagacatgatcccttgcgtcctgcagtacctaaatttctctacaataattggagttggtgttggagctggagcctacatcctggcgagatatgctcttaaccacccggacactgttgaaggtcttgtcctcatcaacattgatcccaatgccaagggttggatggattgggcagcccacaagctaacaggcctcacctcttccattccggagatgatccttggacatcttttcagccaggaagagctctctggaaattctgagttgatacaaaagtacagaaatatcattacacatgcacccaacctggataacattgaattgtactggaacagctacaacaaccgccgagacctgaactttgagcgtggaggtgatatcaccctcaggtgtcctgtgatgctggtggtaggagaccaagcacctcatgaagatgcagtggtggaatgtaactcaaaactggaccccacccagacctcgttcctcaagatggctgactccggaggtcagccccagctgactcagccaggcaagctgaccgaggccttcaagtacttcctgcaaggcatgggctacatggcctcatcctgcatgactcgcctgtcccggtctcgtacagcctctctgaccagtgcagcatccgttgatggcaaccggtcccgctctcgcaccctgtcccagagcagcgagtctggaactctttcttcggggcccccggggcacaccatggaggtctcctgttgaatggcccttgttgccctagagtgggacccagccctcacctcccccagagctaacctgggaggtgctgaaggggcattgggccaccgtaagcaagggaaaaagggcagatcatgcggggagatgaccttgatctttgattgctaccctaaccttgacctttaacccgtgattccccccagctcctggaagagatgtcctaatatctcttagggacccagacccctaaattctcctcctcccccattttgatgttaaggtggagagggcatatgcatcctctgtcctgatctaggtgtctatagctgaggggtaagaggttgttgtagttgtcctggtgcctccatcagactctccctacttgtcccatatttgcaaggggaggggatttggggctggggctccattcaccaaagctgaggtggcttctcattaaccctttaggactctgaagggtatggacctacgtgaatgtgtgtcagggggagacttgctggtgggttagtggtcctcaggatgtgatagaaacatccagtgtaaaaaggaagttggaatgggagttggcgggcagtgaacgagtgtggggaaggattggtgctggggcaacaggaaggggcctggggccgtttggctgcactaactttggtagctcagtgtgcatctagagtgggactggggagggagctaagcttgggctgggctgcttggggcttggcatagggtggaaagggctaccctggggctctgaccacactgtagtatgtgtggagggtgccctcccgtctcccacaacttctgctataacaataaactgtagaggaatctgagtaccgttattattctttgtctaggtgtgcctgcatcatgctcctcttcctatcttctccctgtccacgtctcatattctcttctcaaagtgatataaaccctgggagagggcctttgtggcataggcacttcacaaaatatgaccacatagaaactggctcttttccaatacaacggtgttgccttgatattggagtatttttaagcctg

SEQ ID NO: 75636 - DNA, 1160 bp, Homo sapiens
ttttttttttttgcagataatttctttattgaaactatcaggaagttttactatgaaattttacatacatgatggaaagtggaagacatataccaattatattccaggaaaaaatactttaatagtattgttatatagtgtattggctaattccagtggatcctcatctctcactgctgacattatctccaatatttgaattatatggcagggttcatttctgtcttttaagcagtgcccactttcccacttctttttggtaggaaatgcagttcttatatattttgatccagcatgtgtacttttgactccacaccaagggtgcatctgtctcaatcattaatttttcactaggaattgacttcaaaacttccaaattagcttcagttttcagtgagcaaccattaaatcctatataaagatccaagtcaatcaaagcagctggctgcttccttggtaccatcaaatgaatgcaccactccccctacacaccgatctctatttcttttcattatgtccaaaaaattccagccatgtgagtttcgacaatggaggaaacattggtaattttgtttgttctgacagttcaaactgtttttcaaaatatttgagttgagtatctttgggacaaaactgcagtcggtcaaaatcaagtccgcattctcctattgccacaactttccctttattgttttcagcaagatttagcaactcctttaagtaaagatcagggttattcttttcaaattcaccacatcttgtaggatgacatccaactgtactgaaaaacataccatttgtttgtgccaaatgcagtgcatctttactgtcttgtagatttccacctgtaatcataaactttttaacaccaatctcgacagctctccctattacatcctgtaagtcatcttgatgcttttgaacccccctataaattcctctgaacatagggtcagtcaagttgataccaatatctggaggttcaaggacttcgggaacggaattggaaggtggcctctcgcttcacagaatcctatggtagacccgggttcaaatccaggcttcgccacttatggccgggagaccttgtagagttgcttgtcgggtctgggcgtcagctttttgtttagtaaaacggacgcacgaccagcgcagagggt

SEQ ID NO: 75637 - DNA, 1483 bp, Homo sapiens; identical to SEQ ID NO: 61064

SEQ ID NO: 75638 - DNA, 1422 bp, Homo sapiens; identical to SEQ ID NO: 61065

SEQ ID NO: 75639 - DNA, 3120 bp, Homo sapiens; identical to SEQ ID NO: 61066

SEQ ID NO: 75640 - DNA, 2848 bp, Homo sapiens
ttttttttttttgaaattgtaaatgcccagaaacttccattgtattaatcaggagttagcgcagtacaggcaccacgtggttgtctccaggagcttgaggggcctgagcagactggggggatatcccctccccagggctgggcccactggccacccttctgcccaggggctgaccctcgggccccatccccagcagcccaaaggctgtgttgaagaggttgatgggagtggagccatcggtgatgagggttgatttcaggcccagggactggagcagttttacctgcatctcaggcccagccacagcaaggtccctgatggtgctggggcctatggcctctgtcatctgcttgaacttcttcacctccacctcagccagctgctgagccttgctcacctccagctccagctgggcccgggcatagaccagttccagctctcggaccttctggaccctctggagctcagcctccgtttcaatggccaaggcctgtgcttttagcttggcctgcagcacggacccttctccctcaatccgggctgcctccgcacgggactcggcctccgccttggcagtcccggtgctctccacggccatgctcagagcctccagctccaaaagttccttgcgagctttctcggcttctgactggtccaggatcttctgccgctcaagccggccgcgggcttcctgctccagtctctgagcctcatgcttggccgccgcttcctgggagttggtggtgatctcgatggccagctggacgctgcgttgcagggcgtcccgggtcctctgatccacaggctccactgactgcacgtccacactgctgaccaccagcccgttttgggggaagacagcctggtcccggggcctgggcagggccatgccatcggggcccttcgcttccgaggtctcaaagccaaagacagcagtgcgaatgatgcgggctgagttcttatggaagtcatcgaaagtgacagaggccacggccccccgcacccgggatgcgatggctttgcaggcatcacctacaaagtctggcactgaaaagagcttggccgtctcttgggggtccttccggtcattcacctcaaagtgccagttgtaggccagctgcagttgcagcctggcatgatccgccgtttcgatggtgatgacgtctgtgaagaagtcaggccccagcagcaggcagagcgcacggcgggcatggggacgcttgggccgcccagctgagagggacaacactgtgaactgctcctcaggacccagcgacaccagctcaggcccgaagaccacgcgggctcgcttctctcggtagtcgtacacctgcaccgcagcgttgtggggcacgcggtagctgaccacacgggtcttgttccggggcgccaagggctggaggctcttagctgtgtccttctcacccctgtctgccagagggtcctgccccttgttcagcagctcctccaccccgggaggcagctctttctcccacaggacttcgtcctgggtcagcatgtaggtgcttccaatcacagcgcgcacctttccggtcttgacatcctgcacatagatgccctcgttctcgtctagagggatggcctggcgctcctccaccacctccactttggcagatggcacatactccaggggtccgcggatgagccagtggtccccagcctggtgtgagaccttctcctcatcctccccctcctccaggggctgcagggccctcagcagcagcccctgctgctccgacagcacatacacatcctggatgccttgttccagctgctctcctggctggaggaaaaaagacttctctcccttgaccacgcgcttctgccccagctgattcttgccatccggtccgacagggtcgagaatcacgcagtagttgtgggggcccagggtggtgatgggcacaacccccagcacctcctcgtggacatctggcacgtgggcctctgtgtcctgcactgttaccagccactcctccccagtgcggcgggacactcccctgaagtcccggaagttccgccgagcccggaggtgcagggctgtcttttccgtaaggatgacggcgtccaccaaatccagaacctcctcaaacaccgctgggaggtacgcccctactgtggtgaccagccattcttcccctgtcaccctctccttgccgtcccggtcccagcactccttgcgggccctgagccgcagagcctggttctgcctgatgatggtggcctgaatgatctccacgacctccacttccttccgggggatgtacgtgccaggtccctcgaaaagccactcatctcctgccaccaccttgtctccatctttatcctcaaaatcaagcagcgcctttagatggagggcagtgttgggcagaaccacctgcaggggtgtgatgtccttttccagcacctcccctgggtacagggggaaggggtcctgggccagccggatctcgaggtcagcgtggcgaagccgaacttgccctgtgacatcaaacagcaccaagccctgggcatcccgagacacagggttggccactgtgcagtagtgacgtggggggacggtcaccatgcgcatgggggcaaacagtaccctctcattgtcctgccggatgtaggtctttggcccgacctccacacgggacacgttgctgttctggtccagcacatggatatagtggtatggggggatgcggatgatgaactcttcagttgccatggtgactcctaagcccagggctcacaagaagatgactggtaggtgggggagacgacacaggatgaacctggggagcatctagaagtgcaggtagctgcaacaaacacgaaa

SEQ ID NO: 75641 - DNA, 1845 bp, Homo sapiens; identical to SEQ ID NO: 61068
  misc_feature (1)...(1845): n = a,t,c or g

SEQ ID NO: 75642 - DNA, 1627 bp, Homo sapiens; identical to SEQ ID NO: 61069

SEQ ID NO: 75643 - DNA, 1302 bp, Homo sapiens
ttttttttttttggcaggttcagacaaagagaaaattttattttcttattcttgaaatgactgtacgatttttcaatgttaaagttcactttcaagtatgatcaataacaagacatcaaatgtaaaaattatgctgtattatcattttctccattgcttcttaaaccactgaaagtaatttcacaattcaccacatttaggcatcttctttttcactttcttcattttttacttctttaggcaacaatggatcaatcttcagtaataaaccttcacttgttgaactacgaaggaaagcacgtaccacaaagggacccaaattcagcggtctgtgcctacaaacttcattaataactgcttgcagattggcagctatctggtcacttgacatatccaatgttgctattttggtctggagaaagttctccctttcttcatctaccttaatttcatgtccatttttaaataattcaagcattttggggatgtcacggccaatggaatttcgagaaagctttggatattttttattcagtttcttccttaatcgattaagttcaggcattatttctggaacagctacgtaaaagtctgcaacaatttcatcatcccaaatcttctgtatcagactagtgcctcctgcaaatgcagctccattttcttccgctattttgacctctgatgcattctctgtaaatacagcaactttattgatttcggaagcaaatgggtatgggcaaactaaggaacactgggtaaatgggctccacgtttttcccttcctttcccccagtgccatatccagtgtcaaatcaagataaacactttgctttggactagtaaagtcaagaatttgaaatttcttaagtaagtgaacagctttctccacctcatatatctgtctcgggtataagcgttttaaatagacatcatcctcaggttcgccttccatatagggatatgcttttattttttctatttcatcttttttctcatctggtgttttttctttagcacctttttttgttttctttgcagactttgtagcagcagcaaaatgtctgttgggcactcggatgtttacagaacaagaacaaagtgatgtctgataaaccatcttggaaaggctatgcctttgatgatgtatcaaggctctacccatgcaccttacggccgccgccatgttgggcactccggattgcgttcacgaaattgttcctacgtttctactgggaagaattaaaaaaaggttccgttctagaatccgcaaagagggaaggagttaaaaaaaaaactcgtgcc

SEQ ID NO: 75644 - DNA, 4254 bp, Homo sapiens
gactccgcttgacgaattcggcacgaggatcgcaagactaggcaacctccagccagtccctgggtcgggcggatcctcccagaggtggcacaatggagcgatctccaggagagggccccagccccagccccatggaccagccctctgctccctccgaccccactgaccagccccccgctgctcacgcaaagccagacccaggttctgggggccaacctgctggccctggcgcggcgggtgaggccctggcggtgctgacttcattcgggaggcggttgctggtgctgatacctgtgtatttggccggggcagtgggactcagcgtgggtttcgtgctcttcggcctcgccctctacctgggctggcgccgggtccgcgacgagaaagaacggagccttcgagcagcgaggcagctactggacgacgaggagcagctcactgcgaaaactctctatatgagtcatcgagagctacctgcctgggtcagcttcccagacgtggaaaaggctgaatggctcaataagattgtggcccaggtctggcccttcctgggccagtatatggagaagcttctggctgaaactgtggctccggctgttaggggatctaacccccatctgcaaacatttacatttacacgagtggaactgggtgaaaagccattgcgcatcattggagtcaaggttcacccaggtcagagaaaagagcagatcctgctggacttgaacatcagctatgtaggtgatgtgcagattgatgtggaagtgaagaaatatttttgcaaagcaggagtcaagggcatgcagctacatggcgttttgcgggtgatactggagccactcattggggaccttcccttcgtgggggctgtgtcaatgttcttcatccgacgcccgaccctagacatcaactggacagggatgaccaacctgctggatatcccaggacttagctcactctctgacaccatgatcatggactccattgctgccttcctcgtgttgcccaaccgattactggtgccccttgtgcctgaccttcaagatgtggctcagttgcgttcccctctgcccaggggcattattcgaattcacctgctggctgctcgagggctgagttccaaggacaaatatgtgaagggcctgattgagggcaagtcagacccatatgcacttgtgcgtttgggtacccagacattctgcagtcgtgtcattgatgaagaactcaacccacagtggggagagacttatgaggtgatggtacacgaggtcccagggcaggagattgaagtggaggtgttcgacaaggatccagataaagatgactttctgggcagaatgaagctggatgtagggaaggtgttacaggctagcgttctggatgattggttccctctacaaggtgggcaaggccaagttcacttgaggctagaatggctgtcacttttgtcagatgcagagaaactggagcaggttctacagtggaattggggagtctcctctcgaccagatcccccgtcagctgccatcttagttgtctacctggatcgggcccaggatcttcctatggtgacctctgaattgtacccaccacagctgaagaaggggaacaaggaacccaaccctatggtacaactgtcaattcaggatgtgactcaggagagcaaggctgtctacagtaccaactgcccagtgtgggaggaagcgttccggttcttcctacaagaccctcaaagccaggagctcgatgtgcaagtgaaggatgattccagggccctgactttaggagcactgacgctgcctctggcccgcctgctgactgccccagaactcatcctggaccagtggttccagctcagcagctctggtccaaactccagactctatatgaaactagtcatgaggatcctgtacttggattcatcagaaatatgcttccccacggtgcctggttgtcctggtgcttgggacgtggacagtgagaatccccagagaggcagcagtgtggatgccccacctcgaccctgtcacacgactcctgatagccagtttgggactgagcatgtgcttcggatccatgtattagaggcccaggacctgattgccaaagaccgtttcttggggggactggtgaagggcaagtcagacccctatgtcaaactaaagttggcaggacgaagcttccggagccatgttgttcgggaagatctcaatccccgctggaatgaggtttttgaggtgatcgtcacatcagttccaggccaagagctagaggttgaagtctttgacaaggacttggacaaggatgattttctgggcaggtgtaaagtgcgtctcaccacagtcttaaacagtggcttccttgatgagtggctgaccctggaggatgtcccatctggccgcctgcacttgcgcctggagcgtctcaccccccgtcccactgctgctgagttagaggaggtgctgcaggtgaatagtttgatccagactcagaagagtgcggagctggctgcggccctgctatccatctatatggagcgggcagaggacctcccgctgcgaaaaggcaccaagcacctcagcccttatgctactctcactgtgggagatagttctcataaaaccaagactatttcgcaaacttcagcccctgtctgggatgagagtgcctcctttctcatcaggaaaccacacactgagagcctagagttgcaggttcggggtgagggcactggcgtgctgggctcattatccctgcccctctcagagctcctcgtggctgaccagctctgcttggaccgctggtttacactcagcagtggtcaggggcaggtgctactgagagcacagctagggatcctggtgtcccagcactcgggagtggaagctcatagccacagctacagccacagctcctcatcgctgagtgaagaaccagagctctcggggggaccccctcacatcacctcctcagccccagaggttccggcagcgcctaacacatgttgacagtccccttgaggctccagccgggcctctgggccaggtgaaactgactctgtggtactacagtgaagaacgaaagctggtcagcattgttcatggttgccggtcccttcgacagaatggacgtgatcctcctgatccctatgtgtcactgttgctactgccagacaagaaccgaggcaccaagaggaggacctcacagaagaagaggaccctgagtcctgaatttaatgaacggtttgagtgggaactccccctggatgaggcccagagacgaaagctggatgtctctgtcaagtctaattcctccttcatgtcaagagagcgtgagctgctggggaaggtgcagctggacctagctgagacagacctttcccagggtgtagcccggtggtatgacctgatggacaacaaggacaagggcagctcctaggagctggcgagtcccagcctgactgctctgtcttcctgccttcgtctcgctccatcaccgcctcaatgtgatgagcctaaagctagggtccaagggcagagcctgtgcccttcagccctttcacctaacaggcccatattcgggcctttgcctgaccaaagagaagaaccgtatgttccctttactgcacggcctttatccttctgggcccctggggcggggacctgagctggctgtttcctgctttgcctgcacattgttctcccttcctcccaactcctcagggccttctgtatctgtgcctggccagtggcagcactagcagtggtattagcttatgccaaatacagctttggaaggatctttttttctttaactagatggtcaccttcttccctaccacacatgggtgggaaggtggacaggctaacctctccagctgtgagcctcttagactactgcatgtagcaaatgttcagcagctcaggcccccatgtccagttctgtccccactgtcctcaaccctgtcctgaaaattctactgctttgatggctggggccagtctcttgtcactttggaaactgaggacgcgtggattctactcaagcctccaagtagtggcatatcagtcttggagctcctagctggtgatacggagagggctttggaggacttgggacagcagggccaatttttttgcccaagtgcctaggctgctaactcactgactagaacttaatctggtactttacagttttgcaccaactctgccaagccactggatcttacattaaacatcatactcaaaaaaaaaa

SEQ ID NO: 75645 - DNA, 1871 bp, Homo sapiens
ttttttttttttgacagatcttgacaatgtccttttaattgtactcttttcaaaaaatctcctttctcagttaaaaaaggacaaggcatgatgaagacctgctctgagcccattactgggcggtgatctcggtcctgggggaggccaggccgggactcttccaaggcctcctccctgggcagtcccagcaatggggccagtggcagggcaggttctccctgccagaacccgatcctagcccttcagaaggactggacctctgtgtcccttcagtgggaagccaccttggacacacgcagtcattcaggtggacataaggccactcttctcgcccttgaccttgaggaactcagccatgctggagaaatacttctggttggcctcagccaccttcttctctgccgcctgtgggttcacaatctccaggccctggagtggggtgaaggccacgctggaggccgtgcccgaggagcggtcgcggatggtggacttcccgccatatacgacgctctgcttctgcagggtccgctgcagcgtcttggagatcctggccttggtggcctcgtttacctgtgtctgccgcacacgcccactgcccgacttgcccaggtggcccaggctgaatcccaggtcctcctggtaggcgtcctcctcgatctctccgaagctcatacggttggcctgctatccggatctccgtcagccccagccgctccttcatcttgcggtacctgcggccgcctcgcttcttccgctgtccatccaggggcgcaggcagcggcttcacctgcttcacaggcggcggctcctgccacttgtcgaatttgcgctcgatctcatccttcagttcgtagcccaccttcccttctgtgctctcgtggaaactgtccacacgggctgccagtgtgcacttggcggccaccagccgggccgctttccgccgcagatcctggagcaacggaaaacgggggtggaatcggtggcagggactgcacgatgtcactgtggtagatgtagccggtgtggggcagcactgaggtagacgagaagcccgacagcgtcttgcgctgggccccgagcagcatgatgttgcaggcgggcatcttggagaggttggtcaggccgccggccacacccatgatcttggcggccgtggatgccccgataatgatggacaggttgggtgcgatgaaggacatccgggactccacatactcgtagatgcggtgcttggaggcgttcagctccagcgccatgtcgcaggcctcctccagccgctccagctcctcctccgacagctgctgcccctgggtggtggaggcggtgacgctgacgaccatgatggtggcattggtgaggatctgctgcaggttctcattgttcttgcacttgtccaggctgttgcccagctccttgaccgtgcggatgtaatccagtgcattggggaccaaggactccagttcagggaatctctttgagtacttatcccggatgaacttatggatgatgttcagctcgttttcgatctccacggtcaggttgttggcatccacgatgacgcggtattcaggcgcggcctccactggtcccatcacttctgaagctttggcttgcttgctgatatactcctcaatcttcatcataatctcagcaaacatcttactatcccatagcttggcgatggtcttgactgaatccccggaaagatccagctgtgtctcctcctgcacatcctcgatcgctggctcctcttcttcctccccatagcttcctccttcctcctcttctgctgcctcttcgagatcagctaagagctcatctgccagagacatcccgaggcctctcctctccgcgcaccactgtttctagcg

SEQ ID NO: 75646 - DNA, 2348 bp, Homo sapiens; identical to SEQ ID NO: 61073

SEQ ID NO: 75647 - DNA, 2537 bp, Homo sapiens; identical to SEQ ID NO: 61074

SEQ ID NO: 75648 - DNA, 2491 bp, Homo sapiens; identical to SEQ ID NO: 61075

SEQ ID NO: 75649 - DNA, 2178 bp, Homo sapiens; identical to SEQ ID NO: 61076

SEQ ID NO: 75650 - DNA, 2361 bp, Homo sapiens; identical to SEQ ID NO: 61077
  misc_feature (1)...(2361): n = a,t,c or g

SEQ ID NO: 75651 - DNA, 1006 bp, Homo sapiens
ccgttcgacgatttcgtcgaaggactatggcaggggagaacttcgctacgccgttccacgggcacgtgggccgcggcgccttcagcgacgtgtacgagcccgcggaggacacgtttctgcttttggacgcgctcgaggcagcggctgccgaactggcaggagtggaaatatgcctggaagtagggtcagggtctggtgtagtatctgcattcctagcctctatgataggccctcaggctttgtacatgtgcactgatatcaaccctgaggcagcagcttgtaccctagagacagcacgctgtaacaaagttcacattcaaccagttattacagatttggtcaaaggcttgctaccaagattgaccgaaaaagttgatcttctggtgtttaatcccccctatgtagtgactccacctcaagaggtaggaagtcacggaatagaggcagcttgggctggtggcagaaatggtcgggaagtcatggacaggtttttttcccctggttccagatctcctttcaccaagaggattattctatttagttaccattaaagaaaacaacccagaagaaattttgaaaataatgaagacaaaaggtctgcaaggaaccactgcactttccagacaagcaggccaagaaactctttcagtcctcaagttcaccaagtcttagcatacagtgtgtgcccagaactactggaaactgaatgcatttagcatattttgaaactgaagtcattcattagatggatttacatcactggcttccctggttctcaagcctttggattcagactgaattataccacaggccttcctgggtctgcagcttatagatggcagatcatgggacctcttagcctccataatcatgtaagccactttcttgtagtactggtaaaagatatattagaccaatctataaaacagctagctatgaaagagaaaggtgacaggcacaagcctatgcaaatagagaagggttcctggagagcctctgacttgcc

SEQ ID NO: 75652 - DNA, 2628 bp, Homo sapiens; identical to SEQ ID NO: 61079

SEQ ID NO: 75653 - DNA, 1631 bp, Homo sapiens; identical to SEQ ID NO: 61080

SEQ ID NO: 75654 - DNA, 1684 bp, Homo sapiens
ttttttttttttggagaaaaaaaactttattggtattacagcaaaaaattcacataagatacataaattatgatacctcaaagctagaggcaaataaaatacacctaattatacaaattctatacaattaaatcaagaacattaggaaaatttttttgcaaaaatgtcaaaaaaagatttgatctggtcgggtatagtggctcacacctgtaatcccagcactttgggaggccaaggcgggtggatcacctgaggtcaggagttcaagactagtctagccaacttggtgaaaccccatctctaccaaaaatacaaaaattagccaggtatggtggtgtgtgcctgtaatcccagctactagggaggctgagccacgagaatcgcttgaacctgtgaggtggaggttgcagtgagccgagatcgcaccactgcagtccagcctgggggaacagagtaagactccatctcaagagaaaaaaaaaaagatttgatcaaaccaagatttcagaaaaacaaaaccaaaaacactgtgacttggttaacatttatttaattttgggaacacagtaaaaaacagaaacaaaacatctatttcttcacaattgtgaaaatgtctggcttgaaacacctttgacatttatctcactttcgctctcaagtttcaggctgctgcatccatggcggctagctggcagtgatgctcttttctgctctcaaggtttctttgggcttggaatagttccacggccgtctattttctgtgaatccataaagttttctaagggccactcgagcagcctcttcttctgcaaccaatactgtttccccaggtccttctgcaatcaactttttatcacagtataagccaacaaaatacaaaggcaaagctgtgggggccaccagactgcctagtaagtcttgattcaggagctgaaacattccttttcttcagttcttctaccaatagccccatgggatttattatcttccacatctcaaagagctcttttccagtcatttgagtaattaagaagtccctgatgaaaagtgcagtcctctcaggtccactgctctgtaacagggctccaataactgcaaagaaagtctgctgtaacacagctgggggcactgggaattcttcactcagtgttaactgctccacagccaagtttctagccacgtgacacacgacttcctcaccagtgagaaagtcaacaagattttttatgccttcagtgggcatgtctgggtactcgtcttcaagaaactgtgtaaggcaagtctgtgaaaaagatgtcccttgttcggatagttcttgattacttttaagattcagaagaacagcttctttctctatcccaagttgttggcgtttggcctcctcacttttaatatagcagctattaacaaatgcagttttgagaagatctaaggaaaagttttcctgtaaccgatgtccaaaagcttgtatttctgcatggtaatcccagttcggcttctctgaacggcgcacgggcggcggcgggcaccgcagaaggcgctgccgctctaactccttctggaagcggaaggcggcgcggaatcccttcttcactccccgaaccggagggaccagcttgggggcgactggagccaggaggcagcgatgtccctgctgcagcaatcttaccagcccggacgcccc

SEQ ID NO: 75655 - DNA, 2012 bp, Homo sapiens; identical to SEQ ID NO: 61081
  misc_feature (1)...(2012): n = a,t,c or g

SEQ ID NO: 75656 - DNA, 1847 bp, Homo sapiens; identical to SEQ ID NO: 61082

SEQ ID NO: 75657 - DNA, 6309 bp, Homo sapiens; identical to SEQ ID NO: 61083
  misc_feature (1)...(6309): n = a,t,c or g

SEQ ID NO: 75658 - DNA, 1761 bp, Homo sapiens; identical to SEQ ID NO: 61084

SEQ ID NO: 75659 - DNA, 950 bp, Homo sapiens; identical to SEQ ID NO: 61085

SEQ ID NO: 75660 - DNA, 1618 bp, Homo sapiens; identical to SEQ ID NO: 61086

SEQ ID NO: 75661 - DNA, 3277 bp, Homo sapiens
ttttttttttttacggatagaacctttattgctgaacataaaacacctgacctgggaggcctggccagtggcctcttcactgggccgaaaacctgggtggggagggctgggggctgcagggccacctgttgccaatggagatcggggacaggcctggaggccagccctgcctggcaccctggaaggtggtggggtggggacaggggcctggcttgggggaggaagaccaggccctgcgcacacgctggtcatggaaggttgagggccaggcaggcagagcagtgtccctgtggcccccaggtgaggcttggtggcgggcggccctcctgtagggtagagtggtggacagagcctctttcctctccaaggatgagggtctgaggtaggtgcaggccggtccctggggtcctcacagacgtggtttgatgtgcagaggcttccctgagtccttggtgaggggggccctaggggcccggaccctgggctgggctcctgggctcggcgaggactgcagggagatgaaggaaggcagcttgcagagcctgttggagcacgctgctgctaaggcagcctcctggagagatggtgcctcgtggtccaaggaagcgggaggggatgaggaggaggaggaggaggaggaagccttcgaggatgagggagaggctgacccccctgggcagtggggaggtgcagccacggcagccgcagtgagggcagccgagctgggcgtctgcctggtggggcgctgggatgctgaaggcttcctgggcccgtggctggccgagaccctgctcctggcggttgcgtcgctgggccctggggcgggggacgtggctgcccgccgactgtggcgtttctgggtacggtggagcagctggcactgggcgccgcggggacacgcccccctgcgggcaaagtcggggcacagcagcgtgtgtttcttcttgcactttgcacccagggggcagtagcctttgaggaagtcgctgcagacctcggccttgcgggacacgtacacgtggctatagggacagttgctgttgctgcagatgcccttcaggaagtaggagcacaccggcatcttctccttggacacatggtgggagaaggggcaggtcccatccgttttcttgcaggtgccccggacaaacctggtgcacacggccaccttctcgggatcgtggatgtaggggcagcgctcgccacggttgcacctgccgaagcggttgtagtacatgcagtactccttcctcttctccctgcgctgccgcgcctgccggatgatggccaggctgcgctgcactgcccggctggccagggaacggctacagctgcctgcaggatccagccggcctgtgcgcaggaggggcctgctgcccgcatcactgggctggccggaggtcttggagagcttgttggcagatactttgtagaggacccctccgatgcagcggtagcctttgctccgccaccaaggggagcccggttgggctttcccacccccgctggcaactggacgcaggcggttcagcaccagggacctggatagtgagagccgccgggcccgccaggagggcagagacagggggaagggcggggcgctgagaggcgaggccggcgtcttcttgacaatgcggtagcgggtcttgatcaccttgctggtgggtgcagtccgcacggcatgcaggctggacgcttccttggtggggaggtgggcccggctcggtggcaggcgacatagtcggtgcgtggtgacctgtaccaggcccttgttgggggtcttcttcaggacagggctgctcttccccctgagggcctgtctccgccggaggctgaggtggctcttggcggtggcggcaggtgaggtgccgcttttcttgtctccaggaaggcttgtgctgccgcgtctccggatgatcttggtgcggctcttcactttgtaagccgagagcggggtctccccagagaggggcttcaagccactgtgtcctactgctggtctggtcccccgacggggacctagacaggactggggagagctgggaggcatggtccttgctgccggcctccgactgccaacggaaggaggaagaggaggaggcagaggggctggaggccttccacttgtacttgctgggggcagaccctggcttggaggacgtggctggcttcctgggcttgggctctgggtcagctatgagctgcggcttctccaccttgtttgccatgccagcagaggccttgcacacattctctgcagccactctgggactgagggccctccgagcaacccggggactcttcgaggaggcagccacccatttgtagttgtttttccggaacttgttagttcgacaggtcacaaccagcgaggcctcccgggcctgcctgggtcctgaggccggtctggcggggccccccactgagccagacggaactggctgatctgtgtggccagcatctactctcctgtccccaaggagctgtggagcacagctggccacggaatgagaacccagcttccggcccagggccacgccagtgcgtgggggcagagcggaggatgggaagctcgccttgacggcaatcacactctcactgactgtccggcggggctcccgggggctgtcgcccacactgcccactgacttcaccatcctgggcttaccaggctccttctggcagaccagaagaggatcttccacactgcaggtccccctggctcttgttggcctcgagggctgcagctgtccccgagggggctcaccttcaccttcccggggcctttggtcactccagggggtgtcctcaaattcttccaaagagccccgctgggcccctgaggcactggcagagccagactttgatggcggtttaactttgatgaccacgttctgaccctgactgagctggacctgtctctcaaggacatgctgctgcgggacaggaggctggcccccccgggccccgtgcaacggccgcacagcatggtcggcaggagggtctgagggtcccgggggccgattcacgagggagtatttcttgcgccacgaaggcccatggtgggaagagtagcccctccggcttggacgagggtagcgggcactaaaggctctgccactgtggtaagtgggtggctgccacccagaagctgctggggtaccaggggccggggcattgccgtggagggttttgtagtcatcaatcagaccctgcagtaggcggatctgccgccgtaatatctccttttcctccatctcccgagtccgcgacgaaa

SEQ ID NO: 75662 - DNA, 8428 bp, Homo sapiens
tttcgtggagccgagctgggtgcggtgaggcgcgcagatcaccgcggttcctgggcagggcacggaaggctaagcaaggctgacctgctgcagctcccgcctcgtgcgctcgccccacccggccgccgcccgagcgctcgagaaagtcctctcgggagaagcagcgcctgttcccggggcagatccaggttcaggtcctggctataagtcaccatggcacagcaagctgccgataagtatctctatgtggataaaaacttcatcaacaatccgctggcccaggccgactgggctgccaagaagctggtatgggtgccttccgacaagagtggctttgagccagccagcctcaaggaggaggtgggcgaagaggccatcgtggagctggtggagaatgggaagaaggtgaaggtgaacaaggatgacatccagaagatgaacccgcccaagttctccaaggtggaggacatggcagagctcacgtgcctcaacgaagcctcggtgctgcacaacctcaaggagcgttactactcagggctcatctacacctattcaggcctgttctgtgtggtcatcaatccttacaagaacctgcccatctactctgaagagattgtggaaatgtacaagggcaagaagaggcacgagatgccccctcacatctatgccatcacagacaccgcctacaggagtatgatgcaagaccgagaagatcaatccatcttgtgcactggtgaatctggagctggcaagacggagaacaccaagaaggtcatccagtatctggcgtacgtggcgtcctcgcacaagagcaagaaggaccagggcgagctggagcggcagctgctgcaggccaaccccatcctggaggccttcgggaacgccaagaccgtgaagaatgacaactcctcccgcttcggcaaattcattcgcatcaactttgatgtcaatggctacattgttggagccaacattgagacttatcttttggagaaatctcgtgctatccgccaagccaaggaagaacggaccttccacatcttctattatctcctgtctggggctggagagcacctgaagaccgatctcctgttggagccgtacaacaaataccgcttcctgtccaatggacacgtcaccatccccgggcagcaggacaaggacatgttccaggagaccatggaggccatgaggattatgggcatcccagaagaggagcaaatgggcctgctgcgggtcatctcaggggttcttcagctcggcaacatcgtcttcaagaaggagcggaacactgaccaggcgtccatgcccgacaacacagctgcccaaaaggtgtcccatctcttgggtatcaatgtgaccgatttcaccagaggaatcctcaccccgcgcatcaaggtgggacgggattacgtccagaaggcgcagactaaagagcaggctgactttgccatcgaggccttggccaaggcgacctatgagcggatgttccgctggctggtgctgcgcatcaacaaggctctggacaagaccaagaggcagggcgcctccttcatcgggatcctggacattgccggcttcgagatctttgatctgaactcgtttgagcagctgtgcatcaattacaccaatgagaagctgcagcagctcttcaaccacaccatgttcatcctggagcaggaggagtaccagcgcgagggcatcgagtggaacttcatcgactttggcctcgacctgcagccctgcatcgacctcattgagaagccagcaggccccccgggcattctggccctgctggacgaggagtgctggttccccaaagccaccgacaagagcttcgtggagaaggtgatgcaggagcagggcacccaccccaagttccagaagcccaagcagctgaaggacaaagctgatttctgcattatccactatgccggcaaggtggattacaaagctgacgagtggctgatgaagaacatggatcccctgaatgacaacatcgccacactgctccaccagtcctctgacaagtttgtctcggagctgtggaaggatgtggaccgcatcatcggcctggaccaggtggccggcatgtcggagaccgcactgcccggggccttcaagacgcggaagggcatgttccgcactgtggggcagctttacaaggagcagctggccaagctgatggctacgctgaggaacacgaaccccaactttgtccgctgcatcatccccaaccacgagaagaaggccggcaagctggacccgcatctcgtgctggaccagctgcgctgcaacggtgttctcgagggcatccgtatctgccgccagggcttccccaacagggtggtcttccaggagtttcggcagagatatgagatcctgactccaaactccattcccaagggtttcatggacgggaagcaggcgtgcgtgctcatgataaaagccctggagctcgacagcaatctgtaccgcattggccagagcaaagtcttcttccgtgccggtgtgctggcccacctggaggaggagcgagacctgaagatcaccgacgtcatcatagggttccaggcctgctgcaggggctacctggccaggaaagcatttgccaagcggcagcagcagcttaccgccatgaaggtcctccagcggaactgcgctgcctacctgaagctgcggaactggcagtggtggcggctcttcaccaaggtcaagccgctgctgcaggtgagccggcaggaggaggagatgatggccaaggaggaggagctggtgaaggtcagagagaagcagctggctgcggagaacaggctcacggagatggagacgctgcagtctcagctcatggcagagaaattgcagctgcaggagcagctccaggcagaaaccgagctgtgtgccgaggctgaggagctccgggcccgcctgaccgccaaagaagcagggaattagaagagatctgccatgacctagaggccagggtggaggaggaggaggagcgctgccagcacctgcaggcggagaagaagaagatgcagcagaacatccaggagcttgaggagcagctggaggaggaggagagcgcccggcagaagctgcagctggagaaggtgaccaccgaggcgaagctgaaaaagctggaggaggagcagatcatcctggaggaccagaactgcaagctggccaaggaaaagaaactgctggaagacagaatagctgagttcaccaccaacctcacagaagaggaggagaaatctaagagcctcgccaagctcaagaacaagcatgaggcaatgatcactgacttggaagagcgcctccgcagggaggagaagcagcgacaggagctggagaagacccgccggaagctggagggagactccacagacctcagcgaccagatcgccgagctccaggcccagcatcgcggagctcaagatgcagctggccaagaaagaggaggagctccaggccgccctggccagagtggaagaggaagctgcccagaagaacatggccctcaagaagatccgggagctggaatctcagatctctgaactccaggaagacctgaagtgcgagcggggcttccaggaataaagctgagaagcagaaacgggaccttggggaagagctagaggcgctgaaaacagagttggaggacacgctggattccacagctgcccagcaggagctcaggtcaaaacgtgagcaggaggtgaacatcctgaagaagaccctggaggaggaggccaagacccacgaggcccagatccaggagatgaggcagaagcactcacaggccgtggaggagctggcggagcagctggagcagacgaagcgggtgaaagcaaacctcgagaaggcaaagcagactctggagaacgagcggggggagctggccaacgaggtgaaggtgctgctgcagggcaaaggggactcggagcacaagcgcaagaaagtggaggcgcagctgcaggagctgcaggtcaagttcaacgagggagagcgcgtgcgcacagagctggccgacaaggtcaccaagctgcaggtggagctggacaacgtgaccgggcttctcagccagtccgacagcaagtccagcaagctcaccaaggacttctccgcgctggagtcccagctgcaggacactcaggagctgctgcaggaggagaaccggcagaagctgagcctgagcaccaagctcaagcaggtggaggacgagaagaattcccttccgggagcagctggaggaggaggaggaggaggccaagcacaacctggagaagcagatcgccaccctccatgcccaggtggccgacatgaaaaagaagatggaggacagtgtggggtgcctggaaactgctgaggaggtgaagaggaagctccagaaggacctggagggcctgagccagcggcacgaggagaaggtggccgcctacgacaagctggagaagaccaagacgcggctgcagcaggagctggacgacctgctggtggacctggaccaccagcgccagagcgcgtgcaacctggagaagaagcagaagaagtttgaccagctcctggcggaggagaagaccatctctgccaagtatgcagaggagcgcgaccgggctgaggcggaggcccgagagaaggagaccaaggctctgtcgctggcccgggccctggaggaagccatggagcagaaggcggagctggagcggctcaacaagcagttccgcacggagatggaggaccttatgagctccaaggatgatgtgggcaagagtgtccacgagctggagaagtccaagcgggcaatagagcagcaggtggaggagatgaagacgcagctggaagagctggaggacgagctgcaggccaccgaagatgccaagctgcggttggaggtcaacctgcaggccatgaaggcccagttcgagcgggacctgcagggccgggacgagcagagcgaggagaagaagaagcagctggtcagacaggtgcgggagatggaggcagagctggaggacgagaggaagcagcgctcgatggcagtggccgcccggaagaagctggagatggacctgaaggacctggaggcgcacatcgactcggccaacaagaaccgggacgaagccatcaaacagctgcggaagctgcaggcccagatgaaggactgcatgcgcgagctggatgacacccgcgcctctcgtgaggagatcctggcccaggccaaagagaacgagaagaagctgaagagcatggaggccgagatgatccagttgcaggaggaactggcagccgcggagcgtgccaagcgccaggcccagcaggagcgggatgagctggctgacgagatcgccaacagcagcggcaaaggagccctggcgttagaggagaagcggcgtctggaggcccgcatcgcccagctggaggaggagctggaggaggagcagggcaacacggagctgatcaacgaccggctgaagaaggccaacctgcagatcgaccagatcaacaccgacctgaacctggagcgcagccacgcccagaagaacgagaatgctcggcagcagctggaacgccagaacaaggagcttaaggtcaagctgcaggagatggagggcactgtcaagtccaagtacaaggcctccatcaccgccctcgaggccaagattgcacagctggaggagcagctggacaacgagaccaaggagcgccaggcagcctgcaaacaggtgcgtcggaccgagaagaagctgaaggatgtgctgctgcaggtggatgacgagcggaggaacgccgagcagtacaaggaccaggccgacaaggcatctacccgcctgaagcagctcaagcggcagctggaggaggccgaagaggaggcccagcgggccaacgcctcccgccggaaactgcagcgcgagctggaggacgccactgagacggccgatgccatgaaccgcgaagtcagctccctaaagaacaagctcaggcgcggggacctgccgtttgtcgtgccccgccgaatggcccggaaaggcgccggggatggctccgacgaagaggtagatggcaaagcggatggggctgaggccaaacctgccgaataagcctcttctcctgcagcctgagatggatggacagacagacaccacagcctccccttcccagaccccgcagcacgcctctccccaccttcttgggactgctgtgaacatgcctcctcctgccctccgccccgtccccccatcccgtttccctccaggtgttgttgagggcatttggcttcctctgctgcatccccttccagctccctcccctgctcagaatctgataccaaagagacagggcccgggcccaggcagagagcgaccagcaggctcctcagccctctcttgccaaaaagcacaagatgttgaggcgagcagggcaggcccccggggaggggccagagttttctatgaatctatttttcttcagactgaggccttttggtagtcggagcccccgcagtcgtcagcctccctgacgtctgccaccagcgcccccactcctcctcctttctttgctgtttgcaatcacacgtggtgacctcacacacctctgccccttgggcctcccactcccatggctctgggcggtccagaaggagcaggccctgggcctccacctctgtgcagggcacagaaggctggggtggggggaggagtggattcctccccaccctgtcccaggcagcgccactgtccgctgtctccctcctgattctaaaatgtctcaagtgcaatgccccctcccctcctttaccgaggacagcctgcctctgccacagcaaggctgtcggggtcaagctggaaaggccagcagccttccagtggcttctcccaacactcttggggaccaaatatatttaatggttaagggacttgtcccaagtctgacagccagagcgttagaggggccagcggccctcccaggcgatcttgtgtctactctaggactgggcccgagggtggtttacctgcaccgttgactcagtatagtttaaaaatctgccacctgcacaggtatttttgaaagcaaaataaggttttcttttttcccctttcttgtaataaatgataaaattccgagtctttctcactgcctttgtttagaagagagtagctcgtcctcactggtctacactggttgccgaatttacttgtattcctaactgttttgtatatgctgcattgagacttacggcaagaaggcattttttttttttaaaggaaacaaactctcaaatcatgaagtgatataaaagctgcatatgcctacaaagctctgaattcaggtcccagttgctgtcacaaaggagtgagtgaaactcccaccctacccccttttttatataataaaagtgccttagcatgtgttgcagctgtcaccactacagtaagctggtttacagatgttttccactgagcatcacaataaagagaaccatgtgctaaccagcttactgtagtggtgacagctgcaacacatgctaaggcacttttattatataaaaaagggggtagggtgggagtttcactcactcctttgtgacagcaactgggacctgaattcagagctttgtaggcatatgcagcttttatatcacttcatgatttgagagtttgtttcctttaaaaaaaaaaaatgccttcttgccgtaagtctcaatgcagcatatacaaaacagttaggaatacaagtaaattccgcaaccagtgtagaccagtgaggacgagctactctcttctaaacaaaggcagtgagaaagactcggaattttatcatttattacaagaaaggggaaaaaagaaaaccttattttgctttcaaaaatacctgtgcaggtggcagatttttaaactatactgagtcaacggtgcaggtaaaccaccctcgggcccagtcctagagtagacacaagatcgcctgggagggccgctggcccctctaacgctctggctgtcagacttgggacaagtcccttaaccattaaatatatttggtccccaagagtgttgggagaagccactggaaggctgctggcctttccagcttgaccccgacagccttgctgtggcagaggcaggctgtcctcggtaaaggaggggagggggcattgcacttgagacattttagaatcaggagggagacagcggacagtggcgctgcctgggacagggtggggaggaatccactcttccccccaccccagccttctgtgccctgcacagaggtggaggcccagggcctgctccttctggaccgcccagagccatgggagtgggaggcccaaggggcagaggtgtgtgaggtcaccacgtgtgattgcaaacagcaaagaaaggaggaggagtgagggcgctggtggcagacgtcagggaggctgacg

SEQ ID NO: 75663 - DNA, 3156 bp, Homo sapiens; identical to SEQ ID NO: 61089

SEQ ID NO: 75664 - DNA, 2730 bp, Homo sapiens; identical to SEQ ID NO: 61090

SEQ ID NO: 75665 - DNA, 790 bp, Homo sapiens; identical to SEQ ID NO: 61091

SEQ ID NO: 75666 - DNA, 2329 bp, Homo sapiens
ttttttttttttgaacatttggtaattttttatttgcttttcttggcactcataacattttttaccctttaaaacagattcaagtgattcaaattccagttacctctaagttatattctgttaacaaccaccttgtataaattggtttcataaataaaaactgctcttaaatgattctgtcagtggatgtctatccacaagctttccagcctggtctgctttatgtgtacatcctgaaaatttgccaaaatagcagcaacaactgatgatatcatagggaaaaaactcactgccacaagaaaccaagcattgttgagtcaacttctttttggtcacttgttttatacttactagataagccaaaagacctgtttgttacacaaacatgcatgcatccaggtattaatccattctcacactgctatgaagaaatacccgagactgggtaattataaaagaggtttaattttctgactcacagttccacatggctgggaaggcctcaggaaacttaacaatcacggtggaaggcacctcttcacagggcggcaagagtgagaatgagagccagtaggggaaatgccaggcacttataaaaccatcagatcttatgaaagctcactatcatgagaatagcatgagggaaactgcccccatgattcaattacctaccacaacacctgggaattatgaggattaaaattcaagatgagacttgggtggggatacatccaaaccatatcaatccatatatggctgaaatttacatcagacaatggtaaatatctatgttcaaagtccattgatgctttgagattctgagctattttctggtatggaaaacagacttagcatctccatctccattggatgtatgctgcctcctgtgatgatcaaggaatgcaatggttctcccaagtccacagtgcacatttgccttaaagtgcctgctgcaattttctggtcgtcggctccaaccctgggctaagccaacacaaagtgtctcctcggtaactgctggttcttctcctcgtattctttgattttgaacaatctccagaagctgctgggctgcttggtttacactcatataccgtggaggttcatagatcttccttcccttgattagattttccaaagactgctcctttactttgatgtctagtaaacataatgtgtgcatgccattttgtctgttcttcttcactttgtcaaagaagctttctggtctccaagtgtctgtccaaaaaacaatagaaactgtctctccaaacttatataactgtaaaccacagcagcctacagcattcattatggaggcattgtgaataactctataaggaattcccagctttgttgctcttagaacaagatcactgtgtgttgtggccccaaatggatcaccaaccacaaggaatgcaacatcactgatatcagcatcctttaaaatattatctgcttcttgttccacttcttctctatcagcaacaaccaattttcttccataaaactcttccaaggcttccttccctacagttaggactgaggtgtaggcttccagatacactcgactgcagcgtctaacaacttccaggcccttgactgtgatgtccttggcatctcccaggcccaacccgatgagataaagcatttcaaacttgaggagaagagagaccgctgagagaatcgtaggtagttctctggcctttacaaattcttaactaccacctttccgcagaagcaactgcaaaagcgccggctccgtgcagagaaaaggcccacgccgccggcctcacctacggtgccgcaaaatgctggtgcctttactgcactttacgactagcgggagggggccgggctagcgggctactgggctgcggagaccagagcccggctccactgaagaaacccgccggctgctggggcagggcggcgaaaggtcagtcggccgagaggagtccgtggagccaccgtttcatagcctcagggaaaggatcgggcgtgctcacgagccctctaacccatggcttaaacacccgcttcctaagcctgggttcttatgcctttgtttgaaaaacatggttccctgtgaaattttacatgtagaagaaagcttcacactacgagagctctcaggatataattatttcagacagatactgggaacataagatggcttatcaatctaagatggccttcctgtccttcggattgaactgaaaccatccctgattccagggataggtagatgatccgggtttggacaatcaaaatattgaaccaccctggacctacaagtgtttctgggatgggaacatgcaaacgttgg

SEQ ID NO: 75667 - DNA, 4562 bp, Homo sapiens; identical to SEQ ID NO: 61093

SEQ ID NO: 75668 - DNA, 5103 bp, Homo sapiens
cggggcggcggcgggggccgggggggcccgggcgcgcgggagcgggagcggccgggggagccggagcgcaccatggaggcggcggcaggcggccgcggctgtttccagccgcacccggggctgcagaagacgctggagcagttccacctgagctccatgagctcgctgggcggcccggccgctttctcggcgcgctgggcgcaggaggcctacaagaaggagagcgccaaggaggcgggcgcggccgcggtgccggcgccggtgcccgcagccaccgagccgccgcccgtgctgcacctgcccgccatccagccgccgccgcccgtgctgcccgggcccttcttcatgccgtccgaccgctccaccgagcgctgcgagaccgtactggaaggcgagaccatctcgtgcttcgtggtgggaggcgagaagcgcctgtgtctgccgcagattctcaactcggtgctgcgcgacttctcgctgcagcagatcaacgcggtgtgcgacgagctccacatctactgctcgcgctgcacggccgaccagctggagatcctcaaagtcatgggcatcctgcccttctcggcgccctcgtgcgggctcatcaccaagacggacgccgagcgcctgtgcaacgcgctgctctacggcggcgcctacccgccgccctgcaagaaggagctggccgccagcctggcgctgggcctggagctcagcgagcgcagcgtccgcgtgtaccacgagtggcttcggcaagtgtaaggggctggctggtgcccgagctctacagcagcccgagcgccgcctgcatccagtgcctggactggccgcctcatgtacccgccgcacaagttcgtggtgcactcgcacaaggccctggagaaccggacctgccactggggctttcgactcggccaaactggcgggcctacatcctgctgagccaggattacacgggcaaggaggagcaggcgcgcctcggccgcatgcctggacgacgtgaaggagaaattcgactatggcaacaagtacaagcggcgggtgccccgggtctcctctgagcctccggcctccataagacccaaaacagatgacacctcttcccagtcccccgcgccttccgaaaaggacaagccgtccagctggctgcggaccttggccggctcttccaataagagcctgggctgtgttcaccctcgccagcgcctctctgctttccgaccctggtcccccgcagtgtcagcgagtgagaaagagctctccccacacctcccggccctcatccgagacagcttctactcctacaagagctttgagacagccgtggcgcccaacgtggccctcgcaccgccggcccagcagaaggttgtgagcagccctccgtgtgccgccgccgtctcccgggcccccgagcctctcgccacttgcacccagcctcggaagcggaagctgactgtggacaccccaggagccccagagacgctggcgcccgtggctgccccagaggaggacaaggactcggaggcggaggtggaagttgaaagcagggaggaattcacctcctccttgtcctcgctctcttccccgtcctttacctcatccagctccgccaaggacctgggctccccgggtgcgcgtgccctgccctcggccgtccctgatgctgcggcccctgccgacgcccccagtgggctggaggcggagctggagcacctgcggcaggcactggagggcggcctggacaccaaggaagccaaagagaagttcctgcatgaggtggtcaagatgcgcgtgaagcaggaggagaagctcagcgcagccctgcaggccaagcgcagcctccaccaggagctggagttcctacgcgtggccaagaaggagaagctgcgggaggccacggaggccaagcgtaacctgcggaaggagatcgagcgtctccgcgccgagaacgagaagaagatgaaagaggccaacgagtcacggctgcgcctgaagcgggagctggagcaggcgcggcaggcccgggtgtgcgacaagggctgcgaggcgggccgcctgcgcgccaagtactcggcccagatcgaagacctgcaggtgaagctgcagcacgcggaggcggaccgggagcagctgcgggccgacctgctgcgggagcgcgaggcccgggagcacctggagaaaggtggtgaaaggagctgcaggaacagctgtggccgcgggcccgccccgaggctgcgggcagcgagggccgctgcggagctggagccgtagattccgtggcctgccgccgcagcgccgccgacatcgcgggtgccaggggggcgcggctgggcggtgcagctccgcccggctccggcccttcaagcccacacagccaccaacggtctttaccggtgccttattacccagggaggtgtttgtaacccatgtaggttttggaaccccactgccaaaaattttctactggccaagttcaagtgagtaagccgcgtcccccaactacagctggagacgggcccagctcggcggcctgctggtcctctgcttgctggaacattctaacatttacacttttgttataagctatttaaaaccagtaaggagacttgaaattcagaaaatcaacacatttttaaatgactaacttctaaaagccccaacacatgacgccatctgaagacccgcaacggagtgggggtggcggccgccccaccctccccacccggggaagccatcacagctcatctgcccgcggctgcgtgaggacagcaggggtttttcttcagagtctattttttcagcgacaaggacccaggtcttcctgctgctgccagggagagcagggacagtgccgcgtgcgagatgagctcgaacactgcccgccttactgccgcctaccccgcccgccacgccgccgtcgatgccagcgctgtccccacgggtaccaggaagtgcagagccgcacaggagctgccccggagctgaggggacggtcttcggctcctctgcaccccgtgattctgcccacgctcctccaccacgaggcactgacctgcgtcgggtggtgaccgtggctggcggtcacgccctcagcccctccgggcacacgtgccgcctgaccgggcgacccttttcagttcggcaaacgtcgctcccttcattttgggactgaggctgcagcattggaacaaaagagcattatttcaatttttctttctttttttttgttcgttcatttaaacgtatatttagaactgcactttgtccacaaccttcccttctctttctattccccagtgaactgaggtttttaccgatttatagagcagtcaaatccgaagtgctcgagtgcttagaaaccccctctggtgcttggttgaacaagggaatcacaagaaaacgaaaatgcaaaaactgaacttcgggggtcgttctgtgccttccagcatcttgtacagcaaatcctgactcgtgtctttttacccccaagatatctgtcttcagtagcgactgaatctgccactctcagaataagttccttgcatttattccaaataatctcgtttactctcacctgtttatgcaaattgtataaggtttcttatgcccaagcttgaaaaatgatttcccagtagacaagaggcggctacctatcctacagttacggtatttatttacataagaagatcttacaggagttctttgcttgaatccgttctaacacccgcggcagctgcacgcgctcacagaaggtggaggttacttgcccagggtacaggacggacctcgggcgcagtgacgagcaaagaccagagactgctgagccctcgcatctgagttggcggaattgcctgcgggggttttgcccttggtttactgaggggggtcttggttgctgctgaagcccccccaccccttctaaagtgcaatgcaaaagggacatcatgtatatgcagcgtttgtttggaattttctttgcttttgttttctttgcggttgttctgtgtgcatggattccacacctctgccgtaggtagatccgtcagcgggcattattaccgtgtcttgtaaagggtcggttttgttatgcaacacgcagaatgctgtttttagccttgttttaccagagttgttttttttttcagttatttcttcaagggaaactaaatgatttagttggagcaaagctttaagtgtgttggcgtgcttctgtgtggctgtcctgtgtcgccaggtcgaagatcacagtgaggtagaggccctgccccatccccagggccgccaggcttgctccgtttgctttgagtttttagaccccagagggagatgagcttttccaagctgtgtctgggccagagcctctccttgcccttgctccatcccgacggtcaccgttgggtccacgcctccaccgccccatcttgccccaaacggaaagcgctgtatctgcagtggcagcccttccccacttcggctctgggagggtccagccagtgtcacctgggcccaccctttcctgcagctgccaggcccgtgcggtcagtgggacccggacgtgggcaggcgagctcgggaccctcccaggcagttcccacagctcttgcctcggctcaccagggtcacttccactgtcaggggcctgagggggcagctgtggctgcagggctgctctggactgaggggtcccaggccccgaggggtgcacgcctggctccccttggcacaggtgcgagtccgtttcttttcagcagaagggggaagaggtgtccgctgtgtgggctgctgactcctctgtgtgtgaggcccttcatctaagtgattgtgtattcagtttaattctcattatatttctatactgaaagaagatttttaacgaagggaaaaacaacagcaataacattcatatctctggagcagctaactcatacacgtaatgtctgcttttcgtacagaactagccaatgtaaaaacagttcacctgtaaatactttttcctttttcaccgttgtattatacatgtatatgctgggtcctttttccagaaactcttttcttacctgagagttgtcttgttttctgggctgtttttaactgaggaaaaaaaaa

SEQ ID NO: 75669 - DNA, 2888 bp, Homo sapiens; identical to SEQ ID NO: 61095

SEQ ID NO: 75670 - DNA, 2562 bp, Homo sapiens
ttttttttttttttaaagcctggattgtaaccagattttcttttttcccccttctcagctgtagatatgatatctcctttcagggccccagcttaagggcaaagtgagttaatgtgtagacaaaggcgagggacaagagagagttaacatctagacagtggaaaaagccatggtgtgtggtttctgggaaccaccaacacttgcaggtttagctttttcccagggttgactacaagaaagaaaaccatgtttttgcaagattaaaatgtggttgagtgtgcctaaattaaccatccccatttttatcatatttccaccatcacttcagggttttaagagtcagtgctcacctgggcggagctggtagtacattttgcttcttagaaagctaagtcctgggttccgtctgattttaggttccaggaacttcctgagaacacccgatcgcagagggtaattttctggagtttgttttgcagggatagctgggagtatggccaccctgctccacgatgcggtaatgaatccagcagaagtggtgaagcagcgcttgcagatgtacaactcgcagcaccggtcagcaatcagctgcatccggacggtgtggaggaccgaggggttgggggccttctaccggagctacaccacgcagctgaccatgaacatccccttccagtccatccacttcatcacctatgagttcctgcaggagcaggtcaacccccaccggacctacaacccgcagtcccacatcatctcaggcgggctggccggggccctcgccgcggccgccacgacccccctggacgtctgtaagacccttctgaacactcaggagaacgtggccctctcgctggccaacatcagcggccggctgtcgggtatggccaatgccttccggacggtgtaccagctcaacggcctggccggctacttcaaaggcatccaggcgcgtgtcatctaccagatgccctccaccgccatttcttggtctgtctatgagttcttcaagtactttctcaccaagcgccagctggaaaatcgagctccatactaaaggaagggatcatagaatcttttcttaaagtcattctctgcctgcatccagccccttgccctctcctcacacgtagatcattttttttttttgcagggtgctgcctatgggccctctgctccccaatgccttagagagaggaggggacggcacggccgctcaccggaaggctgtgtgcggggacatccgaggtggtggtggacaggaaggacttgggaaggggagcgagaaattgctttttctcttcctccctgggcagaatgtagcttttctgcttcactgtggcagcctcctccctggatccttagatcccagaggagggaagaaaatttgcagtgactgaaaacagtaaaaaaaaaaaaatttatgtatataaaagttgcattacacagtacaaaatagatggataatgtttatcctttatttttctatgtagaagtttttgaatttgtgtgtgtgcttgtgcgtgtctacacctagtattacggctgggactctccagctgtttttgttgttgttatgtttttaagagggttgaattcttccatcaggtgaacgaaaaaggcaacaaagtaataaatcagtgaatgtggccggcagctgtgtttagcccctccagatggaagtttcacttgaatgtaaaataataaagtttatattttgaatttctcttttcatgggggaaaaaaggtacgttaaaaaaatcaaaataatgatatgtcacttgcagctaccttttttttttcttttaaattcaatcagccaccttcatgtgcctttttcctttgtctttccccaaaattccaggaccagagatctggccctggctaattttctcttgctgtgtacacacacgcacacatgccgactagcgcctccgtgtccacccacatgacagcaggagcgatggccgggatcctggagcactcggtcatgtacccggtggactcggtgaagacacgaatgcagagtttgagtccagatcccaaagcccagtacacaagtatctacggagccctcaagaaaatcatgcggaccgaaggcttctggaggcccttgcgaggcgtcaacgtcatgatcatgggtgcagggccggcccatgccatgtattttgcctgctatgaaaacatgaaaaggactttaaatgacgttttccaccaccaaggaaacagccacctagccaacgggatagctgggagtatggccaccctgctccacgatgcggtaatgaatccagcagaagtggtgaagcagcgcttgcagatgtacaactcgcagcaccggtcagcaatcagctgcatccggacggtgtggaggaccgaggggttgggggccttctaccggacctacaacccgcagctgaccatgaacatccccttccagtccatccacttcatcacctatgagttcctgcaggagcaggtcaacccccaccggacctacaacccgcagtcccacatcatctcaggcgggctggccggggccctcgccgcggccgctctaga

SEQ ID NO: 75671 - DNA, 1433 bp, Homo sapiens; identical to SEQ ID NO: 61096

SEQ ID NO: 75672 - DNA, 2291 bp, Homo sapiens
ttttgtttaataagttgcttaaatttcttctttttttttttggtagcctgagagggcctctccattctttattcagtcccaataagttaaagggcaagggtagggggcagggcctcttaggtgaggacgctgctaactgaaggcagcagttcagccagttgctccaagatgcccaccgcttggcacagcgggttaccctgcaggttgaggaggaccagcctggggcaggaggcaagaggctggagcactgcaggctgctggaggcggttgttgcacagtagcagctcctgcagccggggtaggttggtgacgccgtccagggactctatggcattatcactggcctgcagcacctgttcggggtggagggtcctcaaggcagcgcagggcagccagtgcaggtggcagggttcggaggcgattgtgtgacaagtcaagatgggtgaccaagagcagctgttccagatggcagagcactgtcagatccttgtgagccaggtgcagcacacgcacctcggcatactccatcttgagcacgctattctccagcaagaacttgctgcgcaggtcatcaagaatacgttgcccgcttggggtcccaggcctttgagggtctggaagtactgcagggtctccttctcatacagcagggggtccagtgcccgcatcagcaggatgatggtaagccaggcaccatttattctcaggctccagctcctgcagctccttacaggattccagctcagactgcagcactgtggacttctccactgacagctcacacctgaatagctgctcgtctgtcgtggagtcccggcaccagccctcctggcggccttttaaaagcacgcattctttctggacatcgcctgctgtccaaatgacgcgaaatgtatgttggggcaactggtcgttgagggaggcagcaggcaggtcacagagccagacatggctgggccggttcctgccatctggggtcctccactccacaatcaggggagaatcatcaaccatgagcagcaagatctccatcctggagcccactaagaggggccgagagaaggagacagtcagacaggcctcgtcccggctcacatgcaggcagcgcagtgcatcctgggggtcagctcggcctaggagccaacggtgataaaaccaggcactctggtcattggggtcagtgaagaaggcattctgcaccagctccagctctttgagcagcacatcctcagggaggcgcccctgtggtccagaatccggctgggggtgcagctggggcaagagacaggagcggtaatgccaggaagagtagttggagaagtttcgggtgatgaggctgtcagtgaaggctagctcttctgcagggggcacggctgcctgtgtggccacaaaccgccgatagtcccagcagtgaaagttccgctcatccacctccaggaaacgggcacagagctccagctctcgggtccagttgggctcaggcaggcggcctagcagccagcatcggtggtgccaggtaccataagacttggggttcacccgcaggcagctctccaggaagcccagttctgccttcaccagagcagccaactcttcaggagacttctgagtctccagctgctggagcacctctcgtcggcagttccagagggtggcaaaatcagggttggctcccagaatctggcttgtcagttccagcacggactcatccagctcaccagcctggcgcttctggaatacggcctgggtggctgactggtatagcttcagcttctgctctcgctctagccttttggcctccgcctgctcttctgacgtcttcaccttcaggcgtccgtgcatggtgccggctcagggttcaagacaggggaagggtccagtggtagcccttgaagtctgaggagagaagtgtcaatcacgtagccccgcccctactagctccgcccacagctgtgtccggaagcagcaagcgtgcctgggcagagacccccagagtgtaaagaggtcctgggacaggctttgcacgttccacaagagtgtctcgctgtgtcgtctagactggagtgcagtggtgtgatcatggctcaactcctaggctcaagcgatcctcctgcctcagcctccggagtagctgctgggactgcaggaacgtgccaccatgcctggctcaaacacaaagttttttcataaaactcacttggcggcaaaattctaccttacctgaagttatttacggggtttttaatttccactttgaataaatattcacatcttgttgagtaaaaaaaaaa

SEQ ID NO: 75673 - DNA, 776 bp, Homo sapiens
tctcgctcaggctcggttttaccccggagtctattcgaagggggctgctacgtcagcgcgtctcagcgtaagacggcgctattccgctgtaacagcttccggcgggtcctggatgttgatgtcctgcatctaacgcggtgtaacccccgaagccgagcgagctccggaggaatttcagtatctgctacggtaacttcatcagcccgccaagatggcgatgcaagcggccaagagggcgaacattcgacttccacctgaagtaaatcggatattgtatataagaaatttgccatacaaaatcacagctgaagaaatgtatgatatatttgggaaatatggacctattcgtcaaatcagagtggggaacacacctgaaactagaggaacagcttatgtggtctatgaggacatctttgatgccaagaatgcatgtgatcacctatcgggattcaatgtttgtaacagataccttgtggttttgtactataatgccaacagggcatttcagaagatggacacaaagaagaaggaggaacagttgaagcttctcaagggagaaatatggcatcaacacagatccaccaaaataaatgttttctacattttcatttggactaaatcccacgaatgacaactaccaccttttttttcctttttaattaatactaaatattgtgatttcttatttgaggttcaaaatgacctggctggaaactttgatacatattggaatacattatgttaataaacttgtaatctttttgtgaaaaaaaaaa

SEQ ID NO: 75674 - DNA, 2585 bp, Homo sapiens; identical to SEQ ID NO: 61101

SEQ ID NO: 75675 - DNA, 4142 bp, Homo sapiens
gaattcgcggccgctcgacgctcagcagagctaccagctgccctgttggcttcgctggtcggatcgtcctcctggccccgccaaacaggcggggggagcggccccgactgtggggccatggcagtagtctcctcgttctccgccgccgctagcctagctgagtcgccggcttctgcgctaggggctcccaccgcctccgcaggctaaggagccgctgccaccaacgagctgtgagggttactatgctccctctttgccgccgtctcctcctcttgcccgcgcaggcacccctctggctgctcagtcctgcctcagtgtcaaaccagaagagaagtaaaattcaacaaaaatttatgtgtggagttccttcttaaaagaagaaaaaagtgattatttagactatggatcggagcaaacggaattcaattgcaggatttcctccacgtgtggagccgtcttgaagagtttgaaggaggtggtggaggagaaggaaatgtgagccaggtgggaagagtttggccatcttcgtatcgagctcttataagtgcctttttcagactgacgcgtttggatgatttcacctgtgaaaaaatagggtctggcttcttttctgaagtgttcaaggtacgacaccgagcttctggtcaggtgatggctcttaagatgaacacattgagcagtaaccgggcaaacatgctgaaagaagtacagctcatgaatagactctcccatcccaacatccttaggtatatcaactccgggaacctggaacagttgctagacagtaacctgcatttgccttggactgtgagggtaaaactggcctatgacatagcagtgggcctcagctaccttcacttcaaaggcatttttcatcgggacctcacatctaagaactgcctgataaagagggatgagaatggttactctgcagtggtagctgactttggcctggctgagaagatccccgatgtcagcatggggagtgagaagctggccgtggtgggttccccattctggatggcacctgaggttctccgagatgagccctataatgaaaaggcagatgtgttctcttatggtatcatcctctgcgagatcatcgcccgcatccaggccgatccggactatcttccccgcacagagaatttcgggctggactatgatgctttccagcacatggtgggagactgtcccccagattttctgcaacttactttcaactgctgtaacatggatcccaaactgcgcccatcttttgtggagattgggaagaccctggaggaaattctgagccgcctacaggaagaagagcaggagagggataggaagctgcagcccacagccaggggactcttggagaaagcacctggggtgaagcgactaagctcactggatgacaagatcccccacaagtcaccatgcccaagacgtaccatctggctgtctcgaagccagtcagatatcttttcccgtaagcccccacgtacagtgagtgtcttggacccatactaccggccacgagatggtgctgcccgcacccccaaagtcaacccttttagtgctcgccaggacctcatggggggcaagatcaagttttttgacctgcccagcaagtctgtcatctctctggtatttgacctggatgcaccagggcccggaactatgcccctggctgactggcaggagcccctggccccacctattcgccggtggcgttccttgcctggttcgcctgagttcttgcatcaagaggcttgtccatttgtgggccgggaagaatcgctatctgatgggcccccaccacgcctaagtagtctcaagtacagagttaaagagatcccaccattccgggcatctgccctaccagctgctcaagcccatgaggctatggactgctccattctccaggaagaaaatggttttgggtccaggccccaggggaccagtccatgccctgcgggtgcttctgaggagatggaggtagaagaaaggccagcaggctcaactccagccaccttctccacctcaggcataggcctgcaaacccagggaaagcaggatgggtgagggggtttagtccctgcctcaccttggggatggaccttcagctgaaaccatatggccccctaggtgcacagccttgattcttccctggagcctacagagcaggcaggctaggccaagccaggctcaacttctgggctcccagtgcccattggctgtgtatgacgggaggcagcagtgagaggccttcctagttagggccaacagctgataccaagcctctgaaatccagcaaggaggtctgcctcccaccagaccctctccagtgtacttccccagataggaccagaggatgtctagttctaggctgagctggcaggcagctattaccccggttctttccccaccccaggtctgtctcttgccttttcttggggcatataagctactgagtggaacatggagctgatcaagaggccgtaacggtcatggctgtttcccagacctgaatattggggtgcttcttgccagtattctaagacatttgagtaattgctgtttgcacttactgcatggtcagaccacgtcactacatttctatgcaaggggacagcaaggcagcgtggtggtcatggctcttagctaacctattcaaagaccttttcctgttgattaatctattttcatatttataaaggagtcttaatgttctgccccataagactttcaaccttgtggttgggagtggggctggttttgtaggccctagggcctgcttctatgtatttatcaacatgtgatacattcaattggttaaatggtttatacagggactgatttgcttcccttcctgccctggctgggagctttggggaacagtctgtcccttacagagctgcaataagaaataaccaaagatgaagctggtcaaatattttcataacttgacttctgttgattttttttttttgtaaaactttcccaaggacattttcagacttaaaaataaagtcagtgttacaggtgctggtcagccttcttacttgtacctcaaacactgggataaaggaggcggtccagggcaatgcagtgatgtctgtcaagacattccccctcccctaaactcagtagcagttgaggatgacatttcaggctagagagacccaaaatacctctgttccacctgagagcaaggtgggaagttgcatcagctacttgccccaagtgagcttcatcttctggattgtggggctttgggagggaacgaggaggaactgggctcttggggccactgtgaggggtacagctttgcccactcaaatataccttattgtggcattcagggagccagggtccagagctgcagggctgcggtccctggctcacttccacataggccatcacataacctgtcataaaggcatcaaaaccagcccggtgcaatccatccccaggcactgggttaggactggcttggctccctggcacttctgaggtagctctatcagctatttcaggccttgctgccttaatccccatctctaagtcatttttgttgccttgcttggagtgaggcaggttcctagtttcatcggcagccacctcctgctcggtttcttcaggcttgatgctatccccacagacctgcttcttgggaggaccatccttagcttccccagaggtctgtgtccccggtaggttcaataaagccctcttccgtttttccctacgtcgtcgccgtcgccgcttgtcctctgccgcagcctcatcagtgtcaatgataaggtcaatatcgtgagactgaggacactgtggtcccagggggcaccagccataagccgagaagttgtcacagatgctggtgggatgaggacggtgggttgctgggggcaggcagcagcggtaatcaatatggtccctcatgctggaaggatagttgcagaactccagggtaaggtgtgggctgccagctgcccgctgcttcccattttcccgttcactgcaacagcgcaagagggtaatggtccactagcatataagctccataagagcagggttttgtggtctgttttgttcactgctgaatcctcagcacctaaaacactgcctgggcacatggtaggagctcaataaat

SEQ ID NO: 75676 - DNA, 2506 bp, Homo sapiens; identical to SEQ ID NO: 61103

SEQ ID NO: 75677 - DNA, 1919 bp, Homo sapiens; identical to SEQ ID NO: 61104

SEQ ID NO: 75678 - DNA, 2162 bp, Homo sapiens; identical to SEQ ID NO: 61105

SEQ ID NO: 75679 - DNA, 2081 bp, Homo sapiens; identical to SEQ ID NO: 61107

SEQ ID NO: 75680 - DNA, 1722 bp, Homo sapiens; identical to SEQ ID NO: 61108

SEQ ID NO: 75681 - DNA, 3549 bp, Homo sapiens
  misc_feature (1)...(3549): n = a,t,c or g
gcggccgcgtcgccgctgaggatgtcccgaaaggggccgcgagcggaggtgtgtgcggactgcagcgccccggaccctggctgggcatccatcagcaggggtgtgctggtgtgtgacgagtgctgcagcgtgcaccggagcctgggacgccacatctccattgtcaagcaccttcgccacagcgcctggcctcccacgctgctgcagatggtgcacacgcttgccagcaacggggccaactccatctgggagcactccctgctggaccccgcacaagtgcagagcgggccggcgttaaagcaaacccccaaggacaaagttccaccccatcaagtcagagttcatcagggccaagtaccagatgctggcatttgtgcacaagcttccctgccgggacgatgatggagtcaccgccaaagacctcagcaagcaactacactcgagcgtgcggacaggcaacctggagacatgtctgcgcctgctctccctgggtgcccaggccaacttcttccacccagagaagggcaccacacctctgcacgtggctgccaaggcaggacagacactgcaggccgagctgcttgtagtgtatggggctgaccctggctcccctgatgttaatggccgcacacccattgactatgccaggcaggcggggcaccatgagctggcggaaaggctggttgagtgccaatatgagctcactgaccggctggccttctacctctgtggacgcaagccggatcacaagaatgggcattacatcatcccacagatggctgacagccttgacttatccgaattggccaaagctgctaagaagaagctgcaggcgctcagcaaccggctttttgaggaactcgccatggacgtgtatgacgaggtggatcgaagagaaaatgatgcagtgtggctggctacccaaaaccacagcactctggtgacagagcgcagtgctgtgcccttcctgcctgttaacccggaatactcagccacgcggaatcaggggcgacaaaagctggcccgctttaatgcccgagagtttgccaccttgatcatcgacattctcagtgaggccaagcggagacagcagggcaagagcctgagcagccccacagacaacctcgagctgtctctgcggagccagagtgacctcgacgaccaacacgactacgacagcgtggcctctgacgaggacacagaccaggagcccctgcgcagcaccggcgccactcggagcaaccgggcccggagcatggactcctcggacttgtctgacggggctgtgacgctgcaggagtacctggagctgaagaaggccctggctacatcggaggcaaaggtgcagcagctcatgaaggtcaacagtagcctgagcgacgagctccggaggctgcagcgagagatccacaagctgcaggcggagaacctgcagctccggcagcctccagggccggtgcccacacctccactccccagtgaacgggcggaacacacacccatggcgccaggcgggagcacacaccgcagggatcgccaggccttttccatgtatgaacctggctctgccctgaagccctttgggggcccccctggggacgagctcactacgcggctgcagcctttccacagcactgagctagaggacgacgccatctattcagtgcacgtccctgctggcctttaccggatccggaaaggggtgtctgcctcagctgtgcccttcactccctcctccccgctgctgtcctgctcccaggagggaagccgccacacgagcaagctttcccgccacggcagtggagccgacagtgactatgagaacacgcaaagtggggacccactgctggggctggaagggaagaggtttctagagctgggcaaagaggaagacttccacccagagctggaaagcctggatggagacctagatcctgggcttcccagcacagaggatgtcatcttgaagacagagcaggtcaccaagaacattcaggaactgttgcgggcagcccaggagttcaagcatgacagcttcgtgccctgctcagagaagatccatttggctgtgaccgagatggcctccctcttcccaaagaggccagccctggagccagtgcggagctcactgcggctgctcaacgccagcgcctaccggctgcagagtgagtgccggaagacagtgcccccagagcccggcgccccagtggacttccagctgctgactcagcaggtgatccagtgcgcctatgacatcgccaaggctgccaagcagctggtcaccatcaccacccgagagaagaagcagtgacctctctccccacaccctcacctgcaccctaggacctcactggccataggagctgggccactccagacattaatccccaccccaacagagccactggcacaagtgcccttagtgctgccacactccctggcagccaggtgccctggtgcccacccctgtcgagcccctaaggatggggaggtgggggggcaggagcttctgtcccccacattccatgcacctcccctctgtatatagcatctcccccctcctagtgagcaggggcctgcaaggcatcactcccagcccctcgccttctagggcaccctcagcaaaggggcaggtggggacactccaagtggggcagctctccgtacatgcgccccacccccatgagccagttcagccctactgggggctgagcgggggcatcccctcctttgtacatagtctccatggatgtccctgccctgtagccaccagccccttgctgctctccctttaatgccatatggcccctgcctagggcacaggccccaacctgtgtgctggggtccccagcagcaaacactggaaagtctgttttttttttttctttcttcttccccaccccttaattttaactttgtggtaactgagtgcccccgcgtgcctgcgtgttgagtgtgtggggcggcagtgccgttccggaggcctgggtccatgtgggagttttgaggggtgaggggaccagagcagtgggaccagcatggggatcagcttcccttccccacctggagccagggactgtccgggtagccagttttggtcctgccagctgcctccctgatccctccccactctcgccccttctctatgaacttaaatcaaaaaccacttccctccatctcctcctgctcctgcgtggagggggaatgtgtgctggctagggtggaggactgagcacctgagcctggggctggctccccggggtccccgactcagctggtggctgtggagctgagtcccctccccgtaacctctgcaaggccagcacccaccatcactacctgcacctgctgtggtcccaccctctggaggcctgggaacctggctgcagcctgggaaggctggagaggcagacggtgggancccaccagctctctccccatcccgcttcttccctgggggccagggccctacctgtgtggtggtgggtgggctgtcaagacgtgtcatgtacatttgtatcaaaaataaagaagtggccatgaaaaaaa

SEQ ID NO: 75682 - DNA, 2326 bp, Homo sapiens; identical to SEQ ID NO: 61110

SEQ ID NO: 75683 - DNA, 629 bp, Homo sapiens; identical to SEQ ID NO: 61111

SEQ ID NO: 75684 - DNA, 3270 bp, Homo sapiens; identical to SEQ ID NO: 61112

SEQ ID NO: 75685 - DNA, 4454 bp, Homo sapiens; identical to SEQ ID NO: 61113

SEQ ID NO: 75686 - DNA, 1839 bp, Homo sapiens; identical to SEQ ID NO: 61114

SEQ ID NO: 75687 - DNA, 2542 bp, Homo sapiens; identical to SEQ ID NO: 61115

SEQ ID NO: 75688 - DNA, 3137 bp, Homo sapiens
ttttttttttttgccacacacagcactgggtggacttttattttaaagtcaaaggcacagcctggctgggctgaggcagtgaccatggatgcccagcccagacccccaaggccccacccccagccaggagtagctgtgccaaagaggaaggggtgggtgagaagatggcctcctcttttaggagccacctatctccttccttagccccaacaggggagaagcagatgacataaagtgaggcagaaatgcttcagagggtcccccagggcctctccttcagtacccccaacacgggtctttggtggacgtaattgcacagacagtccataaagtgacagttgaggggtgcccctcccaggaacggggcctcaggggagaacagggtagggggtcccagtttaggagttagcactcctaactcagtgcttagaagtgggggaggggctctttcctgttggagcagtccccctggaggggccttctgcccagaagaggcagtgtcctgggagagggccccccaaaccccactccccagcaggcccccccttccctgcaactctatctggtaagacataaaaaattctctgcttataaaaatacttctgctctgtctgggagtggggtggggtaggagaggaaaggacagtcccttggggattctggtcagccgcaggcagaggcctccgggagtgagccgggctcccaggtcacagcccctatgagggaagggggtcacagtggtggggattaggaggggggcagggggccgttggctcggcggggggcccctttggaggcgacgggggctcggcccgggttggctggtgcaggggagccccggcgggaggcggtggcgctccgcagcttctgcttccgccgcttggccaggggtgcattctccacgctcttcaggaagaagccctcccgcttgccccggttgaatgccatgaaggtggcgttgagacccgagcgcactgcgggcccagaggactcgagcacgtcgggcgtccggagcgggggcgaggagcgcgcgctgccgtcctgcagccacgagctgccccgcagtccctcgagtttcagccgcttggcggggtccacggtcaggagccctcggaccagctccttggcttcctcggatacaccctgccaggcctccccgtcaagggagaagcgcccctcgcggattttgcacatgatctcggccgcctggctctgcccgccctggccagaggccccctggaagcggacctgccccgacagcatcatggtacagaatgacgcgcaggctccagaggtcgcaggactcgtcgtatcgctgctgcgccagcagctcgggggcagcgtactgcagcgtgaagcagggcgtctgcatgggcaccccgggactctgcggccggaaccgcggcgagacccgaagtcgatgattttcaccggggccccggctgtgtcgtcggcgtacacgatgttctccggcttgaggtcgcggtgcaccacgcccgcctcctcgtgcatgaagctcacggccgacacgaggctgcgcaggatctggcttgcttccgactcgctgaagtgccgcttcttggcgaatgtgctccagcagctccccgccccgcagcagctccaggaccaggtacgtgtgcagctggtcgtgatgcacctcgtgcagattcaccacgttggggtgtgactggcacaggcgcagggcagccacttcgcgctgcgtgttcgcctccagcctgcgactgaggatcttgactgcgaactcctggccgctctggcgctggcggcagcggcgacacacagaaaagctgccctggcccagcgcaggctcccgcaggtccagctcgtactgctggaagaagggcgagtcctgcatcatagcgctcctggccaccgctgcccgacctggccggtctccagcaccaggcgcttccagcccatcggtcatcaccgcgttgttgtggtcaaagagaatggagggtgccacaaaggagtatccctgaaagattcgggggtccccaggtgggggtctgtccagggggtgagtagacaggctccagccgagtgaattcctccgcaaagtttgcccacatccagctctgagcggatttggggccggaatggggctggaatcttcctggcagccagagccacccaatcgaggccctggaagaagggatggttccggacttcttgtgccccctggggccccgcgcccaatcgcttcttaggatccttacaaagcagccgctgcagcaggtcctgcgccacgggcccgatccgaggggggaagggaggggagcacttcaggatccgtcgagacacctcagcctgcgtgttcctctcgccctccagggtgaagggcgaggcccccgtcagcagctcgaagagcaagatgcccaggctccaccagtccacagccttgccatgccccgtcttgctacggatgatttcgggggccatgtactcgatggtgccacagaaggagaaggtccgctctttctcctccgtcaggaactccttgctcagcccgaagtccgtgaggacaatgtggccctcggagtccagcagcacattctccagtttcaggtctcggtaaatgatgccgagcttgtgcaggtgttccagggccagcacgatctctcctccatacacgcgcccctcagcctccttgaagtactggcgctggtagaggtggcccaccatctccccgccgctcacatagtccaggatgaggtgcagcttggcatccgtctggaaagcgtagtgcagcgtgaccaggaagggcgcctggcgcaccagctccagcaccgagcgctcggtgcgcgtgtgctcctgcgtcttggcgcgctgcaccagcgccgccttgcgcagcaccttcatggcgtacagcttccccgcgtcgtgcccgcccgccttccgcaccaggaacaccttgccgtaggctcccgtgcccagcaccttgagcagctcgaagttctccacgctcaccttctcctcgtgcccggtcaggttggcttctgtgatccgcagctccacggcgcagctctcatcgtcgtcctcgtcccccatggcgggcgggtcgctggggcccgcgcggctcgggctccgggcggcgccggttacatggcggctcc

SEQ ID NO: 75689 - DNA, 2275 bp, Homo sapiens
ttttttttttttacacatcaacagttgttcagaaagggaccagcagatagctgccccggctcctctaaggaagagcaggcagcttccccccgaatctacatgtgcgtgtgctcggggagaggaaggctggcggtcaggaaggcccatctcccagcctgatcccaggcagcagggctgcaggagctgggcaggaaggctctgggccggccatagccacctgccagcaagggcaggcttctcttctcatggctggggcagctcggcacagctgacctctgctggccaagtgaagcactgcatgcagccacagagccaggcacagctgtcttccgaagtttcccgactcctgatgttttggggattcaaatagtccttttcatatgctggaggcacaaactggggcagctaaaatttttattctgttgtcaaggggcaagatgccagcttggaagtgccaaggagctaaagggcccagcactgccggccccagaactgtctgttcaggctgtgcagtaagcaccagagcctcgcctgtccacgaagggtgtaagcctgtgctccacaatgtgctcagctccagagaggcccaacaacctcaggagggcttggctgtgggtctgaatttctttcctttgtgcttgaagctgcgcagtgggttctgggactttgctctcttggccttcctacaagaggaagacagcttcttccgcttcttgtgagggcgcaccaggccacggagagcaggaggaaccaggtagtcaggaacatggcccaggtggggcttcaccactgcggggtgcaaaggtaggtcatgccgcagcagctggaggtcccctagggttgtcttcaaagtatgtcttaagcttctcagaatgcagaagctcttccttgatctccttcaatcttgcctcccgaatggcctgcttagtcactgagcgcatggcatccctgcagcgatagcggaagccctcgatctcctccatccggaactggtaggggagcagaatggggcccctgttctctccactgagaagctcctcaatcttgcctaagtggaactgctccgtgggaagcacaaaggttaagactatgcctgggttgttagcgcgtgctgtcctgccagctcgatggatgtaggcctcaggggttgggggaagatcaaagttgagcacagcagacacatggtggaagtctatgccccgggccacacctgcttccggatcagaggccttgtcccctttgggccctcggccccgacgcttgcccttgactggggcccccaggacttcagcatcagttgctatgacacagtcgtagaagccttggttgaactgtgagatgatgtggcacctggagcgcagtggaagctctccattgagcacacaggtggggatgctgaactgttccaagaacaggcgtagccggtaactccgttctagagtgttgacaaagagcagagacttgccccgaatcaatgacagcttgagcagggcatacagcaggaggaatttgtcttcctcagtctcacagaccacctgaaactgctgtaactggtctggcccaggcagctgggactcctgtaacttaagggtaaccgggttatgtaatatcagctccttgagtgcttgtacgtcctcgttaaaagtagctgacatgagaaaagcctggtaaatccggggcaagtgacagaggagactcttgagctcttcttcaaagccaaaggaaaaaagaaggtcagcttcgtccaccaccaaaagctccagggagtcacgaagtttcaggctgtcttgctgcaagtggcttaatatgcgagatggggtccctactaccacatctggcttctccatcagcacagctctctgagagactgagtcttcagcagctgagacattggccactcggacatcccgagcacagtaggtagccagctgctgaatcatggactgtgcttgccgtgccagctccttggtaggaacaagaacaaggcctctcactgcctgttctaccaccggacctgtcgccttcctatggagcaacagctgcagcatcggaatagcataagcggccgtcttcccggagcccgtgcgggcccgagccaggaggtccttcccttctagggccagtgggatggccttctcctggatcagcgtaggtcgcgaccagcccagatcggtgacagcctgaaggagccggggatcgaggcccatgtgttcgaagcccagtgcttcagagtcctccatggcgctgctcagtagcgcagcacgcacgcgctgca

SEQ ID NO: 75690 - DNA, 2726 bp, Homo sapiens; identical to SEQ ID NO: 61118

SEQ ID NO: 75691 - DNA, 2642 bp, Homo sapiens; identical to SEQ ID NO: 61119
  misc_feature (1)...(2642): n = a,t,c or g

SEQ ID NO: 75692 - DNA, 2306 bp, Homo sapiens; identical to SEQ ID NO: 61120

SEQ ID NO: 75693 - DNA, 2327 bp, Homo sapiens; identical to SEQ ID NO: 61121

SEQ ID NO: 75694 - DNA, 4091 bp, Homo sapiens
attctttggaatactactgctagaagtctgacttaagacccagcttatgggccacatggcacccagctgcttctgcagagaaggcaggccactgatgggtacagcaaagtgtggtgctgctggccaagccaaagacccgtgtaggatgactgggcctctgccccttgtgggtgttgccactgtgcttgagtgcctggtgaagaatgtgatgggatcactagcatgtctgcggagagcggccctgggacgagattgagaaatctgccagtaatgggggatggactagaaacttcccaaatgtctacaacacaggcccaggcccaaccccagccagccaacgcagccagcaccaaccccccgcccccagagacctccaaccctaacaagcccaagaggcagaccaaccaactgcaatacctgctcagagtggtgctcaagacactatggaaacaccagtttgcatggcctttccagcagcctgtggatgccgtcaagctgaacctccctgattactataagatcattaaaacgcctatggatatgggaacaataaagaagcgcttggaaaacaactattactggaatgctcaggaatgtatccaggacttcaacactatgtttacaaattgttacatctacaacaagcctggagatgacatagtcttaatggcagaagctctggaaaagctcttcttgcaaaaaataaatgagctacccacagaagaaaccgagatcatgatagtccaggcaaaaggaagaggacgtgggaggaaagaaacagggacagcaaaacctggcgtttccacggtaccaaacacaactcaagcatcgactcctccgcagacccagacccctcagccgaatcctcctcctgtgcaggccacgcctcaccccttccctgccgtcaccccggacctcatcgtccagacccctgtcatgacagtggtgcctccccagccactgcagacgcccccgccagtgcccccccagccacaacccccacccgctccagctccccagcccgtacagagccacccacccatcatcgcggccaccccacagcctgtgaagacaaagaagggagtgaagaggaaagcagacaccaccacccccaccaccattgaccccattcacgagccaccctcgctgcccccggagcccaagaccaccaagctgggccagcggcgggagagcagccggcctgtgaaacctccaaagaaggacgtgcccgactctcagcagcacccagcaccagagaagagcagcaaggtctcggagcagctcaagtgctgcagcggcatcctcaaggagatgtttgccaagaagcacgccgcctacgcctggcccttctacaagcctgtggacgtggaggcactgggcctacacgactactgtgacatcatcaagcaccccatggacatgagcacaatcaagtctaaactggaggcccgtgagtaccgtgatgctcaggagtttggtgctgacgtccgattgatgttctccaactgctataagtacaaccctcctgaccatgaggtggtggccatggcccgcaagctccaggatgtgttcgaaatgcgctttgccaagatgccggacgagcctgaggagccagtggtggccgtgtcctccccggcagtgccccctcccaccaaggttgtggccccgccctcatccagcgacagcagcagcgatagctcctcggacagtgacagttcgactgatgactctgaggaggagcgagcccagcggctggctgagctccaggagcagctcaaagccgtgcacgagcagcttgcagccctctctcagccccagcagaacaaaccaaagaaaaaggagaaagacaagaaggaaaagaaaaaagaaaagcacaaaaggaaagaggaagtggaagagaataaaaaaagcaaagccaaggaacctcctcctaaaaagacgaagaaaaataatagcagcaacagcaatgtgagcaagaaggagccagcgcccatgaagagcaagccccctcccacgtatgagtcggaggaagaggacaagtgcaagcctatgtcctatgaggagaagcggcagctcagcttggacatcaacaagctccccggcgagaagctgggccgcgtggtgcacatcatccagtcacgggagccctccctgaagaattccaaccccgacgagattgaaatcgactttgagaccctgaagccgtccacactgcgtgagctggagcgctatgtcacctcctgtttgcggaagaaaaggaaacctcaaggtctgagaaagttgatgtgattgccggctcctccaagatgaagggcttctcgtcctcagagtcggagagctccagtgagtccagctcctctgacagcgaagactccgaaacaggtcctgcctaatcattggacacggactcttaataaaacggtcttcagttccagattccttcccagcaagctatagcttaagtccattttcttccgtgaaagggacaggactccatcaagttatggaattcctcagagccctgggcctgtcccccggggtggattagtcatgtccagcagcacacgcctagtcccgccttcgggaaggctgcctgcctggccagccgcccaggtctctctgtgtaaagactgcctgggctgtcctgcccagccttcctggttctctggggtcctctgggtgggtggcatctcctggagggtgatgacaatccccaacacatgcattcatgtggtgctactctgtgtgccaaagctaagaccccaagtatgttttctctctttgtcccatccctctttttctgggactttggaccctaactacttccctcctgaaccttgcagtgacatcagtccaggagagctctcgttcagtgtgcggaagaacactctgacctctagagctgtcctagataaggagtgggagctttagaggcaaggcctctagaccctggaaggctcagtgaggctcttcccacagcatgcttctcactggtgccctgtaaggctcgagccaccgctgactctgagccttttggagtctttcctccttcgtctccattgttcccgtgcatttccaaaagcttaagttgcctggtgggcatttccccagtttctttggcctccgtcttctcaagtcacatagggaaagtacctcctggaaccaggctgcagtatgcaggacctgccaggcaggcactggtgaagggccttgggcctatcatccccccaaccccacctcaccccacccgcctcctctagtggggtgagtctgggctggtggaccagagagggtgtcacagaccctcagggactgccccatggacacctctgactggtgttaacagtgtgaacattttccccgtcttcagtcccttagaatgacgacagcccctggggttggggcaggcgagtgtggccacatcatccaagccctcccagagacacaaataggcttttttgctctaaaaataaataccagcccttttttggtcacaaatccagcatctcagcagaaaactgcctgacatgaaaagtcccctgaggaactgcatctgcgtttcaggggcttttcattttttctccttttttaaagtgtagattgtgggtgcttcctagaggcctgccttcttctggaactggaagtgggctatcaccatgggcaagcccttgggtgcaggctccccacctgcctgggaactctggcagctctcctcagctccttgggcttgagcagctgcaactgccccagatttgctgtggaagcaggggctagccctggcctcaccagggcctcccggggccctgcattgatgctcaggagttcctgggctgctcttgatcctttctgggcatccagcttccagttaagctctgtttgccaaacaaactattctcagctgccctttggcctgcgcctgatgtgttcctgttgcagtcccgcctgcctgagacaggagcaggcaggagagccttcatgcccagattcccacaggacaattggggagctgctggcattgtctttctgggaagattctgctttcttggaccaaatggcagcctgattacccagtgtcgggcctgcatgctgcc

SEQ ID NO: 75695 - DNA, 701 bp, Homo sapiens; identical to SEQ ID NO: 61123

SEQ ID NO: 75696 - DNA, 2217 bp, Homo sapiens; identical to SEQ ID NO: 61125

SEQ ID NO: 75697 - DNA, 3167 bp, Homo sapiens; identical to SEQ ID NO: 61126
  misc_feature (1)...(3167): n = a,t,c or g

SEQ ID NO: 75698 - DNA, 800 bp, Homo sapiens; identical to SEQ ID NO: 61127

SEQ ID NO: 75699 - DNA, 2495 bp, Homo sapiens
ggccttgctgagtttctctaggggcaggtagcacacacctgccttatgtcatgtgtttggaaaaacttttgtctcctcataactccagcacagctcagagatgggaaggcgactttttatattaacctgaggagggtattaaatgaagaaggcaatccagacaagtggctatttcctcctagctttggctctggggacaccttggcatcctgggtgacatggtaggttacagagccgctaaaatgggcatgggcagacacactgatccaatactaagagttcagctgtagcgtccggtgtttcatgatactcacttgtcttcctcccttgcaacccagccatttcatgggaccaacgggccaccacagggcatgggatcagatctcaacacattctgcaggcccttgtcgaaattcttccctagttcactagtgggagagggattgggtgtggttgccaaagaaataaaagcgttgaaatttcaatagaaatgccataatttattccattgtataaaaaagtcatccttatgtaacaaaatgtcttcttagaagaagaaatatattatttcaggtcataaataatcagcaaacatacaactgttggcaactaaaaaaaaacccaacactggtattttccatcagtgctgaaaacaaacctgcttaagatatatttacaggatagtacagtactcaaaaacaaaaattgaggtatttggttcttctaggagtagacaatgacatttgtgaaggcagacacctacacaaaaataaataaggtatattctcatatgtatatgtgtcgtcgggaataatactggtaggtatgtcaagcatgaagagattctacaaaaaacaggggcgagcaaaaagaaaccggatcacacactgagtcctttctcttctgccccattttgtcagatggacttgatgtacccactatatattggtcccgaatgtgctgagttcagcaaatgtcttgacgctaagtcatcaccataactgcttagaaacccagaggaactcgggtgaagttaaataaataaggaccagccctctcgagcccctcccagagttattgcatttctcctctcaaggagcatggagtcccaatgggatgtgaagagcctcacctcccgtggcctttcagcagctgggagaggtcgtaatggggctctgaaggtagctcagcgcactgttcgtggagtggacagggatggagacggggaagttgaacacggtggtggtggaggtgcctcggtcgagcacagccatggcggggctcccagcctctgccgaacagtgcggagccagcacctgggactcaaactgcagcagctggcccatgaagctgaagttgggagagatgatgcttcgcctctgcttcacaaactcaaaggcctcgtccagcttgactcgattagtcctcataaggtaagcaaggcagatggtggctgaccgggaaatgcctgcctggcagtggacaaacacccttcctccagcattcttgatggagtctatgaagtcaatggcctcgttgaaccaggagctgatgtctgccttgtggttgtcctccacagggatgctcttgtactggtagtgaccctcaaaatggttgggacaattggctgagacgttgatcaaggcagttatgcccaaggcatccagcatgtccttgcgggaagcgtgatacgcactgcccaggtacagaaagggcaggatttccaccgggccaccctgatcgtagagtggggtactgcaggaactgcacccagattccgcgctgtcagggacgctagtactcaggggaaggctgagccccatgggggtcgactgtttgctgcacagctccgggcaggaagccgaaaacgcttcgtatcctcctttgaggaagaagacttgcgcggcgcgcgcctcgcggcagagcgcgccggccgccagggccagggtgccgtcgcgcttggcgccgtccagggcggcgctgcgctcgtccagcaacaccacggcgtggtaggcgccggccagcaggcggcgcgcggagctcggcgtttgggcaacgatgtgcttccaaggccccaatggcgccctttggccccggcggccgcaacgatggtgctgaagcgcacgttgacagagccggcgatgtggccggcgttgaaagcgaagaaggagcggcagtccagcagcaggcattgcgccgctcgctcccccagcagcgcccgcaggcctccagcgtccagggtgcccacttccatgaccatggccggcctcagcgcccccagcgtgatcggccctgcggtgctctttgtctgttctcggggccaagggcagggcggcgcttttcgaggaaaagctagacccccgggtctctctgcgccgaaccaaaagccgcttttggactgagagaggagcgtcacgcggggctccgggctcctcggcttcttcgcggttcccccgactgcccctccgacccgcgtcgcacacacagcccaaatg

SEQ ID NO: 75700 - DNA, 5022 bp, Homo sapiens; identical to SEQ ID NO: 61129

SEQ ID NO: 75701 - DNA, 1108 bp, Homo sapiens; identical to SEQ ID NO: 61130
  misc_feature (1)...(1108): n = a,t,c or g

SEQ ID NO: 75702 - DNA, 4946 bp, Homo sapiens
gcatgattccagcagggggccgagcccctgggcccccctacagccctgttcctgcagaatcagaaagtctggtaaatgggaaccacaccccacagactgcaacacggggaccctctgcctgtgccagccacagttccctggtgagctctattgagaaggacctgcaagagatcatggactcactggtgctagaggagcctggagctgctggcaagaagcctgccgcaacctctccactgtcaccgatggctaatggtgggcgctacctgctgtctcccccaaccagccccggcgccatgtctgtgggctccagctatgagaacacctctccagccttctctccactctcttcaccagccagcagtggaagctgtgccagtcactcacccagtgggcaagagccaggaccttctgtgcccccgctggtacctgcccgttcctccagctaccatctggccctacagcccccacagtcccgcccaagtggtgctcgctccgagagtcctcggctgagcaggaaagggggccatgagaggcctcccagccctggcctccggggtctgctgacagacagccctgcagctactgtcttggcggaggcccggagagccactgagagcccccggctgggtgggcagctgcctgtggtggccatcagcctgagtgaatacccagcttctggtgctctcagtcaacccaccagcattcctggcagccccaagtttcagcctccagtccctgctccccgaaacaagattggcacactccaggaccgccctcccagccctttccgtgagcctccaggcagtgagcgggtgctaacaaccagcccctcacgccaactggtgggccgaacattttcagatgggttagccacccgtaccctgcagcctcctgagagtccccgcctgggccggcggggcctggacagtatgcgagaactaccccccttaagtccatctctgtcccggcgagctctctccccgctgcccacccggaccaccccagatcccaagctaaacagggaagtggcagagagtcctcggccccggcgctgggcagcccatggggcttcaccagaggacttctccctgacgctgggggcacggggccgtaggacacggagcccctcacccacactgggtgagtctctggcaccccacaagggcagcttcagtggcaggctgagcccagcctacagtctgggctctcttactggggcttcaccctgccagagtccctgtgtccagaggaagctctccagcggggacttgcgggtgcctgtcacaagggagcggaaaaatagcatcacagagatcagtgacaatgaggacgacctcctggagtaccaccggcgacagcgccaagagcggctccgggagcaggagatggagaggctggaacgccagcgcctggagaccatcctgaacctgtgtgccgaatacagccgggctgatgggggacctgaggctggggagcttcccagcattggggaggccaccgcagcattggcactggcaggccggaggccctcacgaggccttgcaggggcctctgggcggagcagcgaggagcctggcgttgccacccaacgcctatgggagagtatggagcgctcagatgaggaaaatctcaaggaggagtgcagcagcactgagagcacccagcaggagcacgaagatgcacctagcaccaagctccagggagaggtgctagccctggaagaagagcgggctcaggtgctggggcacgtggagcagctcaaggtccgtgtgaaggagctagagcagcagctgcaggagtcagcccgagaggccgaaatggagcgggcactgctgcagggagagagggaggcagagcgggcactgctgcagaaggagcagaaggcagtggatcagctgcaggagaagctggtggccttggagacaggcatccagaaggagagggacaaggaggcagaggccctggagactgagacaaagctctttgaggacttggagttccagcagttggagcgggagagccgcgtggaggaggagcgcgagctggccggccaggggctgctccggagcaaggctgagctgctccgcagcatcgccaagaggaaggagcgcctggccatcctggacagtcaggctgggcagatccgggctcaggccgtgcaggagtcagaacgcctggcccgggacaagaatgcctccttacagctgctgcaaaaggagaaggagaagctgactgtgctggaaaggagataccactcactcacagggggcaggcctttcccgaagaccacatcgaccctcaaagagatggagaagctgctgctccctgctgtagacttagagcagtggtaccaggagctgatggccgggctggggactggccccgctgcagcctcccctcactcttctcccccgcctctgcccgccaaagcttcccgtcagctgcaggtttaccgctccaagatggatggcgaggccaccagcccccttccccggacccgcagcggccccctcccctcctcctctggctcttcctcctcctcctcccagctcagcgtggctaccctggggcgtagcccctccccaaagagcgctctactcacccagaatggcacgggcagccttcctcgcaacctggcagccacactgcaggacatcgagaccaagcgccaactagctctgcagcagaagggacaacaagtgattgaagagcagcggcggcgactggctgagctgaagcagaaagcggcagctgaggcacagtgccagtgggatgcccttcacggggcagcacccttcccagcgggcccctcgggcttcccccctctcatgcaccactctatcctacaccacctgcctgcggggcgggagcgtggggaggagggtgagcacgcctatgatacgctgagtctggagagctctgacagcatggagaccagcatctccaccgggggcaactcggcctgctcccctgacaacatgtccagcgcgagtggtctggacatggggaagatcgaggagatggagaagatgctgaaagaggctcatgcagagaagaaccggctcatggagtcgagggagcgggagatggagctgcggcggcaggccctggaggaggagcggcggaggcgtgagcaggtagaacggaggctgcagagtgagagtgcccggaggcagcagctggtcgagaaggaggtcaagatgcgggagaaacaattttcccaggcacgacccctgacccgctacctgccaatccggaaggaggactttgacctgaagacacatattgagtcatcgggccatggtgttgatacctgcctgcacgtggtgctcagcagcaaggtctgccgtggctacttggtcaagatgggcggcaagattaaatcatggaagaagcgctggtttgtcttcgaccggctcaagcgcaccctttcctattatgtggacaagcatgagacgaagctgaagggagtcatctatttccaggccattgaggaagtgtactacgaccacctgcgcagatgcagccaagaagaggtttttccgcttcactatggtgactgagagcccgaacccagccctcaccttctgcgtaaagacccatgaccggctgtactacatggtggccccatctgcagaggccatgcgtatctggatggatgtcattgtcacaggggctgagggctacactcagttcatgaactaactgccgtgggcctcctggcagagcacaactggggcttttgtataagaagacttaaatattctgtaaggagcttggtcctgtgagtttctgggctatggcctcatgaagaaccagccagaagaagaaaagtagaggtggctttgctgcctcctgggagcccagaacttgcagtaaccctttaggtccctgcccccaggcccagccagggctggaggagctgtcacagagagggcctcagctctgacctgacacctggctcttccccagcctgttttcttcttttcttaaaagacaattatgggtaccataagctgccaaagatcccctcctgcctcagacccctttgccaggggcttttgggggctgagaagaggcacatacagagtggggtaatagctcaggcggcccgcttcccatttctcaaaccccgctctgccccattgttctcctttcccttatactttttatttaccttgctcaaggggccagaggattttcaagtgttcaaccttggagggtcccagctccatcccctagttgcagactcatcaccatggttaccatagtgactgcttcattgccatggttacatactaattgctgcagctctgtggcccagcccactgcttcagctgtgcgcgagtctgaggggacgttgcaaccatctcccaagcccaggcccctgggcatcatcatgctggggggaagggacttgaatacctttttccttcccccgtgccatgtgtcttcagccctgatgcacaaggctgccagccccccacgtccaggcctctcccttccactggtgccttgcttaagagccaagaagggaatgaagccgggggatctatggaacagaggaggagcgatgcagttgggagaggaagctaagaagggttatggttggagttcttgtacagtgttgagtttccgacagggaatagaggattcctccaatgctcccaagagagaaagcctgagcaggagatgatgcagcagaggggaagggccctgtggttgccgccgcccttccttcagcctccgaaggttgatggaaatggagagtggaggaccaggcctccagctgtctggcctcgcccttcacgccttaacactaagcccacctcccctgctctccttcccagcattgagcccttggttgcctgggcccaggctgggggttttcagtatttgtaagcatttcagcagaacaataaagcctttggactacggaagtg

SEQ ID NO: 75703 - DNA, 2389 bp, Homo sapiens; identical to SEQ ID NO: 61131

SEQ ID NO: 75704 - DNA, 3165 bp, Homo sapiens; identical to SEQ ID NO: 61132

SEQ ID NO: 75705 - DNA, 2148 bp, Homo sapiens; identical to SEQ ID NO: 60930

SEQ ID NO: 75706 - DNA, 2127 bp, Homo sapiens
ttttttttttttatttctgaaatgtttcttttaatcaatacatattaagtatataatttccttaaaaattaacaaataactctgattttcactgttaggacactgttacagagaaggaaacatattgctcttctaacttttcttctttttacatttatccacattccaagtagattatcatagtaaggttcttctgtgttacttttgtccaagttgtgacaactgttttatgaactgtgtagcattaaaaagctcactgcagccatataaaatgtgtttgccttgtttcccctttatgtagtcaacaagattctgatattcaatgtagttgcctcctcccaccacaaaaacaatggcctcttggaatggatttttatttctgggaactgagctgtcattgccccgcagcattttgggatcaaaatatctatagtcatcagtttcggggtttgacttcatctccataagattgtccaaaatacgagtaacaggtagattttgctgtttcaaaaccaggttcttcactccttccatcacaaactgtgatcctgtattcatgactcgtgataaaagacccattggtttagtggtagtgctgccatagctggccggagctgaggccatcttggtaaaagccttccactgtttgatatattgtaaaggattaaggttgcatcctgcatcagttaaagcttttttatattgctccaaatcagcctcagaaggtgcttgctgtgtgcttatataatagataagaaacaacctcattttatcttctggagttcctgcatcagggtctgatattatatctagaagagatttatccagagtagttttgctcattattttttcttcatattcaaaatatacatccaattttcttgcctttatatgttctaaaacagcagtggcaacatttgtatggagatcaataagtctttttttctcaaggagttctgagcaaagaactaacagctgatgttagcttagcggtattgtcagaaagcatacttatggctccttcatcttccccttctagtcccataatgcttttaagtcgtttgacctcatcttcctgtgctctgtaagattctagttcttgctgaactgattctgcaacttctgggaatggacttcctttatgtttttgccaaaatttatcaaccggagttaaatcataagacttcttgttttttctctttggtctagcaccagctggagagttttccactcctgaagattcttccaaattaaccctgtttaaatggaaatccagtacatcgtgcaccaatgcttgatatgtccaagtatgatgtaaaggagttgccaaatctatgtttctgtcaacaaggactaataagggcctctggaagctgaattggccagctccaagtgtatcacctgtaaaaagactgtttcttgcatctcttagattttctcgaagtttcttgtctagtttcactgctaccatttctgctgctgttcctcttgaacatctgattataggaacagcacccagagtaacaaaaaagcagaagaggctgtcaactatagtgtccataacagtttccatttccgtgtctgtgatatctggcctgttaatggcacgatatgaaacaagctccttattttgattacataatacaaacatatcatcttccaaagtaataaaattgagatattggtccccaaaccttggctacttgtgttacttgcacttaggccccgaacgctggcatttgcaatatcttccagtttacttcttgaaatagcagaaataaaatttaaataatatgattcatatagttgatttcgaagatcctggcacattctgtcaatattttcttcagttggcattacaaagtatactgcaggaacatctggaataggatctcgatcagagtgtaaaagcagatgcagagtgattcccatgtctcttagctccctcacagatagcagaggagagattatatcttggccaaatctgtcataaatgagtaccttccatactggttctcctgtgctgtttttaatatgaggcacattgaaattcaacatacgcttcaaagccactgtctgcctttcccgaatactggctgctgctgctgctgtcctgccgccggccat

SEQ ID NO: 75707 - DNA, 2372 bp, Homo sapiens; identical to SEQ ID NO: 61136

SEQ ID NO: 75708 - DNA, 5427 bp, Homo sapiens; identical to SEQ ID NO: 61137

SEQ ID NO: 75709 - DNA, 2785 bp, Homo sapiens; identical to SEQ ID NO: 61139

SEQ ID NO: 75710 - DNA, 5200 bp, Homo sapiens; identical to SEQ ID NO: 61140

SEQ ID NO: 75711 - DNA, 527 bp, Homo sapiens; identical to SEQ ID NO: 61141

SEQ ID NO: 75712 - DNA, 5869 bp, Homo sapiens
caggagtgatcgggcagcagtcggccggccagcggacggcagagcgggcggacgggtaggcccggcctgctcttcgcgaggaggaagaaggtggccactctcccggtccccagaacctccccagcccccgcagtccgcccagaccgtaaagggggacgctgaggagccgcggacgctctccccggtgccgccgccgctgccgccgccatggctgccatgatggatcggaagtgagcattagggttaacggctgccggcgccggctcttcaagtcccggctccccggccgcctccacccggggaagcgcagcgcggcgcagctgactgctgcctctcacggccctcgcgaccacaagccctcaggtccggcgcgttccctgcaagactgagcggcggggagtggctcccggccgccggccccggctgcgagaaagatggcggacctggccgagtgcaacatcaaagtgatgtgtcgcttcagacctctcaacgagtctgaagtgaaccgcggcgacaagtacatcgccaagtttcagggagaagacacggtcgtgatcgcgtccaagccttatgcatttgatcgggtgttccagtcaagcacatctcaagagcaagtgtataatgactgtgcaaagaagattgttaaagatgtacttgaaggatataatggaacaatatttgcatatggacaaacatcctctgggaagacacacacaatggagggtaaacttcatgatccagaaggcatgggaattattccaagaatagtgcaagatatttttaattatatttactccatggatgaaaatttggaatttcatattaaggtttcatattttgaaatatatttggataagataagggacctgttagatgtttcaaagaccaacctttcagttcatgaagacaaaaaccgagttccctatgtaaaggggtgcacagagcgttttgtatgtagtccagatgaagttatggataccatagatgaaggaaaatccaacagacatgtagcagttacaaatatgaatgaacatagctctaggagtcacagtatatttcttattaatgtcaaacaagagaacacacaaacggaacaaaagctgagtggaaaactttatctggttgatttagctggtagtgaaaaggttagtaaaactggagctgaaggtgctgtgctggatgaagctaaaaacatcaacaagtcactttctgctcttggaaatgttatttctgctttggctgagggtagtacatatgttccatatcgagatagtaaaatgacaagaatccttcaagattcattaggtggcaactgtagaaccactattgtaatttgctgctctccatcatcatacaatgagtctgaaacaaaatctacactcttatttggccaaagggccaaaacaattaagaacacagtttgtgtcaatgtggagttaactgcagaacagtggaaaaagaagtatgaaaaagaaaaagaaaaaaataagatcctgcggaacactattcagtggcttgaaaatgagctcaacagatggcgtaatggggagacggtgcctattgatgaacagtttgacaaagagaaagccaacttggaagctttcacagtggataaagatattactcttaccaatgataaaccagcaaccgcaattggagttataggaaattttactgatgctgaaagaagaaagtgtgaagaagaaattgctaaattatacaaacagcttgatgacaaggatgaagaaattaaccagcaaagtcaactggtagagaaactgaagacgcaaatgttggatcaggaggagcttttggcatctaccagaagggatcaagacaatatgcaagctgagctgaatcgccttcaagcagaaaatgatgcctctaaagaagaagtgaaagaagttttacaggccctagaagaacttgctgtcaattatgatcagaagtctcaggaagttgaagacaaaactaaggaatatgaattgcttagtgatgaattgaatcagaaatcggcaactttagcgagtatagatgctgagcttcagaaacttaaggaaatgaccaaccaccagaaaaaacgagcagctgagatgatggcatctttactaaaagaccttgcagaaataggaattgctgtgggaaataatgatgtaaagcagcctgagggaactggcatgatagatgaagagttcactgttgcaagactctacattagcaaaatgaagtcagaagtaaaaaccatggtgaaacgttgcaagcagttagaaagcacacaaactgagagcaacaaaaaaatggaagaaaatgaaaaggagttagcagcatgtcagcttcgtatctctcaacatgaagccaaaatcaagtcattgactgaataccttcaaaatgtggaacaaaagaaaagacagttggaggaatctgtcgatgccctcagtgaagaactagtccagcttcgagcacaagagaaagtccatgaaatggaaaaggagcacttaaataaggttcagactgcaaatgaagttaagcaagctgttgaacagcagatccagagccatagagaaactcatcaaaaacagatcagtagtttgagagatgaagtagaagcaaaagcaaaacttattactgatcttcaagaccaaaaccagaaaatgatgttagagcaggaacgtctaagagtagaacatgagaagttgaaagccacagatcaggaaaagagcagaaaactacatgaacttacggttatgcaagatagacgagaacaagcaagacaagacttgaagggtttggaagagacagtggcaaaagaacttcagactttacacaacctgcgcaaactctttgttcaggacctggctacaagagttaaaaagagtgctgagattgattctgcatgacaccggaggcagcgctgctcagaagcaaaaaatctcctttcttgaaaataatcttgaaccagctcactaaaagtgcacaaaccagttggtaccgtgataatgcagatctccgctgtgaacttcctaagttggaaaagcgacttcgagctacagctgagagagtgaaagctttggaatcagcactgaaagaagctaaagaaaatgcatctcgtgatcgcaaacgctatcagcaagaagtagatcgcataaaggaagcagtcaggtcaaagaatatggccagaagagggcattctgcacagattgctaaacctattcgtcccgggcaacatccagcagcttctccaactcacccaagtgcaattcgtggaggaggtgcatttgttcagaacagccagccagtggcagtgcgaggtggaggaggcaaacaagtgtaatcgtttatacatacccacaggtgttaaaaagtaatcgaagtacgaagaggacatggtatcaagcagtcattcaatgactataacctctactcccttgggattgtagaattataacttttaaaaaaaatgtataaattatacctggcctgtacagctgtttcctacctactcttcttgtaaactctgctgcttcccaacacaactagagtgcaattttggcatcttaggagggaaaaaggacagtttacaactgtggccctatttattacacagtttgtctatcgtgtcttaaatttagtctttactgtgccaagctaactgtaccttataggactgtactttttgtattttttgtgtatgtttattttttaatctcagtttaaattacctagctgctactgcttcttgtttttcttttcctattaaaacgtcttcctttttttttcttaagagaaaatgggaacatttaggttaaatgtctttaaattttaccacttaacaacactacatgcccataaaatatatccagtcagtactgtattttaaaatcccttgaaatgatgatatcagggttaaaattacttgtattgtttctgaagtttgctcctgaaaactactgtttgagcactgaaacgttacaaatgcctaataggcatttgagactgagcaaggctacttgttatctcatgaaatgcctgttgccgagttattttgaatagaaatattttaaagtatcaaaagcagatcttagtttaagggagtttggaaaaggaattatatttctctttttcctgattctgtactcaacaagtcttgatggaattaaaatactctgctttattctggtgagcctgctagctaatataagtattggacaggtaataatttgtcatctttaatattagtaaaatgaattaagatattataggattaaacataattttatacggttagtactttattggccgacctaaatttatagcgtgtggaaattgagaaaaatgaagaaacaggacagatatatgatgaattaaaaatatatataggtcaattttggtctgaaatccctgaggtgtttttaacctgctacactaatttgtacactaatttatttctttagtctagaaatagtaaattgtttgcaagtcactaataatcattagataaattattttcttggccatagccgataattttgtaatcagtactaagtgtatacgtatttttgccactttttcctcagatgattaaagtaagtcaacagcttattttaggaaactgtaaaagtaatagggaaagagatttcactatttgcttcatcagtggtaggggggcggtgactgcaactgtgttagcagaaattcacagagaatggggatttaaggttagcagagaaacttggaaagttctgtgttaggatcttgctggcagaattaactttttgcaaaagttttatacacagatatttgtattaaatttggagccatagtcagaagactcagatcataattggcttatttttctatttcccgtaactattgtaatttccacttttgtaataattttgatttaaaatatgaaatttatttatttatttttttaatagtcaaaaatctttgctgttgtaatctgcaacctctaaaatgattgtgttgcttttaggattgatcagaagaaacactccaaaaattgagatgaaatgttggtgcagccagttataagtaatatagttaacaagcaaaaaaagtgctgccaccttttatgatgattttctaaatggagaaacatttggctgcatccacatagacctttatgttttgttttcagttgaaaacttgcctcctttggcaacattcgtaaatgaagcagaatttttttttctcttttttccaaatatgttagttttgttcttgtaagatgtatcatgggtattggtgctgtgtaatgaacaacgaattttaattagcatgtggttcagaatatacaatgttaggtttttaaaaagtatcttgatggttcttttctatttataatttcagactttcataaagtgtaccaagaatttcataaatttgttttcagtgaactgctttttgctatggtaggtcattaaacacagcacttactcttaaaaatgaaaatttctgatcatctaggatattgacacatttcaatttgcagtgtctttttgactggatatattaacgttcctctgaatggcattgatagatggttcagaagagaaactcaatgaaataaagagaatatttattcatggcgattaattaaattatttgcctaacttaagaaaactactgtgcgtaactctcagtttgtgcttaactccatttgacatgaggtgacagaagagagtctgagtctacctgtggaatatgttggtttattttcagtgcttgaagatacattcacaaatacttggtttgggaagacaccgtttaattttaagttaacttgcatgttgtaaatgcgttttatgtttaaataaagaggaaaattttttgaaatgtaaaaaaaaaa

SEQ ID NO: 75713 - DNA, 2639 bp, Homo sapiens; identical to SEQ ID NO: 61143

SEQ ID NO: 75714 - DNA, 990 bp, Homo sapiens; identical to SEQ ID NO: 61144

SEQ ID NO: 75715 - DNA, 1887 bp, Homo sapiens; identical to SEQ ID NO: 61145

SEQ ID NO: 75716 - DNA, 821 bp, Homo sapiens; identical to SEQ ID NO: 61146

SEQ ID NO: 75717 - DNA, 4541 bp, Homo sapiens; identical to SEQ ID NO: 61147

SEQ ID NO: 75718 - DNA, 2569 bp, Homo sapiens; identical to SEQ ID NO: 61148

SEQ ID NO: 75719 - DNA, 1569 bp, Homo sapiens
ggcacgagggaggcttcaccctcatgacctcatccaaccctaattacctcgtaaagaccccacctccacacaccatcacattgaagattagggcttcaacatgtatgtttggtgtgggggcggggggcaagatacagacatttagtccatagcactgtatgtcttaaaattattgtttaaggcaccgttcacctctggaaaaggattcttcacctggaagttcatcaacaagcttgttgataaaaaagcaaagagagacttcagacacgccgatcatgagagctttaaaagaacttgatgagggaaaaatatttaaaaattgggggacacagacagagaaagaggacacctcaaatataaatcctcggcaaactgaaacttcagttaatgcaagtcgttctccagaaaagtgtgcccaacagagacaaaagagacttaattcggcctcacagagatcatcatctttaccaccttcaaatcgtaaatcaagtactccaacaaaaagagagattatgctaacaccagtgactgtggcttatagtccaaagcgatcccctaaagaaaacttgtccccaggatttagtcatctgcttagcaaaaatgagagcagtccaattcgatttgatatacttttggatgatttagatactgttcctgtgtctacattacaacgtaccaatccaagaaagcaacttccagtttcttcctctagatgactcggaagaaaaaaacttattctgagaaagccacccgataacattgttaatcatagctcttgccctgaaccggtgccaaatggagtgaagaaagtatctgtgagaacagcctgggagaagaataaatcagttagctacgaacagtgtaagccggtttcagtcactccacaggggaatgattttgaatatacagcaaaaattcggaccctagctgaaacagaacgatttttttgatgaacttacaaaagaaaaggaccagattgaggcagcactaagcaggatgccttctcctggaggacggatcactttacagacaaggttaaatcaggaagcctttggaagatcgtttggaaaggattaatcgagaactggggttcagttcgcatgacgctaaagaaattccatgttttgcgcacctctgcaaatcttcgagattcgtagccattaaattttgagacatttttgtttgcactaatgtataattatgcagtcagaaaaggcaaactattttgtactgtttataagccttcaaacagtagttttacaatcatgctattcttacacttgctattttatacttcaaatagccacatattttcaagatatttttgttatgctcaggaatctcttgtatattttactatttaaaaagcattatttttaaatagtatctgtctccaatttatatcaagaataaggaaatataaacagaggaagcagcttgtttctaaacaaatagtgttatccttttacaattaactgcacatcaattttatagacttgttctacattgtaaatacaattcagtttttaaaaaataaagcttactagcttcacataaatgaaaaaaaaa

SEQ ID NO: 75720 - DNA, 987 bp, Homo sapiens; identical to SEQ ID NO: 61150

SEQ ID NO: 75721 - DNA, 1493 bp, Homo sapiens; identical to SEQ ID NO: 61151

SEQ ID NO: 75722 - DNA, 2360 bp, Homo sapiens
ggcgtccccgccacgtttccggcgaccgcaggcgcggattccttggcttccctcagcactttcccctccgcgcggacggccccgagacgctttttcactgggccttgtcgccagcacccggcgtgggggatgtgtagttggtgactgcctctccagatgctgaggtgcctgtatcattggcacaggccagtgctgaaccgtaggtggagtaggctgtgccttctgaagcagtatctattcacaatgaagttgcagtctcccgaattccagtcacttttcacagaaggactgaagagtctgacagaattatttgtcaaagagaatcacgaattaagaatagcaggaggagcagtgagggatttattaaatggagtaaagcctcaggatatagattttgccaccactgctacccctactcaaatgaaggagatgtttcagtcggctgggattcggatgataaacaacagaggagaaaagcacggaacaattactgccaggcttcatgaagaaaattttgagattactacactacggattgatgtcaccactgatggaagacatgctgaggtagaatttacaactgactggcagaaagatgcggaacgcagaggatctcactataaattctatgtttttaggttttgatggcactttatttgactactttaatgggttatgaagatttaaaaaataagaaagttagatttgttggacatgctaaacagagaatacaagaggattatcttagaattttaagatacttcaggttttatgggagaattgtagacaaacctggtgaccatgatcctgagactttggaagcaattgcagaaaatgcaaaaggcttggctggaatatcaggagaaaggatttgggtggaactgaaaaaaattcttgttggtaaccatgtaaatcatttgattcaccttatctatgatcttgatgtggctccttatataggtttacctgctaatgcaagtttagaagaatttgacaaagtcagtaaaaatgttgatggtttttcaccaaagccagtgactcttttggcctcattattcaaagtacaagatgatgtcacaaaattggatttgaggttgaagatcgcgaaagaggagaaaaaccttggcttatttatagttaaaaataggaaagatttaattaaagcaacagatagttcagacccattgaaaccctatcaagacttcattatagattctagggaacctgatgcaactactcgtgtatgtgaactactgaagtaccaaggagagcactgtctcctaaaggaaatgcagcagtggtccattcctccatttcctgtaagtggccatgacatcagaaaagtgggcatttcttcaggaaaagaaattggggctctattacaacagttgcgagaacagtggaaaaaaagtggttaccaaatggaaaaagatgaacttctgagttacataaagaagacctaaaactgatggctactaaaaagcagagcatttctggtaagactaaattttctcccctccctcttaatgaggttttagagactacaccagaataaaagacagtttaggggacctctgtagaacaacaagggtcttattttgtgaattatatatttcaagaactaaacagagatccacctttctggatctgatttatatcactgaaatgtacagttcttttggaatagtttcacctgagaaaacatagttggctattatctatcttaacctgttcaggcttttaaaaaaaactgtttttgcatagggtagtactaagatcttaaaaagtggtaactgtcttgaagaaaaaacgtttattgtttgtttgcaattgaaataacagggttaccttaacaatgactgtctatgatgtgtcagttcttatctgaattccaaaataaacctgtgcttaaaaaagaaataattgaccaagtaagtttgcataaaatgtgaatactaaatgtgtccccagttgctggcattcatatgtacaggatttgttctagcaagctatgcttcagtatgtggttgatatttttctgtcacaatgatttctttatgcatgcagagcctgggaaagtcatgggattaacttgagggtcactattgagcctattaattaattaattattgttttaataaaacaaacattggtattggaagataaatatgtttatgtggtatctgacaatgtgtattaggtgtcatatacaatggtaatatgcctgtctttaaagtgttattttattaattaaaaggatatcggctattattatatattctctaaagaaagatttattctctaaagatttgagtcctaaatgctttcatcaggtaaataaaatgtataatacaaaaaaa

SEQ ID NO: 75723 - DNA, 4211 bp, Homo sapiens
tttcgtggaggcgacagatggaggctgaggaagcagagtgatccccggccccttcctgtccctgaacactgtctgcctggatgagggctgtctgccctgccctgccgtaggagatgggctgggagcctcccacgctctccagctcactcggcaggcagcggggaccagggctggcaggttaagcctctgggggtggatcctgaaaggtggtccagccgcctggccctgcgtgggaccctccacctggcagcaggtacccaaacaagggctggacagcagggtctcgctctgtcacacaggctggagtgcagtggtgtgatcttggctcatcgtaacctccacctcccgggttcaagtgattctcatgcctcagcctcccgagtagctgggattacaggtggtgacttccaagagtgactccgtcggaggaaaatgactccccagtcgctgctgcagacgacactgttcctgctgagtctgctcttcctggtccaaggtgcccacggcaggggccacagggaagactttcgcttctgcagccagcggaaccagacacacaggagcagcctccactacaaacccacaccagacctgcgcatctccatcgagaactccgaagaggccctcacagtccatgcccctttccctgcagcccaccctgcttcccgatccttccctgaccccaggggcctctaccacttctgcctctactggaaccgacatgctgggagattacatcttctctatggcaagcgtgacttcttgctgagtgacaaagcctctagcctcctctgcttccagcaccaggaggagagcctggctcagggccccccgctgttagccacttctgtcacctcctggtggagccctcagaacatcagcctgcccagtgccgccagcttcaccttctccttccacagtcctccccacacgggcgctcacaatgcctcggtggacatgtgcgagctcaaaagggacctccagctgctcagccagttcctgaagcatccccagaaggcctcaaggaggccctcggctgcccccgccagccagcagttgcagagcctggagtcgaaactgacctctgtgagattcatgggggacatggggtccttcgaggaggaccggatcaacgccacggtgtggaagctccagcccacagccggcctccaggacctgcacatccactcccggcaggaggaggagcagagcgagatcatggagtactcggtgctgctgcctcgaacactcttccagaggacgaaaggccggaggggggaggctgagaagagactcctcctggtggacttcagcagccaagccctgttccaggacaagaattccagccacgtcctgggtgagaaggtcttggggattgtggtacagaacaccaaagtagccaacctcacggagcccgtggtgctcaccttccagcaccagctacagccgaagaatgtgactctgcaatgtgtgttctgggttgaagaccccacattgagcagcccggggcattggagcagtgctgggtgtgagaccgtcaggagagaaacccaaacatcctgcttctgcaaccacttgacctactttgcagtgctgatggtctcctcggtggaggtggacgccgtgcacaagcactacctgagcctcctctcctacgtgggctgtgtcgtctctgccctggcctgccttgtcaccattgccgcctacctctgctccagggtgcccctgccgtgcaggaggaaacctcgggactacaccatcaaggtgcacatgaacctgctgctggccgtcttcctgctggacacgagcttcctgctcagcgagccggtggccctgacaggctctgaggctggctgccgagccagtgccatcttcctgcacttctccctgctcacctgcctttcctggatgggcctcgaggggtacaacctctaccgactcgtggtggaggtctttggcacctatgtccctggctacctactcaagctgagcgccatgggctggggcttccccatctttctggtgacgctggtggccctggtggatgtggacaactatggccccatcatcttggctgtgcataggactccagagggcgtcatctacccttccatgtgctggatccgggactccctggtcagctacatcaccaacctgggcctcttcagcctggtgtttctgttcaacatggccatgctagccaccatggtggtgcagatcctgcggctgcgcccccacacccaaaagtggtcacatgtgctgacactgctgtgcctcagcctggtccttggccctgccctgggccttgatcttcttctcctttgcttctggcaccttccagcttgtcgtcctctaccttttcagcatcatcacctccttccaaggcttcctcatcttcatctggtactggtccatgcggctgcaggcccggggtggcccctcccctctgaagagcaactcagacagcgccaggctccccatcagctcgggcagcacctcgtccagccgcatctaggcctccagcccacctgcccatgtgatgaagcagagatgcggcctcgtcgcacactgcctgtggcccccgagcccggcccagccccaggccagtcagccgcagactttggaaagcccaacgaccatggagagatgggccgttgccatggtggacggactcccgggctgggcttttgaattggccttggggactactcggctctcactcagctcccacgggactcagaagtgcgccgccatgctgcctagggtactgtccccacatctgtcccaacccagctggaggcctggtctctccttacaacccctgggcccagccctcattgctgggggccaggccttggatcttgagggtctggcacatccttaatcctgtgcccctgcctgggacagaaatgtggctccagttgctctgtctctcgtggtcaccctgagggcactctgcatcctctgtcattttaacctcaggtggcacccagggcgaatggggcccagggcagaccttcagggccagagccctggcggaggagaggccctttgccaggagcacagcagcagctcgcctacctctgagcccaggccccctccctccctcagccccccagtcctccctccatcttccctggggttctcctcctctcccagggcctccttgctccttcgttcacagctgggggtccccgattccaatgctgttttttggggagtggtttccaggagctgcctggtgtctgctgtaaatgtttgtctactgcacaagcctcggcctgcccctgagccaggctcggtaccgatgcgtgggctgggctaggtccctctgtccatctgggcctttgtatgagctgcattgcccttgctcaccctgaccaagcacacgcctcagaggggccctcagcctctcctgaagccctcttgtggcaagaactgtggaccatgccagtcccgtctggtttccatcccaccactccaaggactgagactgacctcctctggtgacactggcctagagcctgacactctcctaagaggttctctccaagcccccaaatagctccaggcgccctcggccgcccatcatggttaattctgtccaacaaacacacacgggtagattgctggcctgttgtaggtggtagggacacagatgaccgacctggtcactcctcctgccaacattcagtctggtatgtgaggcgtgcgtgaagcaagaactcctggagctacagggacagggagccatcattcctgcctgggaatcctggaagacttcctgcaggagtcagcgttcaatcttgaccttgaagatgggaaggatgttctttttacgtaccaattcttttgtcttttgatattaaaaagaagtacatgttcattgtagagaatttggaaactgtagaagagaatcaagaagaaaaataaaaatcagctgttgtaatcacctagcaaaaaaaaaaaaagggggggcccttttaaaagaacccttggggggcccaattttaacgggggagggcaaggaaaaatttttttctttatggggggcggaataaaaaccactttgggaattttggaaaggaaccttttttttgggggggggccatatgggcccaccccccccacggattttaagggctttagggaaaaaaaaaatttttaaggggaaaaggggggaaaacaaccccaaaagccttgctgttgaa

SEQ ID NO: 75724 - DNA, 2213 bp, Homo sapiens
  misc_feature (1)...(2213): n = a,t,c or g
tttcgtgggcgagcatggccgctccgcgaggtgagccattggctggggtgtcggcgagtgtgttcgtggagcgcgtcctggggacgactcccggcattatcggccaggttgagtccgctcctggcattccgcggaaagatggtattcccactttcctgtgcggtgcagcagtatgcctgggggaagatgggttccaacagcgaagtggcgcggctgttggccagcagtgatccactggcccagatcgcagaggacaagccttatgcagagttgtggatggggactcacccccgaggggatgccaagatccttgacaaccgcatctcacagaagaccctaagccagtggattgctgagaaccaggacagcttgggctcaaaggtcaaggacacctttaatggcaacctgcccttcctcttcaaagtgctctcagttgaaacacccctgtccatccaggcacaccctaacaaggagctggcagagaagctgcacctccaggctccgcagcactaccccgatgccaaccacaagccagagatggccattgccctcacccccttccagggcttgtgtggcttccggccagttgaggagattgtaacctttctaaagaaggtgcctgagtttcagttcctgattggagatgaggcagcaacacacctgaagcagaccatgagccatgactcccaggctgtggcctcctctctgcagagctgtttctcccacctgatgaagagtgagaagaaggtggtggtggaacagctcaacctgttggtgaagcggatctcccagcaagcggctgccggaaacaacatggaggacatctttggggagcttttgctacagctgcaccagcagtacccaggtgatatcggctgctttgccatctacttcctgaacctgcttaccctgaagcctggggaggccatgtttctggaggccaacgtaccccatgcctacctgaaaggagactgcgtggagtgcatggcgtgttcagacaacacagttcgtgctggcctgacacccaagttcattgatgtgccaaccctgtgtgaaatgctcagctatacccctagctccagcaaggacaggctctttctcccaacacggagtcaggaagacccctacctctcaatctatgacccccctgtaccagacttcaccattatgaagacnggaggtccctgggctctgtcactgaatacaaggacttggcactggactctgccagcatcctcctgatggtacaggggacagtgatagccagcacacccacaacccagacaccaatccctctgcaacgtggtggcgtgctcttcattggggccaatgagagtgtctcactgaagcttactgagccgaaggacctgctgatattccgtgcctgctgtctgctgtaaaggctgcagcctccccagctctcctctgccagccaccctaaattccagccaacctcacctcctcgggcccagctcaagcccccttccttgctctggaccccttaggtataccctggaagagctggggtgggggaggagggagcgtgaaggtagtgactcctgaacacacccaggtggaaccatctttggggaggagaggcccgtgtgaggggtctgatactccctttgtcttccctctctactcctcgctacacctgagccaggctcttgccaactctgttccagcctatggctttaggctagctgttaaatatgtgacccagcattagctcagcatctgtcagagcaagagaccaggtaatttctaagaacagggttctagcgatgggactgcccatttcctcagctgcagaggaggaaagggaaagggtaggcctgtagactaacgctgtttacacccttgttctgtcaaagcaattaaagatcacttgtgttgaggctgtggggtaatgagcactcagcctttggggtacctgttcctaaagtgggccaaaagagccctccctacatgatgccccagtttttgctttattcctatttcatacagcttctcgggggggtgagcaggctacactccagaacaccggtatgggaaggagtgggagaggaagccagctttggcctcacaggcacagcttgcaagcaggccttgggtctgcccagaggcacagcttgcaagcagccctacagagaaggtgactcaaaggatacaccagtcaccagtgcaagactcttcgctcctgtttttctctt

SEQ ID NO: 75725 - DNA, 2904 bp, Homo sapiens; identical to SEQ ID NO: 61155
  misc_feature (1)...(2904): n = a,t,c or g

SEQ ID NO: 75726 - DNA, 3854 bp, Homo sapiens
gagagcggcgcctcactactgactatgctgcgaaaacactacataaggggggggcggggtggcgccacccctgattgcggtgccacggactgctcctgctgggcggagaggacagattttgcaaagcggaggctgcgacgggtcctgcagggggacagtgaggaaagggccgcctcgtctccgctcctgggggaccgcagaaataagaatcaaactccacaatgacaacctatttggaattcattcaacaaaatgaagaacgagatggagtccgatttagttggaatgtttggccatcaagtcgactggaagctacaagaatggttgttcctgtggcagccctgtttacaccactgaaagagagacctgacttaccacctattcaatatgaacctgttctgtgtagtaggaccacttgccgtgcagttttgaatcctttatgtcaagtggattatcgagcaaaactttgggcttgcaacttttgttaccaaaggaatcagtttccacctagttatgctggtatatctgaactgaatcagcctgctgaacttttacctcagttttctagcattgaatatgtagttctgcgtggtcctcagatgcctttgatattcctctatgtggttgatacttgcatggaagatgaagatttacaagccctgaaagaatccatgcagatgtcattaagtcttttaccacctacagctttggttggacttattacttttgggagaatggttcaggttcatgaacttggatgtgaaggcatttcaaaaagctatgtcttcagaggaacaaaagatttgtctgccaaacaactgcaggaaatgctggggctctctaaagtaccagttactcaagcaacacgtggtcctcaggtacagcagccacctccttccaacagattcttacaaccagtacagaaaatagacatgaatctcacagatcttctgggagaactccagcgagacccttggcctgtaccacagggaaagagacctttgcgttcctctggggtggcactttccatagctgtaggactgctggagtgtacttttcccaacactggtgctcgtatcatgatgttcattggtggtcctgctactcaggggcctggaatggtggttggagatgagttgaagacacctataagatcgtggcatgacattgacaaagacaatgccaaatatgttaaaaagggaactaagcattttgaagcattggctaatcgagctgctacaactggccatgttattgatatctatgcgtgtgcattagatcagacaggtctcctggagatgaaatgctgtcccaaccttactggaggatacatggtaatgggtgattctttcaatacttccttattcaaacaaacttttcaaagagtctttaccaaagacatgcatggacagtttaaaatgggctttggtggtacgctagaaataaagaccccaaggggaaataaagatttcaggagctattggaccctgtgtgtcactcaattctaaaggaccctgtgtgtctgaaaatgagataggaacaggtggcacatgtcagtggaagatatgtggacttagtcccactacaaccttagccatatattttgaggttgtcaatcagcataatgctccaattcctcaaggagggccgtggtgcaaatccagtttgtgactcagtatcgagcattcaagtgggcagagacgcatccgagtgaccaccattgctaggaacttgggcagatgctcaaactcaaatccaaaacattgctgcatcttttgaccaggaggcagctgccattcttatggcccggctagcaatatatagagcagaaacagaagaaggtccagatgtgcttaggtggctggacagacagctcattcgactgtgtcagaaatttggagaatatcataaagatgacccaagttccttcagattttcagaaactttctccctttatccacagtttatgtttcatttaagaagatcttctttcctgcaagtttttaacaatagtcctgatgagagttcatattatcgtcaccattttatgcgtcaagatctgacccagtctctaattatgattcagcctatcctgtatgcgtattcttttagtggaccaccagagccggttcttcttgatagcagtagcattcttgcagatcgtattcttctcatggacacattcttccagattttgatttatcatggtgagaccatagcacagtggcggaagtcaggataccaggatatgcctgagtatgaaaatttccgccaccttctgcaagccccagtggatgatgcacaggaaattcttcactccagatttccaatgccaagatacattgacactgaacatggaggcagccaggcccgtttcctcctttcaaaagtcaacccttcacagactcataataatatgtatgcctgggggcaggagtctggagcacctattcttacagatgatgttagtttacaagtgtttatggatcacttgaagaaacttgctgtgtccagtgctgcttgaagtgctaataatgttaaagacacttaagaagatgaaataatattcaaatttcattttttcctttttccatttatctgtggaaaccaacagatattgctctatattttttgtattagtatggtttgagacaacatatggaaaatgttcacatttgtagattaagctggaattataatgagagcaataagaacaaatttattttgcttaccacagtgttatagctggttctagaaatttgaagtctttataacttaattatgtttaataaaaaatagagtctgcctcgtactacagatgtaactcatttgtatattgcagacagacccaaagtggcactgaattttcttgctcaccttttaaaaacttgttccttaattttagccagaaagcaaaaaaacaatagtaatgataaatgtgaacatttttgcttattcattgaatatttttctgtaattttcagcacttatgtatacactttttctgtacttactaggttaaggcagacttatttttatgatttgtttaggaattatttgattgtataatggtaattttcatgatgataatgttgttggatatttggaaagatagtttacagatgaaaggtttttttgcgtaacaatcccgcagctgacaaaaaatgtgaaatttccacaaaatatccaacttatgtgactaaacgcagtagtttttttaaaaggggagatagaaaataaatggttttgttggagtgcattttagtaagcctttgcagtaaaatgacggttgtaactactaaaccaaatttagttttcacagcatggttttgttgttttccccttgtttttcagaggtaaattttgcattatatccttcagtattttaacactattttggcagtttacacattactttttgtttttccttcctttttgtgaaatgtattaagttgtggttcttattgaaacagtattatataatgtttgcttaattatatcatgtgatgctcagttctattttgatttattcattagtattcacttttacctttaaagtttacttgtagcaaatatgtttacattgataaagccagatatgttttgacaatgaaatttacatatcaagtactgcaaataaaaggtggtgctatgatatatgcttaggaggacagttttaatgattgtacttgcatgaacacaatcatatgatggtaaagcagaaacttaagaaaaaattgtttatgtgttatattcaattagcttaaataagttgctttgttatattttatttgaattgaactacgctaggcctaaatgccaataaaatatacttttcactgttaaaaaaaaaa

SEQ ID NO: 75727 - DNA, 1023 bp, Homo sapiens; identical to SEQ ID NO: 61157

SEQ ID NO: 75728 - DNA, 1157 bp, Homo sapiens; identical to SEQ ID NO: 61158

SEQ ID NO: 75729 - DNA, 4242 bp, Homo sapiens
ttttttttttttttacaaatattaaaaatgtgatttttaataatataagtacaaaattttatttctttatacaactgtaatgggatttggatcaaaccactagaatttatttaaaaaaacaaaataaaacaatgatataaaaactgcaagaaggtctgaatccaaagtttttcctctaatagtaccaaataccacaagggtccagattattatacaaatgtgtacaaattttaaatacaaatacaatagggctgggtttcaaaggaaaacaaacaaaaagcaggtccctccatccaggatttcattaatggtatatgattggacaatgctaggggtttaatgtcttcctatactaaccatgtcttccccgcccctcctagataccctgtgtcaaacagggaaacttcccacagatacagaagaggcatggtacaatgttctaacacatgaaatcaagttaagatttctgttcctcttgattttggttctcaaacaatcctgtttctctgtattcccaattaaatcttaaaactgctctgagctgagaaagggattcagcagccagactacctttaagcaacatagccctgtgacaacactggtggggagaagggaagaaattaaataggatgcagatgggctacactgtccccaaagatttactttgatgctgtagtgctctgtcagggccaggagaagaaagcacagttaactcagagcttggtgttggcagagaatctcataccaaatttaaaaaccatcctgaagtgctcaactgtcttctttccaactgggaaacaaacgtctggttctctggaaataagggcagctggggatggtaacattcctctttattttactttctagacattattgaagcccatgaagttctttataaagaattagaatcctaacacaatgattcatttttgaggtaaaataccttaaactgtagatgattcagagtttttggaacagaccaggaggaaggaaggaaagagggaaggaaacagggaaggaaggaaggaaagaagggagggcggaagggagaaatgacaaatctgtatcttccacatgctgttgctggtggaggctaactcttgttagatggtacatccagaaatgagcaggataaaattaaaatctaagagattttaaagagttaaatacacataattaaaatacacattcacacacacataaataaacctacaagagagtgagttttgttttgtttttgcaattcacttacatgtggaatgcagaacactgtgtatctgcccaccaggggaactgataagatgaacccaaaaatcatgctgggcaaagtttatccataaccaccgagcaactaagcagcacggcttgtgaggacttggtggctaacttcatgctgccagtgaaagacaccagcacttaattaagaagactaaagattctgggttagctcagaatgtatggaggtccaactggtggcattgacagcttcaccccccaaggtgttttttgctgcccagggctcaccagaactccccttggcctctgttggaggccaccaatggtacccaatgattacaataaattttgagacacagacacctatacagtaggaattggaatgaaccctctactcaattcacctaagccacctccgtaactataaagggaacaaattttatcacctcccacctaggtcacttcaaattgaaaggctttgaattttcagtcaactggcatcttcccgttatctttcctattacatttcagactaagacaggtaaggcaaatggtcagtgatgggtctggaggtccaactgagcttggaaaataatcacattttagctgtccataaagagatgcgcttggcacccagaacaagcccccagcccccaaagttacattgatttttaaggcagatttatccaccacaggagaaaaaagaatcccaagcctgtattcatgccaaaatttcctcttggctaaacctttgccatttcataaaattattaaaagcaaagtagttacagtctatgtatatattgtacattatatatatatgtatatatgtatgtatagatataaaaatttaaaacctacagccagaggccactgaaggaatctgcaacagtcatatatacacaaaccagcaatggtgtaggataaggtttctgtcccaggattctttgctgtcacagtcccggcgtggtgtaagcaatgttgtctaatgtgtttgacaagacctgtttgggacagccattcaattcaggtagttgtgtggtgagacatgccaaggggccaagggcacagataatggaatccagaagcactgacaaactgccagacacagccaccataccctcagtttcctgcagacggtgtccaatgaggcttagggactctcccaacagctgaagatgagcagcaacatcaatgggctctgtctcaggggctttggctggtgaggctggtaacagcatggtggtgggtggggacttcttctggggtgacagtactcctacagaagaggctttgactttcatggaaccttctgagctggatgctttccttttcacagttgtggcttctgctttgttctgtttgtgctgcagatactgagctttttgcttccaaatcagtttgtctttttctggtaattgcttccacacctcagccagttttttactaagttccccaaaatctatacctggatggtcagccacaatggtcacgcgatactctttacagaacacctggtaggccgacatgttcttcttttttggcttttctcctctctctctctctttgtccttctcttcttttttcttttttttttcactatgcccatctgtgtggaggccaggaagtggcaggggaggtgctgctgctccagcgtatgggatgctgggaggagggccagatgtcactgtgacctctcccactggcacggcagaaagtcctaaacttctcttggacttggagtgtcgcttctctttatgcttctccttgtctttcttctttttgctcttctttgacttctttttcttcttgatttctcggtaagaatcatctatcactaactccccagcctctagttccccaccagaggatgagtctgattctaccagaataggttcaagccctgaaaaatcaaggttagctctgtgggactctgcgaactgggaggcgtcagacccacagcccttcaggggcccaggagatgaatgtgcgtctgaggatgacttgtgctttttccgggctgttttcagaaagctctgtaactcatgtcctaggagtaaagcaccctgctcatcccgagctgatttctttgaggaatttttcacagtcgcttgttgggaagggatattgaaaagactcctcatcaacagagctgcttcccttctcctttggtgacagaataagtttcatttttaaaccatcaggctcccgaagggtcagtgtctcctgtgttcacatagagaggtttcatttttttcgatttgtgggagacaccatcctctaggggtagttccccactgcttccactgactttcttcctgtggtgctccctttttaactctcccgaaatggctttgaaagagccagaggatttctcccccagtctttttggagggcttggagcctgctgccagtggggaagtgatagctttcaacaggtccatagctgtatcagtagactgtgggctggactttttctttttcttctgtgacgattccaaagacgaaatatctggtgtatcacaaatgcagactgttcttctatgctgaatcctccaaaataccagccctccacctctctcctccttcacactggtttatcggcactcagaacaagaaccactgtcctccatagtagtaatcatcagaggagtgcttcctcttcttcttgtgtgtgtccgtccccaagaagtaaagttcactatccttcaacttcttcttggaagaattcctgacctgagcagcaatttcttcctcttcccttaaaaaatctttgtaagaacgttttttctctcgttggcttcggccagctgcaagtcctatgtcctcaaaggtatgatcaccatcaaaacaatcttctttcttcacggagtcatcataagccatggtggtcctgcagggcctttgagaatgtgtcactgtgtccaggctccttcccgtctacaggaccaggtcttcactcggctcgcccggatcccgcctcaacgccgccgatcgccgacgaaa

SEQ ID NO: 75730 - DNA, 564 bp, Homo sapiens; identical to SEQ ID NO: 61160

SEQ ID NO: 75731 - DNA, 2411 bp, Homo sapiens; identical to SEQ ID NO: 61692
  misc_feature (1)...(2411): n = a,t,c or g

SEQ ID NO: 75732 - DNA, 1352 bp, Homo sapiens; identical to SEQ ID NO: 61161

SEQ ID NO: 75733 - DNA, 2637 bp, Homo sapiens; identical to SEQ ID NO: 61162

SEQ ID NO: 75734 - DNA, 3028 bp, Homo sapiens; identical to SEQ ID NO: 61163

SEQ ID NO: 75735 - DNA, 655 bp, Homo sapiens
tttttaaaaatttttaaatgtttaatcacaagtcagtagcatgacatcattagtagagtagagtctgctgacattacaatctattgatctccccagagttaccaaaagtagttcacaatagttaggcttccttctgtccatagttcagggcatattcaaagtctctaaaagctgacgtgaccatctggaatctcgatctaacttccctgaatacctcaagaacagtcctttccggtaatttgggagccacctgcctaaatgcttttttgaaatcttccaaagttaaaaatccacgatagtaggtgtcaaaggctgtgaagatgtgtcttacttcgttccgatatcgttgagcttccttctttttcctgacaatatttaaaaacccctcgagtaatataccagaagtatttggatttattgaagacatcacagaatccacttctatcttggagggcttgtacccaaacagcattacaacagcagttttaaagtcctctctgctgagatatcctttgtgatcttcatcacatgctttaaatacttccacccacttcctgtgttccgagggactggcttcccacgtccgcgacctggctctggcctcggagaagaacatcgcgactacaacaaccgagccccagcaacccaaccagct

SEQ ID NO: 75736 - DNA, 2086 bp, Homo sapiens
tcacggccggcgcctcctcctggattcattcactcgctcttttcattcacgaaggtagtgaggcctagtggaaagccatggagagcgctctccccgccgccggcttcctgtactgggtcggcgcgggcaccgtggcctacctagccctgcgtatttcgtactcgctcttcacggccctccgggtctggggagtggggaatgaggcgggggtcggcccggggctcggagaatgggcagttgtcacaggtagtactgatggaattggaaaatcatatgcagaagagttagcaaagcatggaatgaaggttgtccttatcagcagatcaaaggataaacttgaccaggtttccagtgaaataaaagaaaaattcaaagtggagacaagaaccattgctgttgactttgcatcagaagatatttatgataaaattaaaacaggcttggctggtcttgaaatcggcatcttagtgaacaacgtgggaatgtcgtatgagtatcctgaatactttttggatgttcctgacttggacaatgtgatcaagaaaaatgataaatattaatattctttctgtttgtaagatgacacaattggtactgcctggcatggtggaaagatccaaaggggctattctgaacatttcatctggcagtggcatgctccctgtcccactcttgaccatctattctgcaaccaagacttttgtagatttcttctctcagtgcctccatgaggagtataggagcaagggcgtctttgtgcagagtgtcctgccatacttcgtagctacaaaactggctaaaatccggaagccaactttggataagccctctccggagacgtttgtgaagtctgcaattaaaacagtcggcctgcaatcccgaaccaatggatacctgatccatgctcttatgggcttgataatctcaaacctgccttcttggatttatttgaaaatagtcatgaatatgaacaagtctacacgggctcactatctgaagaaaaccaagaagaactaagcattgataactgcattgtaacttggccagatgctccagcatatgcacgttcactgcaaagcaccctactggttttgaaaatctgaccttgtcatttcaatagttattaacatgactaaatattatcttaattaagaggaaaatagaagttgcttttaggggtttctgacatatattctggatactatccgaggtaattttgaagtttaatataaatgctcatatcaaatgaatatagaactaatattgtcgggaacacctaatagaaaggaatactattatagcaaatcacagaatgatagactcaagcataaaacttggcagttttatctgcttcaaaatgccattgatcattattcctgtattttctctgaaactgattataaaaaccaatgtccagctactcttttgtttttgacacttgaagaaatggagatcgatttgatttgtttataagcagacacactgcaatttacaaagatctctttacggttttataaaattatcttccagtttgtacatttatatggaattgttctttatcaagggtagctaatgacatgaaaataattgtgaaatatggaattatttctgacacatgaagcccactaaactatgctttcttataatgcatatttcttctcagtttaaatgtatgtaaatatcgaagctatatggtatgatttataaagataaatgggccaaagtgtacattgagactggcagccatctatggtaccactgaaaccctgacccagaaaagtggcttgcttggacacccagctgcctttgtttctgcattaaaccaatattgatcacacatatgacacaggctagtcctataaaagtaatgacttcatagaaatggcattataatttttaagttgatactctacaggtagctattgatataattagttttaataaaacatgctgcaaccatggtatacaacaaaaatacatttctttggtgattgaaattaaggccgtatttacaatgacttaatataagactgaccttttatcctgcttcataaccttgtatggagaactcaccaagaaaagaatt

SEQ ID NO: 75737 - DNA, 6622 bp, Homo sapiens
gcggccgcgggcggggctgagggcggcgggggcgggccgcccgagctgggagggcggcggcgccgaggggaggagagcggcccatggacccgcggggcccggcgccccagactctgcgccgtcgggacggagcccaagatgtcggcctaggccggggcgcgacgacgcggacggggcggcgaggaggcgccgctgctgccggggctcgcagccgccgagcccccgagggcgcgccctgacggactggccgagccggcggtgagaggccggcgcgtcgggagcgggccgcgcggcaccatgtcggccaaggtgcggctcaagaagctggagcagctgctcctggacgggccctggcgcaacgagagcgccctgagcgtggaaacgctgctcgacgtgctcgtctgcctgtacaccgagtgcagccactcggccctgcgccgcgacaagtacgtggccgagttcctcgagtgggctaaaccatttacacagctggtgaaagaaatgcagcttcatcgagaagactttgaaataattaaagtaattggaagaggtgcttttggtgaggttgctgttgtcaaaatgaagaatactgaacgaatttatgcaatgaaaatcctcaacaagtgggagatgctgaaaagagcagagaccgcgtgcttccgagaggagcgcgatgtgctggtgaacggcgactgccagtggatcaccgcgctgcactacgcctttcaggacgagaaccacctgtacttagtcatggattactatgtgggtggtgatttactgaccctgctcagcaaatttgaagacaagcttccggaagatatggcgaggttctacattggtgaaatggtgctggccattgactccatccatcagcttcattacgtgcacagagacattaaacctgacaatgtccttttggacgtgaatggtcatatccgcctggctgactttggatcatgtttgaagatgaatgatgatggcactgtaggtgcagtccctcccgtggccgtgggcacacctgactacatctcgccggagatcctgcaggcgatggaggacggcatgggcaaatacgggcctgagtgtgactggtggtctctgggtgtctgcatgtatgagatgctctatggagaaacgccgttttatgcggagtcactcgtggagacctatgggaagatcatgaaccatgaagagcgattccagttcccatcccatgtcacggatgtatctgaagaagcgaaggacctcatccagagactgatctgcagtagagaacgccggctggggcagaatggaatagaggatttcaaaaagcatgcgttttttgaaggtctaaattgggaaaatatacgaaacctagaagcaccttatattcctgatgtgagcagtccctctgacacatccaacttcgacgtggatgacgacgtgctgagaaacacggaaatattacctcctggttctcacacaggcttttctggattacatttgccattcattggttttacattcacaacggaaagctgtttttctgatcgaggctctctgaagagcataatgcagtccaacacattaaccaaagatgaggatgtgcagcgggacctggagcacagcctgcagatggaagcttacgagaggaggattcggaggctggaacaggagaagctggagctgagcaggaagctgcaagagtccacccagaccgtgcagtccctccacggctcatctcgggccctcagcaattcaaaccgagataaagaaatcaaaaagctaaatgaagaaatcgaacgcttgaagaataaaatagcagattcaaacaggctggagcgacagcttgaggacacagtggcgcttcgccaagagcgtgaggactccacgcagcggctgcgggggctggagaagcagcaccgcgtggtccggcaggagaaggaggagctgcacaagcaactggttgaagcctcagagcggttgaaatcccaggccaaggaactcaaagatgcccatcagcagcgaaagctggccctgcaggagttctcggagctgaacgagcgcatggcagagctccgtgcccagaagcagaaggtgtcccggcagctgcgagacaaggaggaggagatggaggtggccacgcagaaggtggacgccatgcggcaggaaatgcggagagctgagaagctcaggaaagagctggaagctcagcttgatgatgctgttgctgaggcctccaaggagcgcaagcttcgtgagcacagcgagaacttctgcaagcaaatggaaagcgagctggaggccctcaaggtgaagcaaggaggccggggagcgggtgccaccttagagcaccagcaagagatttccaaaatcaaatccgagctggagaagaaagtcttattttatgaagaggaattggtcagacgtgaggcctcccatgtgctagaagtgaaaaatgtgaagaaggaggtgcatgattcagaaagccaccagctggccctgcagaaagaaatcttgatgttaaaagataagttagaaaagtcaaagcgagaacggcataacgagatggaggaggcagtaggtacaataaaagataaatacgaacgagaaagagcgatgctgtttgatgaaaacaagaagctaactgctgaaaatgaaaagctctgttcctttgtggataaactcacagctcaaaatagacagctggaggatgagctgcaggatctggcagccaagaaggagtcagtggcccactgggaagctcagattgcggaaatcattcagtgggtcagtgacgagaaagatgcccggggttaccttcaagctcttgcttccaagatgaccgaagagctcgaggctttgaggagttctagtctggggtcaagaacactggacccgctgtggaaggtgcgccgcagccagaagctggacatgtccgcgcggctggagctgcagtcggccctggaggcggagatccgggccaagcagcttgtccaggaggagctcaggaaggtcaaggacgccaacctcaccttggaaagcaaactaaaggattccgaagccaaaaacagagaattattagaagaaatggaaattttgaagaaaaagatggaagaaaaattcagagcagatactgggctcaaacttccagattttcaggattccatttttgagtatttcaacactgctcctcttgcacatgacctgacatttagaaccagctcagctagtgagcaagaaacacaagctccgaagccagaagcgtccccgtcgatgtctgtggctgcatcagagcagcaggaggacatggctcggcccccgcagaggccatccgctgtgccgttgcccaccacgcaggccctggctctggctggaccgaagccaaaagctcaccagttcagcatcaagtccttctccagccctactcagtgcagccactgcacctccctgatggttgggctgatccggcagggctacgcctgcgaggtgtgttcctttgcttgccacgtgtcctgcaaagacggtgccccccaggtgtgcccaatacctcccgagcagtccaagaggcctctgggcgtggacgtgcagcgaggcatcggaacagcctacaaaggccatgtcaaggtcccaaagcccacgggggtgaagaagggatggcagcgcgcatatgcagtcgtctgtgactgcaagctcttcctgtatgatctgcctgaaggaaaatccacccagcctggtgtcattgcgagccaagtcttggatctcagagatgacgagttttccgtgagctcagtcctggcctcagatgtcattcatgctacacgccgagatattccatgtatattcagggtgacggcctctctcttaggtgcaccttctaagaccagctcgctgctcattctgacagaaaatgagaatgaaaagaggaagtgggttgggattctagaaggactccagtccatccttcataaaaaccggctgaggaatcaggtcgtgcatgttcccttggaagcctacgacagctcgctgcctctcatcaaggccatcctgacagctgccatcgtggatgcagacaggattgcagtcggcctagaagaagggctctatgtcatagaggtcacccgagatgtgatcgtccgtgccgctgactgtaagaaggtacaccagatcgagcttgctcccagggagaagatcgtaatcctcctctgtggccggaaccaccatgtgcacctctatccgtgggtcgtcccttgatggagcggaaggcagctttgacatcaagcttccggaaaccaaaggctgccagctcatggccacggccacactcaagaggaactctggcacctgcctgtttgtggccgtgaaacgagaaatcctttgctatgagatccagagaacgaagccattccacagaaagttcaatgagattgtggctcccggcagcgtgcagtgcctggcggtgctcagggacaggctctgtgtgggctacccttctgggttctgcctgctgagcatccagggggacgggcagcctctaaacctggtaaatcccaatgacccctcgcttgcgttcctctcacaacagtcttttgatgccctttgtgctgtggagctcgaaagcgaggagtacctgctttgcttcagccacatgggactgtacgtggacccgcaaggccggagggcacgcgcgcaggagctcatgtggcctgcggctcctgtcgcctgtagttgcagccccacccacgtcacggtgtacagcgagtatggcgtggacgtctttgatgtgcgcaccatggagtgggtgcagaccatcggcctgcggaggataaggcccctgaactctgaaggcaccctcaacctcctcaactgcgagcctccacgcttgatctacttcaagagcaagttctcgggagcggttctcaacgtgccggacacctccgacaacagcaagaagcagatgctgcgcaccaggagcaaaaggcggttcgtcttcaaggtcccagaggaagagagactgcagcagaggcgagagatgcttagagacccagaattgagatccaaaatgatatccaacccaaccaacttcaaccacgtggcccacatgggcccaggcgacggcatgcaggtgctcatggacctgcctctgagtgctgtgcccccctcccaggagaaaaggccgggccccgctcccaccaacctggctcgccagcctccatccaggaacaagccctacatctcgtggccctcatcaggtggatcggagcctagcgtgcactgtgcctctgagaagtatgtctgatccagaccaggactttgacaaagagcctgattcggactccaccaaacactcaactccatcgaatagctccaaccccagcggcccaccgagccccaactccccccacaggagccagctccccctcgaaggcctgggatcagccggcctgtgacacctgaagccgccagctcgccacaggggccaggggagcttggagatggcctccagcgttcagtgccaagactgagcgggccctccaatgttgtccaaggaaatgtagaatcactttgtagatatgggagatgaagaagacaaatctttattataatattgatcagttttatgccgcattgttcgtggcagtagaccacatctgttcgtctgcacagctgtgaggcgatgctgttccatctgcacatgaaggacccccatacagcctgtctcccacccctgacaacccgagagggcatatggggccctgccaacaccacttcctcagcagaaacccgtcatgacgcggctgcttcggaagcagacatctggggacacagcctcagtacccagtcttttccctagttcctgaaactttcctaggaccttaagagaatagtaggaggtcctatagcattcccagtgtcactagaattttgaagacaggaaagtggaggttagtctgtggcctttttttcatttagccattgcacagtcagctgcagaagtcctgctgaccacctagtcatggacaaaggcccaggaccagtgacaccctgcgtccctgtgtgcgttaagttcattctgggtcgcagccatgaagtgtcaccagtatctactactgtgaagtcagctgtgctgttttccattcgcttccacggcttctgcctcctgccataaaaccaacgagtgtcgtggtgcaggcagcccctgtggcctgctgggctgagggaagtcagagccccagggcgcccacgaagcagccactgggataccccaccccgccccgccctgcccgccccccccccccaccagtcctgcccccgcatgggagcccccgtgattagtagcccgtatgatcacgtagacccacccaacacactcctgcacactgggccccggcccacggcacagcaatcccctgcgcgtggatttcaccttcaccctttgtaccagatgtttgagtgaccagctctgtggccctgtgtcgtcagcctcagtacccagtcttttccctagttcctgaaactttcctacggaccttaagagaatagtaggaggtcctatagcattcccagtgtcactagaattttgaagacaggaaagtggaggttagtctgtggccttaagaggcttgtgattaacttg

SEQ ID NO: 75738 - DNA, 2143 bp, Homo sapiens; identical to SEQ ID NO: 61167

SEQ ID NO: 75739 - DNA, 1069 bp, Homo sapiens
  misc_feature (1)...(1069): n = a,t,c or g
ttttttttttttgcaagctctcttagcttgtgcattcagaccagacatcacatgtaaatatttatacacagggaggtgggaggggagggccacacgatgcgttgctgcgccccccgccttcctctcactcctcttataagaagcgcggagtgttctgccttttcacctacgcagccccagcccggcccccctggggaccctagagagggtgtcctttctgtttatccttctctttgctccagatggctgcgctctctaggggcgcgatgtgtgtgtggtggagccgggtcccctccagcaaggagggcggcccactgctctgctggtgctggaaggaggaccccgggtagtggccgatgacctcgctgtaggtggggcggcggcccctccatgcgcccgccgctgccgtagcacgtggcgctgatgcccgagttactgctgggggggcaggggccgcccagcctggcactatccatcaggtcactgtcgaagatggttctgtttgggggtgcgcgcaccgactcccggttcagttccagctgctgctcggggtcccgaagctggagggtgcaggggccctggtagggtgggggctcctccccgtccgacagcgaaatagtgggcggcaggtcgatctcgtgctgcaggtacggataggtgggctggaagcggtggaagcgctcccgctgggcgaagggcggcacggccaggcggtcggtgggccgaggcggggcgtagacctgcggctctgggattccgttgcctgacactgtgctctccgagggccacaggcatccttctgaggacagggcatcttctctcctncgcccctggctgtgccggctgatgaaggaccgtgcagacagcttgtagtggctcagcaggcacgtgatcaccaccaccatcaccatcatcaccaccacggatgatgatgatctgaacaanatcttcagtccgctggtttcgcaggagactgtccgccttcagttctccagcagctcggggatcatggcccactgaacccccaagcgctttcacccgaacccaaggaggacgaccaggaaagacg

SEQ ID NO: 75740 - DNA, 1856 bp, Homo sapiens
tgccggagtcgagcgggtgctgctagcggaggcgccatattggaggggacaaaactccggcgacagcgagttgacacaaataaacccctggacccccttgttccctcagctctaagggccgcgatgttgtacctagaagactatctggaaatgattgagcagcttcctatggatctgcgggaccgcttcacggaaatgcgcgagatggacctgcaggtgcagaatgcaatggatcaactagaacaaagagtcagtgaattctttatgaatgcaaagaaaaataaacctgagtggagggaagagcaaatggcatccatcaaaaaagactactataaagctttggaagatgcagatgagaaggttcagttggcaaaccagatatatgacttggtagatcgacacttgagaaagctggatcaggaactggctaagtttaaaatggagctggaagctgataatgctggaattacagaaatattagagaggcgatctttggaattagacactccttcacagccagtgaacaatcaccatgctcattcacatactccagtggaaaaaaggaaatataatccaacttctcaccatacgacaacagatcatattcctgaaaagaaatttaaatctgaagctcttctatccacccttacgtcagatgcctctaaggaaaatacactaggttgtcgaaataataattccacagcctcttctaacaatgcctacaatgtgaattcctcccaacctctgggatcctataacattggctcgttatcttcaggaactggtgcagggggcatttaccatggcagctgctcaagcagttcaggctacagctcagatgaaggagggacgaagaacatcaagtttaaaagccagttatgaagcatttaagaataatgactttcagttgggaaaagaattttcaatggccagggaaacagttggctattcatcatcttcggcacttatgacaacattaacacagaatgccagttcatcagcagccgactcacggagtggtcgaaagagcaaaaacaacaacaagtcttcaagccagcagtcatcatcttcctcctcctcttcttccttatcatcgggttcttcatcatcaactgttgtacaagaaatctctcaacaaacaactgtagtgccagaatctgattcaaatagtcaggttgattggacttacgacccaaatgaacctcgatactgcatttgtaatcaggtatcttatggtgagatggtgggatgtgatacccaagattgccctatagaatggttccattatggctgcgttggattgacagaggcaccaaaaggcaaatggtactgtccacagtgcactggctgcaatgaagagaagaggcagcagacacaaataaaaggtggtccttttggtttgaaggaagaaataaacttcagcctgaaggttttaatatggggaccttaaaaagaagagaagagaaagaagaaacaatgccattcccccggcaaccccacctaaaggatttacccatagacaatcccctataagatcttgaaccttgaattttaatggggttgtattttaaataatgtaaagtaaattatttaatgcacccccccggtgtgcctatgaatattattcccagttagcccttggattatttccagtggcccaacatatgcagacatttgtactcctcaacccattttctcaaagtaatgggcattctatgatttagacttcaaggaattccaatgatgaagattttaaggaaagtattttatattcaacaggtatattctgctgcatgtactgtactccagagctgttatgtaacactgtatataaatggttgcaaaaaaaaaaaaaa

SEQ ID NO: 75741 - DNA, 827 bp, Homo sapiens; identical to SEQ ID NO: 60912
  misc_feature (1)...(827): n = a,t,c or g

SEQ ID NO: 75742 - DNA, 3090 bp, Homo sapiens
gtccgggttcgcttgcctcgtcagcgtccgcgtttttcccggccccccccaacccccccggacaggacccccttgagcttgtccctcagctgccaccatgagcgaccaagatcactccatggatgaaatgacagctgtggtgaaaattgaaaaaggagttggtggcaataatgggggcaatggtaatggtggtggtgccttttcacaggctcgaagtagcagcacaggcagtagcagcagcactggaggaggagggcaggagtcccagccatcccctttggctctgctggcagcaacttgcagcagaattgagtcacccaatgagaacagcaacaactcccagggcccgagtcagtcagggggaacaggtgagcttgacctcacagccacacaactttcacagggtgccaatggctggcagatcatctcttcctcctctggggctacccctacctcaaaggaacagagtggcagcagtaccaatggcagcaatggcagtgagtcttccaagaatcgcacagtctctggtgggcagtatgttgtggctgccgctcccaacttacagaaccagcaagttctgacaggactacctggagtgatgcctaatattcagtatcaagtaatcccacagttccagaccgttgatgggcaacagctgcagtttgctgccactggggcccaagtgcagcaggatggttctggtcaaatacagatcataccaggtgcaaaccaacagattatcacaaatcgaggaagtggaggcaacatcattgctgctatgccaaacctactccagcaggctgtccccctccaaggcctggctaataatgtactctcaggacagactcagtatgtgaccaatgtaccagtggccctgaatgggaacatcaccttgctacctgtcaacagcgtttctgcagctaccttgactcccagctctcaggcagtcacgatcagcagctctgggtcccaggagagtggctcacagcctgtcacctcagggactaccatcagttctgccagcttggtatcatcacaagccagttccagctcctttttcaccaatgccaatagctactcaactactactaccaccagcaacatgggaattatgaactttactaccagtggatcatcagggaccaactctcaaggccagacaccccagagggtcagtgggctacaggggtctgatgctctgaacatccagcaaaaccagacatctggaggctcattgcaagcaggccagcaaaaagaaggagagcaaaaaccagcagacccaagcagcaccaaaatctttatcccggcctcagctagttcaaggggggacaggccctccaaggctttccaagcagcaccattgtcagggcagacctttacaactcaagccatctcccaggaaaccctccagaacctccagcttcaggctgttccaaactctggtcccatcatcatccggacaccaacagtggggcccaatggacaggtcagttggcagactctacagctgcagaacctccaagttcagaacccacaagcccaaacaatcaccttagccccaatgcagggtgtttccttggggcagaccagcagcagcaacaccactctcacacccattgcctcagctgcttccattcctgctggcacagtcactgtgaatgctgctcaactctcctccatgccaggcctccagaccattaacctcagtgcattgggtacttcaggaatccaggtgcacccaattcaaggcctgccgttggctatagcaaatgccccaggtgatcatggagctcagcttggtctccatggggctggtggtgatggaatacatgatgacacagcaggtggagaggaaggagaaaacagcccagatgcccaaccccaagccggtcggaggacccggcgggaagcatgcacctgcccctactgtaaagacagtgaaggaaggggctcgggggatcctggcaaaaagaaacagcatatttgccacatccaaggctgtgggaaagtgtatggcaagacctctcacctgcgggcacacttgcgctggcatacaggcgagaggccatttatgtgtacctggtcatactgtgggaaacgcttcacacgttcggatgagctacagaggcacaaacgtacacacacaggtgagaagaaatttgcctgccctgagtgtcctaagcgcttcatgaggagtgaccacctgtcaaaacatatcaagacccaccagaataagaagggaggcccaggtgtagctctgagtgtgggcactttgcccctggacagtggggcaggttcagaaggcagtggcactgccactccttcagcccttattaccaccaatatggtagccatggaggccatctgtccagagggcattgcccgtcttgccaacagtggcatcaacgttaaagaaggtggccagttctgcagccccataaataccagtgccaatggcttctgaggtcaagccaccggggccaagagacatagtggccaatcccccttacccccgggatgcaaggtagcatgggtccaagagacatggaagagagagccatgaagcattaaaatgcatggtgttgagaagaatcaggagagggatacaagagaggagatggggtcccggcacccatctgtatcatcagtgcctctttgaaggtgggaaacattagtgaaaattctgttggtgccacgctttgatgagcatttgtttgaccccagtttcttcttacacttcttacccccagcctacccttcctgcatttctcttctcagctcttccatgatggattcccccccctttcctaaagccatcatgccttgataaatatatatgatcattgaaatactttttaacaaaaaacagattctatattattatatatatatatatatataaagatatatagagatgcattcacaggggttggctgggaggaggaagaccattctgtgaccaaaataccttggtcattttttttatattgccttatttcccttatggctgagccttgttgtgacacatcaagcttttctgtagatgttgtcttggcttcccaccagcttaagcgttcatatgctctgctt

SEQ ID NO: 75743 - DNA, 3104 bp, Homo sapiens
cgacgatttcgtgggagttctgagtgcgacggcgcaggtctgcaccatggcggcccggcttgtcagccgatgcggggctgtgcgtgcagctccccacagcggcccgctggtgtcctggcgcaggtggtccggcgcctcaacagacaccgtgtatgacgtggtggtgtcgggtggaggcctggtgggcgctgccatggcctgtgccttgggatatgatattcactttcatgacaagaaaatcctgttgctcgaagcaggtccaaagaaagtactggagaaattgtcagaaacttacagcaacagggtcagctccatttcccctggctctgcaacgcttctcagtagttttggtgcctgggaccatatctgcaacatgagatacagagcctttcggcgaatgcaggtgtgggacgcctgctcagaggccctgataatgtttgataaggataatttagatgacatgggctatatccttggagaatgatgttcatcatgcatgctttcactaagcagttggaggctgtgtctgaccgagtgacggttctctacaggagcaaagccattcgctatacctggccttgtccatttcctatggccgactccagcccttgggttcatattaccctaggtgatggcagcaccttccagaccaaattgttgataggtgcagatggtcacaactccggagtacggcaggctgttggaatccagaatgtgagctggaactatgaccagtctgctgttgtggctactctgcatttatcagaggccacagaaaacaacgtagcctggcagagatttcttccctctgggcctattgctctgctcccgctctcagacaccttgagttccttggtttggtccacgtcccatgaacatgcagcagagctagttagcatggatgaggaaaaatttgtggatgccgttaactctgccttttggagtgatgctgaccacacggacttcatcgacacagctggtgccatgctgcagtatgctgtcagccttctgaagcccactaaggtctcggctcgccagctgcccccaagcgtagccagggtggatgccaaaagccgagttctgtttcctcttgggttgggacatgctgctgagtacgtcaggcctcgggtggcgctcattggggatgcagcccacagagtccatccgcttgcaggacagggtgtcaacatgggctttggggatatctccagcttggcccatcacctcagtacggcagccttcaatgggaaggacttaggttccatgagccacctcacaggttatgaaacagaaagacagcgtcacaacactgctcttctggctgctacagacttactaaaaaggctctattctaccagtgcctccccgcttgtgttgctcaggacgtggggcttgcaggccacaaatgcagtgtctccactcaaagaacagattatggcctttgcaagcaaatgagtactcctctcctaaagaaagattacgttgatgaaaaagaacatcctgcccaggacccatcatacatattttcaagatcttatttaatttaataaacttactttacattaaaattctctttttcttctttgcttaatgggcctgtggcacccaaataatgaatgataatttgctgtgaggagcgtatattagccagaccaaaggaaaaaacttcgaaggaagacttacaatttggttgaaaagagctttttattactaaaaaacccacaaggtgctgtctcactcatttccagttaatcatttctaaagagaaaatttacattttgtttttgttttaatgttggtcataaatttatacagttgttttttcgatagaggtaagaattagactcgatgcatttttgttagaattgctgtttaaatgttaacatcaggaatgcaaattaaatataaattgctttaacctttgttacaggggatactgggacttttctgaaaggaaaaccagggtctcattaatgctaggttattactttatcacaggcaccagattttccattttatttatgggttcctctctgggacaccactggtccggtttaataaaacaataaataattcattgcacagatccgaagtacctcaggaaccagatcacaagggaaaccgattagcagcagaatttgttcatgtttggtggcagactggtggccaactggagggaggggagttttactgtgggtttttgaagaggtctcgtcacaagaccagagatgcctcttgaagagatttttaggttgtaggtttgcttactctaaagaacatcttgcccagaagtctgatttgagatgaaatgaagagaaacagtctgcttttgaaccaagtaaggtattcttgggaataatttttagagccatgagaaatctattcttacaggggtgcttttcaggcaaatgcagaaaatttaaaagagtctagaacaaaaaagtgacaatgtcacaaccttgctggaatctcaggaaaaagaattaaagatggcagctgctgtgaaaagctgtgtgactcctggcggagactgcagggacaaggtcatctttcacaaaaaatggaaaggtggcctagatgaggaggacacagactctccagaagttatgcaaacaaaatcaggcaagatgaagaattttaaggcacacctccattggcccacagagagtgttcttcatatgacaatgatgttaaacaccatctgtcacgtaccaggccatgtcctaagtattttaaatatgttaacacatctacaaagaggaaactattagaatctgtaggacctcttaagcccaaagggtctactgcaggcaggatgggcgttacagaaaaaaataaaaactctcattccaaattgctcctaagatggacaaattggttacttctccagaaggtctaatcaaggttaacaaaataggtaagttcgtggagttagaatgcatcttccctggagttcagaggtatttgggatgaccaaaggagtctgctggacagtatgtgtgttttacaaaatggcccccacagtgattaaagaccagagacttatatctctgcatttgtcaagctggaacagtctttagtgaacacagcgaattccaccgcac

SEQ ID NO: 75744 - DNA, 5732 bp, Homo sapiens; identical to SEQ ID NO: 61175

SEQ ID NO: 75745 - DNA, 6087 bp, Homo sapiens; identical to SEQ ID NO: 61176

SEQ ID NO: 75746 - DNA, 1636 bp, Homo sapiens
ttttttttttttgctggtcaaggcagagtttactgaactgttagtttcctcctgcacacaccgggcatgacaccttcaagtctgtccagcagtgggtccagaaagtaccctgtgtgccttggacgcagaggctacagttctcactgtgtggcatgggagccttcacagtgccctcgggagctgcccctggtctttgtctgcaaaggtgactgggaggatagaaaaagcagcgggctggcattgtttcgggggtggggtggtgggcagtgtgcctgggcagtcgcagggaggctgacttggttctgggctgcaagatctgtgcataggaggcccctgggtttcttccaggctcttcactgaaatgcaaagagtctgaagaggaggcagtgggcatagtgcccctgaatctggttaggtggagtttactgcatttaaaggcccatggtgagtggtgagttctgggatttgggagattcccagaggcctgacaggcctgtcccaccctcctggacttcactacagggagctgaagtcagggcccaggcaggggagcaggccacccaggtagggaacaaatgcctgcccatgcagggcagagggcagaaggcagggctgtcagggccttggttggtctgggcactggggcaggtggaggggaggcaggggtgaaggagaggcaggggtggaggaggtggggctctcctgggcgggtggaggagaggcaggggtggaggggaggcaggggtggaggagaggcaggggtggaggaggcggggctctcccaggaggccatcacttgtcggcgtgctgcagcagcaggtccactgcctctgcgaggttgtccacgtacccatcagccttcacttccggatggtgctcgtcactgggcctgaacttcccggtgcgcacctgcagcgctctcattccacaccgctgggcaccgccgacgtcgcccacgatatcgtccccaatcatgacggcctggtgggcttccactcctatcgcttgcagggcagacttgaaaaactcaggagaaggcttcccccccacctcggctttgatgccacaggcatactcaagcgccttcatgtagggaccaacgtccagcatcaggccagaggtctccttgtagtaacgcccttttcccagtgatatgagcacaggtttttccagctccatgagcacctggaaggcgttattcatgttttgataagaaaagctttctcctgcgtctgcaattaccacacagtttggggttgggatgtgtcgatctgatcaaattctgaggcggactccgtcatggatgagcaggtatggtcgcaggcctcgctccttcaggatctggcaggcagctggtgccggggcggtcacctcctgctcagagatgtcaaatcccagcctctgaagctgccccaccagctctgcccgggacttctgcgactcgttggtgcagaacctcaccttcagccgggaacgcttcagtctggccaccgcctccaccgagccggcgatggccgtgccgccgcccgcgccgctgtcgtacagcacgcccgagatgtcaagcagcaccccgcgcacgccagccagccgcttgccccacggtgccatggcgccccggacgcgtgggtcgacccgg

SEQ ID NO: 75747 - DNA, 3821 bp, Homo sapiens; identical to SEQ ID NO: 61178

SEQ ID NO: 75748 - DNA, 446 bp, Homo sapiens; identical to SEQ ID NO: 61179

SEQ ID NO: 75749 - DNA, 4182 bp, Homo sapiens; identical to SEQ ID NO: 61180

SEQ ID NO: 75750 - DNA, 7268 bp, Homo sapiens; identical to SEQ ID NO: 61181

SEQ ID NO: 75751 - DNA, 1778 bp, Homo sapiens; identical to SEQ ID NO: 61182

SEQ ID NO: 75752 - DNA, 826 bp, Homo sapiens; identical to SEQ ID NO: 61183

SEQ ID NO: 75753 - DNA, 3428 bp, Homo sapiens; identical to SEQ ID NO: 61184

SEQ ID NO: 75754 - DNA, 4362 bp, Homo sapiens
gaccgttttaaattcgcgggtcgacgatttcgtgtggaggccatggggcgcgtcgtcgcggagctcgtctcctcgctgctggggttgtggctgttgctgtgcagctgcggatgccccgagggcgccgagctgcgtgctccgccagataaaatcgcgattattggagccggaattggtggcacttcagcagcctattacctgcggcagaaatttgggaaagatgtgaagatagacctgtttgaaagagaagaggtcgggggccgcctggctaccatgatggtgcaggggcaagaatacgaggcaggaggttctgtcatccatcctttaaatctgcacatgaaacgttttgtcaaagacctgggtctctctgctgttcaggcctctggtggcctactggggatatataatggagagactctggtatttgaggagagcaactggttcataattaacgtgattaaattagtttggcgctatggatttcaatccctccgtatgcacatgtgggtagaggacgtgttagacaagttcatgaggatctaccgctaccagtctcatgactatgccttcagtagtgtcgaaaaattacttcatgctctaggaggagatgacttccttggaatgcttaatcgaacacttcttgaaaccttgcaaaaggccggcttttctgagaagttcctcaatgaaatgattgctcctgttatgagggtcaattatggccaaagcacggacatcaatgcctttgtgggggcggtgtcactgtcctgttctgattctggcctttgggcagtagaaggtggcaataaacttgtttgctcagggcttctgcaggcatccaaaagcaatcttatatctggctcagtaatgtacatcgaggagaaaacaaagaccaagtacacaggaaatccaacaaagatgtatgaagtggtctaccaaattggaactgagactcgttcagacttctatgacatcgtcttggtggccactccgttgaatcgaaaaatgtcgaatattacttttctcaactttgatcctccaattgaggaattccatcaatattatcaacatatagtgacaactttagttaagggggaattgaatacatctatctttagctctagacccatagataaatttggccttaatacagttttaaccactgataattcagatttgttcattaacagtattgggattgtgccctctgtgagagaaaaggaagatcctgagccatcaacagatggaacatatgtttggaagatcttttcccaagaaactcttactaaagcacaaattttaaagctctttctgtcctatgattatgctgtgaagaagccatggcttgcatatcctcactataagcccccggagaaatgcccctctatcattctccatgatcgactttattacctcaatggcatagagtgtgcagcaagtgcccatggagatgagtgccattgcagccccacaacgctgcactccttgcctatcaccgctggaacgggcacacagacatgattgatcaggatggcttatatgagaaacttaaaactgaactatgaagtgacacactcctttttcccctcctagttccaaatgactatcagtggcaaaaaagaacaaaatctgagcagagatgattttgaaccagatattttgccattatcattgtttaataaaagtaatccctgctggtcataggaaaacacacggttctaattaagtgtgaaggtatagctattgcacttatgccatctccaaaatttcttaagtattctttcactatccattaggagtttttcttaaacttgtctgataataagaatcacctggagttaggaggtggtggttgcagtgagccaatctcaccattgcacttcagcctgagcaacacgagcaaaactccgtctcaaaagtaaataaaaataatcacctggagtttgttaaaccatatggattctcaagctcctctcttgaagattctgattcagtaggtctgggagtggcgccctggattttgatcaaaattgtagagcattttaaggtgagtacctgagggagaacttaaagacatcttagttggggagtagtccttttgaattttacagctagatataatcttcagtcagataaaatttatgggagctggtgtcttatgcctgactcttagtaatttcataccggtttgaagtacgtgtgcccatgcctaaagccttgactttcagaatgttgtcttttgattcttctgtcttgatttgattaggggtgaaatttagaagtcttagtaatgtaacttgaagatgttaaacaaaaatctcaagtaaaatgaaaagcaaatatgggctactgaattaagaaactggcattctagtattaaatcctcacttcaggagcttttaaaaatactgagacccccccataaccagagattcagattcaaagactgaggataggaccttagcattgtagctatttaaagtttctaatgtgcacccagggttgggaatcaccaatgtgggtgtgaaaatgcctacaaagggttttagtgccttagaagtcctaagaagcccaatctgtatcaaagcagatccattttgcaaggatctttcttttagaactttctcagttctcttagtaagaactttagaagtaatcttgataataagcacagacagcctaacagcagaggcaacttaaataactcctgagcagttggcactagaacagaatacttggaatgacaccaaagttaaccaagtccagcatatgtccaaagagttaagtgtttcatttactgtagcattctgggtgagaaattggttgctgaaatcttaagacagtggtctcaaccttggctgcacattggaatcacctgtagggttttaaagcatccaaatggtaattaacaggcagcaaaacttcagaactagttctgcatctactgtgcaaagatcatgattaactgtcaagacactggtagaacagaacaagcaaaagattaagagttcaaaagtaaatgcaaccaatttaacatgtagtgttattaaaaaattacaaaggcctagaccagcctgggcaacatggtgaaaccccatctctacaaaaaatttttaaaaagttggccaggcatggtaatgcgcgcctgtggtcccagctgctcgggaggctgaggtgggaggatcacttgagccttggaggtcaaggctgcagtgaatcatgatcatgccactgtactccagcctgggcaacagagaccatcttaaaaaaaaaaaatccttccattgaatagaaacttcaaagtccttcatcagatcatggcattagctactttagcaaaatagtgtaaactttggttctgagtaaaaatgacttcttccctaccacagttgtgaatgttaatatgctgataaaactgccaagatatatttgataggtaggggattaaactcatggtttgtcaaaagagtgtttttttctagttttattcttaacagatatgttgaggtattcatatttgtttccttttgtggttttaatgaagacaatttgtaaagtaatactgttatgtatatgctaaatgttggtaaatactaattaatttccatcatttgtagacttgttttgcaatgggatatatttttacttataataccaatttaggctgggcgcagtggctcacgcctgtaatcccagcactttgggaggccaaggcaaacggatcacgaggtcaggagatcaagaccatcctggccaacatggtgaaaccccatctctactgaatacacaaaaattggctggacatggtggcgcatgtctgtaatcccagctactgtaatctcagctactcgggaggctgaggcaggagaattgcctcaaccgggaggcggaggttgcagtgagccaagattcgcaccactgcactccagccttggcaacagagcgagactctgtctcagaaaaaaaaaaacaaaaaccagtttaggctgggtatggtggctcaccagcactttgggaggctgaggcaggtggatctcttgaggtcgggagtttgagaccagcctggccaacatggtgaaaccctgtctttactaaaaatacaaaaattagccaggcatggtggcgtgtgccagtaatcccagctacttgggaggctgaggcgcgagaatcgcttgaaccctggagatggaggttgcagtgagcagagatcgcaccactgcactccagcctgggcaagagtgagactgtgtctcaaaaggaaaaaaaaaaaattaaaaatgttgctggtattacatcaaacctactctggataaattttccagtagggcatctgaaattgctttggcaaaagcaaaacaggttatc

SEQ ID NO: 75755 - DNA, 3050 bp, Homo sapiens; identical to SEQ ID NO: 61186

SEQ ID NO: 75756 - DNA, 1569 bp, Homo sapiens; identical to SEQ ID NO: 61187

SEQ ID NO: 75757 - DNA, 620 bp, Homo sapiens; identical to SEQ ID NO: 61188

SEQ ID NO: 75758 - DNA, 2108 bp, Homo sapiens; identical to SEQ ID NO: 61189
  misc_feature (1)...(2108): n = a,t,c or g

SEQ ID NO: 75759 - DNA, 681 bp, Homo sapiens; identical to SEQ ID NO: 61190

SEQ ID NO: 75760 - DNA, 5681 bp, Homo sapiens
tttcgtgtccgctcggccgggtgcgccgccccagtgctctgtgggatactggaagtctcgagcgtcggctccgggttcccagccctcctctggcccgcactcatagaaacattcacacaccccctgcctcccctctcttccctctccgcctcccccttccccccctcgcgataagaagacccggcggcaggagaggggatgaagatggcggacgcgaagcagaagcggaacgagcagctgaaacgctggatcggctccgagacggacctcgagcctccggtggtgaagcgccagaagaccaaggtgaagttcgacgatggcgccgtcttcctggctgcttgctccagcggcgacacggacgaggtcctcaagctgctgcaccgcggcgccgacatcaattacgccaatgtggacggactcactgccctgcaccaggcttgcattgatgacaatgttgatatggtgaagtttctggtagaaaatggagcaaatattaatcaacctgataatgaaggctggataccactacatgcagcagcttcctgtggatatcttgatattgcagagtttttgattggtcaaggagcacatgtaggggctgtcaacagtgaaggagatacacctttagatattgcggaggaggaggcaatggaagagctacttcaaaatgaagttaatcggcaaggggttgatatagaagcagctcgaaaggaagaagaacggatcatgcttagagatgccaggcagtggctaaatagtggtcatataaatgatgtccggcatgcaaaatctggaggtacagcacttcacgttgcagctgctaaaggctatacggaagttttaaaacttttaatacaggcaggctatgatgttaatattaaagactatgatggctggacacctcttcatgctgcagctcattggggtaaagaagaagcatgtcgaattttagtggacaatctgtgtgatatggagatggtcaacaaagtgggccaaacagcctttgatgtagcagatgaagacattttaggatatttagaagagttgcaaaagaaacaaaatctgctccatagtgaaaaacgggacaagaaatctccactaattgaatcaacagcaaatatggacaataatcagtcacagaagacctttaaaaacaaagagacgttgattattgaaccagagaaaaatgcatcccgtattgaatctctggaacaagaaaaggttgatgaagaagaagaaggaaagaaggatgagtctagcttgcttctagtgaagaagatgaggaagatgactccggaatcagaagctgaaacagataagacaaaacccctgggcttctgtaactaatgccaacacttctagtacacaagcagctcctgtagctgttacaacacctactgtgtcatcaggtcaagcaacacctacatcacctattaaaaagtttccaaccacagctacaaaaatttctcccaaagaagaagagagaaaagatgagtctcctgcaacttggaggttaggacttagaaagacgggcagctatggtgcacttgctgaaatcacagcatctaaagagggtcagaaagaaaaagatactgcaggtgttacacgttcagcttcaagtcccagactttcctcctctttggataataaagaaaaggagaaagatagtaaaggaactaggcttgcatatgttgcacctacaataccaagacgactagccagtacatctgacattgaagagaaagaaaacagagattcttcaagtttgcgaacaagtagttcatatacaaggagaaaatgggaagatgatcttaaaaaaaatagctcagttaatgaaggatcaacgtatcataaaagttgctcctttggtagaagacaagatgatttgattagttctagtgttccaagcaccacatcaacaccaacagttacctctgcagctgggcttcagaaaagcctgctttccagcacaagcactactacaaagattacaacgggttcttcctcagcaggcacacaaagcagtacctcaaatcgtttgtgggctgaggatagtactgagaaagaaaaggacagtgttcctacggcagtgaccattcctgttgctccaactgttgtaaatgctgcagcttctaccacaaccctgactacaactactgctggcactgtctcctccacaacagaggtcagggagagacgcagatcatacctcactcctgttagggatgaagagtctgaatcccaaagaaaagcaagatctagacaagcaagacaatctagaagatcaacacagggagtgacattaactgatcttcaagaagctgagaaaacaataggaagaagtcgttctacccgaaccagagaacaagaaaatgaagaaaaagaaaaagaggaaaaagagaaacaagataaagagaaacaagaagaaaagaaggagtcagaaacatctagagaagatgaatataaacaaaagtactccagaacgtatgatgagacttaccagcgttataggccagtatcaacttcaagttcaaccactccatcctcttcactttctactatgagcagttcactgtatgcttcaagtcaactaaacaggccaaatagtcttgtaggcataacttctgcttactccagaggaataacaaaagaaaatgaaagagagggagaaaaaagagaagaggagaaagaaggagaagataaatcacaacctaaatcaatcagagaacgacgacgaccaagagagaaaagaagatctacaggagtttcattttggacacaagatagtgatgaaaatgaacaagaacaacaatcagacacagaagagggatccaataagaaagaaactcagacggattccatttctagatatgaaaccagttctacatcagctggtgatcgatatgattccttgctgggtcgctctggatcatacagttacttagaagaaagaaaaccttacagcagcaggctagaaaaggatgactcaactgactttaaaaagctttatgaacaaattctagctgaaaatgaaaagctgaaggcacagctacatgatacaaatatggaactaacagatcttaaattacagttggaaaaggccacccagagacaagaaagatttgctgatagatcactgttggaaatggaaaaaagggaacgaagagctctagaaagaagaatatctgaaatggaagaagagctcaaaatgttaccagacctaaaagcagacaaccagaggctaaaggatgaaaatggggccttgatcagagttataagcaaactttccaaataaaaaaaaaaaagcagcaagtaatggaattgcacatattagtaacccagtggaccataattggcagtcactggaagtctgggaagaatccttggagactgtcattttcggatatcctgccaaatgccctcttatctagaatttttgtttcattttgtttaattttctggggtgtttttgttgttgttggtttgttttttgttttttttttttaatcaagaccattgtttcatgttaatgcagctgctgagaagatttttttttaatgactgaggaaaacttgtttacagctccagcatataaggaaagtgttcaaggccagatatgcctcagatatttaacccagtaaggccttagttgtaccataaatacttttgtggtcaacaaaaacttttcagctcttcacagaagacagttactcaacattttttggatgtgccacagtttcgagtttttcgatatttaaattttttggcttttcatctaagtttgggtttgtattttttccttctaaactcttcatgtggcagagtcttctatgttttcacagctttttcattacagaaaagaacacttgctcttctgtgattattgtcatgtattagggctaatgctgggttgcctcccacctggaactgaattgcttggtggaacatatgctttcactgtttgtgcaatatgcatttatttcttatatgaatgctttaaagtcatttgaggttagatcttttaattcctattttctgcttcattggtcactttttttttattgtagtataagatgttagattctgtaatcttcacattcattttagcaggtactgagtgatgctgtatatacaaataagtgtattgttttgatttttagaccaccacatggcatgcttgactatttcttatttcaaatgtctgctaatgcagagtaggctactccatgatagtgttaaaaaacaaaatttgctaacaatgtgatataaagactttaaaagttacacattatgtggagccctatcatctttacaaaagtttcctactgtaaagtgcttttattttcagttttcatttgatagtactcaaccataattaaagttgcataagataattgctttacatttcacatacctatatttatctgagtgctgtctaaaactgttgtgctagccaaagtaatgctatgaaatcatttgcagaattaacccgtgagttaatgttaaatgcactgttattgccatgtgaagaggcatcgactttgataccaccatcatgttcagaccattttatacatttcagtggccttttttttttttaaggaaaaaaaagcgcaaaaccaagtacatagtgacgatggcttttatttggacaaatagcttttatattttcattaaaccatgcaaaaaatactacatctttctggcacataactgtctccttaaccactgaacagttcagccatttgaataaattgtacattgtaaagcttatagtagctgattgtattattgattgtattgtatactatattaaatgtgaatttgtaccccttcattttaaaaggtcattgtgttctactgcctattttagattactttggggttggggaagggtgttttggtaagcaggattttaagtcctctctctctcgattggttttatgaagatataaggttatgctcttactaccaagctcaggattcttgattttaaaggtacaaggatagttgtgggagttttatttttggttatatttgaactgtatgaatggtaggtctgaatattgagaatttccatggtcttatgtggaggtaaaatatacagataactgatcagtttgagtgactgcaacatgttctggttgcacaacagttaggcatgctatggtttatatttgtgaagtttggatgcctgtgaagaatgattaaatacatgtttctaatattttagtgttttgtatttaggttatttattctttgtatctaaaactgaacagctactgtgctatattgattttattggtagtattgagcagaccttgtttctgcatgaaactagttgcaaaacccactattttggaaataaaaatgtattttgacatatacaaataaaatgaataaaactattttaaatgtgtgaacttttaatgaagacattttaaattttgttctgagatatttaaattctgcatgggtattttttcactaattgctttacttggataccaatttgaataatttctgaaattgtaatattgtgataatttgcacagcattgtacatgcacatctgtaaatgcaatcttaattgccatatttatgcaatcctgtgtaccaatttggacaaatgtttatatattttacataaagctgtctgtatgcagaatctgaaaaaaaaaa

SEQ ID NO: 75761 - DNA, 1886 bp, Homo sapiens; identical to SEQ ID NO: 61191

SEQ ID NO: 75762 - DNA, 2003 bp, Homo sapiens
  misc_feature (1)...(2003): n = a,t,c or g
ttttttttttttagtccacaaagaaacaattttattagcccaagaagtgaagacccagtccctctgcttgccccagctccaccccaaagcccctcaaaaggataggtgtgggtaagggagaagcttgggatggaatgtcccctatccctcagaagactggagggaagacgacggtctgtgcaaataggtcaccagaggtgtatgtgtggggggttattagaccaggataacaggggaagagggaggggacagtgggggatctgttgaaggcccaggaaaaacaaggggagctggggctaaggaaccaaaggaggtgggaagagtggggctagaacccaaaagtggggtcctttctgaggcagggtggtcccttggctccccttcatcaccctcctcttgcccttgagtttcttcctcttggtcttcgtccccaggaccccgatgaacaggctgcttgcaaatggggcaggtcttccgggtctgagtgagccaggggtccacgcagcggctgtggtaggcatgagcacaggggagtacccgcagcttgtccccatcctcatattcatccaggcaaatggcacagacatcatactggtctcccttctgatagtcatgtgtaggaaatctgtttcagttgctcctttggtaagtcgattccgctggagccgtttccggtgctggatacaacgagctatcattactgctcccatggccaaaaccagcagtcccacaatccctgtgaaagggatgaggtaatagcccaaggggaaggtattgtctggaaccagaagcacccgagcccccttctcgtagacaaagagggcacgcaggtactcggagcttctctccccaataaatacagacgggatccagatctgctgctggatttcctcactattccacaccatgttcagaagttcattggaattcacattgtgtactacagcggcaccatatccagccttctgggcatttaggaccttgaggtcaaagttgcagtcgaatcttcgaagcagcgcaataaagactgacccattgaccggggctgggggtggtggggcaatggggctgcaggcattgtctgggtgagcctccacaaggaacccctggaggccctcctggctcaaggtagccccaaacagagctggaaggtctgcaaagtccatgctggcattgtggtccgaggtcgctcgaatgagcccccgggtcggggccgctccccacagcacagcggccacaaccacaggaagcgggaaggctgcagggtgcatggcagcgggaggaaagaggctgaggaggccgcgcgtcctggtagcaaggagcagaagcggagttctgcgccctccctgcccctcctttaggatcccaggggtccaaccacccccaggtcccacttcccagctacatgggggcgccggggaaggaacaccaactcaaagaatgagatatccaacccgtttagtggagctgggtgggaggcactaaatgtatccttttctggtacggggataaaacgcggaaaggggacggagcctaacacaggtgacagaaaaacttcgggaagggtggcggagctcaaggaggtgggacttcctgctaggtgggccgtgttcccagcctctggaaaagggcttccggtagagaaaatcaggccgctttcagcattggatgcttgagatgaaggacttccggtcctctcctccctctggcctccgccgctccttcaaatctcgcgagagtgctcaccacctctcccgtcccctcgcagctgaatagttgctgtgtctatcgcgagagcgctccaacttggcgagccgtactcactcgatctcgcgagaccttcaaacaaactcttctctattttcccgcgattctaattcggtgaaaacagcgcctttcctctggtttccaaatcagttacgccccttctcgcacgcttccatcaagctcctcctntcantccgccttactcccggccgctctgttgctncgcnctngcccgc

SEQ ID NO: 75763 - DNA, 1061 bp, Homo sapiens; identical to SEQ ID NO: 61192
  misc_feature (1)...(1061): n = a,t,c or g

SEQ ID NO: 75764 - DNA, 1480 bp, Homo sapiens; identical to SEQ ID NO: 61193
  misc_feature (1)...(1480): n = a,t,c or g

SEQ ID NO: 75765 - DNA, 1690 bp, Homo sapiens; identical to SEQ ID NO: 61194

SEQ ID NO: 75766 - DNA, 4105 bp, Homo sapiens
tttcgtaaggctacagggtatccacgtgggttctgagcgtgtttctacgtccctggaagccggtcatttaagctcattcctcgccacggcttagtcaacatgggtcgctcgggaaagttgccctctggtgtctcagctaagttgaagcgctggaagaaaggccacagcagcgacagcaaccccgccatctgccgccaccgtcaggccgcccgcagccgcttcttcagccggccgtcaggaaggagtgacctgacagtcgatgctgtgaagttacataatgagctgcagtcagggtccttgcgcttgggcaaaagcgaagccccggagacgcccatggaagaagaggcggagctggttctcaccgagaagtcctcgggtaccttcctgagtggcctttccgactgcacaaacgtcaccttcagcaaagtacagcgcttctgggagtccaactcggctgcccacaaggagatctgtgctgttctggctgctgtcactgaggtgattcgctcccagggagggaaggagacggagactgagtacttcgctgctctgatccggaaggctgcccagcatggagtatgctcagtcctcaagggcagtgaattcatgtttgaaaaggcccctgcccatcatcctgctgccatttccactgccaagttctgcatccaggagattgagaagtctggaggctccaaggaggccaccaccacgctgcacatgctgacgctgctgaaggacctgctgccctgcttcccggaaggcctggtgaagagctgcagtgagactctcctcagggtcatgaccttgagccatgtgctggtgacagcctgtgccatgcaggcctttcacagcctcttccacgccaggcctggcctgagcaccctgtcagcagagctcaacgcccagatcatcacggccctgtacgactatgttcccagtgagaatgatttacaacccctgctagcctggcttaaggtcatggagaaagcccacatcaacctggtgaggttgcagtgggacctggggctaggccacctccctcgcttttttggaactgcggtgacctgcctcctttccccacactcgcaagtgctgactgctgctacgcagagcctcaaggagatcctgaaggaatgcgtggctccccacatggctgacattggctccgtgacctcctcggcctcaggccctgcccaatctgttgccaagatgttcagggcagtggaggagggcctgacgtacaaattccatgcggcctggagctccgtgttgcagctgctgtgtgtcttcttcgaggcgtgtgggagacaggcccaccctgtgatgaggaagtgcctccagtccctgtgtgacctgcgcctctcccctcatttcccccacacggcggctcttgaccaggcagtgggggctgcggtgaccagtatgggacctgaggtggtgctgcaggctgtgcctttggaaattgatggctctgaggagactctggatttcccacggagctggctgctgcctgtcatccgagaccatgttcaggaaacgcgacttggttttttcaccacctacttcttgcccctggctaacaccctgaagagcaaagccatggacctggctcaggcaggcagcacagtggaatctaagatctacgacacactccagtggcagatgtggacactcctgcctgggttctgcacaaggcctacagatgtggccatctccttcaaagggctggcacggacgctgggcatggccatcagcgagcgtccagacctgagggtcaccgtgtgccaggccctgcgcaccctcatcaccaagggctgccaggcagaggctgaccgtgctgaagtgagtcgctttgccaagaactttctgccgatcctcttcaacctgtatgggcagcccgtggcagccggggacactccagcccctcgccgggctgtgctggaaaccatcagaacttacctcaccatcactgacactcagttggtgaacagtctcctggaaaaagccagtgagaaggtgctcgaccctgccagctctgactttaccagattgtctgtcctggacctggtcgtggccttggctccgtgtgctgacgaagctgccatcagtaagctatactccaccatccggccctacctagagagcaaggcccacggggtgcagaagaaggcctaccgagtgctggaggaggtgtgtgccagtcctcagggccccggggccctcttcgtgcagagccacctggaggacctgaagaagacactgctggactcgctgcggagcacctcctcacccgccaagaggccccgtttgaagtgcctcctacacatcgtgaggaagctctcagctgaacacaaggagttcatcactgccctcatcccagaggtgatcctgtgcaccaaggaggtgtcggtgggcgcacggaagaacgcttttgcactgctcgtggagatgggccatgctttcctaaggtttggctcgaaccaggaagaggccctgcagtgctacctcgtcctgatctaccctggcctggtgggcgcggtgaccatggtcagctgcagcatcctggccctgacccacctccttttcgagtttaaaggtctgatggggaccagtacagtggagcagctgctggagaatgtgtgcctgcttctggcctcccgcacccgtgacgtggtcaagtctgcactgggcttcatcaaggtggcagtgactgtcatggacgtggcgcacctggccaaacatgtgcagctggtgatggaagccattgggaagctttcagatgacatgcggcggcacttccgcatgaagcttcggaacctgttcacccaaatttattcccaaagtttggaattttaacctgggggaaaaaggctgttggccccaaggagtaccacagagtcctggtcaacatccggaaagctgaggcccgggccaagaggcaccgagccctgagccaggctgccgtggaggaggaagaagaggaggaggaagaggaggagcccgcccagggcaaaggtgacagcattgaggagattttagctgactcagaggacgaggaggacaatgaggaggaggaaagaagccgaggcaaggagcagcggaagctggcacgacagaggagccgggcatggctgaaagagggcggtggggacgagcccctcaacttcctggatcccaaggtggcccaacgagtcctggccacgcagccagggccaggccggggcaggaagaaggaccacagcttcaaggtgagcgccgatggccggctgatcataagggaggaggcagacggcaacaagatggaggaagaggaaggtgccaaaggcgaagatgaagagatggctgacccaatggaagatgtgatcatcaggaataaaaagcaccagaagctcaagcaccagaaagaggctgaggaggaggagctggagataccccctcagtaccaagctggaggctctggcattcatcgccctgtggccaagaaggctatgcctggggctgaatacaaggccaagaaagcaaaaggtgatgtgaagaagaaaggccggccggatccctatgcctacatccccctcaacagaagcaagctcaaccgcaggaagaagatgaagctgcagggacagttcaaaggcctggtgaaggctgcccagcgaggttcccaggtgggacacaaaaaccgcagaaaggatcgtcgaccctgagggcccagggcccctgggctgccctgtggtccagtctgaggccctttcagcccccaggctgcccttgccaccagctccaggtgctcaagattctggcagagcctggactcaggatgacttggaactagggcttggctctcagaagtcctggattttggaaactccaaatggaatcacccttcagagacatccctggtgcctggagatgggaatgtggcctcagtgcctctgagtaggtgccatgaggcacctttgctttctgcccagagtggccatgagcaccagaacagatgatctccatttccgccagctgcctgtagccacgttgcatcctgcctgtggtctgggtgagatttactgtgaccagatgtagaataaatgtgtctcatcctgcaaaaaaaaaa

SEQ ID NO: 75767 - DNA, 2650 bp, Homo sapiens
ttttttttttttaaatatttgatatttttattggaaatgtttttgttagtttgaggggaagggtatgaagacagatctcaaggtaaagtcagagagggctgtcatcagtatgctggggagtttagggacaggaggcattggtaggggattagatgtagcagcagtcaggctgggatcaagatgcctggggggacatcttgatcttggcctttcagggcaagtgggaggctagaaaggtggcctaggaaaagaaacaacaatccttcaggtaaagggtaatagacttgggatgtgaaggcgttatgctgaaaggttctgtcacgaggggatcagaggacagtggggaaattgggtgggttatctagcctgtactgtctgcaggtcctgaaatttgatgctgtcatagtctttgcagtgggtcggttggaatgattctgggggcagaagctcagagccccttagtaggaatggaggcggcccttctgctgccactgctcagccccctccactgcatgacgaagggtggaggaaattcccagcaacatatggcccaggccttgcagcagtgtggaggtccaacgaaggagctccctgagtactttctttgggccaaagtccttgaaagtcacaactcatagagtagagcccgtagaatgtggctttgacattcaggctgccaaagaggtctcgagggttttgcttgtacacgtcaaaggtgaatcgggcgatgtccttgctgtgcttgggcctctcccgtcccaggccatatgacagcactccactccttgtagggctccagctctgaccagactgcaacaccatcaggcacgtgtcatcctccagcagctggaagaagtcctcactgtccactgcagttccatcctcctctagcaccagggttagcactccattcagcagtagggtctccaatgctttggctagcagctcctggcgggtggcagctgtcaggcctttccggatggtccgcttgtgatcacagacacggaaaggtcgctggggtggtggagctgaggtccagaccctccgtccaaactccgagcttatattagatactgacctgagtaagtcactggggttcagagctgagaggtactccatggtggaccggagagttccttccctggaacttctgggctgggtggttctctcctgtgctggggctttagtggtgttttctgttacaaacctgggatctcagcccaggacaaggtgggaatgagtcaagcctggactctggcccccctgcctggccagtaagaagggcaaagtccaaggggagggatgagggaggggccagatggggtcctggaggaagaattgcctggcaaaagccattggagcttgtatgtgtgtctttggtgatgacatgtgttgtgagggtagatgggaaccatgtaaaaggatgaaatgtgacttctggtgtttttttatttctatggagggaatttctggggacggtttctggctctcaggctctgagaagctgcagtttatgagtggctctgtgtgtgctgccacctactggagaagccataagctgcagctttaggaaaagggaacccggggcagagtgtggggaagtgggatggcagcatggcagggctttggaaaatgagaggtgagagtgtgtccaggaagggtgtaaggagaggatggatcctgatacatggattcaggatcattagggtcctgtctgggacactggccttcctgcttacctgctctttccttcctccttggtcggaggaggggctggctcactgctctggcttcattttccagagctgcctgctgcagtcacacttaggtcatcttctctcacttttctccttttgccgattagtggacgtgacagagatgtgaatggggcagggatgtcctttgatggcatcaagactttagcttctggtgcgctgtgtcccagctctgatttcagttgcagccgtgatggacagttgcatggaagctgagactctcactgacagtgaaaccctcaaatgaacacaatccctgctttcctgccaaggatccttgtagggtcccccagcttccccactttttttctgtgtcctgacaaagaaacacagagtaacttgattgccctgtgaccctggccagttgcatttcccctgcaggcttgagcccaagccagagccttgaaaaggtattcaggttgttgcccaaaacactgaaaaaaactggccctggccctgaaccaaataccttgaaccctcgtaaactccataccctgacccccttgttttggatatacccaggtagaacaactctctctcactgtctgttgtgaggatacgctgtagcccacgtcattaagtacattctcctaataaatgctttggactgatcaccctgccagtcttttgtcttgggcaatctatactttttctcagaggttcccaaggcctactgaagggacttaacatactcttaatggctttcctctctgcttgttttaccttatgccctcacttcctgagttaacctcccaaatacagggttcacctgtacccaagcccttagctcaagaatacaggatcacctgtacccaagcccttaggctcaagctctgctttggaagaacccaaactaagacagtgctcccggaatt

SEQ ID NO: 75768 - DNA, 718 bp, Homo sapiens; identical to SEQ ID NO: 61196

SEQ ID NO: 75769 - DNA, 6531 bp, Homo sapiens
tcacagctgtacaaacttttttaaaaacaaggttttgttacaaaaaacagttctgaacagttaacattgtaaaaaggtataaaaatacagggactctgagcactctgaggaatttcccgacacatgctcttaactaaggcggagagatctctgggaagccgaagtcagggcctgggcctctgacccctgccctgggcctggtctccctcctctttcccacgatcccatgctccagggctgaccagagacaagggctctccccaatcctggctacggctcagcctctcaaggaggaactttaatgatctacagtggctcatcctagaagaggggggctggactgcaggtgttgctgggaagcctctccaggcctggagctggagtacccgtcctcagcactgccagcagagcgcctcctcatcccaccccagcttgaggcccccaagggaccgggctctgggggggggggctgtccaaaagaagggtcctcccctgtcccaagcacaggggtgttctccagatgccagcaggagctcatttctctggggggccggagggtggggagaagggtgctgagctccttcgaagctcctgctgcagctggcccttcagtgtggacaccctctggcggtgggcccgctcccgagcctccagggtgcgctcagtctgcgcctgggcgctgcgcagccgctccacctcctgctgcagctccagctgctgctgctgcgcatccacctccagctgggccgggctgtggctctgctccagcaccaccacctgcgcctccagctgctggatctgcctctgcgcctctgccagctccagctcagcccccgtgagggtgcggtccaggcggcccttctctgcgctcagccgcactgtgtcctcatggctacgaagcttctcccgctccaccttgtccagcgtcctcctgagggctacacggtccttctccagccgcagggctgagcgctccacctcccgcttctcagcttccagctgagccagggcgcgctgcaggcttcccaggcgctcctgcagcagccgccgctcgtcttgcagcttctggacggtgttcagggctgcagcctcaccctcctgccgctgccgcagcacctcccgtagctgttgtagctggccctcggcctccacccgctgcagttccaggtcagccacctcgcctcgcaacgtctgcacctgctcgcccagggagctgctctgcttccgtgcctcagataatgcctgccgggcggcatccagccgttcctggagtacttggcggtcatgttcacaggcggtcagagccttctgcagatgcaggttcttgtcccgggtgctgttgaggctggcactgctctgggccagggcctctgtcaggccccgcaccttgtcccgcagggccccctcgctttcctccaccttggccagggccccattcagccgctccacggtcagctgcagggtccctgccttcacctcgctgtcggccacctgtctctgcagggaatccacccgatcctggagggcctgggcttgggcctcgcggtcactgaggcccaggcggctgcgctgcagctccccctcaagcgagcgccgctgcagctccagcttgacagtgcggctctcggaggcgtccagaacctccttcaggcgccgcttgtcgccctccagctttgtctcattggccttcatcttgctgatcttctcctggctggcccggagctcgctctcggtggcctgcaggctcctctccagtgtggccacctggtccagcgtggcccggcgctcccgctcactgcgccgcacactctcctcctgcagcgccagctccgcctggaccccgctcagccgcccatccacactgcgccgggcttcctcactctcagccaccgccttctgcagctgcctggccctcgaggttgcgctgtccctctcagcctccatctcggccagctggcgattcagggcactggtctgggtccgaagttcgtcccgttctctctgggcactccgcagctcttgcaggaattcccggagggccccgcgcactgcctccgggtccaggtctggagaggctggggaggtggcaggtcctggagatggtggctgggacccagggctgcattctaaggtgctggggctgttgagcccttccccgcttccttctgcgggtgcgtcccgggcaggggaaccgggcactggccgcggggctgggctgggcgcgcgaccgaggccgaggccccggcgcagagccgagcgcaggccacccagctgggcctccgccgcgcgccgctgcacctccacgcgggccagctcggcctccaggccttgtgcccggccctcggctgcgctcagccgcaggcccagctctgcggcctcggcccgcgccgcctccagcttcagctccaggccgcgggcgtggtccagctgctgcttttcagtgccacgcgcctcctccagggagcccagcaggcgtcgctcgcgggtccggaactcgccttcttgttcctgcagcttccgctgggctacctggagctcctgccgcatcacctccaggctggcctcgcccttcagcagcctctgccggaggcccagggtctcccgcctgctctccttctctgcccgctcgcccagcgccaggcggccctgcagctccgccagctcccggcccagtctggtgttctcactgtccagcatcttcatctgacgccggagctcctgcagctcccgccgagcctccagccgtgagcgctccacctcctgcagcccagttcgcagctccccggcctccttgcccacagctgtccgtgcctcctctaggagtgccagcttctgctccttgtcctcattggcaagcttcaggctgatgcgctcgctctctgccttcttcacagcagaccgaagctcctcattggaacgccgcagggcctcgcgctccttggcaccctcgcccaggctgcgtcgcagctcgcctgcctcctggcgctgcacctcccggccctcctggctctcacgcagcttgcgctgggcctccagcagctcccgccgcagcccgtcacgggcatcctccagcagacgcagctgggtccgaagctcttctgcctcgcgaagacaggagtcccgctgcttgcccaggtctcgggcctgctcttgcagcctcctcacctcctgggcgtgggccgcagcagcctcctcccgctgggcccgtaggtcccgcagctcagacgtcagagcgttcacggtgctccggtcctgctcctgccggctctgggcatctggtttctgccgctccatctccagggagatggtggccaggctgtgccgtgtacccatcaacttctctgacagcgccatcttctcagactccttcagagacaaggcctgctgcttctcgctctcggccaggaggaggccctcgtcatgctcctgctgcagggcagcaatctcctcactcagctgttccttctcagccttccgccgggccagcagctcctcctgctcacgctgcagctgactctgcagctgggcccgctcggcctccagctcccgccatgctgcctccttttcacgctggagtcgctgtaagtcctcctcgtgagctgcccgctgctcccgcagagaggcctgggcctcccgctcagcctgcaccagcttctgggccatcagctccttgtctagactggctttctcctgtgtagctattatttgctgccgcaggcccgccaactccccagtcagggtctccttggccagcagcagggcctgcccctcggcttccagctgctcccggcgggcctcaagctgggccagctgccgttgcacctcaaacaggctgccctccagggcttccttctccaagcgcaggcgtgtggcctcctctgacagggtcctgccttcacgctccgcagccaccagctgcacagccaggccagcgtgctccttggctagcgcctccttctcacgggccgctcgctccagcgcctccacttgccgctgggcctcccgccgggcctgctccagctcctgctcccgcccgctcagctgccgggagagctgcgctagctgctcctgcagctggctgcgctcatggcgcagcgtggggagctgttgttccagcgcctcctggggcctcgtccgccactcatacgggagccctccaggccctgccgtgccacctcctgctccaaccacagctcctccagccactcctgctctgccggcgccactgtggcctcctgctccgcctgccgctgccggccctgcagcatggccttttcttcctccagctgggtgacaaggcagttcagatccaacttgtcctgagcaaggctctcgttgagggcgctcagcttggacagggagtcctgcagggaggcctcctctgccctcagcttggtcacggagagctcgagctccatgcggccagcctcagccttggtcagcgcctcggccacctcggtcttctcggcctgcagcatgtcccgttgcagcgtggcgcggctcagcgcctccctcacctccaccagctccttggccaggactgagcgcttcccttccagctgctctggttgtctatggctgtgggacaaagggtgggtgggtggcccatgtcactttcctgccccgaacctcctgtagccagcgagatgctgggctggggaccaggcctgaggcaggagtttggagagaaacagcctgagccacagggcaaccaagcccactaccgcttagctccatgaccctgggcctccgttttcacatctgcaaaatgaggtaacacttacctcgtgacattgtttgattttttgagacagagtcttgctcttgtcgcccaggttggagtgcagtggtgcgatctgagctcactgcaacttctgcctcttgggttcaagcgattctcctgcctcagcctcccaagtagctaggactacatacgtccgccaccatgcccagctaattgttgtatttttagtagagacagggtttcaccgtgttggccaggctggtcttgaactccttacctaaggtgatccacctgccccagcttcccaaagtgctgggattacaggagtgagccatggcacctggcctagggttgttatatgtttgacatccgtcccatttgggaggccttctcatcagtcattttatgcctttaatgccattctaggtaggcaggaaaggggtcagggccagtgggcccatgtagcagatagggaaactgaggcccagagaggacaagccacttcttcaagaggacccaaactggatgccaggcaggccctctgcctctgggattttgcccatatggctcaactggcctaagtctgctggcccaaggaaaaatttcaacccaaccctgccctttcccccattcctctcgtgcaggggagttggcgggcctgcggcagcaaataatagctacgcaggagaaagccagtctagacaaggagctgatggcccagaagctggtgcaggctgagcgggaggcccaggcctctctgcgggagcagtgggcagcccaggaggaggacttgcagtgactccagcgtgaaaaggttcaggcagctggggaggggtgggcagaagtctgagccagtgtttcatcatcgttcttgctctgcctcggtctgtacatctgtgaaatgggactccctctctgttgtggaggccctggggacagctgggaggactggaggggtggtggggaggttgtggtccttattagacattcagatacccaggtcccaaatctggtccagccctggtaatcctgatgcagagggtccacaaccacatttgggaaatgctgacctaatgtacagcaggaaagcactttcatttgctaagaagtttccatatgaagggccacgcagacctgagcatgtagaaaggcaaggggccagggaagttactagaacactgactctggggttatattgcctgggtttgaatctaatcttggtcgcttactggtgatgctacccaaggtgtctgtgccttcatttccccacctgtagaaatagggataggatagtggaaggtattgaggatgagctgagaccatctgcatagagggcttaacatagtgactggtacttagcaaatgctccatgagttatgattgctggcactggcatgctctccagagtggccctcaggacaggggccctcagccaccaaatcctagacaggacttcctctgacagaggtgcaggctatgactacatggctccagggcatgccactcaccctgcagtccccgtggccttgggtggtggttatcacgcttctccatcagggggcggtaaagctctttccgaaagtgctgggattccaggcgtgagctatggtgaagctcttaaagaaggggtggcttggccaggcgtgctgactcatgcctgtaatcccagcactttgggaggctgaggtgggcggatcacgaggtcaggagatcgagaccatcctggctaacacagtgaaaccctatctctcctaaaatcacaaaaaattagctgggcatggtggcac

SEQ ID NO: 75770 - DNA, 827 bp, Homo sapiens; identical to SEQ ID NO: 60912
  misc_feature (1)...(827): n = a,t,c or g

SEQ ID NO: 75771 - DNA, 2346 bp, Homo sapiens; identical to SEQ ID NO: 61199
  misc_feature (1)...(2346): n = a,t,c or g

SEQ ID NO: 75772 - DNA, 1312 bp, Homo sapiens; identical to SEQ ID NO: 61200

SEQ ID NO: 75773 - DNA, 1972 bp, Homo sapiens
  misc_feature (1)...(1972): n = a,t,c or g
cggggaccccgagctagagccgcagcgggacctgcccggcccccggcgcccggcggccgccgccgcgatgtttccccgcgagaagacgtgtgaatcatctcgttcgcgggccttgcggcttgggtgggcgtctacttacgtcggcgtggccctcctgcctccgcgagcacgcgccccttcctggtggccaacgccacgcacatctacggcgcctcggccgggggcnttcacggccacggacgctggtcaccggggtctagcctgggtgaggctggtgccaaagttcattgaggtatcttaaagaggcccggaaagcggttcctggtgtcccctgcacccctccttcaacctggtaaaagatcatgccgcagtttcctgctgaaggtcctgcctgctgatagccatgagcatgccagtgggcgcctgggcatctccctgacccgcgtgtcagacggcgagaatgtcattatatcccacttcaactccaaggacgagctcatccaggccaatgtctgcagcggtttcatccccgtgtactgtgggctcatccctccctccctccagggggtgcgctacgtggatggtggcatttcagacaacctgccactctatgagcttaagaacaccatcacagtgtcccccttctcgggcgagagtgacatctgtccgcaggacagctccaccaacatccacgagctgcgggtcaccaacaccagcatccagttcaacctgcgcaacctctaccgcctctccaaggccctcttcccgccggagcccctggtgctgcgagagatgtgcaagcagggataccgggatggcctgcgctttctgcagcggaacggcctcctgaaccggcccaaccccttgctggcgttgccccccgcccgcccccacggcccagaggacaaggaccaggcagtggagagcgcccaagcggaggattactcgcagctgcccggagaagatcacatcctggagcacctgcccgcccggctcaatgaggccctgctggaggcctgcgtggagcccacggatcctgctgaccaccctctccaacatgctgcctgtgcgtctggccacggccatggatggtgccctacacgctgccgctggagagcgctctgtccttcaccatccgcttgctgggagtgggctgcccgacgttcccgagggacatccggtgggatgaaaggagcagacggggcagcatctgccaggtacctgggtgatgcgcgccaagaggaagctgggcagggcacctgccctccaggctgccggagcaggtggagctgcgccgcgtccagtcgctgccgtccgtgccgctgtcctgcgccgcctacagagaggcactgcccggctggatgcgcaacaacctctcgctgggggacgcgctggccaagtgggaggagtgccagcgccagctgctgctcggcctcttctgcaccaacgtggccttcccgcccgaagctctgcgcatgcgcgcacccgccgacccggctcccgcccccgcggacccagcatccccgcagcaccagctggccgggcctgcccccttgctgagcacccctgctcccgaggcccggcccgtgatcggggccctggggctgtgagaccccgaccctctcgaggaaccctgcctgagacgcctccattaccactgcgcagtgagatgaggggactcacagttgccaagaggggtctttgccgtgggccccctcgccagccactcaccagctgcactgagaggggaggtttccacacccctcccctgggccgctgaggccccgcgcacctgtgccttaatcttccctcccctgtgctgcccgagcacctcccccgcccctttactcctgggaactttgcagctgcccttccctccccgtttttcatggcctgctgaaatatgtgtgtgaagaattatttattttcgccaaagcacatgtaataaatgctgcagcccagaaaaaaaaaa

SEQ ID NO: 75774 - DNA, 1282 bp, Homo sapiens; identical to SEQ ID NO: 61202

SEQ ID NO: 75775 - DNA, 2444 bp, Homo sapiens
ggtgtgtgtgcactgtctggtcaagagcagtgtccatttgcttttctgtggcaacagtgcacgtggggtgggtggggggtgcgtacggtggggcttgtaggttaagatgtctctgcggtggtgttgtggggctggaggccgagccaggcacggcagctggccctctccaggcgcatggaggaattctccctttgccgttccaaggatgccgccgcctcctaccggggctcccgggggggtcagccaacactacaaagggcagcgagtcctcagggcgcccgggagccaccagtctgctctcgggctctactcagactagcgccaacagtctccgcggacagactcgcatcagccgccctggggctcggcctcctcccataggctcctcttcctctctttcattcaagtcttcaaactttgaaaaaaatatgagcttttgccaaataagacgggatagtttatggagttttctgaggcgcattgaactctggtcagcccctcgagcgtgggctcggccatcagcaggcccggtgggttggccgggctggccctcccaggctgcctttctctctggtcgcggcctggcccgccccggcctccaccgccgcaattcatgctggtgccgcgcccgcagccccactcctggtatgcctgagattctccaggggccaagccggtcctccttcccggcccactcttccagggccaggacgctcccgcggagccagcccatcgtggctgggggtcccaggggctggaggcctgcctggttagcctctgtttcccagacattgactcgaggcgcctccagtcctctcaaccccctgactttcaagtcctttcaagtccttgtgccctgaccaagttatgaggaaaagagggctgagggcctggaggtgggctcgcaccccctcgaacccacctagatgtctcctcctccccagcctatgagttcagacttggggggctccatctgtccctccctgaggtccctcatcttgtccctgctctgattctgtcagcagatcctgaacactccttggtggggacccatgcctccaaggctgcccccaatgccagctgtcctggggaaactccccagaactctcggggaaaggcccgagaaccttcggaggaagcctccgggactcctcgccacctgctctgtttctctcccggccccactgccttcaggtatcaggaagagggcaggcccctgtgccccctctccccttcccagggcggccaacaatactccaccatggggcgcttcctttcttctctggaaactaagacattggactgaaggaactggcctgaggggggctgaccgggggcccgtgctgctgggagctctacgcacaagaggccgccggggtcacggacaggaacctcagcccagggtgctggcctttctccttcgcaggagtcccccaaaatccacacagcgactcgagcagccttccactcagccagaggagggtcgggctcccccgcctgctctcggtggtggcgtctggcccttcctgccgtttccaaggcctccggaagcaccaacccagttctcagttacctcctctggccggaaggcctcacgttgtcctccagagctgctctgggcccagggctggctccgtgaccacctgatggacgtgctgggcagcatgggctcccaaggcagcatccccagctgctctcccaccccaccccagctgcccggcggctgggcccacgagggctctggggacacttccataggaaaggggcctggcactttgtgattgccacgtgtttcctgttaagccgcctgcccccagtgcaaatctctgtgttttgctctctcctgaacaaaaatgtaaaccgacgccggaaagcaaatggtatcgaatacctttcttgcccataagggtttttacaaagaacgtgtctcactaggaactaggacactcatcggcccgagaccacctgatggacgtgctgggcagcatgggctcccaaggcagcatccccagctgctctcccaccccaccccagctgcccggcggctgggcccacgagggctctggggacacttccataggaaaggggcctggcactttgtgattgccacgtgtttcctgttaagccgcctgcccccagtgcaaatctctgtgttttgctctctcctgaacaaaaatgtaaaccgacgccggaaagcaaatggtatcgaatacctttcttgcccataagggtttttacaaagaacgtgtctcactaggaactaggacactcatcggcccgagaccaactcctggataaaaggaataaggagaatcgtgtttgtaacgagttacaggattgtttctttcctggattttaaacttttgttaaattgtgaaattatggaggagttttatagaaaaaaaaagtgaaataaagtcagatgggaaagcagaaaaaaaaaa

SEQ ID NO: 75776 - DNA, 1541 bp, Homo sapiens; identical to SEQ ID NO: 61204
  misc_feature (1)...(1541): n = a,t,c or g

SEQ ID NO: 75777 - DNA, 1437 bp, Homo sapiens; identical to SEQ ID NO: 61205

SEQ ID NO: 75778 - DNA, 1013 bp, Homo sapiens; identical to SEQ ID NO: 61206

SEQ ID NO: 75779 - DNA, 1478 bp, Homo sapiens; identical to SEQ ID NO: 61207

SEQ ID NO: 75780 - DNA, 3380 bp, Homo sapiens; identical to SEQ ID NO: 60922

SEQ ID NO: 75781 - DNA, 1611 bp, Homo sapiens
ttttttttttttctcaaccaaatgttttgaatttattataatcagtgcttctctacaactaatgattcttgtcggtttgcaaaccactgtctgcctttatttacctacacaaacacggaacagaatttccaataggagaggttcacacagctaacaaagcatagagtgtgtgacctcaataaggcattcaacaaagacacacgccgtatttccctctgactgcgttcccttaggatgctctgatgttggcgtcgcattcttctaaaagtagaatcaaatcttcaatcaggctgtgttctctgccatgtgtcactctcataatatcaaaagccagtctcagattcttcattgcttggggaaacatgccttgatgtagctgcagtttgccaactttcatcacttgaacccctctgacgggatggcttcctgggaaaaaaatcctgtatggctccatggtccgagtaccatagaacaaggcttcctccaacaggccgaggttgatgcaggcatccatggcgcagtcgagcaccttcagctggtagatgttgatatcgggaagccgttcagaattgctgcttatgatcgcctggcacatggccagaacctgctcccacttccagtgtgccttcagttcttcaatttttttcagggattcttgaacttccttccatacttgctcatcaccagttagcatatcagcatccttgtcctgggtttggcaacggaaaccagtcacattcaaagcagtactggtccctcagctgcttccggcgctcctcactggtcatcagcatatccaggtagcagatggtgagctcctctcccacctcgatgtctcggactgctcgcagtaagaggtggggcccattgaacacaatcgaacagttggggtcacagctgtgattgagcaaagagatactgggatataggccaacaccaacttcctgcatctccgcattacagatggtgaaagagttgcagatcacttttgcaaaggcttcaaaaaggtcaaaggcaggtggcagctgagaggcatcctgtatttcttctctcatgaaatgttgaaatgtcattacgagttgcctgaggccctctttcttatcttcagtcagtttgttaatatttgactccagatcataaaatgagtaaagcttctctgattctgaaggtgctccatccataagtttgaagacaactctgccaagaagtcgaacggagtctggaggatatctgggtttgcagcttttaaggcatttgcattcccgcttgtggtctggccaagcttttttctgacacttagcactacagtatttggcgacgcggcactgagagcatcgcatcagcttttccttcccgagaaggcagcggtcgcagacgacgccacgactccccttgcacaccgtgtacgccaagggatccgagcggaagagtagctctccggggcgcagcggggtcacggcgcgcagcccgtttcccctgttggcggttgcgaacttttccaccttcagcggctccatcctcccgcagctccggcacctcagacggctacccgcgcccagcagcgggcgtctcacgggctgccgggacccgcgcgcctgcgccctgacgaaa

SEQ ID NO: 75782 - DNA, 3401 bp, Homo sapiens; identical to SEQ ID NO: 61210

SEQ ID NO: 75783 - DNA, 2622 bp, Homo sapiens; identical to SEQ ID NO: 61211

SEQ ID NO: 75784 - DNA, 1558 bp, Homo sapiens; identical to SEQ ID NO: 61221

SEQ ID NO: 75785 - DNA, 2179 bp, Homo sapiens; identical to SEQ ID NO: 61222

SEQ ID NO: 75786 - DNA, 1911 bp, Homo sapiens; identical to SEQ ID NO: 61223

SEQ ID NO: 75787 - DNA, 3092 bp, Homo sapiens; identical to SEQ ID NO: 60680

SEQ ID NO: 75788 - DNA, 754 bp, Homo sapiens; identical to SEQ ID NO: 61225

SEQ ID NO: 75789 - DNA, 2297 bp, Homo sapiens; identical to SEQ ID NO: 61226
  misc_feature (1)...(2297): n = a,t,c or g

SEQ ID NO: 75790 - DNA, 6310 bp, Homo sapiens; identical to SEQ ID NO: 61227

SEQ ID NO: 75791 - DNA, 1017 bp, Homo sapiens; identical to SEQ ID NO: 61228

SEQ ID NO: 75792 - DNA, 1572 bp, Homo sapiens; identical to SEQ ID NO: 61229

SEQ ID NO: 75793 - DNA, 1388 bp, Homo sapiens; identical to SEQ ID NO: 61230

SEQ ID NO: 75794 - DNA, 2843 bp, Homo sapiens; identical to SEQ ID NO: 61231

SEQ ID NO: 75795 - DNA, 1656 bp, Homo sapiens; identical to SEQ ID NO: 61232

SEQ ID NO: 75796 - DNA, 1846 bp, Homo sapiens; identical to SEQ ID NO: 61233

SEQ ID NO: 75797 - DNA, 3560 bp, Homo sapiens; identical to SEQ ID NO: 61234

SEQ ID NO: 75798 - DNA, 1461 bp, Homo sapiens; identical to SEQ ID NO: 61235

SEQ ID NO: 75799 - DNA, 1476 bp, Homo sapiens
ggtcgactttgtgtttttttgttttgttgttgttttttctctgtccaaccatgagacatgaggggcttcttggtgtcatttccactccccttgccaatatttatttggaaacatttcaaactacagaaaagttatgcaaattacatcaggaacaccacacatcccctgtgcggagatctgtgctttatgtctttgaaagtaagttgtcgagatcacagcactccacccctccacaccgaagcccgcagcttctcaggaaagggcagtcttgtgtgatcagtgcatatcatcacacacaggatgtctgacactgggcaccacgctgccatctcagagtccatttcaatgctgggggtcatcggttttcagcaggttcttccctgggttcaacgcgtcttcccgccagagggatggaatcttgggtgagtgttgaaatgcgtcagaaacaaaaacgcaaagtggaactggagcacgtcacagaccttggaccagaagtggcctgtgaggcactggaagagacgccaccgtgcgagctgatggtcacacagcttgaggaccacaaagcccaggcaagagagcacccccaaagctaagtaggtagccgagggtgttgctgcccatagtgcctgtggggtgcgcagcgcctgccccacagcgggcaccacgtgagcacccagtgcgacctcgaagccctggggatgcagcagagcgaggccataactggccagggagacgcactcaagagagaggaacagccaggggccgccagccgcggtctaggtagaggcaccaggccacgggccatgcaaagatgggcagtgtgagccactggtccagcaccgcggcacggcgccactgcgtccacaggcgcagccactgcacggggccatagagcagggccatggctgcgaacacgtccttcaggtagcggggacccagccccatcgcgccgcccctgtgcagccacgacagccccagcagcgtgtaggccatgttcacgagtgagttgaacggcatggccaggaaggcagggaggccggccacgggcgcctcggcgtagtgctcatagcccacttgcacggaaacactgtcgaaaatgcccgtgaacacagccacggcacagaggccaccggccacggccacgtgcacgaaggcctgcccccactctggattcatctggaaccggcggcgtgacctggggcagggagcttcagagagcagccttcaatacgcagcctctgcagaacactctgggcctcccggctgagccagcagaaagaagccccgtgatttcgtgatttccgaggcagatgctgcgaccttgccccgaaggaaggcaggagtcctgctgattggctggcgccagcggaggaacgttctgcctttttcagtattggcgcgaaaaggccagctatcaccatacgggtatttcgcctcacttcgcctcgctgggggaaattcaaatctccgaaaagg

SEQ ID NO: 75800 - DNA, 2073 bp, Homo sapiens; identical to SEQ ID NO: 61236

SEQ ID NO: 75801 - DNA, 3070 bp, Homo sapiens; identical to SEQ ID NO: 61237

SEQ ID NO: 75802 - DNA, 2321 bp, Homo sapiens; identical to SEQ ID NO: 61238

SEQ ID NO: 75803 - DNA, 3018 bp, Homo sapiens; identical to SEQ ID NO: 61239

SEQ ID NO: 75804 - DNA, 1372 bp, Homo sapiens; identical to SEQ ID NO: 61240

SEQ ID NO: 75805 - DNA, 1465 bp, Homo sapiens; identical to SEQ ID NO: 61241

SEQ ID NO: 75806 - DNA, 1892 bp, Homo sapiens; identical to SEQ ID NO: 61242

SEQ ID NO: 75807 - DNA, 2559 bp, Homo sapiens
actatagggcaaaagtgtgttttgttgttttgtgtttttttgagctcggtattatatatttttttctcattaaaggtttaaaaccaaaagcgggtttctctttgcagcaaatatacattaaaatagagtctctgtacagccaagggctctggggcctgctatagccccaatgtccctgcgcatcccttgccaaacccaaaaaataaatatagtgttattgctctgcagggcataagaggcagtgctctcctaccccctgaggaggctcgtttggggagctgattggggaagccctggccaccccaaggggtccagggggctggagtcctgatttggaggtattgcttcaaggggggacactaaatgcccaatgcaaatgatgagagggcggagcgaaggggggcatggggccttttgctctccaagtcccactctgctttgaagagggggtaggatttaagcagcagcaaaagcatcacccacttgggagactctggcctccatccccttccctccctgagataggtttctgcctcccacgcatcccgtgcagccccctatggcttccgcaaggccccctacactctgggggcaccgttatggcttgcaaggggcagcactgtgccccagaaccctggacacacgttcccaagcttctgaacaacccctaggagggggaggagagggcgtggggcctgttcccaggggctgatggcattgcccctggccctgccagcaggctgtggcactgcccagaccccagctccgccccagcccttggggctgaccccatgctaggcaggtcctgccagaacccccaccagtcccaccccttgcctcagtccatcatggcctcgagcatctccaagaacagcttgtgcatgggcaccttgccctccagcttcaccccatagaaatgggccagcactttgcccgctgtctggcggaggagcggtagcgtgagcagcagcctgcccgcccgccgccgctcagcaccccctccggggccagcccggccggcttcatactccagcagggcctcgtgcaggagcttctcgcagctgctccacagcctcggctcatcttcgatgtgcacagagtctgaattggcaagggccaaggcctttagtagaacatactcctctcgctccagccgcagggcctgcagccgccgcactagttgcagcagggcagctccccaattcccccagtccagctggccgtgccccctcttcatccaggactaagtactcagcgaaggccagctcatcctgcagcgtcagggagcgctgagccacacccagcaccagcacctccatccacacgctctgcagtactgacatctggtcagacagcgacagcgatgagaagcctgggatgctcttggcccagctgatggtgaccacaatctctcggtcaaagaggtcacagagggtagccacggctgggaggtgcccatcagggcctgcggggtcaggcatggcatagagcttctcaggctcaaccaccagcagatgagacaccagtgcattcactggggctgctgtcttccgggggcctccagcgactgccaggggcccagcagggaaggggcccgggaagggcagtgggtccacctccggccgccgcttgtacttctgccgcccaccccggacgcggtccaggcgcactccctccttgagcatgcccacccgcaggcacttggtgaagcggcaggcctggcaggccttgcgtctccgcttggtgatctcacactcgttggaggccggacagctgtactcgatgctcccctggatggtcctcttgaagaaggctttgcaggcctcacaggatgccacaccatagtggtagccggaggccacgtccccacagaccaggcagaggcgcttgggcagggagctgagcaccagcttcccaccgccctgctcgccaggcccagccccctccccatcctcctcttccttgtggcctgggaggcagcgagtgggagctgcgaccaggggccagggccacaggaggctcggtctctgtctccgaggaaccctttggactgtcagggctggccggctctgccttgatgtagagaggctcaatgcccaccacctggctggacatggcgctggtcacctggggctccggcagcgcggtcgggcaggcatgggggccgagcggcccggagtgccggagtgagccgggggccgcgggcggcccctcctccgccgttttctcgggccgagccgccccaccgcgccgcgtcccctcactcggcggcgcccgccggctgcttgtagcatacactctggttttcctcccaccgcaccaggcactttgtggtttctgagcatcttcccaagctcttccatccagactgccagggctgtccttggagctcatctccaatcccatggcaatcttccccagccgtggggctctcacgtttctacctctagcctggacttgctgtgagctccagacccatctctccagctgcctccttgacatcctgcatgtctagaaggcatctcggaccgaacacagcctacgtggactccacgtgtt

SEQ ID NO: 75808 - DNA, 4528 bp, Homo sapiens; identical to SEQ ID NO: 61244
  misc_feature (1)...(4528): n = a,t,c or g

SEQ ID NO: 75809 - DNA, 2018 bp, Homo sapiens; identical to SEQ ID NO: 61245

SEQ ID NO: 75810 - DNA, 1907 bp, Homo sapiens
tggccgcccgcgtatgtaagattggatcctttaaaacggccgccccttttttttttttttaagtgaaataatagatttattcaaagagaaataaaatgtcctgggtaaagcttctgtaataatactatttctgatactgtatctctgaaaaatggctaactagtcaccttatcaatacatttaaggcatcaataataggtaccactgaggacatacattgtgaagaaagagaagaataagtcaaatactaaaacatacttatcatgacaactcaaggtgacatgaatatttaatgaaaatttagaatataacaacatatgactctcattctgtggacataaaaggaaaaatacagtaattcattttactcattacattttacaaaatcagcccaatgaagcagtattttttaataaaaacagtaatttaatttcaaacaaatatattaccatcctattcctttatcttgtatatatgtatctaattggcaaaacatactttactgaaatcagtaacaatccaatccatgatacttcaattgcttcgatcaataaacatcttaaatttgaaactcatttttcttatgccataagcctgattatcagttctataaaaacgctacaccctattgcttggcccattaagtgtaactagtcttctgcacaaggctaagtggctaaggtacttttgaacaaccacacacaattcatcaagcacacacactcactcctgctcctctcacacacggccaccagagcagctcccctagttctcttgttcctcatagtgagcatagccactagcataggtccttcctaaattcaaattagtaaacaaatctgatgactcagtatctgaatcctttctgccttcatcttcttcctcttcatcatcctctgcttcatactcatcctcctcctcatcgtggtagctggtatcaccatacttatcagatgaaaggttcttccaataagcatcatacccagaagctccatctccctcttcacctccagtctgcctgccaaatttcagggagcgtgttgacatgctaaggtccttagtctcctgagtttcatgcccacatttaggacaaggaggctgttttcctttttcttgcttaaacactttgctccttgtatgatcatcacagaaacaagccttacaacggagacatgagtgctgaccaagccgattgcatgaaacacatttaaatgtttctgcctctaaaacctggcagctggcttgatgctcaaattgatcatcttcacagagaaagttatggcaaaaagaacaactgaatattctgcctccatggtcccacacgcctcgttcacattcaacaacactcagcatcggtaagagggcaggcacaagcatgtgtactgagacacttcctcccatggcaaacccaagcttcacagaagtcacatattgcacccaccattgcaaggccagtactgtatacaccagcatgctttatgacacagtctgaagacttcatcatgcactttgttttcccacactgtgcacaaattggtaacttctgtacagaattacaaaagtagcaaaatgctctattcttctgccgcctctgacacttgtcacattccattgaggcattacatggatgtttagctaaatctatagtgcttcttgatgctcttagttgtttttcacgttctcggcggttctcagccttcttcctcgcaccagtcttttttttaggcattttcccctcgtgcgcgctccgggcaaacctcgctcactttcgccgggagaccggactcactcagggggccgagggacagggaatggcgtgaggcccacccgcgacagcagtaaatccaactcgtggaccaggactccgggaaagaaggtactaacagccagggaggctgacagccgat

SEQ ID NO: 75811 - DNA, 1736 bp, Homo sapiens
ggtgcgtcgcgggggcggggccgcgcaggcgtaccgggtgccccggctctggagcataaacaagagcggggacgggatgaggcggcggttgatcccagggtggcgagtggcggcgaccgaggcggcgagcggggcccggcgccgaccctgagtgcagcctgacccgccctcgcgcgcgcgccctccccggccgggcccactcgccgcgcgcccagccatgaacctggcgagccagagcggggaggccggcgccggccagctgctcttcgccaacttcaaccaggacaacacagaagtgaaaggggcatcaagagcagctggtcttggccgtcgcgctgttgtctggtccctagctgttggtagtaagtccggttataaatttttctccctttcttctgtggataagctggaacagatctatgaatgcaccgatacggaagatgtgtgcattgtagagagattgttctccagcagcctagtggccatcgtgagccttaaagcaccaaggaagctaaaggtttgccactttaagaagggaactgagatctgcaactacagctactccaacacgattctggctgtgaagctcaacaggcagaggctgatagtatgcctggaggagtccctgtacatccacaacattcgggacatgaaggtgctgcatacgatcagggagacgcctccaaaccctgcaggcctgtgtgcgctgtcaatcaacaacgacaactgctacttggcgtacccagggagcgcgaccatcggagaggtgcaggtcttcgataccattaatttgagagctgcaaacatgattccggctcacgacagtcctttagcggcactggcctttgacgcaagtggaactaaacttgccacggcttcggagaaggggaccgtgattagggtattttccattccagaaggacaaaaaactctttgagtttcggagaggagtaaagaggtgcgtgagcatctgctccctggccttcagcatggacggcatgttcctctccgcctccagcaacactgagaccgtgcacatcttcaaactcgagactgtgaaagaaaaacccccagaggagcccaccacctggaccgggtacttcgggaaagtgctcatgggcctccaccagctacctgccttcccaagtgacagaaatgttcaaccagggcagagctttcgccacggtccgcctgccattctgcggccacaaaaacatctgctcgctagccacaattcagaagatcccgcggttgttggtgggtgccgccgacgggtacctgtacatgtacaacctggacccccaaggagggcggcgagtgtgcccctgatgaaaccagcaccggctggaacggcagtcttggaaaacgaccaaatgagaatcttgggaactctgccttctcacgaattgcccccttagtcacctcagacattacggcgcagcttgcaggaaaaggtacttacgtgccttcatccccaacggagacttgccctacacgagacgaccctgggtgctgtgggtggcgcctgccctggaggaccgaaggcccacgccctgcgccctggatgaggacagcgagcacccgcccatgattcttcggactgactgaacttgacctgtgacctctgacccggggagcagagaacactggcttcacagaggactttgtgcattgctgcctatgaactttgacctgagtcgggggagaggatggcagagactttattaaaaaaaaaa

SEQ ID NO: 75812 - DNA, 1483 bp, Homo sapiens; identical to SEQ ID NO: 61246

SEQ ID NO: 75813 - DNA, 3707 bp, Homo sapiens; identical to SEQ ID NO: 61247

SEQ ID NO: 75814 - DNA, 2864 bp, Homo sapiens
agcggccgccgcggtcgccgccgccgcctcctcctgccgtccgctcggctcaggcgcgggccctggccccactggggcggccccggtctccgcccctgcccccgggccgggcccggcaggtaagggaggcggcggcggaggcagccccgggcccacggcgggcccggagcccctgagcctgccggggatcctgcactttatccagcacgagtgggcgcgcttcgaagccgagaaagcccgctgggaggccgagcgcgccgagttacaggctcaggtggccttcctttcaggagagaggaaagggcaggagaatctaaagacggacctggtgcggcggatcaagatgctagagtatgcgctgaagcaggaaagggccaaatatcataaactgaagtttgggacagacctgaaccagggggagaagaaagcagatgtgtcagaacaagtctccaatggccccgtggaatcggtcaccctggagaacagcccgttggtgtggaaaggagtggctgcaacttctcctacagtacctgcaagaggtgggctacacagacaccatcctcgacatgcggtccaagcgcgtccgttccctgctgggccgctcgctggagctcaacggggcagtggagccgagtgaaggggcccccagggctccaccaggccctgcagggctcagtggtggggagtcgctgctggtgaaacagatcgaggagcagataaagaggaacgcggcaggcaaagatggcaaagagcgcttgggcggctcagtgctggggcagatccccttcctgcagaactgcgaggacgaagacagcgacgaggacgatgagctggacagcgtgcagcacaagaagcagcgtgtgaagctcccatccaaggctctggtgcccgaaatggaagacgatgatgaggaagacgactctgaggatgctatcaatgagtttgatttcctgggctcaggagaggatggggaaggggctccagaccctcggcggtgcactgtggatgggagcccccatgagctggaaagccgtcgggtcaaactccaaggcattctggctgacctgcgggatgtggatgggctgcccccaaaagtgactggcccgcctcctggcacaccccagccccggccacatgaagacgtcttcatcatggacactatcgggggcggggaggtgagcctgggggacttggcagatctcaccgtcaccaacgacaacgacctcagctgcgatctgtctgacagcaaagatgcttttaagaagacgtggaaccccaagttcaccctgcgctcgcactacgacggcattcgttccctggccttccaccacagccagtcggctctgctcaccgcctccgaggacggcacgctcaagctctggaacctgcagaaggcggtcacggccaagaagaatgcggcgctagatgtggaacctatacatgctttccgggctcacaggggcccaagtgttggctgtggctaggggcagcaacagtgaatactgcttacagtggcggggcagatgcctgcatccatagttggaagattccagaccttcagcatggatccctatgatggctacgacccaagcgtgctgagccacgtcctggagggccacggggacgccgtgtggggcctggccttcagtcccacctcccagcgcctggcttcctgttctgctgatggcaccgtccgcatctgggaccccagcagcagcagcccggcctgcctctgcaccttccccacagccagcgagcacggggtccccacctcagtggccttcaccagcaccgagcctgcccacatcgtggcctccttccgctctggcgacaccgtcttgtatgacatggaggttggcagtgccctcctcacgctggagtcccggggcagcagcggtccaacccagatcaaccaagtggtgagtcatccaaaccagcctctcaccatcaccgcccacgacgacaggggcatccgcttcctggacaatcggacaggtaagccggtgcactccatggttgcacacctggacgcagtcacctgcctagccgtggaccccaacggcgcattcctgatgtcaggaagccatgactgctccctgcgtctctggagcctggacaacaaaacgtgcgtgcaggagatcacggcccaccgcaagaagcacgaggaggccatccacgctgttgcctgccaccccagcaaggccctcattgccagtgctggcgctgatgccctggccaaggtcttcgtatgatgcccacctggccctgccctggccgccacgctggctggggtgtagggccgggcaggtggggctgaggggactcccagcctcgctggaggtgcagaggcctggcctctgtctgtttgccatggagcctggtggtgctaacggccctttccccaggaatccctccccaacggctgccttccccaagcatccagcctggggatgggcccctttcaggaatcacccccgaggatggcctcggggtttccccctgtgccctgacagccgctcctggtatcagagctgctttccagagggcagcacagccagggccgggtgtctttagggatcagtttttccaagactccagaaggtgccaggttctccccttgagctcctgctcccccatcccccatcctcccagacctgggcaggagctgtgctgggagaaagggtggcagccgggagcctcagagctgagccccggcctggctgcccctcccctccggccctctccactgctttccagacactaaccaaggcttccaggccagggattgcccaacactcctagggcaagcctcccagcgccccatggggtcgcccatgggtagagacggctttcttgtgcccctc

SEQ ID NO: 75815 - DNA, 2066 bp, Homo sapiens; identical to SEQ ID NO: 61249

SEQ ID NO: 75816 - DNA, 2355 bp, Homo sapiens
acgcgtccggcttttccggagctctgcacagatgctggggcactgagcaaacagccctcagtttctggagctgttccgagtcccgtggagtctccatctgagccctttcctagtccaggcatcccgatgttggtggatggcccatctgagcggccagccctgtgcttcttgctgttggctgtggcaatgtctttcttcggctcagctctatccatagatgaaacacgggcgcatctgttgttgaaagaaaagatgatgcggctgggggggcggctggtgctgaacaccaaggaggagctggccaatgagaggctcatgacgctcaaaatcgctgagatgaaggaggccatgaggaccctgatattcccacccagcatgcactttttccaggccaagcatctcattgagagaagtcaagtgtttaatattctaaggatgatgccaaaaggggctgccttgcacctccatgacattggcatcgtgactatggactggctggtgaggaatgtcacctacaggcctcactgccacatctgtttcaccccaagggggatcatgcagttcagatttgctcacccaactccccgtccatcagaaaaatgttccaagtggattctgctggaggattatcggaagcgggtgcagaacgtcactgagtttgatgacagcttgctgaggaatttcactctggtgacccagcacccggaggtgatttacacaaaccaaaatgttgtctggtcgaaatttgaaaccatcctcttcaccatctctggtctcatccattacgcaccagtgttcagagactatgtcttccggagcatgcaggagttctacgaggacaacgtgctctacatggagatcagagccaggctgctgccggtgtatgagctcagtggagagcaccatgacgaagagtggtcagtgaagacttaccaggaagtagctcagaagtttgtggaaactcaccctgagtttattggaatcaaaatcatttattcggatcacagatccaaagatgtggctgtcatcgcagaatccatccgaatggccatggggctccgaatcaagttccccacggtggtggcagggtttgacctggtggggcatgaggacactggccactccttgcatgactacaaggaagctctgatgatccccgccaaggatggcgttaagctgccttacttcttccacgccggagaaacagactggcagggtacttccatagacaggaacattctggatgctctgatgctgaacactaccagaatcggccatggatttgctttgagcaaacaccccgcagtcaggacttactcctggaaaaaggacatccccatagaagtctgtcccatctctaaccaggtgctgaaactggtgtctgacttgaggaaccaccctgtagccactctgatggccactgggcaccccatggtgatcagctctgatgacccagctatgtttggtgccaaaggcttgtcctacgatttctatgaggtcttcatgggcattggggggatgaaggctgacctgaggaccctcaaacagctggccatgaactctatcaagtacagtaccctgttggagagtgagaaaaatactttcatggaaatctggaagaagagatgggataagttcatagcagatgtggctacaaagtgaggagaagctagccagccctctacaagctgtcttcttgcacacgctgtcacttcctctcactcgttcttgaatcagctccatgtgcccatgaaatcaatggcctctgtatggagcgaccctgtgagaagcacttggctggctgagcaaattcatcctctggaaatattctctctcagccacagtgacattgaccctcttggttttctcctctctctggccatttcttccagtttccctatttcagagtcttctcctctctctgatctctgtgctgtttcctcaggactcagtcctgggctctcttctattctggtctctttatttttttttttttgtattttttcgagatggagttttgctcttgttgcccaggctggagtgcaatggtgcaatctcggctcactgcaacctccacctcccaggttcaagcaattctcctgcctcagcctcccaagtagctgggattacaggcatgcaccaccacgcccggctgattttgtatttttagtagagacggggtttctccatgttggtcaggctggtctcgaactcccgacctcaggtgatccgcctgcctcggcctcccaaaatgctgggattagaggcgtgacaccacgccgctaatttttgtatttttagtagagatgggtatgagcactgcactccagctgggtgacagagcaagacccgtct

SEQ ID NO: 75817 - DNA, 1162 bp, Homo sapiens
gggggaaggggtgggctttgcgcaagatggcggcgctgggggtgctggagtccgacctgccaagtgccgtgacacttctgaaaaatctccaggagcaagtgatggctgtaactgcacaagtgaaatcactgacacaaaaagttcaagctggtgcctatcctacagaaaagggtctcagcttcttggaagtgaaagaccagctgctgctcatgtaccttatggatttgacccacctcattctggacaaagcctcaggaggatctcttcagggacatgatgcagttttgagactggtagagattcgaacggttttggaaaagcttcgtcccttggaccaaaagctgaagtatcaaattgacaagctgatcaagactgcagtgacaggcagccttagtgagaatgacccacttcgttttaagcctcatcccagcaatatgatgagcaagttgagctctgaggatgaggaggaagatgaagcagaagatgaccagtctgaggcttcagggaagaaatctgtgaagggagtgtctaagaaatatgttcctccacgcttggttccagtacattatgatgaaacagaagctgagcgggagaagaagcgtctagaacgagccaagagacgggcattgagcagctctgtcattcgtgaacttaaggagcagtactcagatgctccagaggaaatccgtgatgctcggcatccccatgttacccgccagagtcaggaggaccaacacaggattaactatgaggagagcatgatggtgcgtttgagcgtcagtaagcgagagaaaggacggcgaaaacgagcaaatgtcatgagctcacaacttcattcccttacacacttcagtgacatcagtgctttgacagggggaactgttcatcttgatgaggatcagaatcctattaagaagcggaagaagatacctcagaaaggtcggaagaaaaaaggttttcggaggcggcggtgattatgggtgtacatatttgtatattttttgtcatcctgagatacttctaatttccattgtattattaggtggttttccctgggaattccatttaattgttttgctttgggacatgtgggaaagagccttactaataaaattgattttacttatgaattaaggcccctttttgcacaaaaaaaaagaag

SEQ ID NO: 75818 - DNA, 1372 bp, Homo sapiens; identical to SEQ ID NO: 61251

SEQ ID NO: 75819 - DNA, 3316 bp, Homo sapiens; identical to SEQ ID NO: 61252
  misc_feature (1)...(3316): n = a,t,c or g

SEQ ID NO: 75820 - DNA, 3559 bp, Homo sapiens; identical to SEQ ID NO: 61253
  misc_feature (1)...(3559): n = a,t,c or g

SEQ ID NO: 75821 - DNA, 1487 bp, Homo sapiens; identical to SEQ ID NO: 61254

SEQ ID NO: 75822 - DNA, 1561 bp, Homo sapiens; identical to SEQ ID NO: 61255

SEQ ID NO: 75823 - DNA, 1539 bp, Homo sapiens; identical to SEQ ID NO: 61256
  misc_feature (1)...(1539): n = a,t,c or g

SEQ ID NO: 75824 - DNA, 4569 bp, Homo sapiens; identical to SEQ ID NO: 61257

SEQ ID NO: 75825 - DNA, 3053 bp, Homo sapiens
tttcgtgcgaaggcggagggggcggcgggggcggcggcggcggcggcggcggcggcgtagccgtagaggtgcacagagaacacccctagcatgaacagtgtgaggattccaccagctttttcaccatgaaggagacagaccgggaggccgttgcgacagcagtgcaaagggttgctgggatgctccagcgcccggaccagctggacaaggtggagcagtatcgcaggagagaagcgcggaagaaggcctccgtggaggccagattgaaggccgccatccagtcacagttggacggggtgcgcacaggcctcagccagctccacaacgccctgaatgacgtcaaagacatccagcagtcgctggcagacgtcagcaaggactggaggcagagcatcaacaccattgagagcctcaaggacgtcaaagacgccgtggtgcagcacagccagctcgccgcagccgtggagaacctcaagaacatcttctcagtgcctgagattgtgagggagacccaggacctaattgaacaaggggcactcctgcaagcccaccggaagctgatggacctggaatgctcccgggacgggctgatgtacgagcagtaccgcatggacagtgggaacacgcgtgacatgaccctcatccatggctactttggcagcacgcaggggctctctgatgagctggctaagcagctgtggatggtgctgcagaggtcactggtcactgtccgccgtgaccccaccttgctggtctcagttgtcaggatcattgaaagggaagagaaaattgacaggcgcatacttgaccggaaaaagcaaactggctttgttcctcctgggaggcccaagaattggaaggagaaaatgttcaccatcttggagaggactgtgaccaccagaattgagggcacacaggcagataccagagagtctgacaagatgtggcttgtccgccacctggaaattataaggaagtacgtcctggatgacctcattgtcgccaaaaacctgatggttcagtgctttcctccccactatgagatctttaagaacctcctgaacatgtaccaccaagccctgagcacgcggatgcaggacctcgcatcggaagacctggaagccaatgagatcgtgagcctcttgacgtgggtcttaaacacctacacaagtactgagatgatgaggaacgtggagctggccccggaagtggatgtcggcaccctggagccattgctttctccacacgtggtctctgagctgcttgacacgtacatgtccacgctcacttcaaacatcatcgcctggctgcggaaagcgctggagacagacaagaaagactgggtcaaagagacagagccagaagccgaccaggacgggtactaccagaccacactccctgccattgtcttccagatgtttgaacagaatcttcaagttgctgctcagataagtgaagatttgaaaacaaaggtactagttttatgtcttcagcagatgaattctttcctaagcagatataaagatgaagcgcagctgtataaagaagagcacctgaggaatcggcagcaccctcactgctacgttcagtacatgatcgccatcatcaacaactgccagaccttcaaggaatccatagtcagtttaaaaagaaagtatttaaagaatgaagtggaagagggtgtgtctccgagccagcccagcatggacgggattttagacgccatcgcgaaggagggctgcagcggtttgctggaggaggtcttcctggacctggagcaacatctgaatgaattgatgacgaagaagtggctattagggtcaaacgctgtagacattatctgtgtcaccgtggaagactatttcaacgattttgccaaaattaaaaagccgtataagaagaggatgacggccgaggcgcaccggcgcgtggtggtggagtacctgcgggcggtcatgcagaagcgcatttccttccggagcccggaggagcgcaaggagggtgccgagaagatggttagggaggcagagcagctgcgcttcctgttccggaagctggcgtccggtttcggggaagacgtggacggatactgcgacaccatcgtggctgtggccgaagtgatcaagctgacagacccttctctgctctgacctgggaggtctccactctggtcagcaagtatccagacatcagggatgaccacatcggtgcgctgctggctgtgcgtggggacgccagccgtgacatgaagcagaccatcatggagaccctggagcagggcccagcacaggccagccccagctacgtgcccctcttcaaggacattgtggtgcccagcctgaacgtggccaagctgctcaagtagcctccgccggcctgccctgctcgcccctccacagcctcggtccctgcctttagaaacgcgggacagctgattgctctccttggccacacgtgctccttttagctgcacggcctgtctttaggtgccagtgtgatgcaccgggtgtgcgtcgagtgagcgtcccgaggccacgtgcggaggcccctcactgtgctgtcaaaggcctgtgggtgcagggctctgccgcacagcctctcttgggtgcttgtttgttgcagtggttgaaagtgtgtggggcacagaggacgtgcacctccctgccctcctcctccctgggccttcaccgcaccccatctgcttaagtgctcggaaccccgtcacctaattaaagtttctcggcttcctcagagaaatgaaaacgccatgcattctcttttccagttaaggttttctgactactgatctaggattgcccaggaactgttgtcaatcacagagtaaaagtctccgctcagcctggagggcgccctcctggtcccctcctgtctgacatcccctcagcctagagggtgccctcctgatcccctcatgtctgacatcccctcagcctagagggtgccctcctgatcccctcatgtctgacatcccctcagcctggagggcgccctcctgggcccctcctgtctgacatcccctcagcctagagggg

SEQ ID NO: 75826 - DNA, 1704 bp, Homo sapiens; identical to SEQ ID NO: 61258

SEQ ID NO: 75827 - DNA, 2863 bp, Homo sapiens; identical to SEQ ID NO: 61259

SEQ ID NO: 75828 - DNA, 2958 bp, Homo sapiens; identical to SEQ ID NO: 61260

SEQ ID NO: 75829 - DNA, 2314 bp, Homo sapiens; identical to SEQ ID NO: 61261

SEQ ID NO: 75830 - DNA, 2622 bp, Homo sapiens; identical to SEQ ID NO: 61211

SEQ ID NO: 75831 - DNA, 4585 bp, Homo sapiens
  misc_feature (1)...(4585): n = a,t,c or g
ttttttttttttctggctaattttgttttttaatgagaaacatctgagttgtacatatcacaaacagcttcaagtttctgtaccaaccccccagccccgcaccccacgccagtggccaaacagttaaaacccaaagcaaagcatcacgtttggatgtgaaaaagtcttagaaaattaacttacaaaaacatcccttatcaagtcggtagtttggcatttactttaccattagtcagaaagctccagctaaaatctaatttttttaaaaaaaaaatcgaagtttacattattcatacagatttgggcattgttaaaaaatatgcacaaataaccacatccatgcaatataatttctttaaaaatttaaagcaatataaaagagcagagctaggtactgaacagaacattttggtgtataaccggcagctcaaaaattgccagctgattggagtaaaaactgattctaagcgtattaaatatgattgattgtttccatcagctaagggtgcctatgagtttctgaaccatttctagggtggaatgtgctcgcttgcttctataatatatgtgatggacaccactgctcattgaccatacctacattataataatgctgttttacaaacaaaccagaattcacaaagtgcttggctcttcaggaaactgacatttccagagatccctaaactaatcaactagttctgccaaagtgcccggggcacctgccacacaggttccctgctcctggggaggaacacaatctcaaacgctgccctgggctccagggagcccgtgctgtgtaagcccagaagaagtctgcacaggtcccgggaccttgccaacactaagtcactcagattggtctggggccacgtgctgggcacccttggcaatcaggcaggtggtgtagcactgtggccagctatgccctctatgtggggggtggcccattggtgtacctcagcatggggtaaaaggaccgggcaaaagttgttggcctgagtgcagctgtagtcttcttcggaggagggcagcaggcaggccaggagcagcagcagcaggaggagcagctgcaggggtagggctgcccggaccacccttgagaggaaggagcgctgtggccgtgtgctgccggggaccctgctctctgtctcctcctcgccttctgtagttctcactgctctgaactgctttgctcggggagctggcacggatgttgcaggaggctggtcccccgagtctacctcgtcgaagctgggcaggggtgaggctgggttctgggttccctgcaaggccattaaatcttgggacacttgctcccgtaactgtttgagtttcttctcaaataacatgcaccttttcttcagcttcaatacagtcttctccatgtcccttaatgagaaggctgtttgaaatctcctgtaacatgtccacttgaggttgacgttctaccagctccttttccagttgcattagttccctccgacactctaggagagcccgggggtctgcctttggatcggtgacatgagccttctgcctccggttcttggcactcgctaaccacagcagcagattttgactcaactggtggaagtcctggcactgcatgagcgactgtcgtaagccccctctccagctgtccactgcgccctgtgctgcttcccagagcaggctcagctggcggagtctactttggagctctgtggattcggggctctcggtttgcagaaattccttgctgctcacgttgacagagaccactaatgccttgtaagtgtcaaaggctttcagtatctcctgcagtctcttcactctcagttctatttcctggatatcagagggaggctttgccatctttaacatttccagctctgcttcagtttttttcagccaagtagtgatggcgctgatatcagagttcagctgttgcaaattttgttttattttgagcttattgtgaaagctcctgtgcttgaatcatctcccatctgtcgaaggcacctgactgctgctctgtgataccggccagtcccccgtcttcctgctgtgggttgccattcaggactcgcgggccttctttgccaccatccgtgcctggaggtaatagtagctttccatagggtggtttataaggggtgctggacgcagggggaacaggtggaacattcctgtcaccttccatttgcttgtagtgatgctcgggacaggaagggctgtcgggaacatgccacgagtggccatccgaaatggatttacctgacagtgcgcttgtagtattgggcctcctcgtcctcttccgtgagaggaggaggnccccccacgtcgncttgtgtggtcccactccagggggatgggagtccacgctgacaggggtctcgcagccagaccgctcgtgccctggggccactagatgacacagggactgaggagatgacggttcctcgctctctccccgtttacgccaagaatcagtctggatttctctggggtcttccatgtctgtttcattctcagaggcctccttttcatcttccaagcccggagtgcaggaggtgagccgccggtggaaccgggagacccttccaaacacctcctggcagtagcggtggagttcctccagctcatcctcaatcagcacagcatccagggggctcgctcttctgaatcagctgctccccaaacacaatgagctgatcaatcttgttggtatttaatgtaatttcctgttgaaagccattcagttggcgcatcttgtcatcggcgtcactctctgagaagtgctccacgttggtcagctgcaggtccatctctgtgagccacaccagaatgctctccctggtgccctcaaattcttccctctggttggtgaaatgcctgagtctccgcaggacggctgtgacccgcctctgaaggttgtcccagcgctggttgccctcgtggaccatctgcttcagcctgctggccgtgtctgtgcggttctcccgggccagccgccggtactgcttgttgatgagctccagctgagtgagccgctcatgaatctgccgctgaaaggcctcaaacctcttcagttcctctttggcactcgtgtacaacacctctgaggaatttgggcaggctgccgtcctctcagctgacttgagccagtcctcaaagcgagaatagtcgtctaaaaacttctgccacaggcgccacgtctcctcgattttcatgcgccgctccatggacatggcacaaatgttcctccagcgtctgtccaggctcctggtggtctgctggatcgagtcacactcggtctcatttgcacaggcatcggagtcgtgcagtaggacgtcacagatgttaaacacggactccacccctgcgctgtgttgttcaatatctcgctgtagatcctgctgctcagcgagcctcttctggatctcttgatcatcgcagacatcataaacaacaggcttggaaagctcagactcaattcgagccaaccaggtgcgaaggttgctcatgtttttgtccaactgctgaataaaagcaaaggtctccttcagcttcttcacccttgatccgatgacatcaaaaagatgttgccaacgatcgttaattttgttgagcttgtcatcgatctcagctgctcttgatttgttgctggccttgatcaactggtcacccatctgctttaactgtaacttgttttcactaaacaagtttatttcttccatgcagtccttctgtaacttttcaatcatttcttcaatactaatgtccgctgtctgtagaactttgttttccatctgcaccagccaggcacacaactctttatttttttcattgaatacaacccatgtattgagtctgtcttcaatctcctgtttacgtatggccacccttaagcagaggtcctcccattgtctgtgcaaatgctctatttgctccttcaaaaccatcacatcttccacgagaacgtgccgggttaagtccgccttcatagtttgaagttctttcaagttctgagtccagctagccaaagactgttctagttccttaatcagctctttttcgttatggaggtcctcgtgaagctctggaagaggatcttcactttgtgcctttaaaacttgcagcctgcttttcaactccttgattttcttttcacactggtcccaggtctctacagtgctctggaactgcttaatcatctctgccagctggggctccatgtctttccagctgtcctgaagttgactgattctcctacccacagactctttagttttcaggtcagttgtgagcagtaacttttctccagcttccaaggttagggcacaggtagttcgcctcctttgaaaatgaatttctttattcttcagctcatggatcagacttctggtttggtataggctgaagcgctcctggcccttcactgcagatagcaggtggctggtgtcagtgaggaagcgaaacaagttctccacagaagtagtgaaatcttgccactgcctcaccagcccatcaacgtcacccttcctctgccgaacaccctggacagcattctgccaccgatccgtcagctttgagaattctg

SEQ ID NO: 75832 - DNA, 1209 bp, Homo sapiens; identical to SEQ ID NO: 61264
  misc_feature (1)...(1209): n = a,t,c or g

SEQ ID NO: 75833 - DNA, 2160 bp, Homo sapiens; identical to SEQ ID NO: 61265

SEQ ID NO: 75834 - DNA, 1751 bp, Homo sapiens
gtatacattttcccacaaaatggttgtaaagatttaagttattttaatttaatgttgattaagaaccctagatgaaactggtcagaacctgtaaattacttagtttatatccactttgagcaggtatcaaatgatttaggatccttaaaattacattctaataattaagttatgtggaaaaagtaaggctggggaagtcgtgattaatagttttcaaagggccattttttaaaatcctctgggcattttctttcagctgtttgttagtttttgctttatttaaagcatatttaagttattttaatgtggtttaggggcaaaatgtgcagatacttcatttttgtaagattgtaatagatgctgtttatactaaacatgtcatatctatctatacagtatatattaaaagaaagcttgtactgtatcttatttgatgatatttattttctctgccaagctgtatagtaaaaggaaaataagtcacatctggtcattggcatttgtatcgtcattctgtaaagacaaaagagtacctatataagaagctccacgtagtgcaaatcgacatctggtaggctgctcgcccccaggcagcagctatgagtctgtaattctctgcgtcatcctcttctttttcttcatttttgctttttcttcgcttgagttcttctctgaaattatatgcaaagagttgtggggtcttcatcacacatttttctggtatacatcacagaggctccttaaaagtgtgaggatgggagagctggcggggccgaaggagtaggggtctatgtctgcccaactctaacaagcctgccccgtgctttccaaggcgctgcgcttcagggaataacattctgagccctcgatggcagtatttccttcggaactgaaatacattctgaaccactttttccaccagcttgaatggctgctctatcttgggctgtatcaagggagtgaagtgcaccacgcccacgtccaccttcgttgtaagcaaacatattatcattctctggtttggggacaaaagcttgtcctggaattgtaaagatgtgtcgaacattgcagaggtactgagccataacagagaggcgactacgctgtttgcttcctgtattggctgcaagtctctctgccacttccttttgaaaagtcaaagtcatctgagttctgccataaacaaaaggtccatctctacaggaaatattttcaagccacttgataatcagtggagttgaaacactaaaaggcagatttccaataatatgtacatttggaggatcatcttcccagggtcttttaagactttctgaaaaagccttttctaccttaaatgtcaagacatctccatgaacaattctcagtttcccaggtgctgcatcagaaagcatctgtaatccaggaataaatcgagtgtccttttcaaccaccagaagttcagcgacgtcggcattaagaatagatcttgtgattccccctggcccagggcccacttcgtaaacataagcatttgtcagattgccagctttccttacaatcttatctgtcagcctcaagtccaggaggaaattctgtgatagctgcttcgctgcttgcagtcttaacaacttaatgatttctcgaatcgtgggcaacggagggagacggcaagtgctgagttttccggaggcagccatgatacgcggcaagcaccatccacccctacctcacccaggaccttcaccgccgctcccacttcagattgtaac

SEQ ID NO: 75835 - DNA, 1459 bp, Homo sapiens; identical to SEQ ID NO: 61267

SEQ ID NO: 75836 - DNA, 1542 bp, Homo sapiens
ttttttttttttgaccaaaaaaggcaactatatttaaagtaaatgtatgtgattcttgtcacaacaaatatttgcattttctcagcggcagctgcgggacctgggtggctccgacacgccaggcccgggaaggacccggcaccctcccctgaacttcctggctactcatttccagcgaagtttaatctatttttaataatcgttcagttttcaaggaaatggaggagctgttttttcccacggagcggcggccctgggaggggccgggcccagaggttccggccgcgatgccgtcagcgccttcggcagagtgactgaagcgagatttcgttcagcgcgttgtactcgttcatggggtccatgtagctctccagctcctcggcggtcacgatgccgtcgtggttggagtcaatgagctcctcaaactccttttttcttgtctttcaacccagttgtcggtcaatgtcctggaccctgctggttctccacggtgcccacgggcaagggagatgaactcgggcacagagagctgcttgtcaccgtcctggtccaggtcccggacgatctccttcaccatgaacctgaagcattcccccggctgtgctcggggtggaggaacgacaggaactcctcctccgtcagcagcaggtctgcagggggggctgtccgcctgggtaccagcggtccttcaggttctccaggacttcctgtgtttcctcgtccactttgagttcctcgttgagcctgatggcgtcggcaacctccttctcgctatggcctttactcgccaaaaacttcaccttatactcgtcccaagacacgtgaccgtccccgtcagggtccacggcgcggaagtgtgtcttgctctcctccatggcctcctggaagtgctcggccgtcttctccatgatccagcgctgcatctccttggcactgatcttccggtcagtgttcacatccaccttggaaaagatgaccatcagcttcctccggctccgccgcggctccgcgtcctcatcaaagccacccaggtccttgcctaggaagacctcctggtggaagccgcgattgaggtgcccgtccatctccagcttcaccccgttcaggtggtctgggggcaggatctcattctcctccctgttggctactctctctcgagtggacgagtggttggcaggcccgtgcagacgcgtccatcagaaggactgcccccaggagccagaggcagcacggagccaggccaatgaggggaccccacctggacgccatcgccacccagggccagaccatggggcgggctgcagggtgtgggccaggtgctgggaggggcaggggcaggggcagaggaggaagtgaggtcctggctccaatccaatccccgggcaccacggagggctctgtgtccccaggacggccgcaggatggggacaagcagctcacagtcggtctgcctccccgcgctcgggatccgaggaccggagcgaagcgtcagtgacgccgccaacgggcccggatcaggccactgccatctttcttgcgtgc

SEQ ID NO: 75837 - DNA, 5830 bp, Homo sapiens; identical to SEQ ID NO: 61269

SEQ ID NO: 75838 - DNA, 1021 bp, Homo sapiens
ttttttttttttaggtgtttaatatttatttatttagttcataaacaggcactgccacctccagtgttcatccatggcactttcatgaccgcttcctgttctgtggcttcttttagtgcccaagttgtatcacatttcttgctgaagttcagacaattgaaaacaaacagactcacatctagggaaatcaacagaccaacaatggcaaaacacaatacaatgaaatggaaaaataatgtttgttacaggagtgcagcaatttagagagtgtctcaggagtgtggctcactggcagctgcagctatgttagtgcttctttctgcctcaagttcagaaacaagctggactatctcagggtgattgaattttcctgctgtggaatcatagaagtcttgcagtctcccaggtttgtgttcaaggtcttcatattcagatgcttgaagaatcatttcacattggtctagctgcttcacaaatttggcttctgcactagattgggtctcgtactccatatatacttacttcccaaagttcatagagctcctttctgaggtcctctggtaggagctgggttatctgcttcatagcttcctcttctcgcctatgtttttcttctttggggatgttatctgctggtgctatgtccccaacgatgcattctgccatatcatgaaccagggctaggcgtacacatcggtctttgttaagacggtcatctttgatcaccatagccataactgccatccggtacatgtgatctgaaacgctctccggcctctggacatttctgtatacccagccagttcgtgggactctcttgagctgccctaccagccgcaggaactgcagtagggaccgagccccgtggcccgagaaggtcgcagaggagaccgaagccatgcggccaccgaccccggctgggcggagcaggccgcggcgaagctcctccccgtcctcctcctcctccccttccccttgtctttcttccccctcctcttactcttctatctctttcacgaaa

SEQ ID NO: 75839 - DNA, 1209 bp, Homo sapiens; identical to SEQ ID NO: 61271

SEQ ID NO: 75840 - DNA, 3138 bp, Homo sapiens
tcagaattactccagtgtgtgggttggcaggttgtagaaagtggcactgcccctactgtctctgagaccagaggggttttcagtgctttgccgggccacagccagagacaggatgagccggggtcaagtttctgtaaactaaacagtcatggcagcaaggtccaactttagaaacaaaagttcattttcaggttctttatgacactgtaggacaatacaacacattttgaagtcggacccaatgtttgttttctactatatgaaatcaggacataagatgctgcttgctaataccagctgttacaagaagacagagttgtcgccatgaaataaagctctctaggaagcacacagaaataaaaaggtcaccatgcataccaagaacaacccatcagtcaataaactaaacactttggaaataaaaacttaacacatcatttcattttgttaaaaataaaacgtatcactaatctgtgagtgtcttgttctgtcacaatgggcattgtgataaatcagggtttctcaatctcggcactactgatattttggggtggatgattctttgctgttgtaggatgtgctgtgcatggtagaatgtttggcagcattcctggcttgtagtagcacccccaagtcatgacaatgaaaactgtcaccagacatttttgaatgtccctggggtggagtcagggggcaaaatcacctcctggttgagaatgattgcaatacacagatacctacaaagaggaacaattctttctcaaaatttattgtgcagaattttaagactatacccagggttgctcatttattaaagcaaagacttagtaaggtaagtgtgtgggaagaataaatggattaatcatagtctgtttcctatgaaaatgcctcgttgagtaattgcagatagactagtgcctcttttttgttttgttttgtttttaaacattttacagccattatccaacagacagtaaagcagtggaccagttgctgtgtgggtataaagcaaacggtctctgggctcctccaagctgtggatatctctggccattatcaatagctgattctcacttgtcctaatgaagtactcagtgcaggttagcctccttctcccccgccagcttctcttccacttccccacaccgtacatgcctctccctttctctctataactcagctcatctcatagcctttttctttggaaatgcaactctgctgatcacttgtgggctgggatcccagctgccttttgaacagagcagacatcctttacagagacaggtggcctggaggggagaacaggtaggggcacactgagatcccacagcaacctgagagattctgccccgtgacctgctggccccctccagggcacttcctattttcatctttcattaattaggcagctaagaagctgctttccagcttgtagagccaagcaggcagcatcctgtcagaaacaaccagataaatagagattaaaaaggaatctgagaaaaccctgctctctcccatgcagggtgaaatcctcgtagagctcatttcctttcccctcattaatacttaatgtaatttcctaaatagaagtttaagaaataacacaaatgaaatgttcccctgaaagtaacccctaacaaaacaacccaaatcctcctcctcggtccttctcaaagtgggtcctgcagtggggaaagaagccttcaccatggtggtctggcctggctggtgcaaggctggcccacttcagctgcaaatcagcctccactcacctttaaagaatggttcttcttgtaccagaaaggggaagttgtagcagccagaggagagggaggaaaacaaaaccacccataccaacaaaacagggcttaagattgtcgttcaatgcgcatcaggtacttattaattctactggataagcacttataaataaagaacagttaatcctcatcccaggccatattccattgttaggagtcatcgtacagagggttgttgtagtttccccaggacccgtagtcatggtcgtccaaaagtcttccataggaggaatgcctgatttttaggtaggctgcaactccaaacaccagcagcaccacggcaatgactgtcacggtaatggcggcgatgctgcctgaacttaatgcatgttctacttcctgcatgatcaccctgggaaaggtggtggtggtctccatgtctatgagctcacacatcactttgcctgacacagttgttgggggtgttttctcctggggtactggctcagctgtggcatgtgaagtgggtgtgtggtcagagctggactcctctgtcggggactctggtgcagttggagctccagtgggttgggtgctggtcacagtggagctatggttggtagtaacggaggcagaaaagacctcaggtggtgaggttgatagggatgagggtgatgaggctggagcttgaggggagatgagtgtgggaggctcagcagcggactgcgacagtgtagctgccacgcctgcttcaggagtgcccaagctgtgttcctccaacgtggttgttaagtggactccaccgcttgttgacgagaacccagaaggtgaggggtctgtgtttgtgccttcccaattcgaacctgggctggtgatctcctcttctctggactctatggaaatgttcttaggaagcagagatgttggggctgatgctgtaactgggagcaccgagttgttgtgagtgccgttggatggggaggcagtgtctgcatcagtgttttgtggagagctagtccagatggtggtcggtggtacaatgtttgtcggaagagaaacagacaaaggagctgatgtaggcagactctgtaccctccatcctgcagttaagatgcaaagagcgaagagagtcttgtagaccatggtagcctggtatttggtgcccagcccggggcgggcggcaaggagtttgcggactgacagagcgcactgggcgctggtagcgactcctctgccgggtgggctgcggtgggagccgggaggcgcgaacagctccagtggagggcgcgaggcaaacgaggcgaacgcagcgcagctccgtcagctgcgtgccctccggtgctccgcgctcttccgctccatcccagccgccacgaaa

SEQ ID NO: 75841 - DNA, 5944 bp, Homo sapiens; identical to SEQ ID NO: 61273
  misc_feature (1)...(5944): n = a,t,c or g

SEQ ID NO: 75842 - DNA, 1201 bp, Homo sapiens; identical to SEQ ID NO: 61274

SEQ ID NO: 75843 - DNA, 2026 bp, Homo sapiens; identical to SEQ ID NO: 61275

SEQ ID NO: 75844 - DNA, 2026 bp, Homo sapiens
caacggacggacgccatgagggctctgctgctcctggggttcctgctggtgagcttggagtcaacactttcgattccaccttgggaagcccccaaggagcataagtacaaagctgaagagcacacagtcgttctcactgtcaccggggagccctgccacttccccttccagtaccaccggcagctgtaccacaaatgtacccacaagggccggccaggccctcagccctggtgtgctaccacccccaactttgatcaggaccagcgatggggatactgtttggagcccaagaaagtgaaagaccactgcagcaaacacagcccctgccagaaaggagggacctgtgtgaacatgccaagcggcccccactgtctctgtccacaacacctcactggaaaccactgccagaaagagaagtgctttgagcctcagcttctccggtttttccacaagaatgagatatggtatagaactgagcaagcagctgtggccagatgccagtgcaagggtcctgatgcccactgccagcggctggccagccaggcctgccgcaccaacccgtgcctccatgggggtcgctgcctagaggtggagggccaccgcctgtgccactgcccggtgggctacaccggacccttctgcgacgtggacaccaaggcaagctgctatgatggccgcgggctcagctaccgcggcctggccaggaccacgctctcgggtgcgccctgtcagccgtgggcctcggaggccaccttaccggaacgtgactgccgagcaagcgcggaactggggactgggcggccacgccttctgcaggaacccggacaacgacatccgcccgtggtgcttcgtgctgaaccgcgaccggctgagctgggagtactgcgacctggcacagtgccagaccccaacccaggcggcgcctccgaccccggtgtcccctaggcttcatgtcccactcatgcccgcgcagccggcaccgccgaagcctcagcccacgacccggaccccgcctcagtcccagaccccgggagccttgccggcgaagcgggagcagccgccttccctgaccaggaacggcccactgagctgcgggcagcggctccgcaagagtctgtcttcgatgacccgcgtcgttggcgggcctggtggcgctacgcggggcgcacccctacatcgccgcgctgtactggggccacagtttctgcgccggcagcctcatcgccccctgctgggtgctgacggccgctcactgcctgcaggaccggcccgcacccgaggatctgacggtggtgctcggccaggaacgccgtaaccacagctgtgagccgtgccagacgttggccgtgcgctcctaccgcttgcacgaggccttctcgcccgtcagctaccagcacgacctggctctgttgcgccttcaggaggatgcggacggcagctgcgcgctcctgtcgccttacgttcagccggtgtgcctgccaagcggcgccgcgcgaccctccgagaccacgctctgccaggtggccggctggggccaccagttcgagggggcggaggaatatgccagcttcctgcaggaggcgcaggtaccgttcctctccctggagcgctgctcagccccggacgtgcacggatcctccatcctccccggcatgctctgcgcagggttcctcgagggcggcaccgatgcgtgccagggtgattccggaggcccgctggtgtgtgaggaccaagctgcagagcgccggctcaccctgcaaggcatcatcagctggggatcgggctgtggtgaccgcaacaagccaggcgtctacaccgatgtggcctactacctggcctggatccgggagcacaccgtttcctgattgctcagggactcatctttccctccttggtgattccgcagtgagagagtggctggggcatggaaggcaagattgtgtcccattcccccagtgcggccagctccgcgccaggatggcgcaggaactcaataaagtgctttgaaaatgctgaaaaaaaaaaa

SEQ ID NO: 75845 - DNA, 1039 bp, Homo sapiens; identical to SEQ ID NO: 61277

SEQ ID NO: 75846 - DNA, 1773 bp, Homo sapiens; identical to SEQ ID NO: 61278
  misc_feature (1)...(1773): n = a,t,c or g

SEQ ID NO: 75847 - DNA, 1150 bp, Homo sapiens; identical to SEQ ID NO: 61279

SEQ ID NO: 75848 - DNA, 1618 bp, Homo sapiens; identical to SEQ ID NO: 61280

SEQ ID NO: 75849 - DNA, 3367 bp, Homo sapiens; identical to SEQ ID NO: 61281

SEQ ID NO: 75850 - DNA, 1875 bp, Homo sapiens; identical to SEQ ID NO: 61282

SEQ ID NO: 75851 - DNA, 4365 bp, Homo sapiens; identical to SEQ ID NO: 61283
  misc_feature (1)...(4365): n = a,t,c or g

SEQ ID NO: 75852 - DNA, 858 bp, Homo sapiens; identical to SEQ ID NO: 61284

SEQ ID NO: 75853 - DNA, 1465 bp, Homo sapiens; identical to SEQ ID NO: 61285
  misc_feature (1)...(1465): n = a,t,c or g

SEQ ID NO: 75854 - DNA, 1130 bp, Homo sapiens; identical to SEQ ID NO: 61286

SEQ ID NO: 75855 - DNA, 3398 bp, Homo sapiens; identical to SEQ ID NO: 61287

SEQ ID NO: 75856 - DNA, 2709 bp, Homo sapiens; identical to SEQ ID NO: 61288

SEQ ID NO: 75857 - DNA, 2172 bp, Homo sapiens; identical to SEQ ID NO: 61289

SEQ ID NO: 75858 - DNA, 4368 bp, Homo sapiens; identical to SEQ ID NO: 61290

SEQ ID NO: 75859 - DNA, 1596 bp, Homo sapiens
ttagtcagaccaacctgtctcaggtaggaatgcttgacccttttatttcgaagcaactcatgcactcttttcagcactcagaaggaactgtgagcttttatactactacagccccagtatctcagcggtaaccatggggaaaaaagtcttgttttccaaaggaaaatgagagttgggaggagccttaatataagcagtgaggccagccgggtggccccaggaagaactaggtgtcttgacacctaatccacacagcagggaaaggggctgggtgtgatgcacagtgcactgattttatttacagatcaaaagccacttaaataatctgcagacacaagtgctgtccagggcagaagcctggggtccaaatcagccttatccctcctcatgcccacagtcagcccaatgctgtctccgttccatgggccagcacaggcaggcgccactctgctgacatgaggacctggggtagctcagacatttgactacccaagcccagaaaggagctgggtccagcccttacggggaattcctttaattcccccaggccaggtgagtgctgactcagtgatgacaacagctgtagaagtaggggtttggcttctggcccagatccacgcccttgtcctctgtcatcacctggaaggcagccacactgacgtaatcctctgccactttctggaagagctcgtccacactctggcctgtcttgctggatgtttcaaagagctgagctttgatattgtctgcatagtcctggacgtcgtggaagtccacacgtcgacgcctccggtcttcttccagcaggtcactcttggtgccacataagtagatttggcagccctcctctaggctgcgcagttccttcacccagaactttgctcgctcaaagctgctgctgtctgtgaggtcatagcagacgatggcagccttggcaccccgatagtagattctactcatggcctcatagcgctcagagcctgctgtgtcccaaatacctaatgtcacagtccggtctccgaccgacatcaccttggccacgaaggcggccccgatggtctgcaacgagagggaagagatcggggccataggtgcagattaccggccccccactcccccgcccaccgtgcctggcccctccggatgcactcacgttctgataaggccccaccagaaagcggtcgtgcacgtagcgctccaccaggctagtcttgcccacgtactccttgcccagcatcaccaccttgacgtccacgcgctgcccgctcatgctcccggggccgcttcagccacgtcagggtcctacgactccagacagcgcgtcgggctcgagctctggccgtggccttgcacttcggcagcgccccgtgtgcccccgctgttcggccccgggcgccgattatccttcgaagaccccaagcctcggggcggcctgggagcgcgcgggacagcgtcctcaacagcgcagcacgccgccgtgcagctcgctactccgtcattcgctcgcctgcccggcttaagctccgttctggctgggaatcccaaccgaacctggggtctcccgcaacccgggtcctacccgcagcgccgcgactc

SEQ ID NO: 75860 - DNA, 3828 bp, Homo sapiens; identical to SEQ ID NO: 61291

SEQ ID NO: 75861 - DNA, 2533 bp, Homo sapiens; identical to SEQ ID NO: 61292
  misc_feature (1)...(2533): n = a,t,c or g

SEQ ID NO: 75862 - DNA, 1201 bp, Homo sapiens
  misc_feature (1)...(1201): n = a,t,c or g
ttttttttttttttaaaattaatcaaccaacacccattctatttaaggttccaaaaggaagtagctggacccggctgcagagcacactcccaccttgcgttttgtcccaaaagtacatcccctacggggggttctccttaaacaattttaatgtctgggttggggaagcaggtagagcgcgtagaggcagctgctagaggctggttgttgactccaggccgcgttccaggaaatatcggtgggaagaacggggacgggcttgggacccttcattgaggaagtaggatgtgatcttcctgagtccctcctgattctcggatgctgagtcctctcttataacatcttccgcctctttctccagggatggtctgggccgtgcgccagctgaaaccggacaaactggggggaagccggaacacaggctccacgtgctccttcaaccacgccttttgtcttggggatcattggggtagcctgagcccataatcagtatccaagtcctgcagtttctccacgaactgccatttcttcacggcctggtcccgggccaccttggcacagatgctggcagcactaacccaccgggtagagggcatctgctttggccttgaccgtcacctcaatcccgggaaaactttgctgcagccgcgcctggtatgtctctggcatccctacggtgtccacgaatacctgggtgacgttcacgccctggtccaatgcatactgtataagcccagtggctgtatcatgtgacagggagttcaggttgtatttgacccgcccaagcatgctggtagagatgaggtttggagacagcacatccagcgcccagccgacaaagtccgtgtcctccattttcgcaaacagcctttcccgctcgctctccaatagggtctttgagtctgccactttcagcgcctccagatctgccaggcgaggcaggggacaataacagatggcgtagaccatggggcccagcacggggcccctgcccgcctcatcgacgcccaggacgcaaggctccttgcggcacaccgcgggcacaggcgaactcaggcgacagcggcctgtattgtctctctccagctcgctgagatccatgccgcctcagccgccaccaccagctgcaagaactaatactgcaggagcgggtctcggcgcgcgttttccgcgggcctcgaagcggcgcctgctntcggcc

SEQ ID NO: 75863 - DNA, 2113 bp, Homo sapiens; identical to SEQ ID NO: 61293

SEQ ID NO: 75864 - DNA, 1368 bp, Homo sapiens
ttttttttttttcaaaacatagttatttttactttttaagttatataaataatatacattttcaatataggaaaatgggaagatacagataagcagtggtcttatatatatccttgcagctttttcccttcggacatacatattttgttacagtaattcctgcatctcaaaaataatacaaaaagtgaaaataagtttagaccagccttaaccttagctcaggtgctaatttatatataaatctatgtgcattcatttcaattttgacttacaaaatctaaagtgatgctgttataatactaaaagattccactttaaacagcagcagtttcagaataattaaaaatttgattcaggcatgaggctgataaagaacgaagttttactttttttcattaaaataagtagctttctactattgcatcctttgaagagaagaatgttctgctggtttggccacaagctctttagatggttacttttagtaaactcttcattcatcctggcattcttgaaaatattcgtcaaacatagaggaagactcatcttcacgttcctttggttctttaaattctaggtcttctccatattgaatggcaaaatcaatatgctgcaatacaatgttcatgctttcttcatctgactgatcgtaaggtaaaaatcgaaccatgctgtagtcatcaatcagtccacatatagctttagtcagtttcttgaattttttgcttcttaagtcacttgtagaatcttctaataaagaatacatgtctggatctaaaaatttctcaatttccttttttgcttttttactcagcagatccatttttgtcatgatgttgacttgcggaatttctagagagatcatggcactcagggctgccaagatgccagaaataaacttgaatgactccaccatgaactgagaatcaacaagaaaaactccacagactcggaaccccactgctcgagctgctggaccagctgtttcatcacaggcaggtgagtgtacaactcaatctgacctggacaatcaaaaaggatatagtcgtcctctacatggccaagacagttctccagccagtcaaaattattggcaaagtactccatgcaaaataccaatcctccgttgggaccgaatcgcagagaatcatcctccattacatcatccacctcgatcagttcccggatgtcagccatcacggagtagttgaagtgttctgctgctggatccaggtttacaacttggacagaccggttgagggcttcacagtgctggaccatggtggcacagtaggtgctcttcccgctgcccgcggggcccatgaccagctgcgcataccgaggcatgttggctcccggagccgcccg

SEQ ID NO: 75865 - DNA, 1643 bp, Homo sapiens; identical to SEQ ID NO: 61296

SEQ ID NO: 75866 - DNA, 620 bp, Homo sapiens
ttttttttttttttggggagttgcaacaattcatctttatttcttattttcctctggagatgcagaatttggtatatttcaccccaggtatatttgggatagttggctcctcgctgggtcaggatggctgggtgccttctcccctggcatggttctcttctctgcagggcgaggggcagggagctagtaaaacctcgcaatgacagcccgcaatggcagacccaatggagcccaggatgaacttggtcaatccggagaagtccagttgctcccagtgactgcagaagtagccacaaaggctgccccggggaaactccacccccattgggcaatggccgccgcggacatcatcttggctgctatggaggacgaggcgattcccgcgcgcagttgaagccccatggcacttgagcaccatgggcacagcctgcatgggccaccaactcttcaatcacaacttgtagcaatcctggccaggggcaaaactacggcagagccagaggccacccctgaccactttggccacactggtcacttgctgatttagtgagagcagaggcctccatgcctgctcgggttaattccgtggcttagagagtaagagatcctcaacttcagct

SEQ ID NO: 75867 - DNA, 801 bp, Homo sapiens; identical to SEQ ID NO: 61297
  misc_feature (1)...(801): n = a,t,c or g

SEQ ID NO: 75868 - DNA, 2072 bp, Homo sapiens
tacatgaaatctgcagtttcataatttccgtgggtcgggccgggcgggccaggcgctgggcacggtgatggccaccactggggccctgggcaactactacgtggactcgttcctgctgggcgccgacgccgcggatgagctgagcgttggccgctatgcgccggggaccctgggccagcctccccggcaggcggcgacgctggccgagcaccccgacttcagcccgtgcagcttccagtccaaggcgacggtgtttggcgcctcgaggaacccagtgcacgcggcgggcgccaacgctgtacccgctgcggtgtaccaccaccatcaccaccacccctacgtgcacccccaggcgcccgtggcggcggcggcgccggacggcaggtacatgcgctcctggctggagcccaacgcccggtgcgctctccttcgcgggcttgccctccagccggccttatggcattaaacctgaaccgctgtcggccagaaggggtgactgtcccacgcttgacactcacactttctccctgactgactatgcttgtggttctcctccagttgatagagaaaaacaacccagcgaaggcgccttctctgaaaacaatgctgagaatgagagcggcggagacaagccccccatcgatcccaataacccagcagccaactggcttcatgcgcgctccactcggaaaaagcggtgcccctatacaaaacaccagaccctggaactggagaaagagtttctgttcaacatgtacctcaccagggaccgcaggtacgaggtggctcgactgctcaacctcaccgagaggcaggtcaagatctggttccagaaccgcaggatgaaaatgaagaaaatcaacaaagaccgagcaaaagacgagtgatgccatttgggcttatttagaaaaaagggtaagctagagagaaaaagaaagaactgtccgtcccccttccgccttctcccttttctcacccccaccctagcctccaccatccccgcacaaagcggctctaaacctcaggccacatcttttccaaggcaaaccctgttcaggctggctcgtaggcctgccgctttgatggaggaggtattgtaagctttccattttctataagaaaaaggaaaagttgaggggggggcattagtgctgatagctgtgtgtgttagcttgtatatatatttttaaaaatctacctgttcctgacttaaaaaaaaaggaaagaaactacctttttataatgcacaactgttgatggtaggctgtatagtttttagtctgtgtagttaatttaatttgcagtttgtgcggcagattgctctgccaagatacttgaacactgtgttttattgtggtaattatgttttgtgattcaaacttctgtgtactgggtgatgcacccattgtgattgtggaagatagaattcaatttgaactcaggttgtttatgaggggaaaaaaacagttgcatagagtatagctctgtagtggaatatgtcttctgtataactaggctgttaacctatgattgtaaagtagctgtaagaatttcccagtgaaataaaaaaaaattttaagtgttctcggggatgcatagattcatcattttctccaccttaaaaatgcgggcatttaagtctgtccattatctatatagtcctgtcttgtctattgtatatataatctatatgattaaagaaaatatgcataatcagacaagcgtaatgcataatcagacaagcttgaatattgtttttgcaccagacgaacagtgaggaaattcggagctatacatatgtgcagaaggttactacctagggtttatgcttaattttaatcggaggaaatgaatgctgattgtaacggagttaattttattgataataaattatacactatgaaaccgccattgggctactgtagatttgtatccttgatgaatctggggtttccatcagactgaacttacactgtatattttgcaatagttacctcaaggcctactgaccaaattgttgtgttgagatgatatttaactttttgccaaataaaatatattgattcttttct

SEQ ID NO: 75869 - DNA, 1160 bp, Homo sapiens; identical to SEQ ID NO: 61299
  misc_feature (1)...(1160): n = a,t,c or g

SEQ ID NO: 75870 - DNA, 2399 bp, Homo sapiens; identical to SEQ ID NO: 61300
  misc_feature (1)...(2399): n = a,t,c or g

SEQ ID NO: 75871 - DNA, 1189 bp, Homo sapiens; identical to SEQ ID NO: 61301

SEQ ID NO: 75872 - DNA, 3885 bp, Homo sapiens
cagggtggtgaactaaaaaagctggttcctgtgaaccttgggaaaatggtcctcaaccccctcctgaagcccctggaagatgaacctgatggggccagctaggaggtccaaatggaaggactgcaaataaaaggcactgggaactctcaggggccacacacatgtgagatcttcccaataaaatcagccttagctttaaaaccaggaaattgttagcaacaggctctcaccttcctccaacacccacagcattgcctatctccctgtgatagcttgattctaaagataacagcctgcctttactcagaaaccaggactgtgacgtgttttgcacacattctcttttcactttcacagtgtgtgaatatggcatgcaacttatgttctctgtgcctcagtttactcaagtgttaaacaggaatactcacatgaggattacatgagttaaaatggataaaatggataaaagtagagagtaaattatttaaactttatcaaatccttggtacatgaccttaatacaattaagtatttgttaaatacatacattttaaagaaacgtcatcatatccacacacctatgaggcacctgcccaggaccacagagccaatcaatcaggtgatgagtgattccaggccagcaggaaaccaccgcccactgacacagggactgcaccatccatccttggtttgcatggtgcctgccatgcttcctgtattactgttaaatacatggggcaggcctttggaggatcccaatgttttaaaagggcaatacgaatatgattctaatacataaaaagtatgagggcagcaagaatttagttacaaaacccaaaaatcctcaaagagaagccacatagcactgtgcagtgttaccactgcctcgagtctggacagggcacaggtgaccgagacaagtcttatttaactgatttcacaagaagggtccgagttttattagacaacccatgtcaaggtacaaaatgattaatgacaatatcagccatattctattagccaagtgccacctgtcactatgaaactatcctgtaggacatccctgggctctcagttgctaatgggctgctgaagaaatgaatgtcctcaaatcgagaccctaacacaaagagattccagagagtggcttagaaaacccagctactcttaccaatgtggggaaagggtcaggggaatgaacctctgcaggacaatttgaattcccaaactgagtaagagcgaaacaaatatgcaggcaaggcaaagcctcaggggggctcctgggtctggggcagggggtgggagacaggagaggcaaaatggcagggacttgacagcaggttcctcttgtctacttcttcctcccgcctctctccttgagggccaggtggatgactgcgccattggccatgttgtagtaagccagtgagttggaatctttgatgaagataccctcatactgtagcttctgtttccctgcaggcatgcctgtggcttcatgaatcttcaccttaatgacagagacctggtccgtgagtgggagggtgaagaccagcacctgcccattcagtttccattccgtcttatcctgcatgttgggcacctggactttgatggacactggacccttgtttctgcgcaggaactcctcctctggcatgaggctgtcctctgtcttcagttttttggaggtgggctcatcttccatgggaggtgggggatgcacagggggcattggggctggagctgggacaggtgccacaggtggagcaggcacaaaggctgttggcacaatcatggggggtgggcggggggccataataggaggggccgagggaggcatgggcacccacgttgattctgggcgcgtggatgatgggcggcatgggggcgatcactgagcctgggggcagccggaccacagatgccattgggggccggggcatgacgggtactgcggagacaactgtagtacgaactggaggtggcattgtgggtggtcggggcactgaagtgatgggtggagccgagctggggatgttggtggctgaagatggtggcggtggctgttgagggatttcattgggcttgctggggccaatcttctctttagtgtcatcctctggcaccaggcctttggccttgtgaatggcctcaatctgctcctggagggtgatgttggcctgggcagcctgctgggtccgggccatgctgcctgagtggccatcccaggtcaccttttcctctggcttctggatctcctcctcaccgatcttcttaccaatggctgtttcctctacaccgaagatgtcagtacgccgctcagccaactgcttcaagctgctctcaatatccagacctggtgcgtacacctcatcatcgctctgcttctcacggatggagcgatcccgctgctccagccagcgagggtcaagaagtccaatgcgcatgtgttcctgcattttgctggcggggatcttctccccagtaatgggggacacaagatactcatctggagcaggggctggaggcaagggcttggaggctttgggatcataatccttgcggacaatgacttggtctggagttgggggcagaggtggaggcatgggtgtctctgggggtgggggcactttctgcccttcttcttcatcatctgaaccctcatccatatcttgtacttgggtgtcctggtccagctgggaaggaggctcctccgccttctcctgtttgtcatcctcctcatcagactcgacctccatctcaacttcctcactctccccaaacttttcatagcgctcctgaatgaggattcgggcccccagctcctctggcgtggtggggggagggaagttcccttgctcattgggttggaagtccactgtttccaccaccacaaaatcatgccagtcgatctgagcataggccacccgctccttctccttctcctcttcttccttcttcctctcacgttcctggaatttggcccattccactcggtaacacacctgatccaaaacttctcgggggttttcagcctctttcttgagctttgaaaataaacctttgggtggaatcaagatcttggtgtactgttccactagcttcgtgaagtagttgaagaggctgtgctgtgggcggagaaagtcaaactggtagttgcgctgctctttctgcatcagctgggtcagaaactggcgcccattcctggccacaaattgagccgtcagcttcaccacatccaagtcgaaggctgagatagagggaggatcagcaatgaactcaaactcaggaggaggctctttgggcacgatggtctcttggattacttgggcttggaccttctggggcagctgctgctgggtggtctgctgctgctgctgcatgaccttggggatggcggcggacggctcctgagccttcccttccttgaactcgctgaccttgtggcggtagtaggcatggtaagggtcattggggttcagaaagttgaacttggggttgttgatctcgttctgtcggatcctagcttcaaattcaggcccgtttctggccacaaagctggcagtcttgtcaacaatatttctgacctctggaggagggtaaataatccccacaactggcttagaaggtgcagaatcctcctttgaagatgcttcttcttctgtgggctgtttgggctccgtgggcacgggcggcggcgggggcaccgcctgcacgggtccggccggcatgactgcgacgctcagggctgccagtccgcctcggtgtcggtgagcggtgccgcctcaagacagcctccccgctcggtcagtacgacgagctcgcaagatggcggcggccgagcgagttgccggggggggggggattaatttaattaaggat

SEQ ID NO: 75873 - DNA, 6309 bp, Homo sapiens; identical to SEQ ID NO: 60546

SEQ ID NO: 75874 - DNA, 2676 bp, Homo sapiens
gtccgtaattgccgggtcgacgatttcgtgtctgacagaggaggctccgtgtctgcagctagtgtgtcaactcagcgtttctcctctcgtccctggaagagctaaagatggctgaatttctagatgaccaggaaactcgactgtgtgacaactgcaaaaaagaaattcctgtgtttaactttaccatccatgagatccactgtcaaaggaacattggtatgtgtcctacctgtaaggaaccatttcccaaatctgacatggagactcacatggctgcagaacactgtcaggtgacctgcaaatgtaacaagaagttggagaagaggctgttaaagaagcatgaggagactgagtgccctttgcggcttgctgtctgccagcactgtgatttagaactttccattctcaaactgaaggaacatgaagattattgtggtgcccggacggaactatgtggcaactgtggtcgcaatgtccttgtgaaagatctgaagactcaccctgaagtttgtgggagagagggggaggaaaagagaaatgaggtttgccatacctcctaatgcatatgatgaatcttggggtcaggatggaatctggattgcatcccaactcctcagacaaattgaggctctggacccacccatgaggctgccgcgaaggcccctgagagcctttgaatcagatgttttccacaatagaactaccaaccaaaggaacattacagcccaggtttcaattcagaataatctgtttgaagaacaagagaggcaggaaaggaatagaggccaacagccccccaaagagggtggtgaagagagtgcaaacttggacttcatgttggccctaagtctgcaaaatgaaggccaagcctccagtgtggcagagcaggacttctggagggccgtatgtgaggccgaccagtctcatggcggtcccaggtctctcagtgacataaagggtgcagctgacgagatcatgttgccttgtgaattttgtgaggagctctacccagaggaactgctgattgaccatcagacaagctgtaacccttcacgtgccttaccttcactcaatactggcagctcttcccccagaggggtggaggaacctgatgtcatcttccagaacttcttgcaacaggctgcaagtaaccagttagactctttgatgggcctgagcaattcacaccctgtggaggagagcatcattatcccatgtgaattctgtggggtacagctggaagaggaggtgctgttccatcaccaggaccagtgtgaccaacggcccaaccactgcaaccaaccatgtgacaaaggggattcctagactggattcccagcctcaagagacctcaccagagctgcccaggaggcgtgtcagacaccagggagacctgtcttctggttacctggatgatactaagcaggaaacagctaatgggcccacctcctgtctgcctcccagccgacccattaacaatatgacagctacctataaccagctatcgagatcaacatcaggccccagacctgggtgccagcccagctctccttgtgtgccgaagctcagcaactcagacagccaggacatccaggggcggaatcgagacagccagaatggggccatagcccctgggcacgtttcagtgattcgccctcctcaaaatctctacccagaaaacattgtgccctctttctcccctgggccttcagggagatacggagctagtggtaggagtgaaggtggcaggaattcccgggtcacccctgcagctgccaactaccgcagcagaactgcaaaggcaaagccttccaagcaacagggagctggggatgcagaagaggaagaggaggagtaatggtgtctccagagactttacatcggttcctggcttctgtgcacagcagcacttgccgctgtgcaggcccacctctttggctctttgggtgggagagtttttccagattttagatttttctaggttatggccattttgtgtcttttgaggttgtgctgtgggggtttgggtttgagggaagggagcagggtggcggttgaggaacgcttcagccttagctgctacctttcggcagcagtgaaatacaagctgcagcctcggctgccagggctcccttttgacttattgtcgccactgccccttggtgctgtgtggtcccagtggaaggaggggaagattttggaaacctggtagccaccagtaaggtgattctctgccctgttggggcctaaatttgggggcttttgggcaacctctccgtgtactgcgtctgtccacactcgattgggccccaggtgtgtatgaggcgctctggtaaggtgctcaggccagttgcaatgtctgtcagtaacgaggcttttgatgtgttgagctggaggtgagtggaccgggggctgtgttttaagctgcttccttggcatttggcatcactgccttctggttcccgggggagcatggatcttttgtcctcactgctttctaatggggagggctgagggctccctgtccccacagcaggtatgttgggctctgccccagccccacacttgctttgaaaaccaagtgtcagagccccttccccttgtttttattttactgttataataattattaacttccttgtaatagaaataaagtttgtacttggagttcagctc

SEQ ID NO: 75875 - DNA, 2174 bp, Homo sapiens; identical to SEQ ID NO: 61304

SEQ ID NO: 75876 - DNA, 1409 bp, Homo sapiens; identical to SEQ ID NO: 61305

SEQ ID NO: 75877 - DNA, 765 bp, Homo sapiens; identical to SEQ ID NO: 61307

SEQ ID NO: 75878 - DNA, 1165 bp, Homo sapiens; identical to SEQ ID NO: 61308

SEQ ID NO: 75879 - DNA, 2103 bp, Homo sapiens; identical to SEQ ID NO: 61309
  misc_feature (1)...(2103): n = a,t,c or g

SEQ ID NO: 75880 - DNA, 2739 bp, Homo sapiens; identical to SEQ ID NO: 61310

SEQ ID NO: 75881 - DNA, 3756 bp, Homo sapiens
cacaagcatgcacagtgtgatgtggttcagaggcagcttctagacctgcaggagggagattgtattcagaggaagagcatcattttggcaacatctgaaagtgaaaacggaagccagaaacacttggccagccctgggggatttttttcttctatgcctctctggtggaatgacatttgctgtgtaggcatctttcctctgactgtatttcttggccttgaagagtactgagtttaaaaagacagtatgtgacagtccatggaaattgcctcttctgtgaaatctcgccacctgctccgaagacatgttgttgtctcccaaattctccttatccaccattcacatacgactgacggccaaaggattgcttcgaaaccttcgacttccttcagggtttaggagaagcactgttgttttccacacagttgaaaagagcaggcaaaagaatcctcgaagcttatgtatccagccacagacagctcccgatgcgctgccccctgagaaaacacttgaattgacgcaatataaaacaaaatgtgaaaaccaaagtggatttatcctgcagctcaagcagcttcttgcctgtggtaataccaagtttgaggcattgacagttgtgattcagcacctgctgtctgagcgggaggaagcactgaaacaacacaaaaccctatctcaagaacttgttaacctccggggagagctagtcactgcttcaaccacctgtgagaaattagaaaaagccaggaatgagttacaaacagtgtatgaagcattcgtccagcagcaccaggctgaaaaaacagaacgagagaatcggcttaaagagttttacaccagggagtatgaaaagcttcgggacacttacattgaagaagcagagaagtacaaaatgcaattgcaagagcagtttgacaacttaaatgctgcgcatgaaacctctaagttggaaattgaagctagccactcagagaaacttgaattgctaaagaaggcctatgaagcctccctttcagaaattaagaaaggccatgaaatagaaaagaaatcgcttgaagatttactttctgagaagcaggaatcgctagagaagcaaatcaatgatctgaagagtgaaaatgatgctttaaatgaaaaattgaaatcagaagaacaaaaaagaagagcaagagaaaaagcaaatttgaaaaatcctcagatcatgtatctagaacaggagttagaaagcctgaaagctgtgttagagatcaagaatgagaaactgcatcaacaggacatcaagttaatgaaaatggagaaactggtggacaacaacacagcattggttgacaaattgaagcgtttccagcaggagaatgaagaattgaaagctcggatggacaagcacatggcaatctcaaggcagctttccacggagcaggctgttctgcaagagtcgctggagaaggagtcgaaagtcaacaagcgactctctatggaaaacgaggagcttctgtggaaactgcacaatggggacctgtggtagccccaagagatcccccacatcctccgccatcccctttgcagtcaccaaggaatttccgggctccttccctagccccagcatttcacccagatgacacgtccccaaagtccacagactctctgaaaagcattttgatgcagggtctgcaggactgaccccaaggaggaacgtgggcacaaagaggtatatcagcacacgtgtgatcaccgtagggtaaactggagcgtcaccaccggcggaaatcgaagcttctgagactggaactctggaggaagacttttgcctccgtccaaaagattcctccaaaaaaagatttaaaaaaagatttcggcatcgacacggacgttgttgcacaaagcacttaaagaacgagagcatcttgttcattgcctttttcacctaagcataaggggaaaaactctcagggccctattaagatttataacctttgtaatgttcttcaccacagacaccttcttgtgagttttcagtctgactgtgggggtggggggtgtgaatgaaatggatgtcacagagtgtcatgtgtctgatgcagcctcctctgctgtgtattaaatgtcaaaatctgaatatatctggatatgtactaatcaaataataatcaatcaatcagcatatacatttcagccaaagccatagaagaaaaagcaatagttgcttgaattatgatcatctaccaccaactctgctcagccctgtaacagggtagggagagggtataacaggaagagctttgacttgtccctgtctatacattctctgtatcttttgggggtaacttcttggcagtttttcagtgttcagccatgtcagttgaaactagatttttctgtagattttttacttacccatgtgagcctaacactatcctgtaattcattttctcaggctatgtgtaaatgtagaaccctaatttttctataaaaaaacaaactaactaactgtgtaaagaaagaaaaagggaagtaccaatgggtttttccaccttatttttacctttgatctacccttgcagatttaacctgtcttcttccctcccattattctcattttccttttacctttctccaccatccagagccacaaaagcaaaccttctacctcctacctacttttctctgggacaaggataaaggaatatgattttccagagccccagagccagctcatcttccaggtgctgaaaccactttccaaataaactaaagcctggatttgatattacaaattttgggaaatcttagaataaagaacgagaacaaggaagtcattggctagtataattaagaaaggtaggattcagtgcttaccgatgatgcagtacttgatagaagaaaacagtctgggaggatagcgctcatttttcagttaccctttaaggagtccctttgtctttgggaaagtagcagaatggtccgcttctttcccatgagtggaaaatgtggcttgtccaactctcctccaggttgcatttcagtttctttccaaaacttattacctcccctaatcctgagactttggaaaaggtggaaggaagaactgttgctttatctatctccccctccctgcatgtgtcaacattgtgatgtcagtatttactaatctacattcagtggctgtacaaataacagctgtagtaagaagagattcaggatgctagaggtgaatatttgggtcatttacatgtacactacatagcaagttgatactcatgttgcatgttcttttaaattagtgattttgtgtcttaagtctttaacttccaatacttcatcatgtatgtaaccttccatgtttgcttctgataaatggaaatgtaggttcactgccacttcatgagatatctctgctcacgcttccaagttgttctcaatgacattagccaaagttgggtttgccattcatcccctaggcatggtaaatcttgtgttgttccctgctgtcctccgtattacgtgaccggcaaataaatctcatagcagttaatataaaacatctttggaggatgggagagaacaggagggaagatgggaaacaaaatagagaattcttaagattttgtttaaaccaaatgtttcatgtagaatgcaaaatgttggcacgtcaaaaatatgaatgtgtagacaactgtagttgtgctcagtttgtagtgatgggaagtgtattttactctgatcaaataaataatgctggaatactcaaaaaaaaaa

SEQ ID NO: 75882 - DNA, 2128 bp, Homo sapiens; identical to SEQ ID NO: 61312

SEQ ID NO: 75883 - DNA, 2475 bp, Homo sapiens
  misc_feature (1)...(2475): n = a,t,c or g
agagggagggaacgatttaaggagcgaatactactggtaaactaatggaagaaatctgctgcaccactggatattgggagtgtgtggcatgcatcctcatcatcaggaaactctaaaaaagaaccgagtggtgctagccaaacagctgttgttgagcgaattgttagaacatcttctggagaaggacatcatcaccttggaaatgagggagctcatccaggccaaagtgggcagtttcagccagaatgtggaactcctcaacttgctgcctaagaggggtccccaagcttttgatgccttctgtgaagcactgagggagaccaagcaaggccacctggaggatatgttgctcaccaccctttctgggcttcagcatgtactcccaccgttgagctgtgactacgacttgagtctcccttttccggtgtgtgagtcctgtcccctttacaagaagctccgcctgtcgacagatactgtggaacactccctagacaataaagatggtcctgtctgccttcaggtgaagccttgcactcctgaattttatcaaacacacttccagctggcatataggttgcagtctcggcctcgtggcctagcactggtgttgagcaatgtgcacttcactggagagaaagaactggaatttcgctctggaggggatgtggaccacagtactctagtcaccctcttcaagcttttgggctatgacgtccatgttctatgtgaccagactgcacaggaaatgcaagagaaactgcagaattttgcacagttacctgcacaccgagtcacggactcctgcatcgtggcactcctctcgcatggtgtggagggcgccatctatggtgtggatgggaaactgctccagctccaagaggtttttcagctctttgacaacgccaactgcccaagcctacagaacaaaccaaaaatgttcttcatccaggcctgccgtggaggtgctattggatcccttgggcacctccttctgttcactgctgccaccgcctctcttgctctatgagactgatcgtggggttgaccaacaagatggaaagaaccacgcaggatcccctgggtgcgaggagagtgatgccggtaaagaaaagttgccgaagatgagactgcccacgcgctcagacatgatatgcggctatgcctgcctcaaagggactgccgccatgcggaacaccaaacgaggttcctggtacatcgaggctcttgctcaagtgttttctgagcgggcttgtgatatgcacgtggccgacatgctggttaaggtgaacgcacttatcaaggatcgggaaggttatgctcctggcacagaattccaccggtgcaaggagatgtctgaatactgcagcactctgtgccgccacctctacctgttcccaggacaccctcccacatgatgtcacctccccatcatccacgccaagtggaagccactggaccacaggaggtgtgatagagcctttgatcttcaggatgcacggtttctgttctgccccctcagggatgtgggaatctcccagacttgtttcctgtgcccatcatctctgccttggagtgtgggactccaggccagctccttttctgtgaagccctttgcctgtagagccagccttggttggacctattgccaggaatgtttcagctgcagttgaagagcctgacaagtgaagttgtaaacacagtgtggttatggggagagggcatataaattccccatatttgtgttcagttccagcttttgtagatggcactttagtgattgcttttattacattagttaagatgtcttgagagaccatctcctatcttttatttcattcatatcctccgccctttttgtcctagagtgagagtttggaaggtgtccaaatttaatgtagacattatcttttggctctgaagaagcaaacatgactagagacgcaccttgctgcagtgtccagaagcggcctgtgcgttcccttcagtactgcagcgccacccagtggaaggacactcttggctcgtttgggctcaaggcaccgcagcctgtcagccaacattgccttgcatttgtaccttattgatctttgcccatggaagtctcaaagatctttcgttggttgtttctctgagctttgttactgaaatgagcctcgtggggagcatcagagaaggccaggaagaatggtgtgtttccctagactctgtaaccacctctctgtctttttccttcctgagaaacgtccatctctctcccttactattcccactttcattcaatcaacctgcacttcatatctagatttctagaaaagcttcctagcttatctccctgcttcatatctctcccttctttaccttcatttcatcctgttggctgctgccaccaaatctgtctagaatcctgctttacaggatcatgtaaatgctcaaagatgtaatgtagntctttgttcctgctttctctttcagtat

SEQ ID NO: 75884 - DNA, 5276 bp, Homo sapiens; identical to SEQ ID NO: 61314

SEQ ID NO: 75885 - DNA, 3812 bp, Homo sapiens
ctccccccggtgtttaaccgccgcccccggattttatttttggggccccataaaaaaaataatacctttccagcccccggtcgtaaaatttgtttctttaaaaagggcccccccttttttttttttttgtcataggagtgtggtttttttaataccatctgtgccaagcaatatcaaagttgtccatactctccaagtttgtcctatttttaatagacaatattaaaaattttttaagtgtgtgctgataaagagactagtcacacctctgaggggatttaaaaatgagaagccacataaattctcttccttaaaaaacagccatttcaaaagattttctttaatatcataaaatattttcatggacaagtgagctagcaaacacacatgcaccaatgtgccttttgacaagagtaccccctaccccgactcccacaccaaaatggacatgagattggagaaatgaatacagcagatggaacagatagaagaaaaaaaaatcagtaaaaaggatggaatataactttgtgcttggttattttcctatgtcgcaacaaaacaagacatttcggtgcaaatagttaatctttcctctttttttccatttgtctggtggagaaaaaatactttttctataataaaatatcgtagttttttggtttttaaccgtaactttttttttcttttttggcagaaaataattttgtaaactggtcacttcgcgggcagggagggatcgatgccacgctgggccccagctcacccggggtggaggctgggatgctgaaaccgaacccaggcaggagatgggccgacggcggaggtgcaaggcagggcacggcgcacaagacgaggggcggccgggcggggtggattagaggtcactctcgccgtacagcgccgtggagaaggacatgtagtccagagcacctggcacggagtcggggccggtgtagggggccatccgcgcgatgcagtactcagcctggtcgggtggcagctcgcggcgcagctcgtccatggtaatgtagttcttgtccccagccaggatcttgaaggaagccatgacttggtctgctgtatctgtgtcggctgtctcgcgggacatgaagtcaatgaaggcctggaatgtcactacccccaggcggttggggtccacaatgctcatgatgcgggcaaattctgcttctccctgggggtcgttgccaatatcataacccaagctgatgaggcaggctttgaactcctcgggacccagtgtgccggagtgatcccggtcaaagtggttgaaggaggcccggaactcattcatctgctcctggctgatgcccttggcatcccgggtcaggatctggttctctacctcattgatggtcctggcgatggtggtgagcagctgctcccagcccacacggatgtgctccatggtgtagttggtgtgcttgttgtcgaagatgagcgcctcctggatgagctggtggtcgccctccagctgatcaatctttggcttgtagttgacgatgctcttctcatactgccgcaggtggctgagctggtcctccagggtcccatgcatctcaatggagatccctcccgatctcctccatctttggtctggatccagggcccgaatgacattggcctgggctccaaactgcttgcggtagcctctcattgtgctgctgtcgggcatgctcctccgtcagagcttggtccctccgaggcaccagctgccgcacgtggtcccatttgccattgatctcctgaggcgtgatggttgtgtaggggttggtgcccgccatattgacgtggtaggtctggacaatcttggacacctcattgtggatgcccaggatggccaggcgctccttgtcggcatcagggagggtggccttgaactgctcatgggctgtggtcagtccctggattctcctcaatggtgtgcacaatgaaggtgtcctgcaggtcctccatggccccctccatccagttgttgaagggtgcagcccgcttggcatactccaagtacagctggtcaatggtctccagcagtttctcggtcccgctccagagcttcccttcgcttctgagttagggcccccagattgtcccaactggtaacagatcttttggcaaacgggcgttgaacactgggtgagtcataatagtccaagttcatttgagctccttgtgcgatggcggcaatctgcttccacacgggtcctggtgggcagcccaggtcactctcgaaggccctcatgcttccttgagcagggccttgatctcccgagagggtggcggtctcatagtccttctgtcgcagcatggcctctttgccgtcagtccaggcctcgtggatggaggcccttctgccggaaaacttctctgcccaaggtggtccaaatcgctccaagcttccgtatctcattcaagcaaaccactccctcaatagcccttctccacatgctcccaggcaagcccccaggcattgttgatgtccgagaccatcctgccctcagagggcatgaaggcaggccggttgctgagccgcagcttggtctgcagcgtgttgaagttgatctccagctggcacttctcctgcaccttgggcggcttgtgcaggcgccggtagtcccggaagtcctccagcttctgttgcatggcatgcatggtgttctcgggcacccggttctccagccacgggattgtgcggcggatccactccaacagatcactggccagcttctcgtagtcttccataagctgctcgttctcctggttgacggccaacaccttgcagatgcgattggctgctgtctccgccttctgggctccagagaaggcgtggtagaagctagacacgtaagtcatgatggctttctcatccggtcgggcagttccaacgatgtcttcggcatccagcatcttggggatgtccaggtacttctctgccacgtcaaaagccatattcagatttgtgagtggatcatccttccgcagcttcccgtagtcaatcagctcgggccggtgtcggtggatcaaagcacagaagccgaggccatccttccagcttatgtggaagttctggatgttgacatttttgtaaggggctgtctttctctgacaccacaggagcagcccttccttggctgaagtctcttccacggagatgtcctggatggcaaagcgcaggatgatggtccagatcatgcccagggtcatcttcacattcccatccacgatttcttcggctccgatggacaccagtttgacgcctttgctggctatgaaatccagggccttgttgacgttggagatcttgtgcactctcatcttgcctcgctctggcttggccaagcgttcacctgagatgacctccagcagcagcatgagcttcaggccatcccggaagtcctcttcgatgttctcgatctgtgtccccgccttccggaggtgggagttacaccatgccgtgaatgtctttctctgctgcttctcccaggccgggtccaggagcaggtcccggtcccagtcctcttctggctgcatgtaatcgttggtttgctgagaatcataatggtccatgatggtgcgcgcgtgctagggtctggatttcttcctccaccttctctctgagcaacggctgctgccctggcgtggggagggagtagggctgggctgggctgggctggcggggccgggctcgctcccctgcgcccggttccgccgcggcgctgctggcgaaggctgctactggcggcgacagcggcggctgggctcgcggactgcctgcctctgggcgggctcgtgcc

SEQ ID NO: 75886 - DNA, 1357 bp, Homo sapiens; identical to SEQ ID NO: 61316

SEQ ID NO: 75887 - DNA, 855 bp, Homo sapiens
gggtcgacccacgcgtccgagtaggcagagagcggacctggcggccgggcagcatggcggggctggagctcttgtcggaccagggctaccgggtggacgggcggcgcgccggggagctgcgcaagatccaggcgcggatgggcgtgttcgcgcaggctgacggctcggcctacattgagcagggcaacaccaaggcactggctgtggtctacggcccgcacgagatccggggctcccgggctcgagccctgccggacagggccctagtgaactgtcaatatagttcagcgaccttcagcacaggtgagcgcaagcgacggccacatggggaccgtaagtcctgtgagatgggcctgcagctccgccagactttcgaagcagccatcctcacacagctgcacccacgctcccagattgatatctatgtgcaggtgctacaggcagatggtgggacctatgcagcttgtgtgaatgcagccacgctggcagtgctggatgccgggatacccatgagagactttgtgtgtgcgtgctcagctggctgtcgtggacggcacagccctggcggacctcagccatgtggaggaagcagctggtggcccccagctgggccctggccctgctgccaagccttcaggacagattgcgctgcttgagatggatggcccggctgcacgaggaccacctggagcgggtgttggaggctgctgcccaaggctgcccgagatgtgcacaccctcttagatcgagtggtccggcagcatgtgcgtgaggcctctatcttgctgggggactgaccacccagccacccatgtccagaataaaaccctcctctgcccgcaaataaaaaaaaaa

SEQ ID NO: 75888 - DNA, 1125 bp, Homo sapiens; identical to SEQ ID NO: 61318

SEQ ID NO: 75889 - DNA, 2250 bp, Homo sapiens; identical to SEQ ID NO: 61319

SEQ ID NO: 75890 - DNA, 3097 bp, Homo sapiens; identical to SEQ ID NO: 61320

SEQ ID NO: 75891 - DNA, 4064 bp, Homo sapiens
agtaccgctcgacccacgcgtgcgatagcccttgctatttgcaagctcattcatataactattgagcctctctaccgaagagttggagttcctaaaggtgctaaaggctcacctgttaatgctttgcaaaacaagagagcaccaaaacaagctgagagctttgaagatttgaggagagacgtgttcaatatgttctgttaccttggtcctcacctttctcacgatcccattttatttgcaaaagtggtgcgcataggcaagtcatttatgaaggagtttcagtctgatggaagcaaacaagaagataaagaaaaaacggaagttatccttagctgtttgcttagcattactgaccaggtactacttccatctctttctttgatggactgcaatgcttgtatgtctgaggaactatggggaatgtttaaaacatttccatatcagcatagatatcgtctgtatggccagtggaagaatgaaacttataacagtcacccacttttagtaaaagttaaagctcaaacaatagacagagccaaatatatcatgaagcgcctaaccaaggaaaatgtgaagccttctggaagacaaattgggaagttgagccacagcaatccaaccattttgtttgattatgtatgttttgagatcttgtcacaaatacagaagtatgataacttaataacacctgtagtagattcattgaaatacctcacttcactgaattatgatgtcttggcctgtatcctttcaaattgtatcattgaagctttagctaatccagaaaaggaaagaatgaaacatgatgacacaaccatctcaagctggcttcagagtctggctagtttctgtggtgcagtttttcgtaaatatccaattgatcttgctggtcttcttcagtatgttgccaatcagctaaaggcgggcaaaagttttgacctgcttatattgaaagaagtggtacaaaaaatggcaggaatagaaattacagaggaaatgacaatggagcaactagaggctatgactggtggagagcagctaaaagctgagggtggttattttggtcagatcagaaacactaaaaaatcctctcagagattaaaggatgctctattggaccatgatcttgcccttcctctctgtctgcttatggctcagcagagaaatggggtaatctttcaggaaggtggagagaaacatttgaaacttgtgggaaagctctatgaccagtgtcatgataccctggtgcagtttggtgggtttttagcatctaatctgagcacagaagattatataaagcgagtgccttcaattgatgtactctgtaatgaatttcatacaccccatgatgcagcatttttcctgtctaggccaatgtatgcccatcatatttcgtcaaaataccgatgaacttaaaaaatcagaaaaagggaagtaaacagcaacataaagtccataaatacattacatcatgtgagatggtgatggctcctgtccatgaagcagtggtctccttacatgtttccaaagtctgggatgacatcagccctcaattctatgctacattctggtcattgacaatgtatgaccttgcagttccacacaccagctatgaacgagaagtcaataaacttaaagtccagatgaaagcaattgatgacaatcaggaaatgcccccaaataaaaagaaaaaagagaaggagcgctgtactgcccttcaggacaagcttcttgaagaagaaaagaaacagatggaacatgtacagagagttctacagagattgaaactggaaaaggacaactggcttttagcaaaatctaccaaaaatgagaccatcacaaaatttctacagctgtgtatatttcctcgatgtattttttcagcaattgatgctgtttactgtgctcgttttgttgaattggtacatcaacagaaaactccaaatttttccacacttctttgctatgatcgagtattctctgacataatttacacagttgcaagctgtactgaaaatgaagccagtcgatacggaaggtttctttgctgcatgttagagactgtgaccaggtggcatagtgatagagccacatatgaaaaaggaatgtggaaactatccaggattccttaccatattacgggcaactggatttgatggtggaaataaggctgatcaattagactatgaaaattttcgacatgttgtacataaatggcattacaaactaaccaaggcatcggtacattgccttgaaacaggcgaatatactcacatcaggaatatcttgattgtgctaacaaaaatacttccttggtacccaaaagttttgaatctgggtcaagcttggaaagaagagtacacaaaatctgccaagaagaaaaagagaagaggccagatctatatgcattggctatgggctactctgggcagttgaaaagtagaaagtcatacatgatacctgaaaatgagtttcatcacaaagacccccctccgaggaatgcagttgccagtgtgcaaaatgggcctggtggtgggccttcttcatcatcaataggaagtgcatctaaatcggatgaaagcagtactgaggagactgataaatcaagggagagatctcagtgtggtgtgaaagctgttaataaagcttctagtaccacacctaaagggaattcaagcaatggaaatagtggctctaacagcaacaaagctgttaaagaaaatgacaaagaaaaagggaaagagaaagaaaaagagaaaaaagaaaagactccagctactactccagaggccagggtacttggtaaagatggtaaagaaaaaccaaaggaagagcggccaaataaagatgaaaaagcaagagagaccaaggaaagaacgccgaagtctgacaaagagaaagaaaaattcaagaaggaagaaaaagctaaagatgagaaatttaagaccactgtccccaacgcagaatcaaaatcaactcaagaaagggaaagagagaaggagccatccagagaaagagatatagcaaaggaaatgaaatcaaaggaaaatgttaaaggaggagaaaaaacaccagtttctgggtccttgaaatcacctgttcccagatcagatattccagagcctgaaagggaacaaaaacgccgcaaaattgatactcacccttctccatcacattcctccacagtaaaggacagtctcatcgaactcaaggaatcttcagcaaagctctacattaatcatactcctccaccactgtccaagagtaaggagagagaaatggacaagaaagatttggacaagtcaagggaaagatccagagaaagagagaaaaaagatgaaaaggacaggaaagagcggaaaagggatcactcaaacaacgaccgtgaagtgccaccggacttaaccaagagacgtaaagaggagaatggaacaatgggggtttcaaaacataaaagtgaaagtccttgtgaatctccttatccaaatgagaaagacaaggaaaaaaataagtcaaaatcttcaggcaaagaaaaaggcagtgattcatttaaatctgagaagatggataaaatctcctccggtggcaaaaaggagtccaggcatgataaagaaaagatagaaaagaaagagaaacgggacagttcaggaggaaaggaagagaagaaacatcataagtcctcggacaagcacagataatgaagactttccatcaaggtgagatcggactggaactgttcggctgcgaccagaaatttattttcctgagtaaattgccgagaattaagaatgaagagggccatttgcatctccttaaattattcagttacctgctttattgctccatgtgggaaaacttaaaattgttaagttgtgcattactgtattttaacttgttggcttagtttctacatgtttattttcagtaatggctgaaagtgttaactgttccatacttttagcacaatgtgctgcataaggttacctgtgtacagagttttactttagattaactaaatattgcctgggttcagtttttatttccattctgaaatgcttcctttt

SEQ ID NO: 75892 - DNA, 2344 bp, Homo sapiens; identical to SEQ ID NO: 61321

SEQ ID NO: 75893 - DNA, 626 bp, Homo sapiens; identical to SEQ ID NO: 61322

SEQ ID NO: 75894 - DNA, 2126 bp, Homo sapiens; identical to SEQ ID NO: 61323

SEQ ID NO: 75895 - DNA, 1005 bp, Homo sapiens; identical to SEQ ID NO: 61324

SEQ ID NO: 75896 - DNA, 2785 bp, Homo sapiens; identical to SEQ ID NO: 60914

SEQ ID NO: 75897 - DNA, 3182 bp, Homo sapiens; identical to SEQ ID NO: 61326
  misc_feature (1)...(3182): n = a,t,c or g

SEQ ID NO: 75898 - DNA, 2695 bp, Homo sapiens; identical to SEQ ID NO: 61327

SEQ ID NO: 75899 - DNA, 862 bp, Homo sapiens; identical to SEQ ID NO: 61328

SEQ ID NO: 75900 - DNA, 3261 bp, Homo sapiens
ttttttttttctagctagaaaaggtgtttcctcccattttatttcataatacattttcacagaaacatgatatatttacaaatatacaggtaagagactgctggtcagaaatcttaaaactcaaaatgtcatcaaaaattaatttacaaaagccaccaagggtccatggaggcggccaggtggatggtgtggccggcgtctgcgtgagcctgcccagaagcccacgcagcctcccggctctgcctccgctggccccgtctcaggaagcgctggtttgcaggtttttggaagctgcaagcatcgctctgactttggccatgagatcctgagtgattttgctctgcacggaagaaacgattgctgaagagatctgggcttctttttcctgagagactcccctggagcgctcctggctggagccccgactctccacaggggagacgctggctgagtgcgccgagtgggccgcgggggccgcgggccggggcgctgcctgcttgctgggtgacaccgactgagacctggccttggacttggtccgcgaccgggaccgcctcttcttcttcttctcgtggggacttctggagcgggtccgcttcctgctggccccagggctgcggctcacgcggtaggcagtgggcacactcctctcttccctccgtctctcaggggagtgggctctcctccgaggggaccgggagcgggacctcgaccgccgcactgtccgataggcactgggaagagaatgctttgcttttgagtgtgatctagacctggacttggatgacgaatggtacttgggagaacgtgatcttgttcgagatctttttttgtgctttttctttttcttttctttctcttcttctctcggtggatctttgcttttgctcgaaggcctatcgggtggtttaacttctaaagtaggcagaggcctgcctccagtcagtagagggcagggcgtagtgctggattcctcgacactgaaaggactctcctcaattttcccagcttctgcttccggcagaggatttttgagggtctgtaaaaataacgccgctttccttttacgttctgcttgaagctgtttctcttttgactccttagacgcctgggccagcttttcccgggcagcagctgcgaggcgatcttccagcttttgctttgcttgctttgcttctagctcctcctgggtaagttgaggcttcttctcctcaacaactacacagggtggggcaactgctgggttagtgtttgcagcactactagaactttcttggccttctttgctttcttcatcatcatcactgtcatcatctagcttaacacgatttttttccaggggaagcagatcattttctttggccttgattgcaaagcttattggagcaaaggaagctttcaccagcttcccgtccgggacggtcttactggacgatgcctccttcttcccgcctgagcctgcccgtgctcccacctcggctgcgtcttcaggcgcgccatcctccccagcatcacttggcttctcgggagcagagtctgtgggagcctcttctggtgcagacacagcctgcatgctatcgcccccttctttctggaggaagaactgcttcttaaactcataataagcattatactggtgccacggctgcaggaactcaaatctttgatcattcttggcacgaacactggtctcgaacttcaggccgttcctggcgacatactcggccagcttgtcaatcacgggctggacgtcggggggcggggggatgatggcggccacgggggcaagtgcacttgtggtggtggttgtggaggtggccccgctgctagtctctgctgtggttgggggcggtggtggtgtggtcccaggaggtggtggggcggtggtcgtcactccaggggagttagacacggtcacgccagcaggaagggtgctgtagtaagtagtcacgtcgattccgggagggggcggcgcccaggcagtaagtgccgtccggtagcatgtagtagctgtaatacatggctgccacggtcgagtctgccgtgtactccacctgggagggctgcacaggcgcaccgtctgcgttgtgtggggtgggagtggaactgtcagcctgtgccttacgaacaagtgctgcgaggggatgatctgggtccactaccttcaagggcttcatcagctcttcaaggcggttacacttcttggaggcaaagagagagggatgaaggtaattcccatcttcttcatcatcatcatcttcattgtcagagctgactcctgatttttttttctcgtcacttttgttttctgccaggacagtgtagcgtccctctttcatggctttctggatgaacttatagtaggggttgaggtagtggtcgaagcgcagaaagtcaaactgggagttccgggcctgcttggccttcagcatgatctcaaactgtgctccctgcctgcacacgaagctggccgtgcgctcgatgatggcgtgcattttagcggttggtggcaactccacgtcagacgggacgctcaatcctaagggggcaacgaagggctcttcattttcctctaaattttcggcctcatttttttctctctgtttggaaggctcctcctcctccgtcggctctgacgggtcgtaatagtcgctaccgtaagtgaaccccacggcattgtagctcccatcctctgctagtgcttcactcaatcgcttgtattcttcctcttgccttgcctcctcctcaagcaagtccgtatgcaaggctaaatacctctcttcatcacacagggcctctattcgcgcctcctcttcagacagctgataatctctgttccacgtggaatactcagcatcgtactcagaaaggtcatgcaggtgaccacgtccatcatatctgtcgatgaggatcttgtggtcccccatccaggggatgaggtgctgtccctgttcctgagccagggcccgctcgtcgtcccggaacagcttgcaggcatagccgaaaaccaagagctccactcggctgcccccaccgccggcaccgcctggcccggcctcctccttcgcgccgcttttcctctcgggtttggcgcggcccccgctcgcgccgtacatgacagcgtccccggcgtccaggctggtcctcttctgtgccgcgcgacgtccctgatacctccacttggcctaccccttcagtcaaagaccccgcatcccggacccaacctcaacaccgccgccatagcgggcctcaaaaacgaaa

SEQ ID NO: 75901 - DNA, 2142 bp, Homo sapiens; identical to SEQ ID NO: 61329

SEQ ID NO: 75902 - DNA, 2372 bp, Homo sapiens; identical to SEQ ID NO: 61136

SEQ ID NO: 75903 - DNA, 897 bp, Homo sapiens; identical to SEQ ID NO: 61331

SEQ ID NO: 75904 - DNA, 2254 bp, Homo sapiens; identical to SEQ ID NO: 61332

SEQ ID NO: 75905 - DNA, 4601 bp, Homo sapiens; identical to SEQ ID NO: 61333

SEQ ID NO: 75906 - DNA, 2200 bp, Homo sapiens; identical to SEQ ID NO: 61335
  misc_feature (1)...(2200): n = a,t,c or g

SEQ ID NO: 75907 - DNA, 1651 bp, Homo sapiens; identical to SEQ ID NO: 61336

SEQ ID NO: 75908 - DNA, 1644 bp, Homo sapiens
  misc_feature (1)...(1644): n = a,t,c or g
ttttttttttttgtgaaaaaccaaacctcaaaaagccactttaattccggcctaacagcgccaggtgcaatgtctggggacagactctgggtacaatgctgtgtggcgaccactcactcacacacggctccaagaaggcccccaaggggggacttaccttcagggggctgagccaagggggaaaggggtggccccagaacaggggaaggggcaggcatggggggaaaaggtgctacttcttggcaaaggagatcttcatggcgttgttctgcgtgatcttaaagccctgcagggcatcgcgagctgcccctgcctgtacctcattgtcaaactccacgaaggcgatgtcatgccgcccgggtaccagacggacctccttgaagccagggaactgattgaaaagcatggacagcatgagctcgttggtctcctctggcaggttggtgaggaacaagatgtgattcggtggattctcagaaagaggctgggcagggggcatctgtcctggcataagctgctgcgggggcatggcccctggtgggatctggccaggtgcaaggcctggcggggggatcataccagggggcggcatgtagggcggctggcccggcatgtggtgcataatgcggggcgcctgagtcatcggcggcatgcccgggacaggcccctggacagcccccaccacgggggtggctcccccgccttgcacagcccnttcttggtggccggggtctcctggctcttgggcttcctcttctcccgcttgcggtcccgctccacgaaggtgcctttcatcttggcaatgatatctgagtcggtcttggcatactggatacgcataggtttgtcatagaaagggaaaccctgcatggagcgcagggcgttggtggcgctgctgacctccttgaagatgacaaaggcctggcccctcatcttcaggctccgtgataccaggatatccaggatctggccaaactgggagaagatggcgtacagggacttttttagctcatccttcttgatcttctcattgaggttgttgatataaatagtgtggttagggcgggtctcgggaactgccatggagtgaagtgttgaggtaagtcttaaaggaggaaaaacgtgactttagccctgggtttctccaaatcctttgtcccaacgtcggctgctcaaggatcttcctccgaaaaggaagtcaggtaaggcgggagtagggggaaggacggaggcaaagcgcgacaacaaagcgtgcgtaggacccgcttctccagcccgcgtgcggagagaactctcgagagatttactacgacttccaggatgctctacgcgacccggtgggcggagcaccctaaatggcgattcccattggcccaagcatccgaagggccgtcccggagaaaaaacccggatgtgggagccagtatagaaaaaagggacaggtcctaggcagcctggcctcgagcagcaagtttcctcagacgggcccaggaaggcccggacgccaagcgtaccgctcgcctgccgccgatggtcgtttgcaccggaggttaccttccgacagggccgtagttctctcaaccggcgcctgctacttccctgagaccaaaccacaaagctttctctcctggccccgccacgaaa

SEQ ID NO: 75909 - DNA, 2738 bp, Homo sapiens
ccacaccaatgccttcatgtgtgggcaatcccatggagcacacccacgcggccaccgccgcgttgcctgctgcaggtcctgtcaacctgcccacaggcatctctcgcgtccccactggctaccctagcgacctcaagccagtcacctggaaccagcaccagctggcccacctacagcagatgtgcagcgaggctagtgggacgccagcccctggcctgacaggcaagcatgcggcaggacgcgagttggcagggcctggctttgtgggcaaggcccctgcctacccgcaggaactctgcctggcgcagtccttccatctgaagccacccctggaaaagccgaccccatccccaccagtcaacggcatggcagccccattggcctaccccaatggtcactacttccaacccctgtggaacaacattctgcccactcccaatagcgacagctcggggtctcaggaccttgccatgccgttccacggtgggcagcccacaggtgcacccctcgactgtgcggcagctcccggggcccactaccgagcagggaccgggggcggtccagtggcaagccagaacagcttgatgcaaacagtggattacctaagtggggatttccaacaggcctgcttccgagaacagagcctggccatgctgagcaaggcccaccgagcccctggcaaccgagcccccgatcccacagagagtcgaagtcttcatattcagcacccagggtatagataggtagccctgctgccctccacgtgcaacacatcatacatcaccctcctaggtttagtcttttaagtaactggatagtttcaaagtttcactgctccagtgtgatcattcttagatgtctaagaaagggaatttggtgggatctaagtggggacagaaggggtcctctcgtcctcccctccagcaacttttggttttatgttagaacctaaccctaagcccaggcttttctctccactgactgcctgtcagctagtctctccaccttggccatttccagccagctcccacccatcttttcttgaatctcttcctgtttcccttaggacgactgaggtgtgggctgacggaatgccctagttgaggtagtataggtgctcaggcccctaatccagacctctacctgttgctaccccccttcccctccctccaggactaagaagcaagatttcccaggtgctctgaaagctaattacttactcatcgaaggatctcaaatcaaagctgacccagtcttcatatccttcaagttcctttccattcctcaaggctttgttttgtgtctatattgatcccacagccactgcacttgcccttgccacacttgatctcaagggcatcttggaagtatttgaccatttcttgagatatggggggaaaaagtctttgtattggcatcttggttccagactcccctttccaaacctagaaaaatacagtgacctttgagcatacccaagatccctttctcactgttgcctgtcccctaactcacctccccacagcccctatcctttccccctcaacaaaaacaaaatctaccttacttgaggaattaggtaggtaaggaatgatcacattggagtttgggattaaaaacaccaaaaaaaaaaaaaatgcatttggttctctctacactggctaagaatattgctctacactgtaagttttaaacgttacgtttctgtatgaatgtagtgtgggtttgagtagcattgtgtgtgagtggccccacaggtacattcaccctctagtgcagcccctcagtttaatgaaggaaaaaaaaacaaacacaaagccttaagctctttgagtacttcctttaccaaatgagcatggttctaacacctggagctgggcctacattggaaacaagcccctcctgccctctgtccattcttagagcataccttcatccactccatgctcagcacgtctcatcccaagcgacaattagttggctagaaacacttttctgtaattttaaacttagactgttttgttacaaatttttgcaccattctgttaaagatgcagaattgggcttttttattttttacagatgaaataagcccttacctttcctcttgtctctggggaatgtcagctgatggttcttatttaaggttttgcattttgttcactatccactactgttcgttagccagaaattctctagtgatctgaagcaatgtgactgaagaccagttttaagttatgtgttggcaagttgccttatatttaaaaggaaaaagaaaaaaaaaaaagcctgattgtgttatgccaaatgatagcaacatgaagtcctaatttattgttcccaattgttttcctgccgtctgtgaacactggtacctccctgtcctgatcccccaggagcacctgtagcttctgactcaatgccttctccgaaggtgttggccgccatctcacccagggccctcttccagttcctgcttttctgagtcagatttaaagagcaccactgtcttccccctaccccttgcttgatctccaaagcagatattcttgctgtatttttttttcctccccaatacctctccctgaaaggtggagctgctattttaggaaactgggaccagacaacaacttgggggctttaagtcaaacaacctcaaacccatctcttcctgtgtaggggtgcaagcctctgaagctctcactcccacccttagtctgcatggaaaatgactggga

SEQ ID NO: 75910 - DNA, 5669 bp, Homo sapiens; identical to SEQ ID NO: 61338

SEQ ID NO: 75911 - DNA, 2580 bp, Homo sapiens; identical to SEQ ID NO: 61339

SEQ ID NO: 75912 - DNA, 827 bp, Homo sapiens; identical to SEQ ID NO: 60912
  misc_feature (1)...(827): n = a,t,c or g

SEQ ID NO: 75913 - DNA, 2407 bp, Homo sapiens
gccaggaatccctgggtcgtcccacgcgcccggcccgaccacgtgtactgtggagactgtcaaagtctcccggagcccaatttccggaagcggtgagttctgaaagaagttcctgcaccgtagtttcccaagtctgcgaatccccaatcatgagcgcctcgggcgtactgtcctttacccagcaaggatgggagcaggtgctggccaaagtgaaacgggctgtggtttacctggacgccgcctgcgccgagagcctgcactggggctgcggatccacccgtctcctggaggcggtggggggtcctgactgtcacctgcgagagttcgagcccgacgcaattggtggtggagccaagcagcccaaggcagtgtttgtgctgagctgcctgctgaaaggccggaccggtggagatcctacgggacatcatctgccgcagtcacttccagtattgtgtggtggtcacaaccgtgagccacgctgtccacctcacagctaatcatgtcccagcggcggcagcggccgagatggaggggcagcagccggtgttcgagcagctggaggagaagctgtgtgaatggatgggcaacatgaactacacggccgaggtgttccatgtcccgttattgcttgcccctgttgctccccactttgccttgactccagcttttgcatcccttttcccactgctaccccaggatgtgcacctccttaatagcgcccgaccggacaagaggaagctgggaagcctgggtgatgtggactccactacgctaaccccagagctgctgctgcagatcagatgcctagtgtcaggcctcagttctctgtgtgaacatttaggagtacgggaggagtgttttgctgtaggttccttaagtcaggtcatcgctgcggatctggccaattatgcccctgcaaagaacaggaagaagactgctgcaggcagggcatcagtggtttttgtggacagaaccctggatctcacaggagcagttggacatcatggagacaacttagtagagaagatcatttcagcacttccccagctcccaggccacacaaatgatgtgatggttaacatgatagcgctcactgcactccatactgaggaggaaaattataatgtggttgcaccaggctgtctttcacaatccagtgacaccacagccaaagccctatgggaagctttactgaacactaagcacaaagaggcagtgatggaagttcggagacatctagtggaagcggcaagcagagaaaacctgccaatcaagatgagtatggggagagtcacaccgggacagctcatgtcctatattcagctcttcaagaacaacctcaaagctctaatgaatcattgtggcctcctccagcttggactggccacagctcaaacgttgaaacacccacagactgccaagtgggacaactttctggcttttgaaaggctccttcttcagagcattggggagtcagcaatgtccgttgtgttaaatcagctgctgcccatgattaagcctgtaacccagagaaccaacgaggactacagccctgaggaactgctgatccttctcatatatatttattctgtcactggagagctcacggtagacaaagacctgtgtgaagcagaagaaaaagtcaagaaagcattggctcaggtcttctgtgaggaatctggatcgtcacctttgctgcaaaaaattacggactgggactcttcaattaatctgacatttcacaaatccaaaattgccgtggatgaactctttacttcacttcgggatattgctggagctcggagtctcctgaaacagtttaagtctgtatatgttcctggaaatcatacccaccaggcatcttataagccattgttgaagcaagttgtggaggaaatatttcatcccgagaggccagattccgttgatattgaacacatgtcttcaggcctcactgatctccttaaaactggatttagcatgttcatgaaggtgagccgggccttcatccttaggtgacttacccccctcctgatcctcttttgtggtaaggtggggtcacagtctctggaagtgaaaatgggtccaaagatcttgtggcatcgttgaagccaggaacccaggtaatcgtgctgtccacacgactcctgaagccacttaacattcctgagctgttatttgcaactgaccgactgcatccagaccttggcttttgagcatccgctaagaagataagacctactcaagctggaaatgccgatgcaattttctgccaccactccaaatactcctccacaaccagcgtccctgtcactaattgcgagaatgatggaattctgcctgaagggtcttgatacctactcagtgaggtactttgcttggattgctgtgattcttaaaaaaaaaa

SEQ ID NO: 75914 - DNA, 5325 bp, Homo sapiens
tactcctagcttggcacgaggagactgtatttccgtgagggtggaagaaaatcataccatatcagatgcctcgcagagcaccaggcccaccgtgaaaggctggtccctgcagacggcttcccatttttatgaccggatgctgggaagcctgctggtccacaggtccatacatgaagtcaccataagagggtggttcccacttcatcaacacctcatcgccgcgaggtgaggctaagatgagcataaccagtgacgaggtgaactttctggtgtatcggtatctccaggagtcaggtttttcccactcggctttcacgtttgggattgagagccacatcagccagtccaacatcaatgggacgctagtgccaccggccgccctcatctccattctccagaagggcctgcagtatgtagaggccgagatcagtatcaacgaggatggcacagtgttcgacggccgccccatagagtccctgtcactgatagacgccgtgatgcccgacgtggtgcagacgcggcacgaggcattccgagagaagctcgctcagcagcaagccagtgcggcggcggcggcggctgcggccacggcagcagcgacagcagccaccacgacctcagccggcgtttcccaccaaaatccatcgaagaacagagaggccacggtgaatggggaagagaacagagcacattcagtcaataatcacgcgaagccaatggaaatagatggagaggttgagattccatccagcaaagccacagtccttcggggccatgagtctgaggtgttcatttgtgcctggaatcctgtcagtgatttgctagcctccggatctggagactcaactgcaaggatatggaacctgaatgagaatagcaacgggggctccacccagctcgtgttgaggcactgtatacgagaggggggccatgacgtcccgagtaacaaagacgtcacctcactggactggaataccaatggaacactcttggctacgggttcatatgacggttttgcaagaatatggacggaagatggtaacctggccagcaccttaggccaacataaaggccccatctttgccttgaaatggaaccgaaaggggaattacattttgagtgctggtgtagacaaaacaacaataatttgggatgcccacacaggagaagccaaacagcagtttccttttcattcagcccctgcccttgatgtggactggcagaacaacacgacctttgcctcctgtagcacagacatgtgtatccatgtgtgcaggctcggctgtgaccgcccagtcaaaaccttccagggacacacaaacgaggtcaacgccatcaaatgggatccgtctggaatgttgctggcatcctgctcggatgacatgacattgaagatctggagcatgaaacaggaggtgtgcatccatgatcttcaggctcacaataaagagatctacaccatcaagtggagccccactgggccccgcccaccagcaacccaaactccaacatcatgttggcaagtgcttcgtttgattctacggtgcgactgtgggacatagaacgaggcgtctgcacccacacgctcacgaagcatcaggagcctgtctatagcgtagctttcagccctgatgggaagtacttggccagtggatccttcgacaagtgcgtccatatctggaatactcagagtggaaatcttgtccacagctaccgaggcactggcggcatcttcgaggtgtgctggaacgcccgaggagacaaagtgggtgccagcgcgtccgacggctctgtgtgtgttttggatctgcggaagtaaccacaaaatattatcgaaaaaagaaaagaattctaatgaccagccgtgaatgtgtagggttgcagctctattctccaaaactgtaggaacttgacttgcgttagagtgtactctgaaaccaactcgtctctggccgcaggagtctatatgttttcgtaatcttcatcaagaagtttttaaaaggcaagcaaaaacagaagcaaatcatatcaaacggggatagaatggtttccactgaggacattcagcctgggaaggaggaagtcaccagctcgaggcgtgtggattggtttccacccggaacaggctctgtgatggctgaatggaaagaaacgtaaaaagctgtgccaaaaaaaaagcaaaatgctgtgataaaccaaacagggaagggggaaaaaccctcctccttgggatttttttttttttgttttccctaacaatttggacactacgattgctctcacaaaggaggttcaaagaccagtttgtaccgatgaaacgcgcaactttgtaatcccaacactttctattttctagaatcttctttgttcattgggtggtttttcagtcggctggaattctatcttctgggggccttccgtctgagatggaagctgtcttgggcttgttgtctcttccttctgttgctccctgcccctccccctgcctttccactctgtctggtgagctctgctttttcagtgcaccatcaagagatgcagccccgtggacatgaagacacaatctcccacggacagctttcccccttccgccctctcccaccctctcctccccttgcgctcgcgctcgcgctcgctttctcactggcgtgctctctttctctctctctctccctctgtacctttctcatagttgcttcagatcttaggtctcaagggcactttggcgcgtagtaagtgctttatgtaagaaggcagggcaggggggctttttacaggagaaaaaaaatgacttataagagaaagagcctggagtatttttggaaaaaaaaataatatttttatgttaaaacaattttaaaatcttaaaatggccatcaaacatagagagctttgtgtgattcatgttttaaaaagaaccgaagaagccacaggcagggcctgagggagcccctggctttcccctcagcctcaggaaaggtggtcaggaaaactctggctggacaagggtcagtcttcggggtcagcagcgagattgctctgcagccagtgagggaggtccccgccatgccggctggaagaagaacctcgcatcttttggtgtgtatgcaccttggcagccagcaggaaagcagcgaagagccgcgcgccctctggcctcaagggagcattggcagaaccataaggtactgcagaagccgtcgaaaccgactgctcggctggattaggcgtgttggctacatctttcccacaaccgtataacgaccgatggtcatttctccaagagcaggcttggcgagtccttgcagagctgacatagaggcgcccgcatgtcacttagtctaacgctgacagaaatgaatgcagaaggaagattttcagtcctgaacgtgaattatagaggtagaacgtcgctaataatttctgccatctttataatttctttgtctcacagaagactaggagaaagatcttttttaaataatctttttgctgtttttaaaaaattaaacaaggctttgtgttcctagaagagcttcatttcagtgaatctggtgacctccatctgcttgctgtcataacccgacacggacttatttttgtcattagcaagggggaaaaggccaaaggacaagggcctcttctcccattggttttcctgtgggcagaagggctgaggaagatggcccagcccgtgggggctgctgggtcaccagcagtgggtagggtgcaatctggtgtgtgttccagcagtgagacggtgttattgtgaaggtggcattcatctgcggagccaaaacccagccatcggggaagggtcagggcttctgtggaacttggaacgtgccaggaccacctgcaaaagccagggtgcgtttgatcatttctcagatcatttgattgggcctccactttggggtatgtgaattattcatgtcccagaagaccaaaaagtgctctggttctgagatgagtattttattcgtgttctgtttccgaaacacttagcaaagaaggtcacagtgatgtggagtcgccgcacccatctttgaagatagccagtgtccctggatgaggtgatgatttcccgtcccaaggactctgtgaagtttaaagtacagtttgttggggtccaaaagacaccatctctaccccacccaaataaaaatgcactcatctctgtagaacatctgctgtcaaaggccagcctgtcgttagggcatggcttatgcttgacaaaccagtaacaactgtgggatggcgatggtgggatgtgtcgcaagcaattcactagacaatcttcacatgaatgtcggtagccagggtctctcccgagggatggctttagtcttgatgaatgtgaaccatgtcggaattgttaggtagaaacctgggctgggaggcctcggaccccaggctccatccctggcttccccagcctgcggccgcaagcaaaaccaagcgcgagatgcagctagcacccttcatatccatccccgttctcagcgggacaacaccatggacagccgttttcagagcctccagcatttgcacaccactactcaccctctctgctgctggcatgttggtagagtcatccctgtaatcaagaaatggcctgtggaatgttattgttcaacgttgtttacagctcttaaaacatggtgaggaatgcctaagtcttagtgaccaaacgtgaccttgaaagcagacatagcatgacagaccttcctagagtgtttggtcgggttcacagtgaccgagagtcaggtccagcacacacctgggaaagggatgctgccccaagggggaccaaaagggccggacgttacagggtgaaaccctctgacccctcgcgacaccgtaggacttgacttttgtttagtctttctaagaaatagatcatggagccaagtgaagtgcactttgtcaaatgtaagggtctgctttgttcttgatgcttttctgtttttttaaccttttgttccgccatttataaaaagaaaaaaaaaaagcttatgtttccttgtcaaaatgcagaaatgttcccttcccgcccactcactgaagttttgcattctggcttgtgcagtttttattgtctgtgtcagacgtacagccagacatgttctctattggcatttttccgattctgttcagatgacagcgaccgccttttcattccccccgccacctgtactcaccctcacgctctttgaagaaaaaaaaaaaaaatcaccttgtgtgttgtagctcatttgtttcaagagagaatcaacagatcgatattcagtgtcttgaataaattgctctattttgatatta

SEQ ID NO: 75915 - DNA, 2895 bp, Homo sapiens; identical to SEQ ID NO: 61342

SEQ ID NO: 75916 - DNA, 2419 bp, Homo sapiens; identical to SEQ ID NO: 61343
  misc_feature (1)...(2419): n = a,t,c or g

SEQ ID NO: 75917 - DNA, 771 bp, Homo sapiens; identical to SEQ ID NO: 61344
  misc_feature (1)...(771): n = a,t,c or g

SEQ ID NO: 75918 - DNA, 708 bp, Homo sapiens; identical to SEQ ID NO: 61345

SEQ ID NO: 75919 - DNA, 1554 bp, Homo sapiens; identical to SEQ ID NO: 61346

SEQ ID NO: 75920 - DNA, 1738 bp, Homo sapiens; identical to SEQ ID NO: 61347

SEQ ID NO: 75921 - DNA, 3500 bp, Homo sapiens; identical to SEQ ID NO: 61348

SEQ ID NO: 75922 - DNA, 2018 bp, Homo sapiens; identical to SEQ ID NO: 61349

SEQ ID NO: 75923 - DNA, 2510 bp, Homo sapiens
ttccgttgagcatctagacgtttccttggctcttctggcgccaaaatgtcgttcgtggcaggggttattcggcggctggacgagacagtggtgaaccgcatcgcggcgggggaagttatccagcggccagctaatgctatcaaagagatgattgagaactgatgcaaaatccacaagtattcaagtgattgttaaagagggaggcctgaagttgattcagatccaagacaatggcaccgggatcaggaaagaagatctggatattgtatgtgaaaggttcactactagtaaactgcagtcctttgaggatttagccagtatttctacctatggctttcgaggtgaggctttggccagcataagccatgtggctcatgttactattacaacgaaaacagctgatggaaagtgtgcatacagagcaagttactcagatggaaaactgaaagcccctcctaaaccatgtgctggcaatcaagggacccagatcacggtggaggaccttttttacaacatagccacgaggagaaaagctttaaaaaatccaagtgaagaatatgggaaaattttggaagttgttggcaggtattcagtacacaatgcaggcattagtttctcagttaaaaaacaaggagagacagtagctgatgttaggacactacccaatgcctcaaccgtggacaatattcgctccatctttggaaatgctgttagtcgagaactgatagaaattggatgtgaggataaaaccctagccttcaaaatgaatggttacatatccaatgcaaactactcagtgaagaagtgcatcttcttactcttcatcaaccatcgtctggtagaatcaacttccttgagaaaaagccatagaaacagtgtatgcagcctatttgcccaaaagcacacacccattcctgtacctcagtttaggaaatcagtccccagaatgtgggatgttaatgtgcaccccacaaagcatgaagttcacttcctgcacgaggagagcatcctggagcgggtgcagcagcacatcgagagcaagctcctgggctccaattcctccaggatgtacttcacccagactttgctaccaggacttgctggcccctctggggagatggttaaatccacaacaagtctgacctcgtcttctacttctggaagtagtgataaggtctatgcccaccagatggttcgtacagattcccgggaacagaagcttgatgcatttctgcagcctctgagcaaacccctgtccagtcagccccaggccattgtcacagaggataagacagatatttctagtggcagggctaggcagcaagatgaggagatgcttgaactcccagcccctgctgaagtggctgccaaaaatcagagcttggagggggatacaacaaaggggacttcagaaatgtcagagaagagaggacctacttccagcaaccccagaaagagacatcgggaagattctgatgtggaaatggtggaagatgattcccgaaaggaaatgactgcagcttgtaccccccggagaaggatcattaacctcactagtgttttgagtctccaggaagaaattaatgagcagggacatgaggttctccgggagatgttgcataaccactccttcgtgggctgtgtgaatcctcagtgggccttggcacagcatcaaaccaagttataccttctcaacaccaccaagcttagtgaagaactgttctaccagatactcatttatgattttgccaattttggtgttctcaggttatcggagccagcaccgctctttgaccttgccatgcttgccttagatagtccagagagtggctggacagaggaagatggtcccaaagaaggacttgctgaatacattgttgagtttctgaagaagaaggctgagatgcttgcagactatttctctttggaaattgatgaggaagggaacctgattggattaccccttctgattgacaactatgtgccccctttggagggactgcctatcttcattcttcgactagccactgaggtgaattgggacgaagaaaaggaatgttttgaaagcctcagtaaagaatgcgctatgttctattccatccggaagcagtacatatctgaggagtcgaccctctcaggccagcagagtgaagtgcctggctccattccaaactcctggaagtggactgtggaacacattgtctataaagccttgcgctcacacattctgcctcctaaacatttcacagaagatggaaatatcctgcagcttgctaacctgcctgatctatacaaagtctttgagaggtgttaaatatggttatttatgcactgtgggatgtgttcttctttctctgtattccgatacaaagtgttgtatcaaagtgtgatatacaaagtgtaccaacataagtgttggtagcacttaagacttatacttgccttctgatagtattcctttatacacagtggattgattataaataaatagatgtgtcttaaaaaaaaaa

SEQ ID NO: 75924 - DNA, 4723 bp, Homo sapiens; identical to SEQ ID NO: 61351
  misc_feature (1)...(4723): n = a,t,c or g

SEQ ID NO: 75925 - DNA, 1781 bp, Homo sapiens
cggccgcgtcgactttttttttagactattttaaaagattttattagaggaaataatctagtagataactttcttacttccacaaaaacaaagtttctcaaggatacaaaccaatggatttatctgtgaactcggtcccagaatagaaactagcaaaaagtcagtacagtactcaaaaaatacttttgtggtatgaaaaaagggcaggtgcagatgtagaactgtaccatcttcagtttctgttcacaattgttttaaaacaattctcatctatccagtctgctctcccacgcctcaggatgaggggaaggccaatgggtcaatgctctgtggataggcccaagtagggatccaatctagggtaattccctgttccaccttaggctctgtcctctgaggggatttgccagggttggcacccacaatagttctccatttctctttagtctgaacttatgctgtaaacccaaggcctggcacaggggtatgcaggaaagtttgagtgaatcagtcacaacagctctagtacagtactgcatcgatatgctctggagacctgcagcctatttttcccagagaaataaagtggagtggagatcagaagccatggcttcccccctacctcctttggtcagtgcaggctctggctcaaatactgaagaaacatgttggccagttgcggcaagttctcattgttgggatgcattttagtgtacgaaataaactggcgacgaaggcgactcagttctgccatggtcaagggccgggtaaaccgcaagtgctctgtggtaccaggaagcgtgagcaagtccccggggacagcgctcttctgcgcttccatcaatccggccagtacttgactcgtgacctggtccaactggtgcagaaagctgccggaggcgaggggctgggactgcgtagactgatggggtggtggggcccggttctcaaacagggcagagcggatccccgccaggggcaacggctcctctaggcccaccaaagtgaataaaggccggtcccagcgattccgagaatcgggagcctcaaagcgcagcgttagggcctccaggagttcgggagagtaaaaggcaccggacccatgctttgcagatttctctgaatccggagtcacaagagctggagactccgcagccccggattcttctcgctccagttccttgggtacgtcggcctgggcacttccatttactacagagtccgcagtatgcagttccctgaggacgctgctgcccgccgcctgggctctcccgtcctcctcagcgcgtggccgccaactcacactgacgttccggccagggttctcgttcgcgcccgccacctgaggtcccgcgatcgggccgccgggccgtacgcagtagaccaggcagagcggggtgcgcgccgcccgtgccaggcgagtagagctcgtaacggaaacctttgatgtagttaagcgagtccaggatgaccacgtcgtggcgactcaggcgccgttccacggaggctcgcagagctccacgcaatgccttctcacgggcagaatcgccgtacaccgctgggtcctctgcgcccaggacagctgcgtcgtccaccacgtacaccgcgcggccctcggcagccagcgccacgcgcaactcttcagcacgccggctcttgccgctgtacggcagcccgcaaaacaccacgagcggcatcctctcagggagcgaccattggcaaccgcgctgcgccaacttccgggttgtacgcgcctccgaccatgggatgctgtcacttgc

SEQ ID NO: 75926 - DNA, 1962 bp, Homo sapiens; identical to SEQ ID NO: 61352

SEQ ID NO: 75927 - DNA, 5656 bp, Homo sapiens; identical to SEQ ID NO: 61353

SEQ ID NO: 75928 - DNA, 2735 bp, Homo sapiens; identical to SEQ ID NO: 61354

SEQ ID NO: 75929 - DNA, 716 bp, Homo sapiens; identical to SEQ ID NO: 61355

SEQ ID NO: 75930 - DNA, 2849 bp, Homo sapiens
  misc_feature (1)...(2849): n = a,t,c or g
ttttttttttttagttcaatatgattttatttaaaaatgtgtacagctgaaggagggatctgatcttttgttaaatgaaaccaattttcacggtatatatttggccattttagcttcgtagtgaataataccagaaaaggaagtttctgttcaagatcctcactccagcacactcagccaggtgcctgggcaagatgacacatttcctggtctgaagctcacaggccaatcctctcactgaagtgaaacaccaattctccaggcatacacacacatacgcacatcttattttcactgctctacacagggacctgagaatccttaattttaaagttgggaaaaacgtgaaaggattccttaactcattgtctgcgacaaatccaactacctgttaactcttaacaattgcaagtataaaatacttgaaatttacaagatgctccatttaatggaacaactcaaatgctaaaaaattaggtcaaataacatgctttaatatttttaaatgttacttaaaaacttatttgagacaagatacggcagcacatttcttggtattataaacatcacatactgacgactgcatacttgatggccaataagatttaaagaaagataataaaccatactggtatacaacaatatctgcagggaatgtcatgttttacattttgttaactgaaattaaacctgacaaaaaaaccaaagatctacaaaaccgacacccatgtcattttaaatgatgaggtagattgtttcctatgcagtaaagtgaagataaaaaaaaaatccatacaacttccaaatcctctttaaaaaaaaaaaaaagttgggttatagtcactttcacaaacaagacattcataaactataaggtggagaggtcatactcaggcaggttctgtacttgatgtgttacttggagattcaataatcagtcttgggtcaatcaactctttccaaaatacagtgatcttgctctcctgtgtcacagcgtactccactacctcggctccattttcattgtgataaactaaatcaaatttccccaggttctcctcaaaggcaggtaaggatgaaagaatttctatatctacttgctgggtctctggattgtggcttaatattcttccttccttgtagtcagagacatcaggagagtaactggatgttagctccaaaagcttaaatgcaatcttttctccaacttgaggggcagctgctaacagtggtaacagactatagtccttcttgggtgtctctactggattctggataatagtagatgaattttttaccacgtcatttaattgctgttgcctctggttgtcagtgcttctatttacaacacaggaaacaggatgccctcgtcctcgacctctcccccgcatgccccgtcccttagctcccttccaagaaaaaaggttctcttctctaccccatcctcttcctaaactagcagggagagacacactgggagaagcaccaggagcctgtccaccaccatttgagccagaacgcctccatccagcagcacctgcagtctgtgatgacagccctgggcctggacgacctcttcctgcaaaaaggcctactgtctttaagaaacccgcagcacactccggggtgctcgatgacatcaagcattggtcgtctgactctgcactagagtctgaactggaaagatgttgttccagaggtcttgcccttgctgggggtaaggctaaagccaagttttatagccagtttgtctgcagttgtatttttggtagagggttcttcctttgataactcagttggtaatttctctgaggaatttctggcctccaaagtgactttgctgggaccatcactgatagattcatcacaagactcagactccgaggaggaactgggactctcttttgagcaaacgcttacactacctttccttttggctttaacaaggctgtttctagcagaaccttttggagaactacatctctgattggcccagtctttcactgcctgtactttcggagacttgggattcttagccttttttttatattcacatttctcctttttctttggtgattttcttttggcctcttcgttatcatcacccactgtgccacaggttgctttattttttctcttgttttttttgctgacagtctgatctgtgacagcttttggttccagatccaagaccttctcattattgttattgttctctcgactcttccaatgcttctttgaatatttgcaatctggttcagtttcttcaccctcctctaactgaaatgcccgcttctttgcttttctaagagataaattaatgtcaccattactgatgactacagaattctcagcaactcctctctcttctaatttaactctgaggcagtcgttgtctctcacaaggcgcgcgctctcggcggggggcaagagccccccctccaggtagaggcctaggaaggccccagaactgaagccgaagcgctggcggatgagactaatgagatctgtgacgactcggcatctgttcaagtcgaccagaagccagaaggccgtacagtgcggggtagctggcggcgggtaatcaaattgaagccgtagcctaaccgtctcggaagctgccatcttgcttggtgctcaacggaagccgagagataccacggngccaccgagaggcgtgctcgggcggctcgcccccgccggagcctttggcgtgtgccacctagtggtgaaaactggctactacaggctgcgtctaggcgagaactcggagcggtggtgatttcattcaatttttgtcacggcagggctgaggaagggaataagttgaatgctttattacatttcta

SEQ ID NO: 75931 - DNA, 2982 bp, Homo sapiens
ctgccgcgacggcggcaagaacggcttcatggtgtcccctatgaaaccgctggaaatcaagacccagtgctcagggccccggatggaccccaaaatctgccctgccgaccctgccttcttctccttcatcaataacagcgacctgtgggtggccaacatcgagacaggcgaggagcggcggctgaccttctgccaccaaggtttatccaatgtcctggatgaccccaagtctgcgggtgtggccaccttcgtcatacaggaagagttcgaccgcttcactgggtactggtggtgccccacagcctcctgggaaggttcagagggcctcaagacgctgcgaatcctgtatgaggaagtcgatgagtccgaggtggaggtcattcacgtcccctctcctgcgctagaagaaaggaagacggactcgtatcggtaccccaggacaggcagcaagaatcccaagattgccttgaaactggctgagttccagactgacagccagggcaagatcgtctcgacccaggagaaggagctggtgcagcccttcagctcgctgttcccgaaggtggagtacatcgccagggccgggtggacccgggatggcaaatacgcctgggccatgttcctggaccggccccagcagtggctccagctcgtcctcctccccccggccctgttcatcccgagcacagagaatgaggagcaggcggctagcctctgccagagctgtccccaggaatgtccagccgtatgtggtgtacgaggaggtcaccaacgtctggatcaatgttcatgacatcttctatcccttcccccaatcagagggagaggacgagctctgctttctccgcgccaatgaatgcaagaccggcttctgccatttgtacaaagtcaccgccgttttaaaatcccagggctacgattggagtgagcccttcagccccggggaaggtgagcagagcctgacgaatgctatctgggtcaatgaggagaccaagctggtgtacttccagggcaccaaggacacgccgctggagcaccacctctacgtggtcagctatgaggcggccggcgagatcgtacgcctcaccacgcccggcttctcccatagctgctccatgagccagaacttcgacatgttcgtcagccactacagcagcgtgagcacgccgccctgcgtgcacgtctacaagctgagcggccccgacgacgaccccctgcacaagcagccccgcttctgggctagcatgatggaggcagccaagatcttccatttccacacgcgctcggatgtgcggctctacggcatgatctacaagccccacgccttgcagccagggaagaagcaccccaccgtcctctttgtatatggaggcccccaggtgcagctggtgaataactccttcaaaggcatcaagtacttgcggctcaacacactggcctccctgggctacgccgtggttgtgattgacggcaggggctcctgtcagcgagggcttcggttcgaaggggccctgaaaaaccaaatgggccaggtggagatcgaggaccaggtggagggcctgcagttcgtggccgagaagtatggcttcatcgacctgagccgagttgccatccatggctggtcctacgggggcttcctctcgctcatggggctaatccacaagccccaggtgttcaaggtggccatcgcgggtgccccggtcaccgtctggatggcctacgacacagggtacactgagcgctacatggacgtccctgagaacaaccagcacggctatgaggcgggttccgtggccctgcacgtggagaagctgcccaatgagcccaaccgcttgcttatcctccacggcttcctggacgaaaacgtgcactttttccacacaaacttcctcgtctcccaactgatccgagcagggaaaccttaccagctccaggtggccctgcctcctgtctccccgcagatctaccccaacgagagacacagtattcgctgccccgagtcgggcgagcactatgaagtcacgttgctgcactttctacaggaatacctctgagcctgcccaccgggagccgccacatcacagcacaagtggctgcagcctccgcggggaaccaggcgggagggactgagtggcccgcgggccccagtgaggcactttgtcccgcccagcgctggccagccccgaggagccgctgccttcaccgccccgacgccttttatccttttttaaacgctcttgggttttatgtccgctgcttcttggttgccgagacagagagatggtggtctcgggccagcccctcctctccccgccttctgggaggaggaggtcacacgctgatgggcactggagaggccagaagagactcagaggagcgggctgccttccgcctggggctccctgtgacctctcagtcccctggcccggccagccaccgtccccagcacccaagcatgcaattgcctgtcccccccggccagcctcccccacttgatgtttgtgttttgtttggggggatatttttcataattatttaaaagacaggccgggcgcggtggctcacgtctgtaatcccagcactttgggaggctgaggcgggcggatcacctgaggttgggagttcaagaccagcctggccaacatggggaaaccccgtctctactaaaaatacaaaaaattagccgggtgtggtggcgcgtgcctataatcccagctactcgggaggctgaggcaggagaatcgcttgaacccgggaggtggaggttgcggtgagccaagatcgcaccattgcactccagcctgggcaacaagagcgaaactctgtctcaaaataaataaaaaataaaagacagaaagcaaggggtgcctaaatctagacttggggtccacaccgggcagcggggttgcaacccagcacctggtaggctccatttcttcccaagcccgagcagagggtcatgcgggccccacaggagaagcg

SEQ ID NO: 75932 - DNA, 1120 bp, Homo sapiens; identical to SEQ ID NO: 61357

SEQ ID NO: 75933 - DNA, 3584 bp, Homo sapiens
cggacgcgtgggggcgcggagcccgggacgcgcgtacgccctgctgcttctcctgatctgctttaacgttggaagtggacttcacttacaggtcttaagcacaagaaatgaaaataagctgcttcctaaacatcctcatttagtgcggcaaaagcgcgcctggatcaccgcccccgtggctcttctggagggagaggatctgtccaaaaagaatccaattgccaagatacattctgatcttgcagaagaaagaggactcaaaattacttacaaatacactggaaaagggattacagagccaccttttggtatatttgtctttaacaaagatactggagaactgaatgttaccagcattcttgatcgagaagaaacaccattttttctgctaacaggttacgctttggatgcaagaggaaacaatgtagagaaacccttagagctacgcattaaggttcttgatatcaatgacaacgaaccagtgttcacacaggatgtctttgttgggtctgttgaagagttgagtgcagcacatactcttgtgatgaaaatcaatgcaacagatgcagatgagcccaataccctgaattcgaaaatttcctatagaatcgtatctctggagcctgcttatcctccagtgttctacctaaataaagatacaggagagatttatacaaccagtgttaccttggacagagaggaacacagcagctacactttgacagtagaagcaagagatggcaatggagaagttacagacaaacctgtaaaacaagctcaagttcagattcgtattttggatgtcaatgacaatatacctgtagtagaaaataaagtgcttgaagggatggttgaagaaaatcaagtcaatgtagaagttacgcgcataaaagtgttcgatgcagatgaaataggttctgataattggctggcaaattttacatttgcatcaggaaatgaaggaggttatttccacatagaaacagatgctcaaactaacgaaggaattgtgacccttattaaggaagtagattatgaagaaatgaagaatcttgacttcagtgttattgtcgctaataaagcagcttttcacaagtcgattaggagtaaatacaagcctacacccattcccatcaaggtcaaagtgaaaaatgtgaaagaaggcattcattttaaaagcagcgtcatctcaatttatgttagcgagagcatggatagatcaagcaaaggccaaataattggaaattttcaagcttttgatgaggacactggactaccagcccatgcaagatatgtaaaattagaagatagagataattggatctctgtggattctgtcacatctgaaattaaacttgcaaaacttcctgattttgaatctagatatgttcaaaatggcacatacactgtaaagattgtggccatatcagaagattatcctagaaaaaccatcactggcacagtccttatcaatgttgaagacatcaacgacaactgtcccacactgatagagcctgtgcagacaatctgtcacgatgcagagtatgtgaatgttactgcagaggacctggatggacacccaaacagtggccctttcagtttctccgtcattgacaaaccacctggcatggcagaaaaatggaaaatagcacgccaagaaagtaccagtgtgctgctgcaacaaagtgagaaaaagcttgggagaagtgaaattcagttcctgatttcagacaatcagggttttagttgtcctgaaaagcaggtccttacactcacagtttgtgaggttctgcatggcagccggctgcagggaagcacagcatgactcctatgtgggcctgggacccgcagcaattgcgctcatgattttggcctttctgctcctgctattggtaccacttttactgctgatgtgccattgcggaaagggcgccaaaggctttacccccatacctggcaccatagagatgctgcatccttggaataatgaaggagcaccacctgaagacaaggtggtgccatcatttctgccagtggatcaagggggcagtctagtaggaagaaatggagtaggaggtatggccaaggaagccacgatgaaaggaagtagctctgcttccattgtcaaagggcaacatgagatgtccgagatggatggaaggtgggaagaacacagaagcctgctttctggtagagctacccagtttacaggggccacaggcgctattcatgaccactgaaaccacgattaccgcaagggccacaggggcttccagagacgtggccggagctcaggcagctgctgttgcactgaacgaagaattcttaaaaaattatttcactgataaagcggcctcttacactgaggaagatgaaaatcacacagccaaagattgccttctggtttattctcaggaagaaactgaatcgctgaatgcttctattggttgttgcagctttattgaaggagagctagatgaccgcttcttagatgatttgggacttaaattcaagacactagctgaagtttgcctgggtcaaaaaatagatataaataaggaaattgagcagagacaaaaacctgccacagaaacaagtatgaacacagcttcacattcactctgtgagcaaactatggttaattcagagaatacctactcctctggcagtagcttcccagttccaaaatctttgcaagaagccaatgcagagaaagtaactcaggaaatagtcactgaaagatctgtgtcttctaggcaggcgcaaaaggtagctacacctcttcctgacccaatggcttctagaaatgtgatagcaacagaaacttcctatgtcacagggtccactatgccaccaaccactgtgatcctgggtcctagccagccacagagccttattgtgacagagagggtgtatgctccagcttctaccttggtagatcagccttatgctaatgaaggtacagttgtggtcactgaaagagtaatacagcctcatgggggtggatcgaatcctctggaaggcactcagcatcttcaagatgtaccttacgtcatggtgagggaaagagagagcttccttgcccccagctcaggtgtgcagcctactctggccatgcctaatatagcagtaggacagaatgtgacagtgacagaaagagttctagcacctgcttccactctgcaatccagttaccagattcccactgaaaattctatgacggctaggaacaccacggtgtctggagctggagtccctggccctctgccagattttggtttagaggaatctggtcattctaattctaccataaccacatcttccaccagagtcaccaagcatagcactgtacagcattcttactcctaaacagcagtcagccacaaactgacccagagtttaattagcagtgactaatttcatgtttccaatgtacctgatttttcatgagccttacagacacacagagacacatacacattgatcttaaaatttttctcagtcactgatatgcaaaggaccacactgtctctgcttccaggagtattttagaaatgttccacaatttactgaagacatagaga

SEQ ID NO: 75934 - DNA, 3063 bp, Homo sapiens
ctgctgctcctcctcctttcccagcccgccgcggccatggcggacagcgccagcgagagcgacacggacggggcggggggcaacagcagcagctcggccgccatgcagtcgtcctgctcgtcgacctcgggcggcggcggtggcggcgggggaggcggcggcggtgggaagtcggggggcattgtcatctcgccgttccgcctggaggagctcaccaaccgcctggcctcgctgcagcaagagaacaaggtgctgaagatagagctggagacctacaaactgaagtgcaaggcactgcaggaggagaaccgcgacctgcgcaaagccagcgttaccatccaagccagggctgagcaggaagaagaattcattagtaacactttattcaagaaaattcaggctttgcagaaggagaaagaaacccttgctgtaaattatgagaaagaagaagaattcctcactaatgagctctccagaaaattgatgcagttgcagcatgagaaaggcgaactagaacagcatcttgaacaagagcaggaatttcaggtcaacaaactgatgaagaaaattaaaaaactggagaatgacaccatttctaagcaacttacattagaacagttgagacgggagaagattgaccttgaaaatacattggaacaagaacaagaagcactagttaatcgcctctggaaaaggatggataagcttgaagctgaaacgcgaatcctgcaggaaaaattagaccagcccgtctctgctccaccatcgcctagagatatctccatggagattgattctccagaaaatatgatgcgtcacatcaggtttttaaagaatgaagtggaacggctgaagaagcaactgagagctgctcagttacagcattcagagaaaatggcacagtatctggaggaggaacgtcacatgagagaagagaacttgaggctccagaggaagctgcagagggagatggagagaagagaagccctctgtcgacagctctccgagagtgagtccagcttagaaatggacgacgaaaggtattttaatgagatgtctgcacaaggattaagacctcgcactgtgtccagcccgatcccttacacaccttctccgagttcaagcaggcctatatcacctggtctatcatatgcaagtcacacggttggtttcacgccaccaacttcactgactagagctggaatgtcttattacaattccccgggtcttcacgtgcagcacatgggaacatcccatggtatcacaaggccttcaccacggagaagcaacagtcctgacaaattcaaacggcccacgccgcctccatttcccaacacacagaccccagtccagccacctccaccttcacctccgccacccatgcagcccacggtcccctcagcagccacctcgcagcctactccttcgcaacattcggcgcacccctcctcccagccttaatgcatgagcttagtctgaatttcaagatgggactcatccaatggagccgtctactcaacgccaaaggcttccttctctggcatatttggatatgacttatttgcactgaggttatctaggcttcactatccattgtgttgtaaatgtttgtcagaaatgcagccagtgttgtgggtctacaacactaaccagacgactttttccatcagtgttttacttgaatcttcatgtacgtccattccctggctggaaccttcgctgtttggtatttggtatttcagcagcagtgtgcaatttttgcttggcccagagcttcattctcctggcttttaggtttgtaaaagaaaaagggatatcttttttatatttttttccatgaatctgcagaaaattactgagctgttgttaccctcctctcattataatagtgtttaccaaacataccaataattcagcactacaattcagacctttgaaaatctggctttcagtgtagaacagaaagttagatgaatcagtgcccaagacatattttctgtttaacagaactttctacagatacattttttacaggttattttcattgtgttattgacatccatgtctctcgtaaaacagatggcccaaagtaatgaatcatgtggctgtaccttctccacataaatgggatggataattatcgtatattaagatgtgattctcttttttatccttaatgttaatctacttaacctggccccctctaacatggagtcgataaatgttgtcctactccaccggtggtttcaatggctaattagaatgtgttatttgatttctgctgcagaaggcagtgtgattgtaacaaaaacaatgcggcttccccctttcgtacttcatttgtgttctcttaaaatagagtttgaacaaatattttaaaggtgcaaaataccattagaaaatactatttgaaatggacattatcgcattatcttggcataatggccagaaaattattgtattgcttggcagaaaagaaaataaggtctaaaggaaagtagcacattagcattgatggctgttcatttcacccagtataagcaagtgcagtgtacaaagaagtatattctgaatacattatttccattcatttagcacaaataaatcatttggtttcactttgcagtggaacactgagtcactcttttcttaatacgtgcaacatcttaatttttgtttttcagcagttgctgttttgtactttggtagtgaagtgatttttaccacctgtgtttgcatatttatatatgctgtggatgaaaataacttactagagaatgtatattttatgacaagaatgtgtatctgttggatataatcagagaactgaaaagtaatttatcagtaatttttaagagtccatgttttgtgacaaccatctctaatagccaactctttattaaacacactcctaaaaataaggaaccatgacattgtagatatttaatattgtacagtatagaaacctccatttttgccttcgaatgcatatttaagagttaacagaatgaaaaaaaaaagtcttgttggataatagtgtttgactagcgttttaagaacttg

SEQ ID NO: 75935 - DNA, 5229 bp, Homo sapiens; identical to SEQ ID NO: 61360
